United States Patent Application Publication US 2011/0183924 A1 - sequence listing, part 174

SEQ ID NO: 435043 - DNA, 3954 bp, Homo sapiens
aggcgctcggctggctaagcctgcgccgggccgcctcgctcgctcccagctctgtcagtggcccgcggggcccgatcgctgcgcccgcggccagggccgaggcaggcctgacccggggccgggcagcccgcgcgactttcggaacatggcaacccgtgtgtgtctcatcccagaaagagaagactttaaccactgtgatgcctgagaatccagtgtgacgtttctccagatacttcatgctgttcacctgtgtcctcgccgcaccactgccgcacacgactcctgaaccatgggggaaaacgaggatgagaagcaggcccaggcggggcaggtttttgagaactttgtccaggcatccacgtgcaaaggtaccctccaggccttcaacattctcacacgacacctggacctagaccctctggaccacagaaacttttattccaagctcaagtccaaggtgaccacctggaaagccaaagccctgtggtacaaattggataagcgtggttcccacaaagagtataagcgagggaagtcgtgcacgaacaccaagtgtctcatagttgggggaggaccctgtggcttgcgcactgccattgaacttgcctacctgggagccaaagtggtcgtggtggagaagagggactccttctcccggaacaacgtgctacacctctggcctttcaccatccatgaccttcgtggcctgggagccaagaagttctatgggaagttctgtgctggctccatcgaccatatcagtattcgccaactacagctcatcctattcaaggtggccctgatgctgggagttgaaatccatgtgaatgtggagttcgtgaaggttctagagcctcctgaagatcaagaaaatcaaaaaattggctggcgggcagaatttctccctacagaccattctctgtcggagtttgagtttgacgtcatcattggtgccgatggccgcaggaacaccctggaagggttcagaagaaaagaattccgtgggaagctggcgattgccatcaccgccaacttcataaacagaaacagcacagcggaagccaaggtggaagagattagtggtgtggctttcatcttcaatcagaaattttttcaggaccttaaagaagaaacaggcatagatcttgagaacattgtttactacaaggactgcacccactattttgtaatgacagccaagaagcagagcctgctcgacaaaggtgtcatcattaacgactacatcgacacagagatgctgctgtgtgcggagaacgtgaaccaagacaacctgctatcctatgcccgggaagctgcagactttgccaccaactaccagctgccatccttagactttgccatgaaccactatgggcagcctgatgtggccatgtttgactttacctgcatgtatgcctcagagaacgcggccctggtgcgggagcggcaggcgcaccagctgctcgtggcccttgtgggtgacagcttgcttgagccattttggcccatgggtacaggctgtgcccgtggcttcctggcagcctttgacacggcatggatggtgaagagctggaaccagggcacccctcccctggagctgctggctgaaagggaaagtctctaccggctgttacctcagacaaccccggagaacatcaacaagaactttgagcagtacacgttggacccagggacacggtacccaaacctcaactcacactgtgtcaggccccatcaggtgaagcatttgtatatcactaaggagctggagcactaccctctcgagagactgggctcggtgaggagatctgtcaacctctccaggaaggagtcagatatccggcccagcaagctcctgacctggtgccagcagcagacagagggctaccagcatgtcaacgtcaccgacctgaccacatcctggcgcagtgggttggccctgtgtgccatcatccaccgcttccggcctgagctcatcaactttgactctttgaatgaagatgatgctgtggagaacaaccagctcgcatttgatgtggccgagcgagagtttgggatccctccagtgaccacgggcaaagagatggcatctgcccaggagcctgacaagctcagcatggtcatgtacctctccaagttctacgagctcttccggggcaccccactgaggcccgtggattcttggcgcaaaaactatggagaaaatgctgacctcagcttggccaaatcatccatttctaataactatctcaacctcacatttccaaggaagaggactccacgggtggatggtcaaaccggagagaatgacatgaacaaacggagacggaagggcttcaccaacctggacgagccttcaaacttttccagccgtagcttgggctccaatcaagagtgtgggagcagtaaggaaggtggaaatcagaacaaagtcaagtccatggcgaatcagctgctggccaagtttgaggagagcactcggaacccctcactcatgaagcaggaacgccgtgtctcagggataggtaagccggtcctgtgctcttcctccggccctcctgttcactcttgctgccccaagccggaggaggccacacccagcccatcacctcctctgaaaaggcagttcccctctgtggtcgtgacggggcacgtgctcagagagctcaagcaagtgtctgctggcagtgagtgcctgagcagaccttggagagccagagccaagtctgacctacagctgggtgggacagaaaatttcgctaccctgccttctacccgcccgagggcgcaggctctttccggggtgctgtggcggctgcagcaagtggaggaaaagattctccagaagagggctcagaacttggccaacagggaatttcacacaaagaacattaaggagaaggcggctcaccttgcctccatgtttggacacggggatttcccgcagaataaactactctctaaaggcctgtctcatactcatcctccatctcctccctctcgccttccgtctcctgatccagctgcttcttcctctccatcaactgttgactctgcttctcctgccagaaagctgacggtagggaaagtgtccagcggaataggggctgcagctgaagtcctggtcaatctgtacatgaatgatcacagacctaaggcccaggccacctctccagacctggaatctatgcgaaagtcatttccccttaacctgggaggcagcgacacgtgttacttctgtaagaaacgtgtgtacgtgatggaacggctgagcgccgagggccacttcttccaccgggagtgtttccgctgcagcatctgtgccaccaccttgcgcctggccgcctacacctttgactgcgatgaaggcaaattttactgcaagcctcacttcattcactgtaaaaccaatagcaaacaacggaagagacgggcagagttgaagcaacaaagagaggaggaggcaacatggcaagagcaggaagcccctcggagagacactcccaccgaaagttcttgcgcagtggccgccattggcaccctggaaggcagccccccagttcatttcagccttccagtgctacacccacttcttggctgacacacttctgctctaaggtgactggttttcttgccaattttcaaagagtggtactaacccccaacccgctttccgcaccccgtcctctccgccagcagtactggttgcactaactagtctccctccctttatagaatgtcaaccaaagagtgccctcctcccctctcagcctcctctttagctagcctccccatctcatcacaacgcatgtctgtgacctttggtaatcatttacagtgccacacggaaccctgtattttgcacacagcaaaacaaacaatgtttagctttatttatggtatttgatgctgtaaatggaaataaatattgttctttataaagcaaaaaaagta

SEQ ID NO: 435044 - DNA, 2735 bp, Homo sapiens
aggcgctcggctggctaagcctgcgccgggccgcctcgctcgctcccagctctgtcagtggcccgcggggcccgatcgctgcgcccgcggccagggccgaggcaggcctgacccggggccgggcagcccgcgcgactttcggaacatggcaacccgtgtgtgtctcatcccagaaagagaagactttaaccactgtgatgcctgagaatccagtgtgacgtttctccagatacttcatgctgttcacctgtgtcctcgccgcaccactgccgcacacgactcctgaaccatgggggaaaacgaggatgagaagcaggcccaggcggggcaggtttttgagaactttgtccaggcatccacgtgcaaaggtaccctccaggccttcaacattctcacacgacacctggacctagaccctctggaccacagaaacttttattccaagctcaagtccaaggtgaccacctggaaagccaaagccctgtggtacaaattggataagcgtggttcccacaaagagtataagcgagggaagtcgtgcacgaacaccaagtgtctcatagttgggggaggaccctgtggcttgcgcactgccattgaacttgcctacctgggagccaaagtggtcgtggtggagaagagggactccttctcccggaacaacgtgctacacctctggcctttcaccatccatgaccttcgtggcctgggagccaagaagttctatgggaagttctgtgctggctccatcgaccatatcagtattcgccaactacagctcatcctattcaaggtggccctgatgctgggagttgaaatccatgtgaatgtggagttcgtgaaggttctagagcctcctgaagatcaagaaaatcaaaaaattggctggcgggcagaatttctccctacagaccattctctgtcggagtttgagtttgacgtcatcattggtgccgatggccgcaggaacaccctggaagggttcagaagaaaagaattccgtgggaagctggcgattgccatcaccgccaacttcataaacagaaacagcacagcggaagccaaggtggaagagattagtggtgtggctttcatcttcaatcagaaattttttcaggaccttaaagaagaaacaggcatagatcttgagaacattgtttactacaaggactgcacccactattttgtaatgacagccaagaagcagagcctgctcgacaaaggtgtcatcattaacgactacatcgacacagagatgctgctgtgtgcggagaacgtgaaccaagacaacctgctatcctatgcccgggaagctgcagactttgccaccaactaccagctgccatccttagactttgccatgaaccactatgggcagcctgatgtggccatgtttgactttacctgcatgtatgcctcagagaacgcggccctggtgcgggagcggcaggcgcaccagctgctcgtggcccttgtgggtgacagcttgcttgagccattttggcccatgggtacaggctgtgcccgtggcttcctggcagcctttgacacggcatggatggtgaagagctggaaccagggcacccctcccctggagctgctggctgaaagggaaagtctctaccggctgttacctcagacaaccccggagaacatcaacaagaactttgagcagtacacgttggacccagggacacggtacccaaacctcaactcacactgtgtcaggccccatcaggtgaagcatttgtatatcactaaggagctggagcactaccctctcgagagactgggctcggtgaggagatctgtcaacctctccaggaaggagtcagatatccggcccagcaagctcctgacctggtgccagcagcagacagagggctaccagcatgtcaacgtcaccgacctgaccacatcctggcgcagtgggttggccctgtgtgccatcatccaccgcttccggcctgagctcatcaactttgactctttgaatgaagatgatgctgtggagaacaaccagctcgcatttgatgtggccgagcgagagtttgggatccctccagtgaccacgggcaaagagatggcatctgcccaggagcctgacaagctcagcatggtcatgtacctctccaagttctacgagctcttccggggcaccccactgaggcccgtggattcttggcgcaaaaactatggagaaaatgctgacctcagcttggccaaatcatccatttctaataactatctcaacctcacatttccaaggaagaggactccacgggtggatggtcaaaccggagagaatgacatgaacaaacggagacggaagggcttcaccaacctggacgaggtttgtgtacacagtgtggctttaaacagaggctcgtttcctgacaaccagtggccacaggcagcctcactgtggtagcagcctggccctgttccttccctctctcatgaaccactgggttccaagcttggcgtgatggaaaaacagttggggttttggatcacgcttcactacttactagctgtgtaaccttgagaaacacaacctcccaggatgtggttcatgtctgtaacgtgcaatgatacacttgaaatacatgaaacttggcaggacttttaaagatgaataagatgaacatggtatctgacacatgttaatcaatatacaaccactgttaacagtaaatagtaaagaggcatcagcactcccacttttctcccaa

SEQ ID NO: 435045 - DNA, 1311 bp, Homo sapiens
aggcgctcggctggctaagcctgcgccgggccgcctcgctcgctcccagctctgtcagtggcccgcggggcccgatcgctgcgcccgcggccagggccgaggcaggcctgacccggggccgggcagcccgcgcgactttcggaacatggcaacccgtgtgtgtctcatcccagaaagagaagactttaaccactgtgatgcctgagaatccagtgtgacgtttctccagatacttcatgctgttcacctgtgtcctcgccgcaccactgccgcacacgactcctgaaccatgggggaaaacgaggatgagaagcaggcccaggcggggcaggtttttgagaactttgtccaggcatccacgtgcaaaggtaccctccaggccttcaacattctcacacgacacctggacctagaccctctggaccacagaaacttttattccaagctcaagtccaaggtgaccacctggaaagccaaagccctgtggtacaaattggataagcgtggttcccacaaagagtataagcgagggaagtcgtgcacgaacaccaagtgtctcatagttgggggaggaccctgtggcttgcgcactgccattgaacttgcctacctgggagccaaagtggtcgtggtggagaagagggactccttctcccggaacaacgtgctacacctctggcctttcaccatccatgaccttcgtggcctgggagccaagaagttctatgggaagttctgtgctggctccatcgaccatatcagtattcgccaactacagctcatcctattcaaggtggccctgatgctgggagttgaaatccatgtgaatgtggagttcgtgaaggttctagagcctcctgaagatcaagaaaatcaaaaaattggctggcgggcagaatttctccctacagaccattctctgtcggagtttgagtttgacgtcatcattggtgccgatggccgcaggaacaccctggaagggttcagaagaaaagaattccgtgggaagctggcgattgccatcaccgccaacttcataaacagaaacagcacagcggaagccaaggtggaagagattagtggtgtggctttcatcttcaatcagaaattttttcaggaccttaaagaagaaacaggcatagatcttgagaacattgtttactacaaggactgcacccactattttgtaatgacagccaagaagcagagcctgctcgacaaaggtgtcatcattaacgtacgtacctcttggctgcgatttcccgacttcgcgacctgggctggtgacatcagcaggtgtgaaggcagatg

SEQ ID NO: 435046 - DNA, 856 bp, Homo sapiens
aggcgctcggctggctaagcctgcgccgggccgcctcgctcgctcccagctctgtcagtggcccgcggggcccgatcgctgcgcccgcggccagggccgaggcaggcctgacccggggccgggcagcccgcgcgactttcggaacatggcaacccgtgtgtgtctcatcccagaaagagaagactttaaccactgtgatgcctgagaatccagtgtgacgtttctccagatacttcatgctgttcacctgtgtcctcgccgcaccactgccgcacacgactcctgaaccatgggggaaaacgaggatgagaagcaggcccaggcggggcaggtttttgagaactttgtccaggcatccacgtgcaaaggtaccctccaggccttcaacattctcacacgacacctggacctagaccctctggaccacagaaacttttattccaagctcaagtccaaggtgaccacctggaaagccaaagccctgtggtacaaattggataagcgtggttcccacaaagagtataagcgagggaagtcgtgcacgaacaccaagtgtctcatagttgggggaggaccctgtggcttgcgcactgccattgaacttgcctacctgggagccaaagtggtcgtggtggagaagagggactccttctcccggaacaacgtgctacacctctggcctttcaccatccatgaccttcgtggcctgggagccaagaagttctatgggaagttctgtgctggctccatcgaccatatcagtgagtggagtctatggtgatatcccatgaagggaggggactgaccctgggtgggacatatctctccaggtctaggagtccccagcttgttccat

SEQ ID NO: 435047 - DNA, 340 bp, Homo sapiens
cctgggtgctaactggcctctacctttgtctctgtctcctctgcctctgctcttggttagctgacggtagggaaagtgtccagcggaataggggctgcagctgaagtcctggtcaatctgtacatgaatgatcacagacctaaggcccaggccacctctccagacctggtaaggacatgcacccccagccttcacccacagacactggctctggcatcccagggcgggcacatgggatgtcgagaggatgccctggccctcccgaggctcctcttctcttggaacaagagggggctgagaatgagctgaatcagggcagaagttaaaaggagcctgcttt

SEQ ID NO: 435048 - DNA, 439 bp, Homo sapiens
cctgttcactcttgctgccccaagccggaggaggccacacccagcccatcacctcctctgaaaaggcaggtagggctccttccagtggatgctgttttggtgaagccagaggggactttgatccagatgggtggggtcagtggctcttcccacaccccaagtagggctgattgtagattttctggacacaccttgatgtcaccacacttataggtaagaataaccaagtatgcaacatcacaaaatacattttattgatcccttagccagtcagaggtatcaattgaccaaataccatgctctcgatggtgctgctagggaaaaataaactgtaccacagggtattttgtatgatgccctataacactaagcattatctgcagaccattcaaataggctgatttccatatcaatgaaaaagtgatgttggaatgggccc

SEQ ID NO: 435049 - DNA, 5855 bp, Homo sapiens
aggcgctcggctggctaagcctgcgccgggccgcctcgctcgctcccagctctgtcagtggcccgcggggcccgatcgctgcgcccgcggccagggccgaggcaggcctgacccggggccgggcagcccgcgcgactttcggaacatggcaacccgtgtgtgtctcatcccagaaagagaagactttaaccactgtgatgcctgagaatccagtgtgacgtttctccagatacttcatgctgttcacctgtgtcctcgccgcaccactgccgcacacgactcctgaaccatgggggaaaacgaggatgagaagcaggcccaggcggggcaggtttttgagaactttgtccaggcatccacgtgcaaaggtaccctccaggccttcaacattctcacacgacacctggacctagaccctctggaccacagaaacttttattccaagctcaagtccaaggtgaccacctggaaagccaaagccctgtggtacaaattggataagcgtggttcccacaaagagtataagcgagggaagtcgtgcacgaacaccaagtgtctcatagttgggggaggaccctgtggcttgcgcactgccattgaacttgcctacctgggagccaaagtggtcgtggtggagaagagggactccttctcccggaacaacgtgctacacctctggcctttcaccatccatgaccttcgtggcctgggagccaagaagttctatgggaagttctgtgctggctccatcgaccatatcagtattcgccaactacagctcatcctattcaaggtggccctgatgctgggagttgaaatccatgtgaatgtggagttcgtgaaggttctagagcctcctgaagatcaagaaaatcaaaaaattggctggcgggcagaatttctccctacagaccattctctgtcggagtttgagtttgacgtcatcattggtgccgatggccgcaggaacaccctggaagggttcagaagaaaagaattccgtgggaagctggcgattgccatcaccgccaacttcataaacagaaacagcacagcggaagccaaggtggaagagattagtggtgtggctttcatcttcaatcagaaattttttcaggaccttaaagaagaaacaggcatagatcttgagaacattgtttactacaaggactgcacccactattttgtaatgacagccaagaagcagagcctgctcgacaaaggtgtcatcattaacgactacatcgacacagagatgctgctgtgtgcggagaacgtgaaccaagacaacctgctatcctatgcccgggaagctgcagactttgccaccaactaccagctgccatccttagactttgccatgaaccactatgggcagcctgatgtggccatgtttgactttacctgcatgtatgcctcagagaacgcggccctggtgcgggagcggcaggcgcaccagctgctcgtggcccttgtgggtgacagcttgcttgagccattttggcccatgggtacaggctgtgcccgtggcttcctggcagcctttgacacggcatggatggtgaagagctggaaccagggcacccctcccctggagctgctggctgaaagggaaagtctctaccggctgttacctcagacaaccccggagaacatcaacaagaactttgagcagtacacgttggacccagggacacggtacccaaacctcaactcacactgtgtcaggccccatcaggtgaagcatttgtatatcactaaggagctggagcactaccctctcgagagactgggctcggtgaggagatctgtcaacctctccaggaaggagtcagatatccggcccagcaagctcctgacctggtgccagcagcagacagagggctaccagcatgtcaacgtcaccgacctgaccacatcctggcgcagtgggttggccctgtgtgccatcatccaccgcttccggcctgagctcatcaactttgactctttgaatgaagatgatgctgtggagaacaaccagctcgcatttgatgtggccgagcgagagtttgggatccctccagtgaccacgggcaaagagatggcatctgcccaggagcctgacaagctcagcatggtcatgtacctctccaagttctacgagctcttccggggcaccccactgaggcccgtggattcttggcgcaaaaactatggagaaaatgctgacctcagcttggccaaatcatccatttctaataactatctcaacctcacatttccaaggaagaggactccacgggtggatggtcaaaccggagagaatgacatgaacaaacggagacggaagggcttcaccaacctggacgagccttcaaacttttccagccgtagcttgggctccaatcaagagtgtgggagcagtaaggaaggtggaaatcagaacaaagtcaagtccatggcgaatcagctgctggccaagtttgaggagagcactcggaacccctcactcatgaagcaggaacgccgtgtctcagggataggtaagccggtcctgtgctcttcctccggccctcctgttcactcttgctgccccaagccggaggaggccacacccagcccatcacctcctctgaaaaggcagttcccctctgtggtcgtgacggggcacgtgctcagagagctcaagcaagtgtctgctggcagtgagtgcctgagcagaccttggagagccagagccaagtctgacctacagctgggtgggacagaaaatttcgctaccctgccttctacccgcccgagggcgcaggctctttccggggtgctgtggcggctgcagcaagtggaggaaaagattctccagaagagggctcagaacttggccaacagggaatttcacacaaagaacattaaggagaaggcggctcaccttgcctccatgtttggacacggggatttcccgcagaataaactactctctaaaggcctgtctcatactcatcctccatctcctccctctcgccttccgtctcctgatccagctgcttcttcctctccatcaactgttgactctgcttctcctgccagaaagctgacggtagggaaagtgtccagcggaataggggctgcagctgaagtcctggtcaatctgtacatgaatgatcacagacctaaggcccaggccacctctccagacctggaatctatgcgaaagtcatttccccttaacctgggaggcagcgacacgtgttacttctgtaagaaacgtgtgtacgtgatggaacggctgagcgccgagggccacttcttccaccgggagtgtttccgctgcagcatctgtgccaccaccttgcgcctggccgcctacacctttgactgcgatgaaggcaaattttactgcaagcctcacttcattcactgtaaaaccaatagcaaacaacggaagagacgggcagagttgaagcaacaaagagaggaggaggcaacatggcaagagcaggaagcccctcggagagacactcccaccgaaagttcttgcgcagtggccgccattggcaccctggaaggcagccccccaggtatctccacctccttctttaggaaggtgctgggctggcccctcaggctgccgagggacctgtgtaactggatgcagggactcctgcaagctgctggcctccatatcagggacaatgcttacaactactgctacatgtacgagctcctgagcctggggctgccactcctctgggcgttctctgaggtcctggcagccatgtacagggaatctgagggctccctcgagagcatctgcaactgggtgctcaggtgcttcccagtcaagctccgctgacatggctggctgccccaaagtgccttcacatttccagggaggcttcagatggcagtgcgtttgcagtttgctcaggctctggccaggaagcctagcattctctaagcaattagctcaaagccaaagaatttcacatgggccacctccgcctggccttatcagggtgaacatctactcacggtgctagggccagggatgatatgaaggatcttttctatagctttgtgagccatacttctgggtttacatttcaatttttttaattttaattagcccagagaaagcatttttttctatgagtgtcaatttttctaaacatgggtttgaagcttataaccagttttataaaccccttgaacactgcagtgagttatcaaagccactgcctgcaaagtggatgatttaagattttacacgcatgaaaatgagtgtgccatctcctgaccagtgccttttgacttaggtacccagatgccacttgtcagcagcaggatactttttacaacacgaaagcataattattttagaagaagagagtagaagggcagaatagaattcaacttacagaagcacggagtagtgtgtggttggctgttatctgtccccctgggaggaggactgttttgctcccttgttttgatgttaaacagtagcttaaaggctttcccccccataccaactcacagccaaatgacaaagaaccgtggggtttcaacagattctacaaacatgcattttcccttcccactaatgggcactgcagggaaagcccattggcatttgaccatggagctgatgcagtgccaaagatgagctctttcaactgatggcattttagcccctgtggctcccagcggatcccccagcccgggctgcaggctgagccaaggctgtgcagggtccatattggtcaggccaagtggagtggaagactctgtccacttatgtggtgtcctttgggactgagggggtttgttagcacatcaggctattgctgggaagcgtggcctgcccagtgagcattgcctgtggacatcctgactgcttagctgctccgctgccacacatatgtggtcaaaacagaaaccaatttcacactgccctgggaaaggaatgggtctgacctccaggggaagctctaccatatcttgactggcagggaaggctgggagtggaagctatttatggactgatccaaaggacatatgcatgagtaagggtaaaaatgagcatgcaggtccacctgtgttcttactctgggtatctagaagagtcctcagctctccctactccacgctgcctagacatacacagctgcagggtctggctgaacaatcaaggggccgccagagaaaggccatctacggtgcgcagtgtatctggagttgctgggcccaagatagctctgtggagttatcactagagatgcctctggattaactaagaggtgtgcctgggtgtgggtgaggagtcagaacctttgagagctttgagatgacagtttctatggggcgggaagaaggaggtgcatttctacaaacacttccctgaaatccttgggaaaaacagaggcatggccgtggccaactctgtgggaactggcgcctctgtccttgttggcactgttctcagtccgatgacttgcattgtgttttctccaatttttgctgggattttaatgttcagcatggtgggaggaacccttgattccttttgtttgatgtatttgtgcagatcctggccagtacaaagtcgttgctcttgtcttatcttctcttacagagtctccctccctttatagaatgtcaaccaaagagtgccctcctcccctctcagcctcctctttagctagcctccccatctcatcacaacgcatgtctgtgacctttggtaatcatttacagtgccacacggaaccctgtattttgcacacagcaaaacaaacaatgtttagctttatttatggtatttgatgctgtaaatggaaataaatattgttctttataaagcaaaaaaagta

SEQ ID NO: 435050 - DNA, 3198 bp, Homo sapiens
aggcgctcggctggctaagcctgcgccgggccgcctcgctcgctcccagctctgtcagtggcccgcggggcccgatcgctgcgcccgcggccagggccgaggcaggcctgacccggggccgggcagcccgcgcgactttcggaacatggcaacccgtgtgtgtctcatcccagaaagagaagactttaaccactgtgatgcctgagaatccagtgtgacgtttctccagatacttcatgctgttcacctgtgtcctcgccgcaccactgccgcacacgactcctgaaccatgggggaaaacgaggatgagaagcaggcccaggcggggcaggtttttgagaactttgtccaggcatccacgtgcaaaggtaccctccaggccttcaacattctcacacgacacctggacctagaccctctggaccacagaaacttttattccaagctcaagtccaaggtgaccacctggaaagccaaagccctgtggtacaaattggataagcgtggttcccacaaagagtataagcgagggaagtcgtgcacgaacaccaagtgtctcatagttgggggaggaccctgtggcttgcgcactgccattgaacttgcctacctgggagccaaagtggtcgtggtggagaagagggactccttctcccggaacaacgtgctacacctctggcctttcaccatccatgaccttcgtggcctgggagccaagaagttctatgggaagttctgtgctggctccatcgaccatatcagtattcgccaactacagctcatcctattcaaggtggccctgatgctgggagttgaaatccatgtgaatgtggagttcgtgaaggttctagagcctcctgaagatcaagaaaatcaaaaaattggctggcgggcagaatttctccctacagaccattctctgtcggagtttgagtttgacgtcatcattggtgccgatggccgcaggaacaccctggaagggttcagaagaaaagaattccgtgggaagctggcgattgccatcaccgccaacttcataaacagaaacagcacagcggaagccaaggtggaagagattagtggtgtggctttcatcttcaatcagaaattttttcaggaccttaaagaagaaacaggcatagatcttgagaacattgtttactacaaggactgcacccactattttgtaatgacagccaagaagcagagcctgctcgacaaaggtgtcatcattaacgactacatcgacacagagatgctgctgtgtgcggagaacgtgaaccaagacaacctgctatcctatgcccgggaagctgcagactttgccaccaactaccagctgccatccttagactttgccatgaaccactatgggcagcctgatgtggccatgtttgactttacctgcatgtatgcctcagagaacgcggccctggtgcgggagcggcaggcgcaccagctgctcgtggcccttgtgggtgacagcttgcttgagccattttggcccatgggtacaggctgtgcccgtggcttcctggcagcctttgacacggcatggatggtgaagagctggaaccagggcacccctcccctggagctgctggctgaaagggaaagtctctaccggctgttacctcagacaaccccggagaacatcaacaagaactttgagcagtacacgttggacccagggacacggtacccaaacctcaactcacactgtgtcaggccccatcaggtgaagcatttgtatatcactaaggagctggagcactaccctctcgagagactgggctcggtgaggagatctgtcaacctctccaggaaggagtcagatatccggcccagcaagctcctgacctggtgccagcagcagacagagggctaccagcatgtcaacgtcaccgacctgaccacatcctggcgcagtgggttggccctgtgtgccatcatccaccgcttccggcctgagctcatcaactttgactctttgaatgaagatgatgctgtggagaacaaccagctcgcatttgatgtggccgagcgagagtttgggatccctccagtgaccacgggcaaagagatggcatctgcccaggagcctgacaagctcagcatggtcatgtacctctccaagttctacgagctcttccggggcaccccactgaggcccgtggattcttggcgcaaaaactatggagaaaatgctgacctcagcttggccaaatcatccatttctaataactatctcaacctcacatttccaaggaagaggactccacgggtggatggtcaaaccggagagaatgacatgaacaaacggagacggaagggcttcaccaacctggacgagccttcaaacttttccagccgtagcttgggctccaatcaagagtgtgggagcagtaaggaaggtggaaatcagaacaaagtcaagtccatggcgaatcagctgctggccaagtttgaggagagcactcggaacccctcactcatgaagcaggaacgccgtgtctcagggataggtaagccggtcctgtgctcttcctccggccctcctgttcactcttgctgccccaagccggaggaggccacacccagcccatcacctcctctgaaaaggcagttcccctctgtggtcgtgacggggcacgtgctcagagagctcaagcaagtgtctgctggcagtgagtgcctgagcagaccttggagagccagagccaagtctgacctacagctgggtgggacagaaaatttcgctaccctgccttctacccgcccgagggcgcaggctctttccggggtgctgtggcggctgcagcaagtggaggaaaagattctccagaagagggctcagaacttggccaacagggaatttcacacaaagaacattaaggagaaggcggctcaccttgcctccatgtttggacacggggatttcccgcagaataaactactctctaaaggcctgtctcatactcatcctccatctcctccctctcgccttccgtctcctgatccagctgcttcttcctctccatcaactgttgactctgcttctcctgccagaaaggtagttgtcctgaacaatttgctttccctattccctgcatgttcccagatgttctcatgctccacttgacctgcacaaacatcttgagcctggcttggctggaataaaaatttgtaagatatttt

SEQ ID NO: 435051 - DNA, 1174 bp, Homo sapiens
aggcgctcggctggctaagcctgcgccgggccgcctcgctcgctcccagctctgtcagtggcccgcggggcccgatcgctgcgcccgcggccagggccgaggcaggcctgacccggggccgggcagcccgcgcgactttcggaacatggcaacccgtgtgtgtctcatcccagaaagagaagactttaaccactgtgatgcctgagaatccagtgtgacgtttctccagatacttcatgctgttcacctgtgtcctcgccgcaccactgccgcacacgactcctgaaccatgggggaaaacgaggatgagaagcaggcccaggcggggcaggtttttgagaactttgtccaggcatccacgtgcaaaggtaccctccaggccttcaacattctcacacgacacctggacctagaccctctggaccacagaaacttttattccaagctcaagtccaaggtgaccacctggaaagccaaagccctgtggtacaaattggataagcgtggttcccacaaagagtataagcgagggaagtcgtgcacgaacaccaagtgtctcatagttgggggaggaccctgtggcttgcgcactgccattgaacttgcctacctgggagccaaagtggtcgtggtggagaagagggactccttctcccggaacaacgtgctacacctctggcctttcaccatccatgaccttcgtggcctgggagccaagaagttctatgggaagttctgtgctggctccatcgaccatatcagtattcgccaactacagctcatcctattcaaggtggccctgatgctgggagttgaaatccatgtgaatgtggagttcgtgaaggttctagagcctcctgaagatcaagaaaatcaaagtacagtataattttctttttctgcctagaaagcagatactacaaaatagaaattccacttgctgcttccaaagggtgtttctgtaggagttattcttactgggagctggttggcataatgccactgaagggtattttactgttttttttttaccattgctatgactttaggtttgctgtttggctccaaggggatttatgattaagccattaaacctgtaatttggttaccctgtcccaaggggttgctactttggcaaaggaaatctaatcaataaataggacagaagacatag

SEQ ID NO: 435052 - DNA, 353 bp, Homo sapiens
ctgtgatgctagaggttaccaagagtctctctcctctctcacctctgcagtgtctcatagttgggggaggaccctgtggcttgcgcactgccattgaacttgcctacctgggagccaaagtggtcgtggtggagaagagggactccttctcccggaacaacgtgctacacctctggcctttcaccatccatgaccttcgtggcctgggagccaagaagttctatgggaagttctgtgctggctccatcgaccatatcagtgagtggagtctatggtgatatcccatgaagggaggggactgaccctgggtgggacatatctctccaggtctaggagtccccagcttgttccat

SEQ ID NO: 435053 - DNA, 1997 bp, Homo sapiens
ggagggggcccggtccgggagtgcgggaggcagtggtagagggaggtggcggcagcggctagcggactcgagtctcaaccgggctgaggcggacacttctgtggagcgaagcagtgggagcatcgagcactagaggcggcaccgggatccccggctccggggaggggggcgccggaccgggaggaggggagggggcgatgctggaagccatggcggagcccagtcccgaagatccacctccgacccttaagccagagactcagccaccagagaaacggcggagaacaattgaggatttcaacaaattctgcagttttgttttggcatatgctggttacattccccctagcaaagaggaaagtgactggccagcctctggctccagctctccattgcgaggagagagtgcggccgacagtgatggctgggactcggccccctcagatcttcgaaccatccagacttttgttaagaaagcaaagtcatccaagagaagggcagctcaagcaggtcccacccagccaggacccccaaggtccactttctctcgtctgcaggcccccgacagtgctaccttgcttgagaagatgaagctcaaggactctctctttgatctggatgggcccaaagtggcatctcctttgtcccccacatccctgacacatacctcccggccccctgctgctcttacccccgtgcccctttcccagggggacctctcccatcctcctcgaaagaaggaccgaaagaaccgaaagttggggccaggagctggggctggctttggggtgcttcggaggcctcggccaactcctggggatggggaaaagagatctcgaatcaagaagagcaagaagcggaagttaaaaaaggcagaacggggggatagactcccacctcctgggcctccccaggcaccccccagtgatacagactctgaagaggaggaggaagaggaggaagaggaagaagaagaagagatggcaacagtggtagggggtgaagccccagtccctgtgctgccaacaccccctgaggctcctaggccccctgccacagtgcaccctgaaggagtccctcctgctgacagtgaaagcaaggaggtgggcagcactgaaacaagccaagatggagatgccagctccagtgaaggcgagatgcgggtcatggacgaggacatcatggtagaatcaggtgatgactcatgggatctgatcacatgttactgtcgaaagccctttgcagggcggcccatgattgagtgcagcctgtgtgggacgtggatccacctctcctgtgctaagattaagaagaccaacgtccccgacttcttttattgccagaaatgcaaggaactgaggccagaggcccggcggttaggggggcctcccaaatctggagagccctgatggcaccaactttagcctggaacttccaaatgacaacatgatttgggaactgagcctcagggtcctcagcctatcccctggagcttggatactgtctgcacttcaaggcaggaattctcaagggagacttgtttgaaaatgagtgtctcactttcccaccctatccttcctccccactctgtggacttgaaattgaatccattacggttggggatgggaggctgtctgtgtcccgacacataatctctgtctcttggacctgccaccatcactttctgggtcaggattggaattgggatggaatgggacagttgtctataaaactctagtgtaaatattagcactcccctccctcatcttttcttctatttcactccccatttattttcttctacaccggttgtatttttaattttggacttcccctattgggcatggcagctcaaaggtggagtactagagcctggccaagtgaggaaggaaagcagaaaggtgacgattctcactcacctcttttgtttttaataatatcggccgctgtttgtacagacagcctgcgtgttgtaaataaagcagagtgggctcttt

SEQ ID NO: 435054 - DNA, 1908 bp, Homo sapiens
ggctcctggtctccccgccgctccccgggggaggggagcggcttggtgcgcctgcgccagcctgtggctttctgggaatcaaagttccggaggttcatgcggtcccttttccgctgttcccggacggactacaaaacccttgatccacctccgacccttaagccagagactcagccaccagagaaacggcggagaacaattgaggatttcaacaaattctgcagttttgttttggcatatgctggttacattccccctagcaaagaggaaagtgactggccagcctctggctccagctctccattgcgaggagagagtgcggccgacagtgatggctgggactcggccccctcagatcttcgaaccatccagacttttgttaagaaagcaaagtcatccaagagaagggcagctcaagcaggtcccacccagccaggacccccaaggtccactttctctcgtctgcaggcccccgacagtgctaccttgcttgagaagatgaagctcaaggactctctctttgatctggatgggcccaaagtggcatctcctttgtcccccacatccctgacacatacctcccggccccctgctgctcttacccccgtgcccctttcccagggggacctctcccatcctcctcgaaagaaggaccgaaagaaccgaaagttggggccaggagctggggctggctttggggtgcttcggaggcctcggccaactcctggggatggggaaaagagatctcgaatcaagaagagcaagaagcggaagttaaaaaaggcagaacggggggatagactcccacctcctgggcctccccaggcaccccccagtgatacagactctgaagaggaggaggaagaggaggaagaggaagaagaagaagagatggcaacagtggtagggggtgaagccccagtccctgtgctgccaacaccccctgaggctcctaggccccctgccacagtgcaccctgaaggagtccctcctgctgacagtgaaagcaaggaggtgggcagcactgaaacaagccaagatggagatgccagctccagtgaaggcgagatgcgggtcatggacgaggacatcatggtagaatcaggtgatgactcatgggatctgatcacatgttactgtcgaaagccctttgcagggcggcccatgattgagtgcagcctgtgtgggacgtggatccacctctcctgtgctaagattaagaagaccaacgtccccgacttcttttattgccagaaatgcaaggaactgaggccagaggcccggcggttaggggggcctcccaaatctggagagccctgatggcaccaactttagcctggaacttccaaatgacaacatgatttgggaactgagcctcagggtcctcagcctatcccctggagcttggatactgtctgcacttcaaggcaggaattctcaagggagacttgtttgaaaatgagtgtctcactttcccaccctatccttcctccccactctgtggacttgaaattgaatccattacggttggggatgggaggctgtctgtgtcccgacacataatctctgtctcttggacctgccaccatcactttctgggtcaggattggaattgggatggaatgggacagttgtctataaaactctagtgtaaatattagcactcccctccctcatcttttcttctatttcactccccatttattttcttctacaccggttgtatttttaattttggacttcccctattgggcatggcagctcaaaggtggagtactagagcctggccaagtgaggaaggaaagcagaaaggtgacgattctcactcacctcttttgtttttaataatatcggccgctgtttgtacagacagcctgcgtgttgtaaataaagcagagtgggctcttt

SEQ ID NO: 435055 - DNA, 1700 bp, Homo sapiens
ggagggggcccggtccgggagtgcgggaggcagtggtagagggaggtggcggcagcggctagcggactcgagtctcaaccgggctgaggcggacacttctgtggagcgaagcagtgggagcatcgagcactagaggcggcaccgggatccccggctccggggaggggggcgccggaccgggaggaggggagggggcgatgctggaagccatggcggagcccagtcccgaagatccacctccgacccttaagccagagactcagccaccagagaaacggcggagaacaattgaggatttcaacaaattctgcagttttgttttggcatatgctggttacattccccctagcaaagaggaaagtgactggccagcctctggctccagctctccattgcgaggagagagtgcggccgacagtgatggctgggactcggccccctcagatcttcgaaccatccagacttttgttaagaaagcaaagtcatccaagagaagggcagctcaagcaggtcccacccagccaggacccccaaggtccactttctctcgtctgcaggcccccgacagtgctaccttgcttgagaagatgaagctcaaggactctctctttgatctggatgggcccaaagtggcatctcctttgtcccccacatccctgacacatacctctcccatcctcctcgaaagaaggaccgaaagaaccgaaagttggggccaggagctggggctggctttggggtgcttcggaggcctcggccaactcctggggatggggaaaagagatctcgaatcaagaagagcaagaagcggaagttaaaaaaggcagaacggggggatagactcccacctcctgggcctccccaggcaccccccagtgatacagactctgaagaggaggaggaagaggaggaagaggaagaagaagaagagatggcaacagtggtagggggtgaagccccagtccctgtgctgccaacaccccctgaggctcctaggccccctgccacagtgcaccctgaaggagtccctcctgctgacagtgaaagcaaggaggtgggcagcactgaaacaagccaagatggagatgccagctccagtgaaggcgagatgcgggtcatggacgaggacatcatggtagaatcaggtgatgactcatgggatctgatcacatgttactgtcgaaagccctttgcagggcggcccatgattgagtgcagcctgtgtgggacgtggatccacctctcctgtgctaagattaagaagaccaacgtccccgacttcttttattgccagaaatgcaaggaactgaggccagaggcccggcggttaggggggcctcccaaatctggagagccctgatggcaccaactttagcctggaacttccaaatgacaacatgatttgggaactgagcctcagggtcctcagcctatcccctggagcttggatactgtctgcacttcaaggcaggaattctcaagggagacttgtttgaaaatgagtgtctcactttcccaccctatccttcctccccactctgtggacttgaaattgaatccattacggttggggatgggaggctgtctgtgtcccgacacataatctctgtctcttggacctgccaccatcactttctgggtcaggattggaattgggatggaatgggacagttgtctataaaactctagtgtaaatatta

SEQ ID NO: 435056 - DNA, 2138 bp, Homo sapiens
  misc_feature (1775)..(1775): n is a, c, g, or t
  misc_feature (1792)..(1792): n is a, c, g, or t
  misc_feature (1798)..(1798): n is a, c, g, or t
  misc_feature (1814)..(1814): n is a, c, g, or t
  misc_feature (1825)..(1825): n is a, c, g, or t
  misc_feature (1829)..(1829): n is a, c, g, or t
  misc_feature (1832)..(1832): n is a, c, g, or t
  misc_feature (1835)..(1835): n is a, c, g, or t
  misc_feature (1837)..(1838): n is a, c, g, or t
  misc_feature (1843)..(1843): n is a, c, g, or t
  misc_feature (1846)..(1847): n is a, c, g, or t
  misc_feature (1852)..(1852): n is a, c, g, or t
  misc_feature (1861)..(1861): n is a, c, g, or t
  misc_feature (1870)..(1870): n is a, c, g, or t
  misc_feature (1873)..(1873): n is a, c, g, or t
  misc_feature (1882)..(1884): n is a, c, g, or t
  misc_feature (1889)..(1889): n is a, c, g, or t
  misc_feature (1892)..(1892): n is a, c, g, or t
  misc_feature (1895)..(1895): n is a, c, g, or t
  misc_feature (1898)..(1899): n is a, c, g, or t
  misc_feature (1905)..(1905): n is a, c, g, or t
  misc_feature (1918)..(1918): n is a, c, g, or t
  misc_feature (1921)..(1921): n is a, c, g, or t
  misc_feature (1925)..(1925): n is a, c, g, or t
  misc_feature (1929)..(1929): n is a, c, g, or t
  misc_feature (1934)..(1934): n is a, c, g, or t
  misc_feature (1940)..(1940): n is a, c, g, or t
  misc_feature (1947)..(1947): n is a, c, g, or t
  misc_feature (1949)..(1949): n is a, c, g, or t
  misc_feature (1955)..(1955): n is a, c, g, or t
  misc_feature (1957)..(1957): n is a, c, g, or t
  misc_feature (1961)..(1961): n is a, c, g, or t
  misc_feature (1971)..(1972): n is a, c, g, or t
  misc_feature (1982)..(1982): n is a, c, g, or t
  misc_feature (1987)..(1987): n is a, c, g, or t
  misc_feature (2014)..(2014): n is a, c, g, or t
  misc_feature (2017)..(2018): n is a, c, g, or t
  misc_feature (2021)..(2021): n is a, c, g, or t
ggagggggcccggtccgggagtgcgggaggcagtggtagagggaggtggcggcagcggctagcggactcgagtctcaaccgggctgaggcggacacttctgtggagcgaagcagtgggagcatcgagcactagaggcggcaccgggatccccggctccggggaggggggcgccggaccgggaggaggggagggggcgatgctggaagccatggcggagcccagtcccgaagatccacctccgacccttaagccagagactcagccaccagagaaacggcggagaacaattgaggatttcaacaaattctgcagttttgttttggcatatgctggttacattccccctagcaaagaggaaagtgactggccagcctctggctccagctctccattgcgaggagagagtgcggccgacagtgatggctgggactcggccccctcagatcttcgaaccatccagacttttgttaagaaagcaaagtcatccaagagaagggcagctcaagcaggtcccacccagccaggacccccaaggtccactttctctcgtctgcaggcccccgacagtgctaccttgcttgagaagatgaagctcaaggactctctctttgatctggatgggcccaaagtggcatctcctttgtcccccacatccctgacacatacctcccggccccctgctgctcttacccccgtgcccctttcccagggggacctctcccatcctcctcgaaagaaggaccgaaagaaccgaaagttggggccaggagctggggctggctttggggtgcttcggaggcctcggccaactcctggggatggggaaaagagatctcgaatcaagaagagcaagaagcggaagttaaaaaaggcagaacggggggatagactcccacctcctgggcctccccaggcaccccccagtgatacagactctgaagaggaggaggaagaggaggaagaggaagaagaagaagagatggcaacagtggtagggggtgaagccccagtccctgtgctgccaacaccccctgaggctcctaggccccctgccacagtgcaccctgaaggagtccctcctgctgacagtgaaagcaaggaggtgggcagcactgaaacaagccaagatggagatgccagctccagtgaaggcgagatgcgggtcatggacgaggacatcatggtagaatcaggtgatgactcatgggatctgatcacatgttactgtcgaaagccctttgcagggcggcccatgattgagtgcagcctgtgtgggacgtggatccacctctcctgtgctaagattaagaagaccaacgtccccgacttcttttattgccagaaatgcaaggaactgaggccagaggcccggcggttaggggggcctcccaaatctggagagccctgatggcaccaactttagcctggaacttccaaatgacaacatgatttgggaactgagcctcagggtcctcagcctatcccctggagcttggatactgtctgcacttcaaggcaggaattctcaagggagacttgtttgaaaatgagtgtctcactttcccaccctatccttcctccccactctgtggacttgaaattgaatccattacggttggggatgggaggctgtctgtgtcccgacacataatctctgtctcttggacctgccaccatcactttctgggtcaggattggaattgggatggaatgggacagttgtctataaaactctagtgtaaatattaaaaaaaaaaaaaaaaaaaaaaaaaanaaaaaaaaaaaaaaaanaaaaanaaaaaaaaaaaaaaanaaaaaaaaaanaaanaanaanannaaaanaannaaccntggggcccncttggcccnagncatttttannntgggnaanttnttnnttgcgnccgaatttggggntanttgnccanattcnccttanggggggngntttaanantaangggcccgggnnttaaaacggngggantgggaaaaccctggggttcccaaattnaanngcnttggagaatatcccctttccccgtttgggtaataagaaaaggccccaccggtgccccttccaacagttcccccccttattggaatggaattggagggttaatttttgttaaatccgg

SEQ ID NO: 435057 - DNA, 939 bp, Homo sapiens
gcggccgctccaacatcaggagatctcgaatcaagaagagcaagaagcggaagttaaaaaaggcagaacggggggatagactcccacctcctgggcctccccaggcaccccccagtgatacagactctgaagaggaggaggaagaggaggaagaggaagaagaagaagagatggcaacagtggtagggggtgaagccccagtccctgtgctgccaacaccccctgaggctcctaggccccctgccacagtgcaccctgaaggagtccctcctgctgacagtgaaagcaaggaggtgggcagcactgaaacaagccaagatggagatgccagctccagtgaaggcgagatgcgggtcatggacgaggacatcatggtagaatcaggtgatgactcatgggatctgatcacatgttactgtcgaaagccctttgcagggcggcccatgattgagtgcagcctgtgtgggacgtggatccacctctcctgtgctaagattaagaagaccaacgtccccgacttcttttattgccagaaatgcaaggaactgaggccagaggcccggcggttaggggggcctcccaaatctggagagccctgatggcaccaactttagcctggaacttccaaatgacaacatgatttgggaactgagcctcagggtcctcagcctatcccctggagcttggatactgtctgcacttcaaggcaggaattctcaagggagacttgtttgaaaatgagtgtctcactttcccaccctatccttcctccccactctgtggacttgaaattgaatccattacggttggggatgggaggctgtctgtgtcccgacacataatctctgtctcttggacctgccaccatcactttctgggtcaggattggaattgggatggaatgggacagttgtctataaaactctagtgtaaatatta

SEQ ID NO: 435058 - DNA, 1430 bp, Homo sapiens
ggagggggcccggtccgggagtgcgggaggcagtggtagagggaggtggcggcagcggctagcggactcgagtctcaaccgggctgaggcggacacttctgtggagcgaagcagtgggagcatcgagcactagaggcggcaccgggatccccggctccggggaggggggcgccggaccgggaggaggggagggggcgatgctggaagccatggcggagcccagtcccgaagatccacctccgacccttaagccagagactcagccaccagagaaacggcggagaacaattgaggatttcaacaaattctgcagttttgttttggcatatgctggttacattccccctagcaaagaggaaagtgactggccagcctctggctccagctctccattgcgaggagagagtgcggccgacagtgatggctgggactcggccccctcagatcttcgaaccatccagacttttgttaagaaagcaaagtcatccaagagaagggcagctcaagcaggtcccacccagccaggacccccaaggtccactttctctcgtctgcaggcccccgacagtgctaccttgcttgagaagatgaagctcaaggactctctctttgatctggatgggcccaaagtggcatctcctttgtcccccacatccctgacacatacctcccggccccctgctgctcttacccccgtgcccctttcccagggggacctctcccatcctcctcgaaagaaggaccgaaagaaccgaaagttggggccaggagctggggctggctttggggtgcttcggaggcctcggccaactcctggggatggggaaaagagatctcgaatcaagaagagcaagaagcggaagttaaaaaaggcagaacggggggatagactcccacctcctgggcctccccaggcaccccccagtgatacagactctgaagaggaggaggaagaggaggaagaggaagaagaagaagagatggcaacagtggtagggggtgaagccccagtccctgtgctgccaacaccccctgaggctcctaggccccctgccacagtgcaccctgaaggagtccctcctgctgacagtgaaagcaaggaggtgggcagcactgaaacaagccaagatggagatgccagctccagtgaaggcgagatgcgggtcatggacgaggacatcatggtagaatcaggtgatgactcatgggatctgatcacatgttactgtcgaaagccctttgcagggcggcccatgattgagtgcagcctgtgtgggacgtggatccacctctcctgtgctaagattaagaagaccaacgtccccgacttcttttattgccagaaatgcaaggaactgaggccagcaaggcgccacacaaagggccctcaacgcgcctcacaatgagccccacaacgagccggtaccgag

SEQ ID NO: 435059 - DNA, 1186 bp, Homo sapiens
ggagggggcccggtccgggagtgcgggaggcagtggtagagggaggtggcggcagcggctagcggactcgagtctcaaccgggctgaggcggacacttctgtggagcgaagcagtgggagcatcgagcactagaggcggcaccgggatccccggctccggggaggggggcgccggaccgggaggaggggagggggcgatgctggaagccatggcggagcccagtcccgaagatccacctccgacccttaagccagagactcagccaccagagaaacggcggagaacaattgaggatttcaacaaattctgcagttttgttttggcatatgctggttacattccccctagcaaagaggaaagtgactggccagcctctggctccagctctccattgcgaggagagagtgcggccgacagtgatggctgggactcggccccctcagatcttcgaaccatccagacttttgttaagaaagcaaagtcatccaagagaagggcagctcaagcaggtcccacccagccaggacccccaaggtccactttctctcgtctgcaggcccccgacagtgctaccttgcttgagaagatgaagctcaaggactctctctttgatctggatgggcccaaagtggcatctcctttgtcccccacatccctgacacatacctcccggccccctgctgctcttacccccgtgcccctttcccagggggacctctcccatcctcctcgaaagaaggaccgaaagaaccgaaagttggggccaggagctggggctggctttggggtgcttcggaggcctcggccaactcctggggatggggaaaagagatctcgaatcaagaagagcaagaagcggaagttaaaaaaggcagaacggggggatagactcccacctcctgggcctccccaggcaccccccagtgatacagactctgaagaggaggaggaagaggaggaagaggaagaagaagaagagatggcaacagtggtagggggtgaagccccagtccctgtgctgccaacaccccctgaggctcctaggccccctgccacagtgcaccctgaaggagtccctcctgctgacagtgaaagcaaggaggtgggcagcactgaaacaagccaagatggagatcgctccatgagcgaatcgtttcgcgcaggatctctagacgacgacacttt

SEQ ID NO: 435060 - DNA, 711 bp, Homo sapiens
  misc_feature (572)..(572): n is a, c, g, or t
  misc_feature (704)..(704): n is a, c, g, or t
ggagggggcccggtccgggagtgcgggaggcagtggtagagggaggtggcggcagcggctagcggactcgagtctcaaccgggctgaggcggacacttctgtggagcgaagcagtgggagcatcgagcactagaggcggcaccgggatccccggctccggggaggggggcgccggaccgggaggaggggagggggcgatgctggaagccatggcggagcccagtcccgaagatccacctccgacccttaagccagagactcagccaccagagaaacggcggagaacaattgaggatttcaacaaattctgcagttttgttttggcatatgctggttacattccccctagcaaagaggaaagtgactggccagcctctggctccagctctccattgcgaggagagagtgcggccgacagtgatggctgggactcggccccctcagatcttcgaaccatccagacttttgttaagaaagcaaagtcatccaagagaagggcagctcaagcaggtcccacccagccaggacccccaaggtccactttctctcgtctgcaggcccccgagcaatancccctaaggaggtggcacacttaacagccagatgagatccactcagtaagcgagatcgtgatatggcgagacatatttagataggtatctaggactataatgtctttgacccttgagcgccatattagtcanctttgtg

SEQ ID NO: 435061 - DNA, 507 bp, Homo sapiens
gtgaggtgtcagacttgagggtagaggtaacacggactggtcaagaggacatgctgatgggaattggggtggggagaagtttttggagtacagtgggatttagtggttgaggtaggacattttggggtaaatccagtcactccttttcaagctgggtttgtggaggggctgagatgacactggggttctgctgaccctggtctcttcccccttttaaggaaagtgactggccagcctctggctccagctctccattgcgaggagagagtgcggccgacagtgatggctgggactcggccccctcagatcttcgaaccatccagacttttgttaagaaagcaaagtcatccaagagaagggcagctcaagcaggtcccacccagccaggacccccaaggtccactttctctcgtctgcaggcccccgacagtgctaccttgcttgagaagatgaagctcaaggactctctctttgatctggatgggcccaaagtggcatctcctttgt

SEQ ID NO: 435062 - DNA, 1749 bp, Homo sapiens
ggagggggcccggtccgggagtgcgggaggcagtggtagagggaggtggcggcagcggctagcggactcgagtctcaaccgggctgaggcggacacttctgtggagcgaagcagtgggagcatcgagcactagaggcggcaccgggatccccggctccggggaggggggcgccggaccgggaggaggggagggggcgatgctggaagccatggcggagcccagtcccgaagatccacctccgacccttaagccagagactcagccaccagagaaacggcggagaacaattgaggatttcaacaaattctgcagttttgttttggcatatgctggttacattccccctagcaaagaggaaagtgactggccagcctctggctccagctctccattgcgaggagagagtgcggccgacagtgatggctgggactcggccccctcagatcttcgaaccatccagacttttgttaagaaagcaaagtcatccaagagaagggcagctcaagcaggtcccacccagccaggacccccaaggtccactttctctcgtctgcaggcccccgacagtgctaccttgcttgagaagatgaagctcaaggactctctctttgatctggatgggcccaaagtggcatctcctttgtcccccacatccctgacacatacctcccggccccctgctgctcttacccccgtgcccctttcccagggggacctctcccatcctcctcgaaagaaggaccgaaagaaccgaaagttggggccaggagctggggctggctttggggtgcttcggaggcctcggccaactcctggggatggggaaaagagatctcgaatcaagaagagcaagaagcggaagttaaaaaaggcagaacggggggatagactcccacctcctgggcctccccaggcaccccccagtgatacagactctgaagaggaggaggaagaggaggaagaggaagaagaagaagagatggcaacagtggtagggggtgaagccccagtccctgtgctgccaacaccccctgaggctcctaggccccctgccacagtgcaccctgaaggagtccctcctgctgacagtgaaagcaaggaggtgggcagcactgaaacaagccaagatggagatgccagctccagtgaaggcgagatgcgggtcatggacgaggacatcatggtagaatcaggtgatgactcatgggatctgatcacatgttactgtcgaaagccctttgcagggcggcccatgattgagtgcagcctgtgtgggacgtggatccacctctcctgtgctaagattaagaagaccaacgtccccgacttcttttattgccagaaatgcaaggaactgaggccagaggcccggcggttaggggggcctcccaaatctggagagccctgatggcaccaactttagcctggaacttccaaatgacaacatgatttgggaactgagcctcagggtcctcagcctatcccctggagcttggatactgtctgcacttcaaggcaggaattctcaagggagacttgtttgaaaatgagtgtctcactttcccaccctatccttcctccccactctgtggacttgaaattgaatccattacggttggggatgggaggctgtctgtgtcccgacacataatctctgtctcttggacctgccaccatcactttctgggtcaggattggaattgggatggaatgggacagttgtctataaaactctagtgtaaatatta

SEQ ID NO: 435063 - DNA, 1869 bp, Homo sapiens
ggcatcggcggcagcagcggtggctgctgtggagagagagagagagtggctggttggggggaaggggccagagttgaggggtccatagcctagtaactgggtgatccacctccgacccttaagccagagactcagccaccagagaaacggcggagaacaattgaggatttcaacaaattctgcagttttgttttggcatatgctggttacattccccctagcaaagaggaaagtgactggccagcctctggctccagctctccattgcgaggagagagtgcggccgacagtgatggctgggactcggccccctcagatcttcgaaccatccagacttttgttaagaaagcaaagtcatccaagagaagggcagctcaagcaggtcccacccagccaggacccccaaggtccactttctctcgtctgcaggcccccgacagtgctaccttgcttgagaagatgaagctcaaggactctctctttgatctggatgggcccaaagtggcatctcctttgtcccccacatccctgacacatacctcccggccccctgctgctcttacccccgtgcccctttcccagggggacctctcccatcctcctcgaaagaaggaccgaaagaaccgaaagttggggccaggagctggggctggctttggggtgcttcggaggcctcggccaactcctggggatggggaaaagagatctcgaatcaagaagagcaagaagcggaagttaaaaaaggcagaacggggggatagactcccacctcctgggcctccccaggcaccccccagtgatacagactctgaagaggaggaggaagaggaggaagaggaagaagaagaagagatggcaacagtggtagggggtgaagccccagtccctgtgctgccaacaccccctgaggctcctaggccccctgccacagtgcaccctgaaggagtccctcctgctgacagtgaaagcaaggaggtgggcagcactgaaacaagccaagatggagatgccagctccagtgaaggcgagatgcgggtcatggacgaggacatcatggtagaatcaggtgatgactcatgggatctgatcacatgttactgtcgaaagccctttgcagggcggcccatgattgagtgcagcctgtgtgggacgtggatccacctctcctgtgctaagattaagaagaccaacgtccccgacttcttttattgccagaaatgcaaggaactgaggccagaggcccggcggttaggggggcctcccaaatctggagagccctgatggcaccaactttagcctggaacttccaaatgacaacatgatttgggaactgagcctcagggtcctcagcctatcccctggagcttggatactgtctgcacttcaaggcaggaattctcaagggagacttgtttgaaaatgagtgtctcactttcccaccctatccttcctccccactctgtggacttgaaattgaatccattacggttggggatgggaggctgtctgtgtcccgacacataatctctgtctcttggacctgccaccatcactttctgggtcaggattggaattgggatggaatgggacagttgtctataaaactctagtgtaaatattagcactcccctccctcatcttttcttctatttcactccccatttattttcttctacaccggttgtatttttaattttggacttcccctattgggcatggcagctcaaaggtggagtactagagcctggccaagtgaggaaggaaagcagaaaggtgacgattctcactcacctcttttgtttttaataatatcggccgctgtttgtacagacagcctgcgtgttgtaaataaagcagagtgggctcttt

SEQ ID NO: 435064 - DNA, 2089 bp, Homo sapiens
  misc_feature (1775)..(1775): n is a, c, g, or t
  misc_feature (1792)..(1792): n is a, c, g, or t
  misc_feature (1798)..(1798): n is a, c, g, or t
  misc_feature (1814)..(1814): n is a, c, g, or t
  misc_feature (1825)..(1825): n is a, c, g, or t
  misc_feature (1829)..(1829): n is a, c, g, or t
  misc_feature (1832)..(1832): n is a, c, g, or t
  misc_feature (1835)..(1835): n is a, c, g, or t
  misc_feature (1837)..(1838): n is a, c, g, or t
  misc_feature (1843)..(1843): n is a, c, g, or t
  misc_feature (1846)..(1847): n is a, c, g, or t
  misc_feature (1852)..(1852): n is a, c, g, or t
  misc_feature (1861)..(1861): n is a, c, g, or t
  misc_feature (1870)..(1870): n is a, c, g, or t
  misc_feature (1873)..(1873): n is a, c, g, or t
  misc_feature (1882)..(1884): n is a, c, g, or t
  misc_feature (1889)..(1889): n is a, c, g, or t
  misc_feature (1892)..(1892): n is a, c, g, or t
  misc_feature (1895)..(1895): n is a, c, g, or t
  misc_feature (1898)..(1899): n is a, c, g, or t
  misc_feature (1905)..(1905): n is a, c, g, or t
  misc_feature (1918)..(1918): n is a, c, g, or t
  misc_feature (1921)..(1921): n is a, c, g, or t
  misc_feature (1925)..(1925): n is a, c, g, or t
  misc_feature (1929)..(1929): n is a, c, g, or t
  misc_feature (1934)..(1934): n is a, c, g, or t
  misc_feature (1940)..(1940): n is a, c, g, or t
  misc_feature (1947)..(1947): n is a, c, g, or t
  misc_feature (1949)..(1949): n is a, c, g, or t
  misc_feature (1955)..(1955): n is a, c, g, or t
  misc_feature (1957)..(1957): n is a, c, g, or t
  misc_feature (1961)..(1961): n is a, c, g, or t
  misc_feature (1971)..(1972): n is a, c, g, or t
  misc_feature (1982)..(1982): n is a, c, g, or t
  misc_feature (1987)..(1987): n is a, c, g, or t
  misc_feature (2014)..(2014): n is a, c, g, or t
  misc_feature (2017)..(2018): n is a, c, g, or t
  misc_feature (2021)..(2021): n is a, c, g, or t
ggagggggcccggtccgggagtgcgggaggcagtggtagagggaggtggcggcagcggctagcggactcgagtctcaaccgggctgaggcggacacttctgtggagcgaagcagtgggagcatcgagcactagaggcggcaccgggatccccggctccggggaggggggcgccggaccgggaggaggggagggggcgatgctggaagccatggcggagcccagtcccgaagatccacctccgacccttaagccagagactcagccaccagagaaacggcggagaacaattgaggatttcaacaaattctgcagttttgttttggcatatgctggttacattccccctagcaaagaggaaagtgactggccagcctctggctccagctctccattgcgaggagagagtgcggccgacagtgatggctgggactcggccccctcagatcttcgaaccatccagacttttgttaagaaagcaaagtcatccaagagaagggcagctcaagcaggtcccacccagccaggacccccaaggtccactttctctcgtctgcaggcccccgacagtgctaccttgcttgagaagatgaagctcaaggactctctctttgatctggatgggcccaaagtggcatctcctttgtcccccacatccctgacacatacctcccggccccctgctgctcttacccccgtgcccctttcccagggggacctctcccatcctcctcgaaagaaggaccgaaagaaccgaaagttggggccaggagctggggctggctttggggtgcttcggaggcctcggccaactcctggggatggggaaaagagatctcgaatcaagaagagcaagaagcggaagttaaaaaaggcagaacggggggatagactcccacctcctgggcctccccaggcaccccccagtgatacagactctgaagaggaggaggaagaggaggaagaggaagaagaagaagagatggcaacagtggtagggggtgaagccccagtccctgtgctgccaacaccccctgaggctcctaggccccctgccacagtgcaccctgaaggagtccctcctgctgacagtgaaagcaaggaggtgggcagcactgaaacaagccaagatggagatgccagctccagtgaaggcgagatgcgggtcatggacgaggacatcatggtagaatcaggtgatgactcatgggatctgatcacatgttactgtcgaaagccctttgcagggcggcccatgattgagtgcagcctgtgtgggacgtggatccacctctcctgtgctaagattaagaagaccaacgtccccgacttcttttattgccagaaatgcaaggaactgaggccagaggcccggcggttaggggggcctcccaaatctggagagccctgatggcaccaactttagcctggaacttccaaatgacaacatgatttgggaactgagcctcagggtcctcagcctatcccctggagcttggatactgtctgcacttcaaggcaggaattctcaagggagacttgtttgaaaatgagtgtctcactttcccaccctatccttcctccccactctgtggacttgaaattgaatccattacggttggggatgggaggctgtctgtgtcccgacacataatctctgtctcttggacctgccaccatcactttctgggtcaggattggaattgggatggaatgggacagttgtctataaaactctagtgtaaatattaaaaaaaaaaaaaaaaaaaaaaaaaanaaaaaaaaaaaaaaaanaaaaanaaaaaaaaaaaaaaanaaaaaaaaaanaaanaanaanannaaaanaannaaccntggggcccncttggcccnagncatttttannntgggnaanttnttnnttgcgnccgaatttggggntanttgnccanattcnccttanggggggngntttaanantaangggcccgggnnttaaaacggngggantgggaaaaccctggggttcccaaattnaanngcnttggaagaacctccccttttccgcagggggcgtagccatgggaaatttaagcggtaatattttgttaa

SEQ ID NO: 435065 - DNA, 1710 bp, Homo sapiens
ggagggggcccggtccgggagtgcgggaggcagtggtagagggaggtggcggcagcggctagcggactcgagtctcaaccgggctgaggcggacacttctgtggagcgaagcagtgggagcatcgagcactagaggcggcaccgggatccccggctccggggaggggggcgccggaccgggaggaggggagggggcgatgctggaagccatggcggagcccagtcccgaagatccacctccgacccttaagccagagactcagccaccagagaaacggcggagaacaattgaggatttcaacaaattctgcagttttgttttggcatatgctggttacattccccctagcaaagaggaaagtgactggccagcctctggctccagctctccattgcgaggagagagtgcggccgacagtgatggctgggactcggccccctcagatcttcgaaccatccagacttttgttaagaaagcaaagtcatccaagagaagggcagctcaagcaggtcccacccagccaggacccccaaggtccactttctctcgtctgcaggcccccgacagtgctaccttgcttgagaagatgaagctcaaggactctctctttgatctggatgggcccaaagtggcatctcctttgtcccccacatccctgacacatacctcccggccccctgctgctcttacccccgtgcccctttcccagggggacctctcccatcctcctcgaaagaaggaccgaaagaaccgaaagttggggccaggagctggggctggctttggggtgcttcggaggcctcggccaactcctggggatggggaaaagagatctcgaatcaagaagagcaagaagcggaagttaaaaaaggcagaacggggggatagactcccacctcctgggcctccccaggcaccccccagtgatacagactctgaagaggaggaggaagaggaggaagaggaagaagaagaagagatggcaacagtggtagggggtgaagccccagtccctgtgctgccaacaccccctgaggctcctaggccccctgccacagtgcaccctgaaggagtccctcctgctgacagtgaaagcaaggaggtgggcagcactgaaacaagccaagatggagatgccagctccagtgaaggcgagatgcgggtcatggacgaggacatcatggtagaatcaggtgatgactcatgggatctgatcacatgttactgtcgaaagccctttgcagggcggcccatgattgagtgcagcctgtgtgggacgtggatccacctctcctgtgctaagattaagaagaccaacgtccccgacttcttttattgccagaaatgcaaggaactgaggccagaggcccggcggttaggggggcctcccaaatctggagagccctgatggcaccaactttagcctcagggtcctcagcctatcccctggagcttggatactgtctgcacttcaaggcaggaattctcaagggagacttgtttgaaaatgagtgtctcactttcccaccctatccttcctccccactctgtggacttgaaattgaatccattacggttggggatgggaggctgtctgtgtcccgacacataatctctgtctcttggacctgccaccatcactttctgggtcaggattggaattgggatggaatgggacagttgtctataaaactctagtgtaaatatta

SEQ ID NO: 435066 - DNA, 597 bp, Homo sapiens
catcatgggtttccctggacgagcacatcatggtagaatcaggtgatgactcatgggatctgatcacatgttactgtcgaaagccctttgcagggcggcccatgattgagtgcagcctgtgtgggacgtggatccacctctcctgtgctaagattaagaagaccaacgtccccgacttcttttattgccagaaatgcaaggaactgaggccagaggcccggcggttaggggggcctcccaaatctggagagccctgatggcaccaactttagcctggaacttccaaatgacaacatgatttgggaactgagcctcagggtcctcagcctatcccctggagcttggatactgtctgcacttcaaggcaggaattctcaagggagacttgtttgaaaatgagtgtctcactttcccaccctatccttcctccccactctgtggacttgaaattgaatccattacggttggggatgggaggctgtctgtgtcccgacacataatctctgtctcttggacctgccaccatcactttctgggtcaggattggaattgggatggaatgggacagttgtctataaaactctagtgtaaatatta

SEQ ID NO: 435067 - DNA, 825 bp, Homo sapiens
ccgccttttcctgccctggatctccgccgccacctcggtctcgctgctcctgggcggggggtgaggacgagtccggagtatctggggtttggcgttgttgtcagcctcggggagagagattggacaaatattctccaagaggaggagggcgacgccaaggactttccacatcaactgctttggggtatctccacaagttggaagagggaccctttcgttttgcattgcgtgtgttgtgctcattaccagtgcagcgactgccgtcccagggtgactctgagttgtcctttatcgtgagctagcaatggctagcgaagacaatcgtgtcccttccccgccaccaacaggtgatgacgggggaggtggagggagagaagaaacccctactgaagggggtgcattgtctctgaaaccagggctccccatcaggggcatcagaatgaaatttgccgtgttgaccggtttggttgaagttggagaagtatccaatagggatattgtagaaactgtctttaacctggtaagtccatgaatattttataagcatatactcttttcagtgggttggggaacaagatcttaaagctggagccatgtggtttactcacactgatggtgacttttttcgtgtatagggacacaaaattctactcacctaaatgaaacaatttcatctgttttttagattgaagggaattgtgcaaacttagatgatccaggttttgtgaaagtgaacacatcacttttgtgctaaggaaataattgttgctatggaagtattggggggaggttctagcggaggagttatctctaattttttttttc

SEQ ID NO: 435068 - DNA, 10007 bp, Homo sapiens
  misc_feature (1651)..(1651): n is a, c, g, or t
  misc_feature (3573)..(3573): n is a, c, g, or t
ccgccttttcctgccctggatctccgccgccacctcggtctcgctgctcctgggcggggggtgaggacgagtccggagtatctggggtttggcgttgttgtcagcctcggggagagagattggacaaatattctccaagaggaggagggcgacgccaaggactttccacatcaactgctttggggtatctccacaagttggaagagggaccctttcgttttgcattgcgtgtgttgtgctcattaccagtgcagcgactgccgtcccagggtgactctgagttgtcctttatcgtgagctagcaatggctagcgaagacaatcgtgtcccttccccgccaccaacaggtgatgacgggggaggtggagggagagaagaaacccctactgaagggggtgcattgtctctgaaaccagggctccccatcaggggcatcagaatgaaatttgccgtgttgaccggtttggttgaagttggagaagtatccaatagggatattgtagaaactgtctttaacctgttggtaggaggacagtttgatctggaaatgaatttcattatccaagaaggtgagagtattaactgcatggtggacctactggaaaaatgtgacattacgtgccaagcagaagtctggagcatgtttacagccattctgaagaaaagcatacggaatcttcaagtctgcactgaagtaggccttgttgaaaaagtgcttgggaaaattgaaaaagttgacaatatgatagcagatcttttggttgacatgttgggagtgctggctagctataatttgacagttcgcgagctaaagcttttcttcagtaaacttcaaggagataaaggacgatggcctccacatgctgggaagttgctgtctgtgttaaagcatatgcctcagaagtatggtcctgatgccttttttaactttccaggaaagagtgctgcagctattgcattacctcctatagccaaatggccataccagaatggttttacatttcatacatggcttagaatggatcctgtaaataacatcaatgtagataaggataaaccatatttgtattgtttcagaaccagcaaaggtcttggctattctgctcattttgttggaggctgtttgattgtaacatcaataaagtcaaaaggaaaaggctttcaacactgtgtgaaatttgatttcaagccacaaaagtggtatatggttaccatagtacacatctataaccgatggaagaatagtgaacttcgatgttatgtgaatggtgagctggcttcctatggagagataacatggtttgtcaacactagcgatacctttgacaaatgtttcctgggctcatcagaaacagcagatgctaatagagtattctgtggtcagatgactgcagtttaccttttcagtgaagctctaaatgcagctcagatatttgctatttatcagttgggcctgggatacaagggtacatttaaattcaaagcagaaagcgaccttttccttgctgagcatcacaaacttttattgtacgatgggaaactctctagtgccattgcattcacgtacaatccacgggctacagatgcccagctttgtcttgaatcatctcctaaggacaacccttcaatttttgttcattcaccacatgcnctcatgctccaggatgtaaaggcagttttaacacattccatccaaagtgcaatgcattcaattggaggagtacaagtactatttccactttttgcacagttggattacaggcaatatttgtctgatgagattgatttgactatatgttcaaccttgctggcctttatcatggaattgttgaagaactcaattgctatgcaggaacagatgcttgcctgtaagggcttcttggtaataggatatagccttgaaaagtcttccaaatctcatgttagcagagcagtacttgaactttgccttgcattttcaaaatatctgagtaatctgcagaatgggatgcccctgctcaagcaattgtgtgatcacgttcttcttaatcctgccatatggattcataccccagccaaggttcaactgatgctctatacttatctgtccacggaattcattggtacagtcaacatatataacaccattcggagagttggaacagtgcttctcatcatgcacacgctgaagtactactactgggcagtgaatcctcaggatcgaagtggtatcaccccaaaaggattagatggaccgcgacctaatcaaaaagaaatgctttctctacgagcattcttgttgatgttcattaagcaattagtgatgaaggattctggagtaaaggaagatgaattacaggccattcttaattacctactgactatgcatgaggatgacaatctaatggatgtcctacagctgcttgttgcattaatgtcagaacaccctaactctatgattcctgcttttgaccaaaggaatgggttacgtgttatctacaaacttctggcatcgaaaagtgaaggaatcagggtacaagctcttaaggcaatgggttattttttaaaacatctggccccaaagaggaaagcagaagtcatgcttggacatggattgttttcattgctagctgaaaggctcatgcttcagacaaatttaatcacaatgaccacatataatgtgctgtttgagattcttatagaacagattggtactcaggtgatacataaacagcatccagatcctgattcttcagtgaagatacaaaaccctcagatactaaaagtaattgcgaccctacttcgaaattctccccagtgcccagagagcatggaggttcgcagagcctttctttctgacatgattaaactttttaataacagtagagaaaacaggaggagcttgctacaatgctctgtgtggcaagaatggatgctttctctctgctattttaatcctaagaattcagatgagcaaaagataacagaaatggtatacgccatattcagaatcctgctttaccatgcagtcaaatatgagtggggtggctggcgtgtatgggtagacactttatcaatcactcattcaaaggtcacttttgaaatacacaaagaaaaccttgccaatatatttagggaacagcaaggaaaagttgatgaagaaatagggctgtgttcttcaacttcagttcaagcagcctctggcattagaagggatattaatgtttcagtaggatcccagcaaccagatacgaaggattctcctgtctgtcctcatttcaccacaaatggtaatgaaaattcaagtatagagaagacaagttcactagaatctgcatctaatattgaactgcaaactactaatacatcttatgaagaaatgaaagctgagcaagaaaatcaggagttaccagatgaaggcactttggaagaaacactgacaaatgagacaaggaatgcagatgatttagaagtatcttctgacataatagaagctgtggctatttcctctaattcttttataacaactggcaaagattcaatgactgtcagtgaagtaactgcttctataagttctccttcagaagaggatgnctcagagatgccagaattcttggataaatctatagtagaggaagaggaagatgatgattatgtggaactgaaagtagaaggcagtcctactgaggaagctaatctacccacagagctccaagataacagtttgtctccagctgcatctgaagccggtgaaaaactggacatgtttggtaatgatgacaaattaatatttcaagaaggaaaacctgttactgaaaagcaaactgatactgaaactcaagattctaaagattctggaattcagactatgacagcatcagggtcttcagctatgtcaccagaaactactgtttcccaaatagctgtagaatcagaccttggtcagatgctggaggaagggaagaaagcaactaacctcactagagaaaccaaattaattaatgattgtcatggtagtgtctctgaggcttcttctgagcaaaagattgcgaagttggatgtttccaatgttgctacagatactgagaggctggagttgaaggccagtcccaacgtggaagcacctcaacctcatcgacatgtgcttgagatatcaaggcaacatgagcagccagggcaaggaatagcaccagatgcagttaatggacaaaggagggattccagatctactgtgtttcgtattcctgagttcaactggtctcagatgcatcaacgtttgctcactgatctattattttcaatagaaacagatatacagatgtggagaagccattcaacaaagacagttatggacttcgtgaatagcagtgataatgtcatctttgtacacaacacaattcatctcatctctcaagtgatggacaatatggtcatggcttgtgggggtatactgccattgctttcagctgctacatcggctacacatgaactggaaaatattgaacctactcaaggcctttcaatagaagcctctgtgacatttttgcagaggctaattagccttgtggatgtgcttatatttgcaagttctcttggctttactgaaattgaagctgaaaaaagtatgtcatctggaggaattttgcggcagtgtctccgactagtttgtgcagtcgcagtaaggaattgcttggagtgtcaacagcattcacaactgaaaactaggggagataaagccttgaaaccaatgcatagccttattcctttagggaaatctgcagcgaagagcccagtggacattgtgactggcggtatatctccagtaagagatcttgacaggcttctacaggacatggatattaatcggcttagggcagttgttttcagagacatagaggatagcaaacaagctcaatttttagccttggcagtagtatactttatctctgttcttatggtctccaagtacagagacattttggaaccccaaaatgaaaggcatagccagtcatgtacagaaactggcagtgaaaatgagaatgtatcactctctgaaatcacaccagcagcattcagcactttaactacggcatcagtggaagaatctgaaagcacatcatctgctcgaaggagggactcaggcattggggaagaaacagccactggtttaggaagccatgtggaagtaactcctcacacagcacctcctggtgtcagtgcaggcccagatgcaatcagcgaggtgctatctactctttctttagaagtcaataagtctccggaaaccaaaaatgatagaggaaatgacttggacactaaggctacaccgtcagtttcagtttcaaaaaacgtcaatgtgaaagacattctccgaagcttggttaacataccagcagatggagtcacagtggatcctgcccttctgccaccagcctgccttggagcccttggtgatctatctgtggaacaacccgtgcagttcagatcttttgacagaagtgtcattgttgcagcaaaaaagtcagcagtctcaccttccacctttaatacaagcatacctaccaatgctgtcagtgtggtttcctcagtagattcagcccaagcctcagatatgggaggagaatcaccaggcagtagatcatctaatgcaaaattgccctcagttccaacagttgattcagtttcacaagatccggtttcaaatatgagtattacagagaggcttgaacacgctttggaaaaggcagctcctctccttcgtgagatttttgtggattttgcaccttttctttctcggacacttttgggtagccatggacaagaactgcttatagaaggaacaagtctggtttgcatgaagtcgagtagttcagttgtggaattggttatgctactgtgttctcaggagtggcaaaattctattcagaagaatgcaggccttgcttttatcgaacttgtcaatgaaggaaggttgcttagccagacaatgaaggatcatctagtaagagtagcaaatgaagctgaatttatcctgagcaggcagagagcagaagatattcacagacatgcggaatttgagtcactgtgtgcccagtattctgcagacaaacgagaagatgagaagatgtgtgatcatttgataagagcagcaaaatatcgtgaccacgtgacagcaactcaactaatccagaaaattatcaacattctcacagacaagcatggagcctggggaaattctgcagtgagtcgtcctcttgagttctggcgccttgactactgggaagatgacttgcggcgccggcgacgatttgtgcgtaaccctctaggatcgacacatcctgaagcgacactaaaaacagccgtggaacatgtgtgcatttttaaattgagagagaacagcaaagccacagatgaagatatccttgctaaaggaaaacagtccatcaggagtcaggctttaggaaatcagaactcagaaaacgagatcctcctggaaggcgatgatgatactctgtcatccgtggatgagaaagatttagagaatcttgccggtcctgttagcctgagcacaccagctcagcttgtggccccctctgttgtagtaaagggcactctttctgtcacctcctccgaactctattttgaggtggatgaagaggatcctaacttcaaaaaaatcgaccccaagatcttggcatatacagaagggctgcatggaaaatggctgttcacagagatacgatcaatcttttctcgtcgttatcttttgcaaaatacagccctggagatctttatggcaaacagagttgctgtgatgttcaacttcccagaccctgcaacagtaaagaaagtggttaactatctacctcgtgttggcgttggaacaagttttggattgcctcaaaccagacgtatttcattagctagtccacgtcagctttttaaggcttctaatatgacccagcgatggcaacacagagagatatctaattttgagtacttgatgtttctcaacacgatagcaggacggagttataatgacttaaatcagtatccagtgtttccttgggtcatcactaattatgaatcagaagaactggatcttaccttgcccaccaacttcagagatttgtccaagccaataggagctctgaacccaaaaagagcagcattcttcgctgagcgttatgaatcatgggaagatgatcaagttccaaagtttcactatggtactcattactcaactgcaagttttgttcttgcatggctgctaagaatagaaccctttacaacttatttcctaaatttgcaaggaggcaaatttgatcatgcagatcgaactttttcatcaatttccagagcttggcgaaacagtcagcgtgatacctctgatattaaggagttgatccctgaattttattatctccctgagatgtttgtcaacttcaataattataatcttggagtgatggatgatgggacagtagtgtctgatgtcgaacttcctccttgggccaaaacctcagaagaatttgttcacataaacagattggccctggagagtgaatttgtttcctgccagcttcaccaatggattgatctcatttttggctataaacagcaaggaccagaagctgtccgagccctcaatgtgttctattacttgacctatgaaggagctgtcaatctgaattcaataactgatcctgtgttgagagaggctgttgaagctcaaatccgaagttttggacagactccttctcaactactcatagagccccatcctcccagaggttctgccatgcaagtgagtccattgatgttcacagacaaagcccagcaggatgttatcatggtcctcaagtttccctccaactcccctgttactcacgtggcagccaacacccagcctggtttggcaactcccgctgtgatcacagtcactgctaacaggttatttgcggtgaacaaatggcacaaccttcctgctcatcaaggtgctgtacaagaccagccataccagctgccagtggaaatcgatcctctcatagccagcaatacaggaatgcacaggaggcaaatcactgaccttttagaccaaagtattcaagtgcattcccagtgctttgtcatcacttcagacaaccgctatattctcgtctgtggcttctgggataaaagtttcagagtctattctacagacacaggaagattgatccaagtggtgtttggccattgggatgtcgtcacttgccttgctcgttctgagtcatatattgggggaaattgctacattctctcagggtcacgtgatgcaactcttttgctgtggtattggaatggaaaatgcagtgggattggagataacccaggcagtgagactgctgctcctcgggccattttgaccggccatgactatgaggtcacatgtgctgcggtgtgtgcggagctaggcctggtgttgagtggttcacaagaaggaccatgtctcatacattccatgaatggagacttgttgaggaccttggagggtcctgaaaactgcctgaaaccaaaactcattcaggcttcaagagagggtcattgtgtcatattctatgaaaacggcctcttctgtacattcagtgtgaatggaaaactccaggccacgatggaaacagatgataacataagagccatccagctgagccgagatgggcagtacctgctcacaggaggagacagaggagtggtcgtggtccggcaggtgtcggacctcaagcagctctttgcctatccaggatgtgacgctggaatccgggccatggcgctgtcttacgaccagaggtgcatcatttctggcatggcttcaggaagcattgtgctattttacaacgactttaaccggtggcatcatgaataccaaacccgctactgatggtgacagctgtacatcaactctgcccctaggatgagcagaagtacctggagcatcattctcttctaccacatctgaatgtaacttaaatttgctcaaagaagcaaaatattttttaaagttattaataattgctatttttgtagtctttgcttgacttttttgggggggattagcaaagcagaaaactggctgctgggttctgtagttttaaaaaatctatatttttagtcataatgagaagtctattttcaccaattatggaaacatacagtggagcaagtaaaccacttattccagctataatattatgaagaacatttcccatgcatctacaagcttgagaaataggattttcacagtggggaagtgggttacaatattggaataggaaaatttgatgctgtaatttgggtcctgtatttttccaaacaactgtgcttcttcagcactaatatttctgggatttaaatagtaatgtttaaattatggtaaatgtaatttaaaacatctcaattaagtctgtctatcaatattgttcttcaagcatgttttagacctagaaaagtatggtttgggggaggctattttattgtgtggttagcacaaggaatctaatttatagcaagtgtgaaatagttaccattttttcctgatctgtcatcttcatagcacaacaaaacgaaatgatggaaatgctcttgagctcacaacatttgtttttcttttaaagtaaatgcaagtaccaaagctcactactgcggtttgcctgtgcctggacaatgaggcggagccactgttgttggggcacccccttccctccccgggtttgcaaatagaggctaccgggtgctgtattcagcaacacctgttttactatttgttattaaactatcatctccaccttccttttgattagcaatttgtactaagaaacgaaacaatgttatttggtggtgtataattctacttttctagtagattactgtgtggaattctgtgaaaaatatttgagaaaaggcctgtattgcataaataaattctttgtatgttgtgaaaaatatttgagaaaaggcctgtattgcataaataaattctttgtatgttgtga

SEQ ID NO: 435069 - DNA, 9478 bp, Homo sapiens
  misc_feature (1651)..(1651): n is a, c, g, or t
  misc_feature (3573)..(3573): n is a, c, g, or t
ccgccttttcctgccctggatctccgccgccacctcggtctcgctgctcctgggcggggggtgaggacgagtccggagtatctggggtttggcgttgttgtcagcctcggggagagagattggacaaatattctccaagaggaggagggcgacgccaaggactttccacatcaactgctttggggtatctccacaagttggaagagggaccctttcgttttgcattgcgtgtgttgtgctcattaccagtgcagcgactgccgtcccagggtgactctgagttgtcctttatcgtgagctagcaatggctagcgaagacaatcgtgtcccttccccgccaccaacaggtgatgacgggggaggtggagggagagaagaaacccctactgaagggggtgcattgtctctgaaaccagggctccccatcaggggcatcagaatgaaatttgccgtgttgaccggtttggttgaagttggagaagtatccaatagggatattgtagaaactgtctttaacctgttggtaggaggacagtttgatctggaaatgaatttcattatccaagaaggtgagagtattaactgcatggtggacctactggaaaaatgtgacattacgtgccaagcagaagtctggagcatgtttacagccattctgaagaaaagcatacggaatcttcaagtctgcactgaagtaggccttgttgaaaaagtgcttgggaaaattgaaaaagttgacaatatgatagcagatcttttggttgacatgttgggagtgctggctagctataatttgacagttcgcgagctaaagcttttcttcagtaaacttcaaggagataaaggacgatggcctccacatgctgggaagttgctgtctgtgttaaagcatatgcctcagaagtatggtcctgatgccttttttaactttccaggaaagagtgctgcagctattgcattacctcctatagccaaatggccataccagaatggttttacatttcatacatggcttagaatggatcctgtaaataacatcaatgtagataaggataaaccatatttgtattgtttcagaaccagcaaaggtcttggctattctgctcattttgttggaggctgtttgattgtaacatcaataaagtcaaaaggaaaaggctttcaacactgtgtgaaatttgatttcaagccacaaaagtggtatatggttaccatagtacacatctataaccgatggaagaatagtgaacttcgatgttatgtgaatggtgagctggcttcctatggagagataacatggtttgtcaacactagcgatacctttgacaaatgtttcctgggctcatcagaaacagcagatgctaatagagtattctgtggtcagatgactgcagtttaccttttcagtgaagctctaaatgcagctcagatatttgctatttatcagttgggcctgggatacaagggtacatttaaattcaaagcagaaagcgaccttttccttgctgagcatcacaaacttttattgtacgatgggaaactctctagtgccattgcattcacgtacaatccacgggctacagatgcccagctttgtcttgaatcatctcctaaggacaacccttcaatttttgttcattcaccacatgcnctcatgctccaggatgtaaaggcagttttaacacattccatccaaagtgcaatgcattcaattggaggagtacaagtactatttccactttttgcacagttggattacaggcaatatttgtctgatgagattgatttgactatatgttcaaccttgctggcctttatcatggaattgttgaagaactcaattgctatgcaggaacagatgcttgcctgtaagggcttcttggtaataggatatagccttgaaaagtcttccaaatctcatgttagcagagcagtacttgaactttgccttgcattttcaaaatatctgagtaatctgcagaatgggatgcccctgctcaagcaattgtgtgatcacgttcttcttaatcctgccatatggattcataccccagccaaggttcaactgatgctctatacttatctgtccacggaattcattggtacagtcaacatatataacaccattcggagagttggaacagtgcttctcatcatgcacacgctgaagtactactactgggcagtgaatcctcaggatcgaagtggtatcaccccaaaaggattagatggaccgcgacctaatcaaaaagaaatgctttctctacgagcattcttgttgatgttcattaagcaattagtgatgaaggattctggagtaaaggaagatgaattacaggccattcttaattacctactgactatgcatgaggatgacaatctaatggatgtcctacagctgcttgttgcattaatgtcagaacaccctaactctatgattcctgcttttgaccaaaggaatgggttacgtgttatctacaaacttctggcatcgaaaagtgaaggaatcagggtacaagctcttaaggcaatgggttattttttaaaacatctggccccaaagaggaaagcagaagtcatgcttggacatggattgttttcattgctagctgaaaggctcatgcttcagacaaatttaatcacaatgaccacatataatgtgctgtttgagattcttatagaacagattggtactcaggtgatacataaacagcatccagatcctgattcttcagtgaagatacaaaaccctcagatactaaaagtaattgcgaccctacttcgaaattctccccagtgcccagagagcatggaggttcgcagagcctttctttctgacatgattaaactttttaataacagtagagaaaacaggaggagcttgctacaatgctctgtgtggcaagaatggatgctttctctctgctattttaatcctaagaattcagatgagcaaaagataacagaaatggtatacgccatattcagaatcctgctttaccatgcagtcaaatatgagtggggtggctggcgtgtatgggtagacactttatcaatcactcattcaaaggtcacttttgaaatacacaaagaaaaccttgccaatatatttagggaacagcaaggaaaagttgatgaagaaatagggctgtgttcttcaacttcagttcaagcagcctctggcattagaagggatattaatgtttcagtaggatcccagcaaccagatacgaaggattctcctgtctgtcctcatttcaccacaaatggtaatgaaaattcaagtatagagaagacaagttcactagaatctgcatctaatattgaactgcaaactactaatacatcttatgaagaaatgaaagctgagcaagaaaatcaggagttaccagatgaaggcactttggaagaaacactgacaaatgagacaaggaatgcagatgatttagaagtatcttctgacataatagaagctgtggctatttcctctaattcttttataacaactggcaaagattcaatgactgtcagtgaagtaactgcttctataagttctccttcagaagaggatgnctcagagatgccagaattcttggataaatctatagtagaggaagaggaagatgatgattatgtggaactgaaagtagaaggcagtcctactgaggaagctaatctacccacagagctccaagataacagtttgtctccagctgcatctgaagccggtgaaaaactggacatgtttggtaatgatgacaaattaatatttcaagaaggaaaacctgttactgaaaagcaaactgatactgaaactcaagattctaaagattctggaattcagactatgacagcatcagggtcttcagctatgtcaccagaaactactgtttcccaaatagctgtagaatcagaccttggtcagatgctggaggaagggaagaaagcaactaacctcactagagaaaccaaattaattaatgattgtcatggtagtgtctctgaggcttcttctgagcaaaagattgcgaagttggatgtttccaatgttgctacagatactgagaggctggagttgaaggccagtcccaacgtggaagcacctcaacctcatcgacatgtgcttgagatatcaaggcaacatgagcagccagggcaaggaatagcaccagatgcagttaatggacaaaggagggattccagatctactgtgtttcgtattcctgagttcaactggtctcagatgcatcaacgtttgctcactgatctattattttcaatagaaacagatatacagatgtggagaagccattcaacaaagacagttatggacttcgtgaatagcagtgataatgtcatctttgtacacaacacaattcatctcatctctcaagtgatggacaatatggtcatggcttgtgggggtatactgccattgctttcagctgctacatcggctacacatgaactggaaaatattgaacctactcaaggcctttcaatagaagcctctgtgacatttttgcagaggctaattagccttgtggatgtgcttatatttgcaagttctcttggctttactgaaattgaagctgaaaaaagtatgtcatctggaggaattttgcggcagtgtctccgactagtttgtgcagtcgcagtaaggaattgcttggagtgtcaacagcattcacaactgaaaactaggggagataaagccttgaaaccaatgcatagccttattcctttagggaaatctgcagcgaagagcccagtggacattgtgactggcggtatatctccagtaagagatcttgacaggcttctacaggacatggatattaatcggcttagggcagttgttttcagagacatagaggatagcaaacaagctcaatttttagccttggcagtagtatactttatctctgttcttatggtctccaagtacagagacattttggaaccccaaaatgaaaggcatagccagtcatgtacagaaactggcagtgaaaatgagaatgtatcactctctgaaatcacaccagcagcattcagcactttaactacggcatcagtggaagaatctgaaagcacatcatctgctcgaaggagggactcaggcattggggaagaaacagccactggtttaggaagccatgtggaagtaactcctcacacagcacctcctggtgtcagtgcaggcccagatgcaatcagcgaggtgctatctactctttctttagaagtcaataagtctccggaaaccaaaaatgatagaggaaatgacttggacactaaggctacaccgtcagtttcagtttcaaaaaacgtcaatgtgaaagacattctccgaagcttggttaacataccagcagatggagtcacagtggatcctgcccttctgccaccagcctgccttggagcccttggtgatctatctgtggaacaacccgtgcagttcagatcttttgacagaagtgtcattgttgcagcaaaaaagtcagcagtctcaccttccacctttaatacaagcatacctaccaatgctgtcagtgtggtttcctcagtagattcagcccaagcctcagatatgggaggagaatcaccaggcagtagatcatctaatgcaaaattgccctcagttccaacagttgattcagtttcacaagatccggtttcaaatatgagtattacagagaggcttgaacacgctttggaaaaggcagctcctctccttcgtgagatttttgtggattttgcaccttttctttctcggacacttttgggtagccatggacaagaactgcttatagaaggaacaagtctggtttgcatgaagtcgagtagttcagttgtggaattggttatgctactgtgttctcaggagtggcaaaattctattcagaagaatgcaggccttgcttttatcgaacttgtcaatgaaggaaggttgcttagccagacaatgaaggatcatctagtaagagtagcaaatgaagctgaatttatcctgagcaggcagagagcagaagatattcacagacatgcggaatttgagtcactgtgtgcccagtattctgcagacaaacgagaagatgagaagatgtgtgatcatttgataagagcagcaaaatatcgtgaccacgtgacagcaactcaactaatccagaaaattatcaacattctcacagacaagcatggagcctggggaaattctgcagtgagtcgtcctcttgagttctggcgccttgactactgggaagatgacttgcggcgccggcgacgatttgtgcgtaaccctctaggatcgacacatcctgaagcgacactaaaaacagccgtggaacatgccacagatgaagatatccttgctaaaggaaaacagtccatcaggagtcaggctttaggaaatcagaactcagaaaacgagatcctcctggaaggcgatgatgatactctgtcatccgtggatgagaaagatttagagaatcttgccggtcctgttagcctgagcacaccagctcagcttgtggccccctctgttgtagtaaagggcactctttctgtcacctcctccgaactctattttgaggtggatgaagaggatcctaacttcaaaaaaatcgaccccaagatcttggcatatacagaagggctgcatggaaaatggctgttcacagagatacgatcaatcttttctcgtcgttatcttttgcaaaatacagccctggagatctttatggcaaacagagttgctgtgatgttcaacttcccagaccctgcaacagtaaagaaagtggttaactatctacctcgtgttggcgttggaacaagttttggattgcctcaaaccagacgtatttcattagctagtccacgtcagctttttaaggcttctaatatgacccagcgatggcaacacagagagatatctaattttgagtacttgatgtttctcaacacgatagcaggacggagttataatgacttaaatcagtatccagtgtttccttgggtcatcactaattatgaatcagaagaactggatcttaccttgcccaccaacttcagagatttgtccaagccaataggagctctgaacccaaaaagagcagcattcttcgctgagcgttatgaatcatgggaagatgatcaagttccaaagtttcactatggtactcattactcaactgcaagttttgttcttgcatggctgctaagaataagccccatcctcccagaggttctgccatgcaagtgagtccattgatgttcacagacaaagcccagcaggatgttatcatggtcctcaagtttccctccaactcccctgttactcacgtggcagccaacacccagcctggtttggcaactcccgctgtgatcacagtcactgctaacaggttatttgcggtgaacaaatggcacaaccttcctgctcatcaaggtgctgtacaagaccagccataccagctgccagtggaaatcgatcctctcatagccagcaatacaggaatgcacaggaggcaaatcactgaccttttagaccaaagtattcaagtgcattcccagtgctttgtcatcacttcagacaaccgctatattctcgtctgtggcttctgggataaaagtttcagagtctattctacagacacaggaagattgatccaagtggtgtttggccattgggatgtcgtcacttgccttgctcgttctgagtcatatattgggggaaattgctacattctctcagggtcacgtgatgcaactcttttgctgtggtattggaatggaaaatgcagtgggattggagataacccaggcagtgagactgctgctcctcgggccattttgaccggccatgactatgaggtcacatgtgctgcggtgtgtgcggagctaggcctggtgttgagtggttcacaagaaggaccatgtctcatacattccatgaatggagacttgttgaggaccttggagggtcctgaaaactgcctgaaaccaaaactcattcaggcttcaagagagggtcattgtgtcatattctatgaaaacggcctcttctgtacattcagtgtgaatggaaaactccaggccacgatggaaacagatgataacataagagccatccagctgagccgagatgggcagtacctgctcacaggaggagacagaggagtggtcgtggtccggcaggtgtcggacctcaagcagctctttgcctatccaggatgtgacgctggaatccgggccatggcgctgtcttacgaccagaggtgcatcatttctggcatggcttcaggaagcattgtgctattttacaacgactttaaccggtggcatcatgaataccaaacccgctactgatggtgacagctgtacatcaactctgcccctaggatgagcagaagtacctggagcatcattctcttctaccacatctgaatgtaacttaaatttgctcaaagaagcaaaatattttttaaagttattaataattgctatttttgtagtctttgcttgacttttttgggggggattagcaaagcagaaaactggctgctgggttctgtagttttaaaaaatctatatttttagtcataatgagaagtctattttcaccaattatggaaacatacagtggagcaagtaaaccacttattccagctataatattatgaagaacatttcccatgcatctacaagcttgagaaataggattttcacagtggggaagtgggttacaatattggaataggaaaatttgatgctgtaatttgggtcctgtatttttccaaacaactgtgcttcttcagcactaatatttctgggatttaaatagtaatgtttaaattatggtaaatgtaatttaaaacatctcaattaagtctgtctatcaatattgttcttcaagcatgttttagacctagaaaagtatggtttgggggaggctattttattgtgtggttagcacaaggaatctaatttatagcaagtgtgaaatagttaccattttttcctgatctgtcatcttcatagcacaacaaaacgaaatgatggaaatgctcttgagctcacaacatttgtttttcttttaaagtaaatgcaagtaccaaagctcactactgcggtttgcctgtgcctggacaatgaggcggagccactgttgttggggcacccccttccctccccgggtttgcaaatagaggctaccgggtgctgtattcagcaacacctgttttactatttgttattaaactatcatctccaccttccttttgattagcaatttgtactaagaaacgaaacaatgttatttggtggtgtataattctacttttctagtagattactgtgtggaattctgtgaaaaatatttgagaaaaggcctgtattgcataaataaattctttgtatgttgtgaaaaatatttgagaaaaggcctgtattgcataaataaattctttgtatgttgtga

SEQ ID NO: 435070 - DNA, 9651 bp, Homo sapiens
  misc_feature (1651)..(1651): n is a, c, g, or t
  misc_feature (3573)..(3573): n is a, c, g, or t
ccgccttttcctgccctggatctccgccgccacctcggtctcgctgctcctgggcggggggtgaggacgagtccggagtatctggggtttggcgttgttgtcagcctcggggagagagattggacaaatattctccaagaggaggagggcgacgccaaggactttccacatcaactgctttggggtatctccacaagttggaagagggaccctttcgttttgcattgcgtgtgttgtgctcattaccagtgcagcgactgccgtcccagggtgactctgagttgtcctttatcgtgagctagcaatggctagcgaagacaatcgtgtcccttccccgccaccaacaggtgatgacgggggaggtggagggagagaagaaacccctactgaagggggtgcattgtctctgaaaccagggctccccatcaggggcatcagaatgaaatttgccgtgttgaccggtttggttgaagttggagaagtatccaatagggatattgtagaaactgtctttaacctgttggtaggaggacagtttgatctggaaatgaatttcattatccaagaaggtgagagtattaactgcatggtggacctactggaaaaatgtgacattacgtgccaagcagaagtctggagcatgtttacagccattctgaagaaaagcatacggaatcttcaagtctgcactgaagtaggccttgttgaaaaagtgcttgggaaaattgaaaaagttgacaatatgatagcagatcttttggttgacatgttgggagtgctggctagctataatttgacagttcgcgagctaaagcttttcttcagtaaacttcaaggagataaaggacgatggcctccacatgctgggaagttgctgtctgtgttaaagcatatgcctcagaagtatggtcctgatgccttttttaactttccaggaaagagtgctgcagctattgcattacctcctatagccaaatggccataccagaatggttttacatttcatacatggcttagaatggatcctgtaaataacatcaatgtagataaggataaaccatatttgtattgtttcagaaccagcaaaggtcttggctattctgctcattttgttggaggctgtttgattgtaacatcaataaagtcaaaaggaaaaggctttcaacactgtgtgaaatttgatttcaagccacaaaagtggtatatggttaccatagtacacatctataaccgatggaagaatagtgaacttcgatgttatgtgaatggtgagctggcttcctatggagagataacatggtttgtcaacactagcgatacctttgacaaatgtttcctgggctcatcagaaacagcagatgctaatagagtattctgtggtcagatgactgcagtttaccttttcagtgaagctctaaatgcagctcagatatttgctatttatcagttgggcctgggatacaagggtacatttaaattcaaagcagaaagcgaccttttccttgctgagcatcacaaacttttattgtacgatgggaaactctctagtgccattgcattcacgtacaatccacgggctacagatgcccagctttgtcttgaatcatctcctaaggacaacccttcaatttttgttcattcaccacatgcnctcatgctccaggatgtaaaggcagttttaacacattccatccaaagtgcaatgcattcaattggaggagtacaagtactatttccactttttgcacagttggattacaggcaatatttgtctgatgagattgatttgactatatgttcaaccttgctggcctttatcatggaattgttgaagaactcaattgctatgcaggaacagatgcttgcctgtaagggcttcttggtaataggatatagccttgaaaagtcttccaaatctcatgttagcagagcagtacttgaactttgccttgcattttcaaaatatctgagtaatctgcagaatgggatgcccctgctcaagcaattgtgtgatcacgttcttcttaatcctgccatatggattcataccccagccaaggttcaactgatgctctatacttatctgtccacggaattcattggtacagtcaacatatataacaccattcggagagttggaacagtgcttctcatcatgcacacgctgaagtactactactgggcagtgaatcctcaggatcgaagtggtatcaccccaaaaggattagatggaccgcgacctaatcaaaaagaaatgctttctctacgagcattcttgttgatgttcattaagcaattagtgatgaaggattctggagtaaaggaagatgaattacaggccattcttaattacctactgactatgcatgaggatgacaatctaatggatgtcctacagctgcttgttgcattaatgtcagaacaccctaactctatgattcctgcttttgaccaaaggaatgggttacgtgttatctacaaacttctggcatcgaaaagtgaaggaatcagggtacaagctcttaaggcaatgggttattttttaaaacatctggccccaaagaggaaagcagaagtcatgcttggacatggattgttttcattgctagctgaaaggctcatgcttcagacaaatttaatcacaatgaccacatataatgtgctgtttgagattcttatagaacagattggtactcaggtgatacataaacagcatccagatcctgattcttcagtgaagatacaaaaccctcagatactaaaagtaattgcgaccctacttcgaaattctccccagtgcccagagagcatggaggttcgcagagcctttctttctgacatgattaaactttttaataacagtagagaaaacaggaggagcttgctacaatgctctgtgtggcaagaatggatgctttctctctgctattttaatcctaagaattcagatgagcaaaagataacagaaatggtatacgccatattcagaatcctgctttaccatgcagtcaaatatgagtggggtggctggcgtgtatgggtagacactttatcaatcactcattcaaaggtcacttttgaaatacacaaagaaaaccttgccaatatatttagggaacagcaaggaaaagttgatgaagaaatagggctgtgttcttcaacttcagttcaagcagcctctggcattagaagggatattaatgtttcagtaggatcccagcaaccagatacgaaggattctcctgtctgtcctcatttcaccacaaatggtaatgaaaattcaagtatagagaagacaagttcactagaatctgcatctaatattgaactgcaaactactaatacatcttatgaagaaatgaaagctgagcaagaaaatcaggagttaccagatgaaggcactttggaagaaacactgacaaatgagacaaggaatgcagatgatttagaagtatcttctgacataatagaagctgtggctatttcctctaattcttttataacaactggcaaagattcaatgactgtcagtgaagtaactgcttctataagttctccttcagaagaggatgnctcagagatgccagaattcttggataaatctatagtagaggaagaggaagatgatgattatgtggaactgaaagtagaaggcagtcctactgaggaagctaatctacccacagagctccaagataacagtttgtctccagctgcatctgaagccggtgaaaaactggacatgtttggtaatgatgacaaattaatatttcaagaaggaaaacctgttactgaaaagcaaactgatactgaaactcaagattctaaagattctggaattcagactatgacagcatcagggtcttcagctatgtcaccagaaactactgtttcccaaatagctgtagaatcagaccttggtcagatgctggaggaagggaagaaagcaactaacctcactagagaaaccaaattaattaatgattgtcatggtagtgtctctgaggcttcttctgagcaaaagattgcgaagttggatgtttccaatgttgctacagatactgagaggctggagttgaaggccagtcccaacgtggaagcacctcaacctcatcgacatgtgcttgagatatcaaggcaacatgagcagccagggcaaggaatagcaccagatgcagttaatggacaaaggagggattccagatctactgtgtttcgtattcctgagttcaactggtctcagatgcatcaacgtttgctcactgatctattattttcaatagaaacagatatacagatgtggagaagccattcaacaaagacagttatggacttcgtgaatagcagtgataatgtcatctttgtacacaacacaattcatctcatctctcaagtgatggacaatatggtcatggcttgtgggggtatactgccattgctttcagctgctacatcggctacacatgaactggaaaatattgaacctactcaaggcctttcaatagaagcctctgtgacatttttgcagaggctaattagccttgtggatgtgcttatatttgcaagttctcttggctttactgaaattgaagctgaaaaaagtatgtcatctggaggaattttgcggcagtgtctccgactagtttgtgcagtcgcagtaaggaattgcttggagtgtcaacagcattcacaactgaaaactaggggagataaagccttgaaaccaatgcatagccttattcctttagggaaatctgcagcgaagagcccagtggacattgtgactggcggtatatctccagtaagagatcttgacaggcttctacaggacatggatattaatcggcttagggcagttgttttcagagacatagaggatagcaaacaagctcaatttttagccttggcagtagtatactttatctctgttcttatggtctccaagtacagagacattttggaaccccaaaatgaaaggcatagccagtcatgtacagaaactggcagtgaaaatgagaatgtatcactctctgaaatcacaccagcagcattcagcactttaactacggcatcagtggaagaatctgaaagcacatcatctgctcgaaggagggactcaggcattggggaagaaacagccactggtttaggaagccatgtggaagtaactcctcacacagcacctcctggtgtcagtgcaggcccagatgcaatcagcgaggtgctatctactctttctttagaagtcaataagtctccggaaaccaaaaatgatagaggaaatgacttggacactaaggctacaccgtcagtttcagtttcaaaaaacgtcaatgtgaaagacattctccgaagcttggttaacataccagcagatggagtcacagtggatcctgcccttctgccaccagcctgccttggagcccttggtgatctatctgtggaacaacccgtgcagttcagatcttttgacagaagtgtcattgttgcagcaaaaaagtcagcagtctcaccttccacctttaatacaagcatacctaccaatgctgtcagtgtggtttcctcagtagattcagcccaagcctcagatatgggaggagaatcaccaggcagtagatcatctaatgcaaaattgccctcagttccaacagttgattcagtttcacaagatccggtttcaaatatgagtattacagagaggcttgaacacgctttggaaaaggcagctcctctccttcgtgagatttttgtggattttgcaccttttctttctcggacacttttgggtagccatggacaagaactgcttatagaaggaacaagtctggtttgcatgaagtcgagtagttcagttgtggaattggttatgctactgtgttctcaggagtggcaaaattctattcagaagaatgcaggccttgcttttatcgaacttgtcaatgaaggaaggttgcttagccagacaatgaaggatcatctagtaagagtagcaaatgaagctgaatttatcctgagcaggcagagagcagaagatattcacagacatgcggaatttgagtcactgtgtgcccagtattctgcagacaaacgagaagatgagaagatgtgtgatcatttgataagagcagcaaaatatcgtgaccacgtgacagcaactcaactaatccagaaaattatcaacattctcacagacaagcatggagcctggggaaattctgcagtgagtcgtcctcttgagttctggcgccttgactactgggaagatgacttgcggcgccggcgacgatttgtgcgtaaccctctaggatcgacacatcctgaagcgacactaaaaacagccgtggaacatgccacagatgaagatatccttgctaaaggaaaacagtccatcaggagtcaggctttaggaaatcagaactcagaaaacgagatcctcctggaaggcgatgatgatactctgtcatccgtggatgagaaagatttagagaatcttgccggtcctgttagcctgagcacaccagctcagcttgtggccccctctgttgtagtaaagggcactctttctgtcacctcctccgaactctattttgaggtggatgaagaggatcctaacttcaaaaaaatcgaccccaagatcttggcatatacagaagggctgcatggaaaatggctgttcacagagatacgatcaatcttttctcgtcgttatcttttgcaaaatacagccctggagatctttatggcaaacagagttgctgtgatgttcaacttcccagaccctgcaacagtaaagaaagtggttaactatctacctcgtgttggcgttggaacaagttttggattgcctcaaaccagacgtatttcattagctagtccacgtcagctttttaaggcttctaatatgacccagcgatggcaacacagagagatatctaattttgagtacttgatgtttctcaacacgatagcaggacggagttataatgacttaaatcagtatccagtgtttccttgggtcatcactaattatgaatcagaagaactggatcttaccttgcccaccaacttcagagatttgtccaagccaataggagctctgaacccaaaaagagcagcattcttcgctgagcgttatgaatcatgggaagatgatcaagttccaaagtttcactatggtactcattactcaactgcaagttttgttcttgcatggctgctaagaataagccccatcctcccagaggttctgccatgcaagtgagtccattgatgttcacagacaaagcccagcaggatgttatcatggtcctcaagtttccctccaactcccctgttactcacgtggcagccaacacccagcctggtttggcaactcccgctgtgatcacagtcactgctaacaggttatttgcggtgaacaaatggcacaaccttcctgctcatcaaggtgctgtacaagaccagccataccagctgccagtggaaatcgatcctctcatagccagcaatacaggaatgcacaggaggcaaatcactgaccttttagaccaaagtattcaagtgcattcccagtgctttgtcatcacttcagacaaccgctatattctcgtctgtggcttctgggataaaagtttcagagtctattctacagacacaggaagattgatccaagtggtgtttggccattgggatgtcgtcacttgccttgctcgttctgagtcatatattgggggaaattgctacattctctcagggtcacgtgatgcaactcttttgctgtggtattggaatggaaaatgcagtgggattggagataacccaggcagtgagactgctgctcctcgggccattttgaccggccatgactatgaggtcacatgtgctgcggtgtgtgcggagctaggcctggtgttgagtggttcacaagaaggaccatgtctcatacattccatgaatggagacttgttgaggaccttggagggtcctgaaaactgcctgaaaccaaaactcattcaggcttcaagagagggtcattgtgtcatattctatgaaaacggcctcttctgtacattcagtgtgaatggaaaactccaggccacgatggaaacagatgataacataagagccatccagctgagccgagatgggcagtacctgctcacaggaggagacagaggagtggtcgtggtccggcaggtgtcggacctcaagcagctctttgcctatccaggatgtgacgctggaatccgggccatggcgctgtcttacgaccagaggtgcatcatttctggcatggcttcaggaagcattgtgctattttacaacgactttaaccggtggcatcatgaataccaaacccgctactgatggtgacagctgtacatcaactctgcccctaggatgagcagaagtacctggagcatcattctcttctaccacatctgaatgtaacttaaatttgctcaaagaagcaaaatattttttaaagttattaataattgctatttttgtagtctttgcttgacttttttgggggggattagcaaagcagaaaactggctgctgggttctgtagttttaaaaaatctatatttttagtcataatgagaagtctattttcaccaattatggaaacatacagtggagcaagtaaaccacttattccagctataatattatgaagaacatttcccatgcatctacaagcttgagaaataggattttcacagtggggaagtgggttacaatattggaataggaaaatttgatgctgtaatttgggtcctgtatttttccaaacaactgtgcttcttcagcactaatatttctgggatttaaatagtaatgtttaaattatggtaaatgtaatttaaaacatctcaattaagtctgtctatcaatattgttcttcaagcatgttttagacctagaaaagtatggtttgggggaggctattttattgtgtggttagcacaaggaatctaatttatagcaagtgtgaaatagttaccattttttcctgatctgtcatcttcatagcacaacaaaacgaaatgatggaaatgctcttgagctcacaacatttgtttttcttttaaagtaaatgcaagtaccaaagctcactactgcggtttgcctgtgcctggacaatgaggcggagccactgttgttggggcacccccttccctccccgggtttgcaaatagaggctaccgggtgctgtattcagcaacacctgttttactatttgttattaaactatcatctccaccttccttttgattagcaatttgtactaagaaacgaaacaatgttatttggtggtgtataattctacttttctagtagattactgtgtggaattctgtgaaaaatatttgagaaaaggcctgtattgcataaataaattctttgtatgttgtgaactttgatctctatttctcttgcaacagacttcaagtggtccctctttttttcctacacactcagctcttctctaaaagcaaggatttggaatgaacaattcagtttgacagaaaaagctgaataaaatggcatctgtaattgaattgttggaaatgcctgttttgctcctaaattttaaacatcatcattaataaaataatgattcacaaagaaagaaaaaaaaaa

SEQ ID NO: 435071 - DNA, 9669 bp, Homo sapiens
  misc_feature (1651)..(1651): n is a, c, g, or t
  misc_feature (3573)..(3573): n is a, c, g, or t
ccgccttttcctgccctggatctccgccgccacctcggtctcgctgctcctgggcggggggtgaggacgagtccggagtatctggggtttggcgttgttgtcagcctcggggagagagattggacaaatattctccaagaggaggagggcgacgccaaggactttccacatcaactgctttggggtatctccacaagttggaagagggaccctttcgttttgcattgcgtgtgttgtgctcattaccagtgcagcgactgccgtcccagggtgactctgagttgtcctttatcgtgagctagcaatggctagcgaagacaatcgtgtcccttccccgccaccaacaggtgatgacgggggaggtggagggagagaagaaacccctactgaagggggtgcattgtctctgaaaccagggctccccatcaggggcatcagaatgaaatttgccgtgttgaccggtttggttgaagttggagaagtatccaatagggatattgtagaaactgtctttaacctgttggtaggaggacagtttgatctggaaatgaatttcattatccaagaaggtgagagtattaactgcatggtggacctactggaaaaatgtgacattacgtgccaagcagaagtctggagcatgtttacagccattctgaagaaaagcatacggaatcttcaagtctgcactgaagtaggccttgttgaaaaagtgcttgggaaaattgaaaaagttgacaatatgatagcagatcttttggttgacatgttgggagtgctggctagctataatttgacagttcgcgagctaaagcttttcttcagtaaacttcaaggagataaaggacgatggcctccacatgctgggaagttgctgtctgtgttaaagcatatgcctcagaagtatggtcctgatgccttttttaactttccaggaaagagtgctgcagctattgcattacctcctatagccaaatggccataccagaatggttttacatttcatacatggcttagaatggatcctgtaaataacatcaatgtagataaggataaaccatatttgtattgtttcagaaccagcaaaggtcttggctattctgctcattttgttggaggctgtttgattgtaacatcaataaagtcaaaaggaaaaggctttcaacactgtgtgaaatttgatttcaagccacaaaagtggtatatggttaccatagtacacatctataaccgatggaagaatagtgaacttcgatgttatgtgaatggtgagctggcttcctatggagagataacatggtttgtcaacactagcgatacctttgacaaatgtttcctgggctcatcagaaacagcagatgctaatagagtattctgtggtcagatgactgcagtttaccttttcagtgaagctctaaatgcagctcagatatttgctatttatcagttgggcctgggatacaagggtacatttaaattcaaagcagaaagcgaccttttccttgctgagcatcacaaacttttattgtacgatgggaaactctctagtgccattgcattcacgtacaatccacgggctacagatgcccagctttgtcttgaatcatctcctaaggacaacccttcaatttttgttcattcaccacatgcnctcatgctccaggatgtaaaggcagttttaacacattccatccaaagtgcaatgcattcaattggaggagtacaagtactatttccactttttgcacagttggattacaggcaatatttgtctgatgagattgatttgactatatgttcaaccttgctggcctttatcatggaattgttgaagaactcaattgctatgcaggaacagatgcttgcctgtaagggcttcttggtaataggatatagccttgaaaagtcttccaaatctcatgttagcagagcagtacttgaactttgccttgcattttcaaaatatctgagtaatctgcagaatgggatgcccctgctcaagcaattgtgtgatcacgttcttcttaatcctgccatatggattcataccccagccaaggttcaactgatgctctatacttatctgtccacggaattcattggtacagtcaacatatataacaccattcggagagttggaacagtgcttctcatcatgcacacgctgaagtactactactgggcagtgaatcctcaggatcgaagtggtatcaccccaaaaggattagatggaccgcgacctaatcaaaaagaaatgctttctctacgagcattcttgttgatgttcattaagcaattagtgatgaaggattctggagtaaaggaagatgaattacaggccattcttaattacctactgactatgcatgaggatgacaatctaatggatgtcctacagctgcttgttgcattaatgtcagaacaccctaactctatgattcctgcttttgaccaaaggaatgggttacgtgttatctacaaacttctggcatcgaaaagtgaaggaatcagggtacaagctcttaaggcaatgggttattttttaaaacatctggccccaaagaggaaagcagaagtcatgcttggacatggattgttttcattgctagctgaaaggctcatgcttcagacaaatttaatcacaatgaccacatataatgtgctgtttgagattcttatagaacagattggtactcaggtgatacataaacagcatccagatcctgattcttcagtgaagatacaaaaccctcagatactaaaagtaattgcgaccctacttcgaaattctccccagtgcccagagagcatggaggttcgcagagcctttctttctgacatgattaaactttttaataacagtagagaaaacaggaggagcttgctacaatgctctgtgtggcaagaatggatgctttctctctgctattttaatcctaagaattcagatgagcaaaagataacagaaatggtatacgccatattcagaatcctgctttaccatgcagtcaaatatgagtggggtggctggcgtgtatgggtagacactttatcaatcactcattcaaaggtcacttttgaaatacacaaagaaaaccttgccaatatatttagggaacagcaaggaaaagttgatgaagaaatagggctgtgttcttcaacttcagttcaagcagcctctggcattagaagggatattaatgtttcagtaggatcccagcaaccagatacgaaggattctcctgtctgtcctcatttcaccacaaatggtaatgaaaattcaagtatagagaagacaagttcactagaatctgcatctaatattgaactgcaaactactaatacatcttatgaagaaatgaaagctgagcaagaaaatcaggagttaccagatgaaggcactttggaagaaacactgacaaatgagacaaggaatgcagatgatttagaagtatcttctgacataatagaagctgtggctatttcctctaattcttttataacaactggcaaagattcaatgactgtcagtgaagtaactgcttctataagttctccttcagaagaggatgnctcagagatgccagaattcttggataaatctatagtagaggaagaggaagatgatgattatgtggaactgaaagtagaaggcagtcctactgaggaagctaatctacccacagagctccaagataacagtttgtctccagctgcatctgaagccggtgaaaaactggacatgtttggtaatgatgacaaattaatatttcaagaaggaaaacctgttactgaaaagcaaactgatactgaaactcaagattctaaagattctggaattcagactatgacagcatcagggtcttcagctatgtcaccagaaactactgtttcccaaatagctgtagaatcagaccttggtcagatgctggaggaagggaagaaagcaactaacctcactagagaaaccaaattaattaatgattgtcatggtagtgtctctgaggcttcttctgagcaaaagattgcgaagttggatgtttccaatgttgctacagatactgagaggctggagttgaaggccagtcccaacgtggaagcacctcaacctcatcgacatgtgcttgagatatcaaggcaacatgagcagccagggcaaggaatagcaccagatgcagttaatggacaaaggagggattccagatctactgtgtttcgtattcctgagttcaactggtctcagatgcatcaacgtttgctcactgatctattattttcaatagaaacagatatacagatgtggagaagccattcaacaaagacagttatggacttcgtgaatagcagtgataatgtcatctttgtacacaacacaattcatctcatctctcaagtgatggacaatatggtcatggcttgtgggggtatactgccattgctttcagctgctacatcggctacacatgaactggaaaatattgaacctactcaaggcctttcaatagaagcctctgtgacatttttgcagaggctaattagccttgtggatgtgcttatatttgcaagttctcttggctttactgaaattgaagctgaaaaaagtatgtcatctggaggaattttgcggcagtgtctccgactagtttgtgcagtcgcagtaaggaattgcttggagtgtcaacagcattcacaactgaaaactaggggagataaagccttgaaaccaatgcatagccttattcctttagggaaatctgcagcgaagagcccagtggacattgtgactggcggtatatctccagtaagagatcttgacaggcttctacaggacatggatattaatcggcttagggcagttgttttcagagacatagaggatagcaaacaagctcaatttttagccttggcagtagtatactttatctctgttcttatggtctccaagtacagagacattttggaaccccaaaatgaaaggcatagccagtcatgtacagaaactggcagtgaaaatgagaatgtatcactctctgaaatcacaccagcagcattcagcactttaactacggcatcagtggaagaatctgaaagcacatcatctgctcgaaggagggactcaggcattggggaagaaacagccactggtttaggaagccatgtggaagtaactcctcacacagcacctcctggtgtcagtgcaggcccagatgcaatcagcgaggtgctatctactctttctttagaagtcaataagtctccggaaaccaaaaatgatagaggaaatgacttggacactaaggctacaccgtcagtttcagtttcaaaaaacgtcaatgtgaaagacattctccgaagcttggttaacataccagcagatggagtcacagtggatcctgcccttctgccaccagcctgccttggagcccttggtgatctatctgtggaacaacccgtgcagttcagatcttttgacagaagtgtcattgttgcagcaaaaaagtcagcagtctcaccttccacctttaatacaagcatacctaccaatgctgtcagtgtggtttcctcagtagattcagcccaagcctcagatatgggaggagaatcaccaggcagtagatcatctaatgcaaaattgccctcagttccaacagttgattcagtttcacaagatccggtttcaaatatgagtattacagagaggcttgaacacgctttggaaaaggcagctcctctccttcgtgagatttttgtggattttgcaccttttctttctcggacacttttgggtagccatggacaagaactgcttatagaaggaacaagtctggtttgcatgaagtcgagtagttcagttgtggaattggttatgctactgtgttctcaggagtggcaaaattctattcagaagaatgcaggccttgcttttatcgaacttgtcaatgaaggaaggttgcttagccagacaatgaaggatcatctagtaagagtagcaaatgaagctgaatttatcctgagcaggcagagagcagaagatattcacagacatgcggaatttgagtcactgtgtgcccagtattctgcagacaaacgagaagatgagaagatgtgtgatcatttgataagagcagcaaaatatcgtgaccacgtgacagcaactcaactaatccagaaaattatcaacattctcacagacaagcatggagcctggggaaattctgcagtgagtcgtcctcttgagttctggcgccttgactactgggaagatgacttgcggcgccggcgacgatttgtgcgtaaccctctaggatcgacacatcctgaagcgacactaaaaacagccgtggaacatgccacagatgaagatatccttgctaaaggaaaacagtccatcaggagtcaggctttaggaaatcagaactcagaaaacgagatcctcctggaaggcgatgatgatactctgtcatccgtggatgagaaagatttagagaatcttgccggtcctgttagcctgagcacaccagctcagcttgtggccccctctgttgtagtaaagggcactctttctgtcacctcctccgaactctattttgaggtggatgaagaggatcctaacttcaaaaaaatcgaccccaagatcttggcatatacagaagggctgcatggaaaatggctgttcacagagatacgatcaatcttttctcgtcgttatcttttgcaaaatacagccctggagatctttatggcaaacagagttgctgtgatgttcaacttcccagaccctgcaacagtaaagaaagtggttaactatctacctcgtgttggcgttggaacaagttttggattgcctcaaaccagacgtatttcattagctagtccacgtcagctttttaaggcttctaatatgacccagcgatggcaacacagagagatatctaattttgagtacttgatgtttctcaacacgatagcaggacggagttataatgacttaaatcagtatccagtgtttccttgggtcatcactaattatgaatcagaagaactggatcttaccttgcccaccaacttcagagatttgtccaagccaataggagctctgaacccaaaaagagcagcattcttcgctgagcgttatgaatcatgggaagatgatcaagttccaaagtttcactatggtactcattactcaactgcaagttttgttcttgcatggctgctaagaataagccccatcctcccagaggttctgccatgcaagtgagtccattgatgttcacagacaaagcccagcaggatgttatcatggtcctcaagtttccctccaactcccctgttactcacgtggcagccaacacccagcctggtttggcaactcccgctgtgatcacagtcactgctaacaggttatttgcggtgaacaaatggcacaaccttcctgctcatcaaggtgctgtacaagaccagccataccagctgccagtggaaatcgatcctctcatagccagcaatacaggaatgcacaggaggcaaatcactgaccttttagaccaaagtattcaagtgcattcccagtgctttgtcatcacttcagacaaccgctatattctcgtctgtggcttctgggataaaagtttcagagtctattctacagacacaggaagattgatccaagtggtgtttggccattgggatgtcgtcacttgccttgctcgttctgagtcatatattgggggaaattgctacattctctcagggtcacgtgatgcaactcttttgctgtggtattggaatggaaaatgcagtgggattggagataacccaggcagtgagactgctgctcctcgggccattttgaccggccatgactatgaggtcacatgtgctgcggtgtgtgcggagctaggcctggtgttgagtggttcacaagaaggaccatgtctcatacattccatgaatggagacttgttgaggaccttggagggtcctgaaaactgcctgaaaccaaaactcattcaggcttcaagagagggtcattgtgtcatattctatgaaaacggcctcttctgtacattcagtgtgaatggaaaactccaggccacgatggaaacagatgataacataagagccatccagctgagccgagatgggcagtacctgctcacaggaggagacagaggagtggtcgtggtccggcaggtgtcggacctcaagcagctctttgcctatccaggatgtgacgctggaatccgggccatggcgctgtcttacgaccagaggtgcatcatttctggcatggcttcaggaagcattgtgctattttacaacgactttaaccggtggcatcatgaataccaaacccgctactgatggtgacagctgtacatcaactctgcccctaggatgagcagaagtacctggagcatcattctcttctaccacatctgaatgtaacttaaatttgctcaaagaagcaaaatattttttaaagttattaataattgctatttttgtagtctttgcttgacttttttgggggggattagcaaagcagaaaactggctgctgggttctgtagttttaaaaaatctatatttttagtcataatgagaagtctattttcaccaattatggaaacatacagtggagcaagtaaaccacttattccagctataatattatgaagaacatttcccatgcatctacaagcttgagaaataggattttcacagtggggaagtgggttacaatattggaataggaaaatttgatgctgtaatttgggtcctgtatttttccaaacaactgtgcttcttcagcactaatatttctgggatttaaatagtaatgtttaaattatggtaaatgtaatttaaaacatctcaattaagtctgtctatcaatattgttcttcaagcatgttttagacctagaaaagtatggtttgggggaggctattttattgtgtggttagcacaaggaatctaatttatagcaagtgtgaaatagttaccattttttcctgatctgtcatcttcatagcacaacaaaacgaaatgatggaaatgctcttgagctcacaacatttgtttttcttttaaagtaaatgcaagtaccaaagctcactactgcggtttgcctgtgcctggacaatgaggcggagccactgttgttggggcacccccttccctccccgggtttgcaaatagaggctaccgggtgctgtattcagcaacacctgttttactatttgttattaaactatcatctccaccttccttttgattagcaatttgtactaagaaacgaaacaatgttatttggtggtgtataattctacttttctagtagattactgtgtggaattctgtgaaaaatatttgagaaaaggcctgtattgcataaataaattctttgtatgttgtgaactttgatctctatttctcttgcaacagacttcaagtggtccctctttttttcctacacactcagctcttctctaaaagcaaggatttggaatgaacaattcagtttgacagaaaaagctgaataaaatggcatctgtaattgaattgttggaaatgcctgttttgctcctaaattttaaacatcaggtgttgctgaatacagcacccggtagcctctatttgcaacccggggagtgcagtatct

SEQ ID NO: 435072 - DNA, 9934 bp, Homo sapiens
  misc_feature (1651)..(1651): n is a, c, g, or t
  misc_feature (3573)..(3573): n is a, c, g, or t
ccgccttttcctgccctggatctccgccgccacctcggtctcgctgctcctgggcggggggtgaggacgagtccggagtatctggggtttggcgttgttgtcagcctcggggagagagattggacaaatattctccaagaggaggagggcgacgccaaggactttccacatcaactgctttggggtatctccacaagttggaagagggaccctttcgttttgcattgcgtgtgttgtgctcattaccagtgcagcgactgccgtcccagggtgactctgagttgtcctttatcgtgagctagcaatggctagcgaagacaatcgtgtcccttccccgccaccaacaggtgatgacgggggaggtggagggagagaagaaacccctactgaagggggtgcattgtctctgaaaccagggctccccatcaggggcatcagaatgaaatttgccgtgttgaccggtttggttgaagttggagaagtatccaatagggatattgtagaaactgtctttaacctgttggtaggaggacagtttgatctggaaatgaatttcattatccaagaaggtgagagtattaactgcatggtggacctactggaaaaatgtgacattacgtgccaagcagaagtctggagcatgtttacagccattctgaagaaaagcatacggaatcttcaagtctgcactgaagtaggccttgttgaaaaagtgcttgggaaaattgaaaaagttgacaatatgatagcagatcttttggttgacatgttgggagtgctggctagctataatttgacagttcgcgagctaaagcttttcttcagtaaacttcaaggagataaaggacgatggcctccacatgctgggaagttgctgtctgtgttaaagcatatgcctcagaagtatggtcctgatgccttttttaactttccaggaaagagtgctgcagctattgcattacctcctatagccaaatggccataccagaatggttttacatttcatacatggcttagaatggatcctgtaaataacatcaatgtagataaggataaaccatatttgtattgtttcagaaccagcaaaggtcttggctattctgctcattttgttggaggctgtttgattgtaacatcaataaagtcaaaaggaaaaggctttcaacactgtgtgaaatttgatttcaagccacaaaagtggtatatggttaccatagtacacatctataaccgatggaagaatagtgaacttcgatgttatgtgaatggtgagctggcttcctatggagagataacatggtttgtcaacactagcgatacctttgacaaatgtttcctgggctcatcagaaacagcagatgctaatagagtattctgtggtcagatgactgcagtttaccttttcagtgaagctctaaatgcagctcagatatttgctatttatcagttgggcctgggatacaagggtacatttaaattcaaagcagaaagcgaccttttccttgctgagcatcacaaacttttattgtacgatgggaaactctctagtgccattgcattcacgtacaatccacgggctacagatgcccagctttgtcttgaatcatctcctaaggacaacccttcaatttttgttcattcaccacatgcnctcatgctccaggatgtaaaggcagttttaacacattccatccaaagtgcaatgcattcaattggaggagtacaagtactatttccactttttgcacagttggattacaggcaatatttgtctgatgagattgatttgactatatgttcaaccttgctggcctttatcatggaattgttgaagaactcaattgctatgcaggaacagatgcttgcctgtaagggcttcttggtaataggatatagccttgaaaagtcttccaaatctcatgttagcagagcagtacttgaactttgccttgcattttcaaaatatctgagtaatctgcagaatgggatgcccctgctcaagcaattgtgtgatcacgttcttcttaatcctgccatatggattcataccccagccaaggttcaactgatgctctatacttatctgtccacggaattcattggtacagtcaacatatataacaccattcggagagttggaacagtgcttctcatcatgcacacgctgaagtactactactgggcagtgaatcctcaggatcgaagtggtatcaccccaaaaggattagatggaccgcgacctaatcaaaaagaaatgctttctctacgagcattcttgttgatgttcattaagcaattagtgatgaaggattctggagtaaaggaagatgaattacaggccattcttaattacctactgactatgcatgaggatgacaatctaatggatgtcctacagctgcttgttgcattaatgtcagaacaccctaactctatgattcctgcttttgaccaaaggaatgggttacgtgttatctacaaacttctggcatcgaaaagtgaaggaatcagggtacaagctcttaaggcaatgggttattttttaaaacatctggccccaaagaggaaagcagaagtcatgcttggacatggattgttttcattgctagctgaaaggctcatgcttcagacaaatttaatcacaatgaccacatataatgtgctgtttgagattcttatagaacagattggtactcaggtgatacataaacagcatccagatcctgattcttcagtgaagatacaaaaccctcagatactaaaagtaattgcgaccctacttcgaaattctccccagtgcccagagagcatggaggttcgcagagcctttctttctgacatgattaaactttttaataacagtagagaaaacaggaggagcttgctacaatgctctgtgtggcaagaatggatgctttctctctgctattttaatcctaagaattcagatgagcaaaagataacagaaatggtatacgccatattcagaatcctgctttaccatgcagtcaaatatgagtggggtggctggcgtgtatgggtagacactttatcaatcactcattcaaaggtcacttttgaaatacacaaagaaaaccttgccaatatatttagggaacagcaaggaaaagttgatgaagaaatagggctgtgttcttcaacttcagttcaagcagcctctggcattagaagggatattaatgtttcagtaggatcccagcaaccagatacgaaggattctcctgtctgtcctcatttcaccacaaatggtaatgaaaattcaagtatagagaagacaagttcactagaatctgcatctaatattgaactgcaaactactaatacatcttatgaagaaatgaaagctgagcaagaaaatcaggagttaccagatgaaggcactttggaagaaacactgacaaatgagacaaggaatgcagatgatttagaagtatcttctgacataatagaagctgtggctatttcctctaattcttttataacaactggcaaagattcaatgactgtcagtgaagtaactgcttctataagttctccttcagaagaggatgnctcagagatgccagaattcttggataaatctatagtagaggaagaggaagatgatgattatgtggaactgaaagtagaaggcagtcctactgaggaagctaatctacccacagagctccaagataacagtttgtctccagctgcatctgaagccggtgaaaaactggacatgtttggtaatgatgacaaattaatatttcaagaaggaaaacctgttactgaaaagcaaactgatactgaaactcaagattctaaagattctggaattcagactatgacagcatcagggtcttcagctatgtcaccagaaactactgtttcccaaatagctgtagaatcagaccttggtcagatgctggaggaagggaagaaagcaactaacctcactagagaaaccaaattaattaatgattgtcatggtagtgtctctgaggcttcttctgagcaaaagattgcgaagttggatgtttccaatgttgctacagatactgagaggctggagttgaaggccagtcccaacgtggaagcacctcaacctcatcgacatgtgcttgagatatcaaggcaacatgagcagccagggcaaggaatagcaccagatgcagttaatggacaaaggagggattccagatctactgtgtttcgtattcctgagttcaactggtctcagatgcatcaacgtttgctcactgatctattattttcaatagaaacagatatacagatgtggagaagccattcaacaaagacagttatggacttcgtgaatagcagtgataatgtcatctttgtacacaacacaattcatctcatctctcaagtgatggacaatatggtcatggcttgtgggggtatactgccattgctttcagctgctacatcggctacacatgaactggaaaatattgaacctactcaaggcctttcaatagaagcctctgtgacatttttgcagaggctaattagccttgtggatgtgcttatatttgcaagttctcttggctttactgaaattgaagctgaaaaaagtatgtcatctggaggaattttgcggcagtgtctccgactagtttgtgcagtcgcagtaaggaattgcttggagtgtcaacagcattcacaactgaaaactaggggagataaagccttgaaaccaatgcatagccttattcctttagggaaatctgcagcgaagagcccagtggacattgtgactggcggtatatctccagtaagagatcttgacaggcttctacaggacatggatattaatcggcttagggcagttgttttcagagacatagaggatagcaaacaagctcaatttttagccttggcagtagtatactttatctctgttcttatggtctccaagtacagagacattttggaaccccaaaatgaaaggcatagccagtcatgtacagaaactggcagtgaaaatgagaatgtatcactctctgaaatcacaccagcagcattcagcactttaactacggcatcagtggaagaatctgaaagcacatcatctgctcgaaggagggactcaggcattggggaagaaacagccactggtttaggaagccatgtggaagtaactcctcacacagcacctcctggtgtcagtgcaggcccagatgcaatcagcgaggtgctatctactctttctttagaagtcaataagtctccggaaaccaaaaatgatagaggaaatgacttggacactaaggctacaccgtcagtttcagtttcaaaaaacgtcaatgtgaaagacattctccgaagcttggttaacataccagcagatggagtcacagtggatcctgcccttctgccaccagcctgccttggagcccttggtgatctatctgtggaacaacccgtgcagttcagatcttttgacagaagtgtcattgttgcagcaaaaaagtcagcagtctcaccttccacctttaatacaagcatacctaccaatgctgtcagtgtggtttcctcagtagattcagcccaagcctcagatatgggaggagaatcaccaggcagtagatcatctaatgcaaaattgccctcagttccaacagttgattcagtttcacaagatccggtttcaaatatgagtattacagagaggcttgaacacgctttggaaaaggcagctcctctccttcgtgagatttttgtggattttgcaccttttctttctcggacacttttgggtagccatggacaagaactgcttatagaaggaacaagtctggtttgcatgaagtcgagtagttcagttgtggaattggttatgctactgtgttctcaggagtggcaaaattctattcagaagaatgcaggccttgcttttatcgaacttgtcaatgaaggaaggttgcttagccagacaatgaaggatcatctagtaagagtagcaaatgaagctgaatttatcctgagcaggcagagagcagaagatattcacagacatgcggaatttgagtcactgtgtgcccagtattctgcagacaaacgagaagatgagaagatgtgtgatcatttgataagagcagcaaaatatcgtgaccacgtgacagcaactcaactaatccagaaaattatcaacattctcacagacaagcatggagcctggggaaattctgcagtgagtcgtcctcttgagttctggcgccttgactactgggaagatgacttgcggcgccggcgacgatttgtgcgtaaccctctaggatcgacacatcctgaagcgacactaaaaacagccgtggaacatgccacagatgaagatatccttgctaaaggaaaacagtccatcaggagtcaggctttaggaaatcagaactcagaaaacgagatcctcctggaaggcgatgatgatactctgtcatccgtggatgagaaagatttagagaatcttgccggtcctgttagcctgagcacaccagctcagcttgtggccccctctgttgtagtaaagggcactctttctgtcacctcctccgaactctattttgaggtggatgaagaggatcctaacttcaaaaaaatcgaccccaagatcttggcatatacagaagggctgcatggaaaatggctgttcacagagatacgatcaatcttttctcgtcgttatcttttgcaaaatacagccctggagatctttatggcaaacagagttgctgtgatgttcaacttcccagaccctgcaacagtaaagaaagtggttaactatctacctcgtgttggcgttggaacaagttttggattgcctcaaaccagacgtatttcattagctagtccacgtcagctttttaaggcttctaatatgacccagcgatggcaacacagagagatatctaattttgagtacttgatgtttctcaacacgatagcaggacggagttataatgacttaaatcagtatccagtgtttccttgggtcatcactaattatgaatcagaagaactggatcttaccttgcccaccaacttcagagatttgtccaagccaataggagctctgaacccaaaaagagcagcattcttcgctgagcgttatgaatcatgggaagatgatcaagttccaaagtttcactatggtactcattactcaactgcaagttttgttcttgcatggctgctaagaatagaaccctttacaacttatttcctaaatttgcaaggaggcaaatttgatcatgcagatcgaactttttcatcaatttccagagcttggcgaaacagtcagcgtgatacctctgatattaaggagttgatccctgaattttattatctccctgagatgtttgtcaacttcaataattataatcttggagtgatggatgatgggacagtagtgtctgatgtcgaacttcctccttgggccaaaacctcagaagaatttgttcacataaacagattggccctggagagtgaatttgtttcctgccagcttcaccaatggattgatctcatttttggctataaacagcaaggaccagaagctgtccgagccctcaatgtgttctattacttgacctatgaaggagctgtcaatctgaattcaataactgatcctgtgttgagagaggctgttgaagctcaaatccgaagttttggacagactccttctcaactactcatagagccccatcctcccagaggttctgccatgcaagtgagtccattgatgttcacagacaaagcccagcaggatgttatcatggtcctcaagtttccctccaactcccctgttactcacgtggcagccaacacccagcctggtttggcaactcccgctgtgatcacagtcactgctaacaggttatttgcggtgaacaaatggcacaaccttcctgctcatcaaggtgctgtacaagaccagccataccagctgccagtggaaatcgatcctctcatagccagcaatacaggaatgcacaggaggcaaatcactgaccttttagaccaaagtattcaagtgcattcccagtgctttgtcatcacttcagacaaccgctatattctcgtctgtggcttctgggataaaagtttcagagtctattctacagacacaggaagattgatccaagtggtgtttggccattgggatgtcgtcacttgccttgctcgttctgagtcatatattgggggaaattgctacattctctcagggtcacgtgatgcaactcttttgctgtggtattggaatggaaaatgcagtgggattggagataacccaggcagtgagactgctgctcctcgggccattttgaccggccatgactatgaggtcacatgtgctgcggtgtgtgcggagctaggcctggtgttgagtggttcacaagaaggaccatgtctcatacattccatgaatggagacttgttgaggaccttggagggtcctgaaaactgcctgaaaccaaaactcattcaggcttcaagagagggtcattgtgtcatattctatgaaaacggcctcttctgtacattcagtgtgaatgggccatccagctgagccgagatgggcagtacctgctcacaggaggagacagaggagtggtcgtggtccggcaggtgtcggacctcaagcagctctttgcctatccaggatgtgacgctggaatccgggccatggcgctgtcttacgaccagaggtgcatcatttctggcatggcttcaggaagcattgtgctattttacaacgactttaaccggtggcatcatgaataccaaacccgctactgatggtgacagctgtacatcaactctgcccctaggatgagcagaagtacctggagcatcattctcttctaccacatctgaatgtaacttaaatttgctcaaagaagcaaaatattttttaaagttattaataattgctatttttgtagtctttgcttgacttttttgggggggattagcaaagcagaaaactggctgctgggttctgtagttttaaaaaatctatatttttagtcataatgagaagtctattttcaccaattatggaaacatacagtggagcaagtaaaccacttattccagctataatattatgaagaacatttcccatgcatctacaagcttgagaaataggattttcacagtggggaagtgggttacaatattggaataggaaaatttgatgctgtaatttgggtcctgtatttttccaaacaactgtgcttcttcagcactaatatttctgggatttaaatagtaatgtttaaattatggtaaatgtaatttaaaacatctcaattaagtctgtctatcaatattgttcttcaagcatgttttagacctagaaaagtatggtttgggggaggctattttattgtgtggttagcacaaggaatctaatttatagcaagtgtgaaatagttaccattttttcctgatctgtcatcttcatagcacaacaaaacgaaatgatggaaatgctcttgagctcacaacatttgtttttcttttaaagtaaatgcaagtaccaaagctcactactgcggtttgcctgtgcctggacaatgaggcggagccactgttgttggggcacccccttccctccccgggtttgcaaatagaggctaccgggtgctgtattcagcaacacctgttttactatttgttattaaactatcatctccaccttccttttgattagcaatttgtactaagaaacgaaacaatgttatttggtggtgtataattctacttttctagtagattactgtgtggaattctgtgaaaaatatttgagaaaaggcctgtattgcataaataaattctttgtatgttgtgaaaaatatttgagaaaaggcctgtattgcataaataaattctttgtatgttgtga

SEQ ID NO: 435073 - DNA, 3648 bp, Homo sapiens
cgagctcggcacccgaagatcatcgtggaattggttatgctactgtgttctcaggagtggcaaaattctattcagaagaatgcaggccttgcttttatcgaacttgtcaatgaaggaaggttgcttagccagacaatgaaggatcatctagtaagagtagcaaatgaagctgaatttatcctgagcaggcagagagcagaagatattcacagacatgcggaatttgagtcactgtgtgcccagtattctgcagacaaacgagaagatgagaagatgtgtgatcatttgataagagcagcaaaatatcgtgaccacgtgacagcaactcaactaatccagaaaattatcaacattctcacagacaagcatggagcctggggaaattctgcagtgagtcgtcctcttgagttctggcgccttgactactgggaagatgacttgcggcgccggcgacgatttgtgcgtaaccctctaggatcgacacatcctgaagcgacactaaaaacagccgtggaacatgccacagatgaagatatccttgctaaaggaaaacagtccatcaggagtcaggctttaggaaatcagaactcagaaaacgagatcctcctggaaggcgatgatgatactctgtcatccgtggatgagaaagatttagagaatcttgccggtcctgttagcctgagcacaccagctcagcttgtggccccctctgttgtagtaaagggcactctttctgtcacctcctccgaactctattttgaggtggatgaagaggatcctaacttcaaaaaaatcgaccccaagatcttggcatatacagaagggctgcatggaaaatggctgttcacagagatacgatcaatcttttctcgtcgttatcttttgcaaaatacagccctggagatctttatggcaaacagagttgctgtgatgttcaacttcccagaccctgcaacagtaaagaaagtggttaactatctacctcgtgttggcgttggaacaagttttggattgcctcaaaccagacgtatttcattagctagtccacgtcagctttttaaggcttctaatatgacccagcgatggcaacacagagagatatctaattttgagtacttgatgtttctcaacacgatagcaggacggagttataatgacttaaatcagtatccagtgtttccttgggtcatcactaattatgaatcagaagaactggatcttaccttgcccaccaacttcagagatttgtccaagccaataggagctctgaacccaaaaagagcagcattcttcgctgagcgttatgaatcatgggaagatgatcaagttccaaagtttcactatggtactcattactcaactgcaagttttgttcttgcatggctgctaagaataagccccatcctcccagaggttctgccatgcaagtgagtccattgatgttcacagacaaagcccagcaggatgttatcatggtcctcaagtttccctccaactcccctgttactcacgtggcagccaacacccagcctggtttggcaactcccgctgtgatcacagtcactgctaacaggttatttgcggtgaacaaatggcacaaccttcctgctcatcaaggtgctgtacaagaccagccataccagctgccagtggaaatcgatcctctcatagccagcaatacaggaatgcacaggaggcaaatcactgaccttttagaccaaagtattcaagtgcattcccagtgctttgtcatcacttcagacaaccgctatattctcgtctgtggcttctgggataaaagtttcagagtctattctacagacacaggaagattgatccaagtggtgtttggccattgggatgtcgtcacttgccttgctcgttctgagtcatatattgggggaaattgctacattctctcagggtcacgtgatgcaactcttttgctgtggtattggaatggaaaatgcagtgggattggagataacccaggcagtgagactgctgctcctcgggccattttgaccggccatgactatgaggtcacatgtgctgcggtgtgtgcggagctaggcctggtgttgagtggttcacaagaaggaccatgtctcatacattccatgaatggagacttgttgaggaccttggagggtcctgaaaactgcctgaaaccaaaactcattcaggcttcaagagagggtcattgtgtcatattctatgaaaacggcctcttctgtacattcagtgtgaatggaaaactccaggccacgatggaaacagatgataacataagagccatccagctgagccgagatgggcagtacctgctcacaggaggagacagaggagtggtcgtggtccggcaggtgtcggacctcaagcagctctttgcctatccaggatgtgacgctggaatccgggccatggcgctgtcttacgaccagaggtgcatcatttctggcatggcttcaggaagcattgtgctattttacaacgactttaaccggtggcatcatgaataccaaacccgctactgatggtgacagctgtacatcaactctgcccctaggatgagcagaagtacctggagcatcattctcttctaccacatctgaatgtaacttaaatttgctcaaagaagcaaaatattttttaaagttattaataattgctatttttgtagtctttgcttgacttttttgggggggattagcaaagcagaaaactggctgctgggttctgtagttttaaaaaatctatatttttagtcataatgagaagtctattttcaccaattatggaaacatacagtggagcaagtaaaccacttattccagctataatattatgaagaacatttcccatgcatctacaagcttgagaaataggattttcacagtggggaagtgggttacaatattggaataggaaaatttgatgctgtaatttgggtcctgtatttttccaaacaactgtgcttcttcagcactaatatttctgggatttaaatagtaatgtttaaattatggtaaatgtaatttaaaacatctcaattaagtctgtctatcaatattgttcttcaagcatgttttagacctagaaaagtatggtttgggggaggctattttattgtgtggttagcacaaggaatctaatttatagcaagtgtgaaatagttaccattttttcctgatctgtcatcttcatagcacaacaaaacgaaatgatggaaatgctcttgagctcacaacatttgtttttcttttaaagtaaatgcaagtaccaaagctcactactgcggtttgcctgtgcctggacaatgaggcggagccactgttgttggggcacccccttccctccccgggtttgcaaatagaggctaccgggtgctgtattcagcaacacctgttttactatttgttattaaactatcatctccaccttccttttgattagcaatttgtactaagaaacgaaacaatgttatttggtggtgtataattctacttttctagtagattactgtgtggaattctgtgaaaaatatttgagaaaaggcctgtattgcataaataaattctttgtatgttgtgaaaaatatttgagaaaaggcctgtattgcataaataaattctttgtatgttgtga

SEQ ID NO: 435074 - DNA, 2916 bp, Homo sapiens
agcggagaaaaatggtgcccagatagcacagagggaatgtgagggaaagcggagaaaattaaggagataatgatcttggcatatacagaagggctgcatggaaaatggctgttcacagagatacgatcaatcttttctcgtcgttatcttttgcaaaatacagccctggagatctttatggcaaacagagttgctgtgatgttcaacttcccagaccctgcaacagtaaagaaagtggttaactatctacctcgtgttggcgttggaacaagttttggattgcctcaaaccagacgtatttcattagctagtccacgtcagctttttaaggcttctaatatgacccagcgatggcaacacagagagatatctaattttgagtacttgatgtttctcaacacgatagcaggacggagttataatgacttaaatcagtatccagtgtttccttgggtcatcactaattatgaatcagaagaactggatcttaccttgcccaccaacttcagagatttgtccaagccaataggagctctgaacccaaaaagagcagcattcttcgctgagcgttatgaatcatgggaagatgatcaagttccaaagtttcactatggtactcattactcaactgcaagttttgttcttgcatggctgctaagaataagccccatcctcccagaggttctgccatgcaagtgagtccattgatgttcacagacaaagcccagcaggatgttatcatggtcctcaagtttccctccaactcccctgttactcacgtggcagccaacacccagcctggtttggcaactcccgctgtgatcacagtcactgctaacaggttatttgcggtgaacaaatggcacaaccttcctgctcatcaaggtgctgtacaagaccagccataccagctgccagtggaaatcgatcctctcatagccagcaatacaggaatgcacaggaggcaaatcactgaccttttagaccaaagtattcaagtgcattcccagtgctttgtcatcacttcagacaaccgctatattctcgtctgtggcttctgggataaaagtttcagagtctattctacagacacaggaagattgatccaagtggtgtttggccattgggatgtcgtcacttgccttgctcgttctgagtcatatattgggggaaattgctacattctctcagggtcacgtgatgcaactcttttgctgtggtattggaatggaaaatgcagtgggattggagataacccaggcagtgagactgctgctcctcgggccattttgaccggccatgactatgaggtcacatgtgctgcggtgtgtgcggagctaggcctggtgttgagtggttcacaagaaggaccatgtctcatacattccatgaatggagacttgttgaggaccttggagggtcctgaaaactgcctgaaaccaaaactcattcaggcttcaagagagggtcattgtgtcatattctatgaaaacggcctcttctgtacattcagtgtgaatggaaaactccaggccacgatggaaacagatgataacataagagccatccagctgagccgagatgggcagtacctgctcacaggaggagacagaggagtggtcgtggtccggcaggtgtcggacctcaagcagctctttgcctatccaggatgtgacgctggaatccgggccatggcgctgtcttacgaccagaggtgcatcatttctggcatggcttcaggaagcattgtgctattttacaacgactttaaccggtggcatcatgaataccaaacccgctactgatggtgacagctgtacatcaactctgcccctaggatgagcagaagtacctggagcatcattctcttctaccacatctgaatgtaacttaaatttgctcaaagaagcaaaatattttttaaagttattaataattgctatttttgtagtctttgcttgacttttttgggggggattagcaaagcagaaaactggctgctgggttctgtagttttaaaaaatctatatttttagtcataatgagaagtctattttcaccaattatggaaacatacagtggagcaagtaaaccacttattccagctataatattatgaagaacatttcccatgcatctacaagcttgagaaataggattttcacagtggggaagtgggttacaatattggaataggaaaatttgatgctgtaatttgggtcctgtatttttccaaacaactgtgcttcttcagcactaatatttctgggatttaaatagtaatgtttaaattatggtaaatgtaatttaaaacatctcaattaagtctgtctatcaatattgttcttcaagcatgttttagacctagaaaagtatggtttgggggaggctattttattgtgtggttagcacaaggaatctaatttatagcaagtgtgaaatagttaccattttttcctgatctgtcatcttcatagcacaacaaaacgaaatgatggaaatgctcttgagctcacaacatttgtttttcttttaaagtaaatgcaagtaccaaagctcactactgcggtttgcctgtgcctggacaatgaggcggagccactgttgttggggcacccccttccctccccgggtttgcaaatagaggctaccgggtgctgtattcagcaacacctgttttactatttgttattaaactatcatctccaccttccttttgattagcaatttgtactaagaaacgaaacaatgttatttggtggtgtataattctacttttctagtagattactgtgtggaattctgtgaaaaatatttgagaaaaggcctgtattgcataaataaattctttgtatgttgtgaaaaatatttgagaaaaggcctgtattgcataaataaattctttgtatgttgtga

SEQ ID NO: 435075 - DNA, 9822 bp, Homo sapiens
  misc_feature (1651)..(1651): n is a, c, g, or t
  misc_feature (3573)..(3573): n is a, c, g, or t
ccgccttttcctgccctggatctccgccgccacctcggtctcgctgctcctgggcggggggtgaggacgagtccggagtatctggggtttggcgttgttgtcagcctcggggagagagattggacaaatattctccaagaggaggagggcgacgccaaggactttccacatcaactgctttggggtatctccacaagttggaagagggaccctttcgttttgcattgcgtgtgttgtgctcattaccagtgcagcgactgccgtcccagggtgactctgagttgtcctttatcgtgagctagcaatggctagcgaagacaatcgtgtcccttccccgccaccaacaggtgatgacgggggaggtggagggagagaagaaacccctactgaagggggtgcattgtctctgaaaccagggctccccatcaggggcatcagaatgaaatttgccgtgttgaccggtttggttgaagttggagaagtatccaatagggatattgtagaaactgtctttaacctgttggtaggaggacagtttgatctggaaatgaatttcattatccaagaaggtgagagtattaactgcatggtggacctactggaaaaatgtgacattacgtgccaagcagaagtctggagcatgtttacagccattctgaagaaaagcatacggaatcttcaagtctgcactgaagtaggccttgttgaaaaagtgcttgggaaaattgaaaaagttgacaatatgatagcagatcttttggttgacatgttgggagtgctggctagctataatttgacagttcgcgagctaaagcttttcttcagtaaacttcaaggagataaaggacgatggcctccacatgctgggaagttgctgtctgtgttaaagcatatgcctcagaagtatggtcctgatgccttttttaactttccaggaaagagtgctgcagctattgcattacctcctatagccaaatggccataccagaatggttttacatttcatacatggcttagaatggatcctgtaaataacatcaatgtagataaggataaaccatatttgtattgtttcagaaccagcaaaggtcttggctattctgctcattttgttggaggctgtttgattgtaacatcaataaagtcaaaaggaaaaggctttcaacactgtgtgaaatttgatttcaagccacaaaagtggtatatggttaccatagtacacatctataaccgatggaagaatagtgaacttcgatgttatgtgaatggtgagctggcttcctatggagagataacatggtttgtcaacactagcgatacctttgacaaatgtttcctgggctcatcagaaacagcagatgctaatagagtattctgtggtcagatgactgcagtttaccttttcagtgaagctctaaatgcagctcagatatttgctatttatcagttgggcctgggatacaagggtacatttaaattcaaagcagaaagcgaccttttccttgctgagcatcacaaacttttattgtacgatgggaaactctctagtgccattgcattcacgtacaatccacgggctacagatgcccagctttgtcttgaatcatctcctaaggacaacccttcaatttttgttcattcaccacatgcnctcatgctccaggatgtaaaggcagttttaacacattccatccaaagtgcaatgcattcaattggaggagtacaagtactatttccactttttgcacagttggattacaggcaatatttgtctgatgagattgatttgactatatgttcaaccttgctggcctttatcatggaattgttgaagaactcaattgctatgcaggaacagatgcttgcctgtaagggcttcttggtaataggatatagccttgaaaagtcttccaaatctcatgttagcagagcagtacttgaactttgccttgcattttcaaaatatctgagtaatctgcagaatgggatgcccctgctcaagcaattgtgtgatcacgttcttcttaatcctgccatatggattcataccccagccaaggttcaactgatgctctatacttatctgtccacggaattcattggtacagtcaacatatataacaccattcggagagttggaacagtgcttctcatcatgcacacgctgaagtactactactgggcagtgaatcctcaggatcgaagtggtatcaccccaaaaggattagatggaccgcgacctaatcaaaaagaaatgctttctctacgagcattcttgttgatgttcattaagcaattagtgatgaaggattctggagtaaaggaagatgaattacaggccattcttaattacctactgactatgcatgaggatgacaatctaatggatgtcctacagctgcttgttgcattaatgtcagaacaccctaactctatgattcctgcttttgaccaaaggaatgggttacgtgttatctacaaacttctggcatcgaaaagtgaaggaatcagggtacaagctcttaaggcaatgggttattttttaaaacatctggccccaaagaggaaagcagaagtcatgcttggacatggattgttttcattgctagctgaaaggctcatgcttcagacaaatttaatcacaatgaccacatataatgtgctgtttgagattcttatagaacagattggtactcaggtgatacataaacagcatccagatcctgattcttcagtgaagatacaaaaccctcagatactaaaagtaattgcgaccctacttcgaaattctccccagtgcccagagagcatggaggttcgcagagcctttctttctgacatgattaaactttttaataacagtagagaaaacaggaggagcttgctacaatgctctgtgtggcaagaatggatgctttctctctgctattttaatcctaagaattcagatgagcaaaagataacagaaatggtatacgccatattcagaatcctgctttaccatgcagtcaaatatgagtggggtggctggcgtgtatgggtagacactttatcaatcactcattcaaaggtcacttttgaaatacacaaagaaaaccttgccaatatatttagggaacagcaaggaaaagttgatgaagaaatagggctgtgttcttcaacttcagttcaagcagcctctggcattagaagggatattaatgtttcagtaggatcccagcaaccagatacgaaggattctcctgtctgtcctcatttcaccacaaatggtaatgaaaattcaagtatagagaagacaagttcactagaatctgcatctaatattgaactgcaaactactaatacatcttatgaagaaatgaaagctgagcaagaaaatcaggagttaccagatgaaggcactttggaagaaacactgacaaatgagacaaggaatgcagatgatttagaagtatcttctgacataatagaagctgtggctatttcctctaattcttttataacaactggcaaagattcaatgactgtcagtgaagtaactgcttctataagttctccttcagaagaggatgnctcagagatgccagaattcttggataaatctatagtagaggaagaggaagatgatgattatgtggaactgaaagtagaaggcagtcctactgaggaagctaatctacccacagagctccaagataacagtttgtctccagctgcatctgaagccggtgaaaaactggacatgtttggtaatgatgacaaattaatatttcaagaaggaaaacctgttactgaaaagcaaactgatactgaaactcaagattctaaagattctggaattcagactatgacagcatcagggtcttcagctatgtcaccagaaactactgtttcccaaatagctgtagaatcagaccttggtcagatgctggaggaagggaagaaagcaactaacctcactagagaaaccaaattaattaatgattgtcatggtagtgtctctgaggcttcttctgagcaaaagattgcgaagttggatgtttccaatgttgctacagatactgagaggctggagttgaaggccagtcccaacgtggaagcacctcaacctcatcgacatgtgcttgagatatcaaggcaacatgagcagccagggcaaggaatagcaccagatgcagttaatggacaaaggagggattccagatctactgtgtttcgtattcctgagttcaactggtctcagatgcatcaacgtttgctcactgatctattattttcaatagaaacagatatacagatgtggagaagccattcaacaaagacagttatggacttcgtgaatagcagtgataatgtcatctttgtacacaacacaattcatctcatctctcaagtgatggacaatatggtcatggcttgtgggggtatactgccattgctttcagctgctacatcggctacacatgaactggaaaatattgaacctactcaaggcctttcaatagaagcctctgtgacatttttgcagaggctaattagccttgtggatgtgcttatatttgcaagttctcttggctttactgaaattgaagctgaaaaaagtatgtcatctggaggaattttgcggcagtgtctccgactagtttgtgcagtcgcagtaaggaattgcttggagtgtcaacagcattcacaactgaaaactaggggagataaagccttgaaaccaatgcatagccttattcctttagggaaatctgcagcgaagagcccagtggacattgtgactggcggtatatctccagtaagagatcttgacaggcttctacaggacatggatattaatcggcttagggcagttgttttcagagacatagaggatagcaaacaagctcaatttttagccttggcagtagtatactttatctctgttcttatggtctccaagtacagagacattttggaaccccaaaatgaaaggcatagccagtcatgtacagaaactggcagtgaaaatgagaatgtatcactctctgaaatcacaccagcagcattcagcactttaactacggcatcagtggaagaatctgaaagcacatcatctgctcgaaggagggactcaggcattggggaagaaacagccactggtttaggaagccatgtggaagtaactcctcacacagcacctcctggtgtcagtgcaggcccagatgcaatcagcgaggtgctatctactctttctttagaagtcaataagtctccggaaaccaaaaatgatagaggaaatgacttggacactaaggctacaccgtcagtttcagtttcaaaaaacgtcaatgtgaaagacattctccgaagcttggttaacataccagcagatggagtcacagtggatcctgcccttctgccaccagcctgccttggagcccttggtgatctatctgtggaacaacccgtgcagttcagatcttttgacagaagtgtcattgttgcagcaaaaaagtcagcagtctcaccttccacctttaatacaagcatacctaccaatgctgtcagtgtggtttcctcagtagattcagcccaagcctcagatatgggaggagaatcaccaggcagtagatcatctaatgcaaaattgccctcagttccaacagttgattcagtttcacaagatccggtttcaaatatgagtattacagagaggcttgaacacgctttggaaaaggcagctcctctccttcgtgagatttttgtggattttgcaccttttctttctcggacacttttgggtagccatggacaagaactgcttatagaaggaacaagtctggtttgcatgaagtcgagtagttcagttgtggaattggttatgctactgtgttctcaggagtggcaaaattctattcagaagaatgcaggccttgcttttatcgaacttgtcaatgaaggaaggttgcttagccagacaatgaaggatcatctagtaagagtagcaaatgaagctgaatttatcctgagcaggcagagagcagaagatattcacagacatgcggaatttgagtcactgtgtgcccagtattctgcagacaaacgagaagatgagaagatgtgtgatcatttgataagagcagcaaaatatcgtgaccacgtgacagcaactcaactaatccagaaaattatcaacattctcacagacaagcatggagcctggggaaattctgcagtgagtcgtcctcttgagttctggcgccttgactactgggaagatgacttgcggcgccggcgacgatttgtgcgtaaccctctaggatcgacacatcctgaagcgacactaaaaacagccgtggaacatgccacagatgaagatatccttgctaaaggaaaacagtccatcaggagtcaggctttaggaaatcagaactcagaaaacgagatcctcctggaaggcgatgatgatactctgtcatccgtggatgagaaagatttagagaatcttgccggtcctgttagcctgagcacaccagctcagcttgtggccccctctgttgtagtaaagggcactctttctgtcacctcctccgaactctattttgaggtggatgaagaggatcctaacttcaaaaaaatcgaccccaagatcttggcatatacagaagggctgcatggaaaatggctgttcacagagatacgatcaatcttttctcgtcgttatcttttgcaaaatacagccctggagatctttatggcaaacagagttgctgtgatgttcaacttcccagaccctgcaacagtaaagaaagtggttaactatctacctcgtgttggcgttggaacaagttttggattgcctcaaaccagacgtatttcattagctagtccacgtcagctttttaaggcttctaatatgacccagcgatggcaacacagagagatatctaattttgagtacttgatgtttctcaacacgatagcaggacggagttataatgacttaaatcagtatccagtgtttccttgggtcatcactaattatgaatcagaagaactggatcttaccttgcccaccaacttcagagatttgtccaagccaataggagctctgaacccaaaaagagcagcattcttcgctgagcgttatgaatcatgggaagatgatcaagttccaaagtttcactatggtactcattactcaactgcaagttttgttcttgcatggctgctaagaatagaaccctttacaacttatttcctaaatttgcaaggaggcaaatttgatcatgcagatcgaactttttcatcaatttccagagcttggcgaaacagtcagcgtgatacctctgatattaaggagttgatccctgaattttattatctccctgagatgtttgtcaacttcaataattataatcttggagtgatggatgatgggacagtagtgtctgatgtcgaacttcctccttgggccaaaacctcagaagaatttgttcacataaacagattggccctggagagtgaatttgtttcctgccagcttcaccaatggattgatctcatttttggctataaacagcaaggaccagaagctgtccgagccctcaatgtgttctattacttgacctatgaaggagctgtcaatctgaattcaataactgatcctgtgttgagagaggctgttgaagctcaaatccgaagttttggacagactccttctcaactactcatagagccccatcctcccagaggttctgccatgcaagtgagtccattgatgttcacagacaaagcccagcaggatgttatcatggtcctcaagtttccctccaactcccctgttactcacgtggcagccaacacccagcctggtttggcaactcccgctgtgatcacagtcactgctaacaggttatttgcggtgaacaaatggcacaaccttcctgctcatcaaggtgctgtacaagaccagccataccagctgccagtggaaatcgatcctctcatagccagcaatacaggaatgcacaggaggcaaatcactgaccttttagaccaaagtattcaagtgcattcccagtgctttgtcatcacttcagacaaccgctatattctcgtctgtggcttctgggataaaagtttcagagtctattctacagacacaggaagattgatccaagtggtgtttggccattgggatgtcgtcacttgccttgctcgttctgagtcatatattgggggaaattgctacattctctcagggtcacgtgatgcaactcttttgctgtggtattggaatggaaaatgcagtgggattggagataacccaggcagtgagactgctgctcctcgggccattttgaccggccatgactatgaggtcacatgtgctgcggtgtgtgcggagctaggcctggtgttgagtggttcacaagaaggaccatgtctcatacattccatgaatggagacttgttgaggaccttggagggtcctgaaaactgcctgaaaccaaaactcattcaggcttcaagagagggtcattgtgtcatattctatgaaaacggcctcttctgtacattcagtgtgaatggaaaactccaggccacgatggaaacagatgataacataagagtgcatcatttctggcatggcttcaggaagcattgtgctattttacaacgactttaaccggtggcatcatgaataccaaacccgctactgatggtgacagctgtacatcaactctgcccctaggatgagcagaagtacctggagcatcattctcttctaccacatctgaatgtaacttaaatttgctcaaagaagcaaaatattttttaaagttattaataattgctatttttgtagtctttgcttgacttttttgggggggattagcaaagcagaaaactggctgctgggttctgtagttttaaaaaatctatatttttagtcataatgagaagtctattttcaccaattatggaaacatacagtggagcaagtaaaccacttattccagctataatattatgaagaacatttcccatgcatctacaagcttgagaaataggattttcacagtggggaagtgggttacaatattggaataggaaaatttgatgctgtaatttgggtcctgtatttttccaaacaactgtgcttcttcagcactaatatttctgggatttaaatagtaatgtttaaattatggtaaatgtaatttaaaacatctcaattaagtctgtctatcaatattgttcttcaagcatgttttagacctagaaaagtatggtttgggggaggctattttattgtgtggttagcacaaggaatctaatttatagcaagtgtgaaatagttaccattttttcctgatctgtcatcttcatagcacaacaaaacgaaatgatggaaatgctcttgagctcacaacatttgtttttcttttaaagtaaatgcaagtaccaaagctcactactgcggtttgcctgtgcctggacaatgaggcggagccactgttgttggggcacccccttccctccccgggtttgcaaatagaggctaccgggtgctgtattcagcaacacctgttttactatttgttattaaactatcatctccaccttccttttgattagcaatttgtactaagaaacgaaacaatgttatttggtggtgtataattctacttttctagtagattactgtgtggaattctgtgaaaaatatttgagaaaaggcctgtattgcataaataaattctttgtatgttgtgaaaaatatttgagaaaaggcctgtattgcataaataaattctttgtatgttgtga

SEQ ID NO: 435076 - DNA, 9449 bp, Homo sapiens
  misc_feature (1651)..(1651): n is a, c, g, or t
  misc_feature (3573)..(3573): n is a, c, g, or t
ccgccttttcctgccctggatctccgccgccacctcggtctcgctgctcctgggcggggggtgaggacgagtccggagtatctggggtttggcgttgttgtcagcctcggggagagagattggacaaatattctccaagaggaggagggcgacgccaaggactttccacatcaactgctttggggtatctccacaagttggaagagggaccctttcgttttgcattgcgtgtgttgtgctcattaccagtgcagcgactgccgtcccagggtgactctgagttgtcctttatcgtgagctagcaatggctagcgaagacaatcgtgtcccttccccgccaccaacaggtgatgacgggggaggtggagggagagaagaaacccctactgaagggggtgcattgtctctgaaaccagggctccccatcaggggcatcagaatgaaatttgccgtgttgaccggtttggttgaagttggagaagtatccaatagggatattgtagaaactgtctttaacctgttggtaggaggacagtttgatctggaaatgaatttcattatccaagaaggtgagagtattaactgcatggtggacctactggaaaaatgtgacattacgtgccaagcagaagtctggagcatgtttacagccattctgaagaaaagcatacggaatcttcaagtctgcactgaagtaggccttgttgaaaaagtgcttgggaaaattgaaaaagttgacaatatgatagcagatcttttggttgacatgttgggagtgctggctagctataatttgacagttcgcgagctaaagcttttcttcagtaaacttcaaggagataaaggacgatggcctccacatgctgggaagttgctgtctgtgttaaagcatatgcctcagaagtatggtcctgatgccttttttaactttccaggaaagagtgctgcagctattgcattacctcctatagccaaatggccataccagaatggttttacatttcatacatggcttagaatggatcctgtaaataacatcaatgtagataaggataaaccatatttgtattgtttcagaaccagcaaaggtcttggctattctgctcattttgttggaggctgtttgattgtaacatcaataaagtcaaaaggaaaaggctttcaacactgtgtgaaatttgatttcaagccacaaaagtggtatatggttaccatagtacacatctataaccgatggaagaatagtgaacttcgatgttatgtgaatggtgagctggcttcctatggagagataacatggtttgtcaacactagcgatacctttgacaaatgtttcctgggctcatcagaaacagcagatgctaatagagtattctgtggtcagatgactgcagtttaccttttcagtgaagctctaaatgcagctcagatatttgctatttatcagttgggcctgggatacaagggtacatttaaattcaaagcagaaagcgaccttttccttgctgagcatcacaaacttttattgtacgatgggaaactctctagtgccattgcattcacgtacaatccacgggctacagatgcccagctttgtcttgaatcatctcctaaggacaacccttcaatttttgttcattcaccacatgcnctcatgctccaggatgtaaaggcagttttaacacattccatccaaagtgcaatgcattcaattggaggagtacaagtactatttccactttttgcacagttggattacaggcaatatttgtctgatgagattgatttgactatatgttcaaccttgctggcctttatcatggaattgttgaagaactcaattgctatgcaggaacagatgcttgcctgtaagggcttcttggtaataggatatagccttgaaaagtcttccaaatctcatgttagcagagcagtacttgaactttgccttgcattttcaaaatatctgagtaatctgcagaatgggatgcccctgctcaagcaattgtgtgatcacgttcttcttaatcctgccatatggattcataccccagccaaggttcaactgatgctctatacttatctgtccacggaattcattggtacagtcaacatatataacaccattcggagagttggaacagtgcttctcatcatgcacacgctgaagtactactactgggcagtgaatcctcaggatcgaagtggtatcaccccaaaaggattagatggaccgcgacctaatcaaaaagaaatgctttctctacgagcattcttgttgatgttcattaagcaattagtgatgaaggattctggagtaaaggaagatgaattacaggccattcttaattacctactgactatgcatgaggatgacaatctaatggatgtcctacagctgcttgttgcattaatgtcagaacaccctaactctatgattcctgcttttgaccaaaggaatgggttacgtgttatctacaaacttctggcatcgaaaagtgaaggaatcagggtacaagctcttaaggcaatgggttattttttaaaacatctggccccaaagaggaaagcagaagtcatgcttggacatggattgttttcattgctagctgaaaggctcatgcttcagacaaatttaatcacaatgaccacatataatgtgctgtttgagattcttatagaacagattggtactcaggtgatacataaacagcatccagatcctgattcttcagtgaagatacaaaaccctcagatactaaaagtaattgcgaccctacttcgaaattctccccagtgcccagagagcatggaggttcgcagagcctttctttctgacatgattaaactttttaataacagtagagaaaacaggaggagcttgctacaatgctctgtgtggcaagaatggatgctttctctctgctattttaatcctaagaattcagatgagcaaaagataacagaaatggtatacgccatattcagaatcctgctttaccatgcagtcaaatatgagtggggtggctggcgtgtatgggtagacactttatcaatcactcattcaaaggtcacttttgaaatacacaaagaaaaccttgccaatatatttagggaacagcaaggaaaagttgatgaagaaatagggctgtgttcttcaacttcagttcaagcagcctctggcattagaagggatattaatgtttcagtaggatcccagcaaccagatacgaaggattctcctgtctgtcctcatttcaccacaaatggtaatgaaaattcaagtatagagaagacaagttcactagaatctgcatctaatattgaactgcaaactactaatacatcttatgaagaaatgaaagctgagcaagaaaatcaggagttaccagatgaaggcactttggaagaaacactgacaaatgagacaaggaatgcagatgatttagaagtatcttctgacataatagaagctgtggctatttcctctaattcttttataacaactggcaaagattcaatgactgtcagtgaagtaactgcttctataagttctccttcagaagaggatgnctcagagatgccagaattcttggataaatctatagtagaggaagaggaagatgatgattatgtggaactgaaagtagaaggcagtcctactgaggaagctaatctacccacagagctccaagataacagtttgtctccagctgcatctgaagccggtgaaaaactggacatgtttggtaatgatgacaaattaatatttcaagaaggaaaacctgttactgaaaagcaaactgatactgaaactcaagattctaaagattctggaattcagactatgacagcatcagggtcttcagctatgtcaccagaaactactgtttcccaaatagctgtagaatcagaccttggtcagatgctggaggaagggaagaaagcaactaacctcactagagaaaccaaattaattaatgattgtcatggtagtgtctctgaggcttcttctgagcaaaagattgcgaagttggatgtttccaatgttgctacagatactgagaggctggagttgaaggccagtcccaacgtggaagcacctcaacctcatcgacatgtgcttgagatatcaaggcaacatgagcagccagggcaaggaatagcaccagatgcagttaatggacaaaggagggattccagatctactgtgtttcgtattcctgagttcaactggtctcagatgcatcaacgtttgctcactgatctattattttcaatagaaacagatatacagatgtggagaagccattcaacaaagacagttatggacttcgtgaatagcagtgataatgtcatctttgtacacaacacaattcatctcatctctcaagtgatggacaatatggtcatggcttgtgggggtatactgccattgctttcagctgctacatcggctacacatgaactggaaaatattgaacctactcaaggcctttcaatagaagcctctgtgacatttttgcagaggctaattagccttgtggatgtgcttatatttgcaagttctcttggctttactgaaattgaagctgaaaaaagtatgtcatctggaggaattttgcggcagtgtctccgactagtttgtgcagtcgcagtaaggaattgcttggagtgtcaacagcattcacaactgaaaactaggggagataaagccttgaaaccaatgcatagccttattcctttagggaaatctgcagcgaagagcccagtggacattgtgactggcggtatatctccagtaagagatcttgacaggcttctacaggacatggatattaatcggcttagggcagttgttttcagagacatagaggatagcaaacaagctcaatttttagccttggcagtagtatactttatctctgttcttatggtctccaagtacagagacattttggaaccccaaaatgaaaggcatagccagtcatgtacagaaactggcagtgaaaatgagaatgtatcactctctgaaatcacaccagcagcattcagcactttaactacggcatcagtggaagaatctgaaagcacatcatctgctcgaaggagggactcaggcattggggaagaaacagccactggtttaggaagccatgtggaagtaactcctcacacagcacctcctggtgtcagtgcaggcccagatgcaatcagcgaggtgctatctactctttctttagaagtcaataagtctccggaaaccaaaaatgatagaggaaatgacttggacactaaggctacaccgtcagtttcagtttcaaaaaacgtcaatgtgaaagacattctccgaagcttggttaacataccagcagatggagtcacagtggatcctgcccttctgccaccagcctgccttggagcccttggtgatctatctgtggaacaacccgtgcagttcagatcttttgacagaagtgtcattgttgcagcaaaaaagtcagcagtctcaccttccacctttaatacaagcatacctaccaatgctgtcagtgtggtttcctcagtagattcagcccaagcctcagatatgggaggagaatcaccaggcagtagatcatctaatgcaaaattgccctcagttccaacagttgattcagtttcacaagatccggtttcaaatatgagtattacagagaggcttgaacacgctttggaaaaggcagctcctctccttcgtgagatttttgtggattttgcaccttttctttctcggacacttttgggtagccatggacaagaactgcttatagaaggaacaagtctggtttgcatgaagtcgagtagttcagttgtggaattggttatgctactgtgttctcaggagtggcaaaattctattcagaagaatgcaggccttgcttttatcgaacttgtcaatgaaggaaggttgcttagccagacaatgaaggatcatctagtaagagtagcaaatgaagctgaatttatcctgagcaggcagagagcagaagatattcacagacatgcggaatttgagtcactgtgtgcccagtattctgcagacaaacgagaagatgagaagatgtgtgatcatttgataagagcagcaaaatatcgtgaccacgtgacagcaactcaactaatccagaaaattatcaacattctcacagacaagcatggagcctggggaaattctgcagtgagtcgtcctcttgagttctggcgccttgactactgggaagatgacttgcggcgccggcgacgatttgtgcgtaaccctctaggatcgacacatcctgaagcgacactaaaaacagccgtggaacatgccacagatgaagatatccttgctaaaggaaaacagtccatcaggagtcaggctttaggaaatcagaactcagaaaacgagatcctcctggaaggcgatgatgatactctgtcatccgtggatgagaaagatttagagaatcttgccggtcctgttagcctgagcacaccagctcagcttgtggccccctctgttgtagtaaagggcactctttctgtcacctcctccgaactctattttgaggtggatgaagaggatcctaacttcaaaaaaatcgaccccaagatcttggcatatacagaagggctgcatggaaaatggctgttcacagagatacgatcaatcttttctcgtcgttatcttttgcaaaatacagccctggagatctttatggcaaacagagttgctgtgatgttcaacttcccagaccctgcaacagtaaagaaagtggttaactatctacctcgtgttggcgttggaacaagttttggattgcctcaaaccagacgtatttcattagctagtccacgtcagctttttaaggcttctaatatgacccagcgatggcaacacagagagatatctaattttgagtacttgatgtttctcaacacgatagcaggacggagttataatgacttaaatcagtatccagtgtttccttgggtcatcactaattatgaatcagaagaactggatcttaccttgcccaccaacttcagagatttgtccaagccaataggagctctgaacccaaaaagagcagcattcttcgctgagcgttatgaatcatgggaagatgatcaagttccaaagtttcactatggtactcattactcaactgcaagttttgttcttgcatggctgctaagaataagccccatcctcccagaggttctgccatgcaagtgagtccattgatgttcacagacaaagcccagcaggatgttatcatggtcctcaagtttccctccaactcccctgttactcacgtggcagccaacacccagcctggtttggcaactcccgctgtgatcacagtcactgctaacaggttatttgcggtgaacaaatggcacaaccttcctgctcatcaaggtgctgtacaagaccagccataccagctgccagtggaaatcgatcctctcatagccagcaatacaggaatgcacaggaggcaaatcactgaccttttagaccaaagtattcaagtgcattcccagtgctttgtcatcacttcagacaaccgctatattctcgtctgtggcttctgggataaaagtttcagagtctattctacagacacaggaagattgatccaagtggtgtttggccattgggatgtcgtcacttgccttgctcgttctgagtcatatattgggggaaattgctacattctctcagggtcacgtgatgcaactcttttgctgtggtattggaatggaaaatgcagtgggattggagataacccaggcagtgagactgctgctcctcgggccattttgaccggccatgactatgaggtcacatgtgctgcggtgtgtgcggagctaggcctggtgttgagtggttcacaagaaggaccatgtctcatacattccatgaatggagacttgttgaggaccttggagggtcctgaaaactgcctgaaaccaaaactcattcaggcttcaagagagggtcattgtgtcatattctatgaaaacggcctcttctgtacattcagtgtgaatggaaaactccaggccacgatggaaacagatgataacataagagccatccagctgagccgagatgggcagtacctgctcacaggaggagacagaggagtggtcgtggtccggcaggtgtcggacctcaagcagctctttgcctatccaggatgtgacgctggaatccgggccatggcgctgtcttacgaccagaggtgcatcatttctggcatggcttcaggaagcattgtgctattttacaacgactttaaccggtggcatcatgaataccaaacccgctactgatggtgacagctgtacatcaactctgcccctaggatgagcagaagtacctggagcatcattctcttctaccacatctgaatgtaacttaaatttgctcaaagaagcaaaatattttttaaagttattaataattgctatttttgtagtctttgcttgacttttttgggggggattagcaaagcagaaaactggctgctgggttctgtagttttaaaaaatctatatttttagtcataatgagaagtctattttcaccaattatggaaacatacagtggagcaagtaaaccacttattccagctataatattatgaagaacatttcccatgcatctacaagcttgagaaataggattttcacagtggggaagtgggttacaatattggaataggaaaatttgatgctgtaatttgggtcctgtatttttccaaacaactgtgcttcttcagcactaatatttctgggatttaaatagtaatgtttaaattatggtaaatgtaatttaaaacatctcaattaagtctgtctatcaatattgttcttcaagcatgttttagacctagaaaagtatggtttgggggaggctattttattgtgtggttagcacaaggaatctaatttatagcaagtgtgaaatagttaccattttttcctgatctgtcatcttcatagcacaacaaaacgaaatgatggaaatgctcttgagctcacaacatttgtttttcttttaaagtaaatgcaagtaccaaagctcactactgcggtttgcctgtgcctggacaatgaggcggagccactgttgttggggcacccccttccctccccgggtttgcaaatagaggctaccgggtgctgtattcagcaacacctgttttactatttgttattaaactatcatctccaccttccttttgattagcaatttgtactaagaaacgaaacaatgttatttggtggtgtataattctacttttctagtagattactgtgtggaattctgtgaaaaatatttgagaaaaggcctgtattgcataaataaacctttggcttcgttggcttcagcggtggagcttctcggccct

SEQ ID NO: 435077 - DNA, 9450 bp, Homo sapiens
  misc_feature (1651)..(1651): n is a, c, g, or t
  misc_feature (3573)..(3573): n is a, c, g, or t
  misc_feature (9444)..(9444): n is a, c, g, or t
  misc_feature (9450)..(9450): n is a, c, g, or t
ccgccttttcctgccctggatctccgccgccacctcggtctcgctgctcctgggcggggggtgaggacgagtccggagtatctggggtttggcgttgttgtcagcctcggggagagagattggacaaatattctccaagaggaggagggcgacgccaaggactttccacatcaactgctttggggtatctccacaagttggaagagggaccctttcgttttgcattgcgtgtgttgtgctcattaccagtgcagcgactgccgtcccagggtgactctgagttgtcctttatcgtgagctagcaatggctagcgaagacaatcgtgtcccttccccgccaccaacaggtgatgacgggggaggtggagggagagaagaaacccctactgaagggggtgcattgtctctgaaaccagggctccccatcaggggcatcagaatgaaatttgccgtgttgaccggtttggttgaagttggagaagtatccaatagggatattgtagaaactgtctttaacctgttggtaggaggacagtttgatctggaaatgaatttcattatccaagaaggtgagagtattaactgcatggtggacctactggaaaaatgtgacattacgtgccaagcagaagtctggagcatgtttacagccattctgaagaaaagcatacggaatcttcaagtctgcactgaagtaggccttgttgaaaaagtgcttgggaaaattgaaaaagttgacaatatgatagcagatcttttggttgacatgttgggagtgctggctagctataatttgacagttcgcgagctaaagcttttcttcagtaaacttcaaggagataaaggacgatggcctccacatgctgggaagttgctgtctgtgttaaagcatatgcctcagaagtatggtcctgatgccttttttaactttccaggaaagagtgctgcagctattgcattacctcctatagccaaatggccataccagaatggttttacatttcatacatggcttagaatggatcctgtaaataacatcaatgtagataaggataaaccatatttgtattgtttcagaaccagcaaaggtcttggctattctgctcattttgttggaggctgtttgattgtaacatcaataaagtcaaaaggaaaaggctttcaacactgtgtgaaatttgatttcaagccacaaaagtggtatatggttaccatagtacacatctataaccgatggaagaatagtgaacttcgatgttatgtgaatggtgagctggcttcctatggagagataacatggtttgtcaacactagcgatacctttgacaaatgtttcctgggctcatcagaaacagcagatgctaatagagtattctgtggtcagatgactgcagtttaccttttcagtgaagctctaaatgcagctcagatatttgctatttatcagttgggcctgggatacaagggtacatttaaattcaaagcagaaagcgaccttttccttgctgagcatcacaaacttttattgtacgatgggaaactctctagtgccattgcattcacgtacaatccacgggctacagatgcccagctttgtcttgaatcatctcctaaggacaacccttcaatttttgttcattcaccacatgcnctcatgctccaggatgtaaaggcagttttaacacattccatccaaagtgcaatgcattcaattggaggagtacaagtactatttccactttttgcacagttggattacaggcaatatttgtctgatgagattgatttgactatatgttcaaccttgctggcctttatcatggaattgttgaagaactcaattgctatgcaggaacagatgcttgcctgtaagggcttcttggtaataggatatagccttgaaaagtcttccaaatctcatgttagcagagcagtacttgaactttgccttgcattttcaaaatatctgagtaatctgcagaatgggatgcccctgctcaagcaattgtgtgatcacgttcttcttaatcctgccatatggattcataccccagccaaggttcaactgatgctctatacttatctgtccacggaattcattggtacagtcaacatatataacaccattcggagagttggaacagtgcttctcatcatgcacacgctgaagtactactactgggcagtgaatcctcaggatcgaagtggtatcaccccaaaaggattagatggaccgcgacctaatcaaaaagaaatgctttctctacgagcattcttgttgatgttcattaagcaattagtgatgaaggattctggagtaaaggaagatgaattacaggccattcttaattacctactgactatgcatgaggatgacaatctaatggatgtcctacagctgcttgttgcattaatgtcagaacaccctaactctatgattcctgcttttgaccaaaggaatgggttacgtgttatctacaaacttctggcatcgaaaagtgaaggaatcagggtacaagctcttaaggcaatgggttattttttaaaacatctggccccaaagaggaaagcagaagtcatgcttggacatggattgttttcattgctagctgaaaggctcatgcttcagacaaatttaatcacaatgaccacatataatgtgctgtttgagattcttatagaacagattggtactcaggtgatacataaacagcatccagatcctgattcttcagtgaagatacaaaaccctcagatactaaaagtaattgcgaccctacttcgaaattctccccagtgcccagagagcatggaggttcgcagagcctttctttctgacatgattaaactttttaataacagtagagaaaacaggaggagcttgctacaatgctctgtgtggcaagaatggatgctttctctctgctattttaatcctaagaattcagatgagcaaaagataacagaaatggtatacgccatattcagaatcctgctttaccatgcagtcaaatatgagtggggtggctggcgtgtatgggtagacactttatcaatcactcattcaaaggtcacttttgaaatacacaaagaaaaccttgccaatatatttagggaacagcaaggaaaagttgatgaagaaatagggctgtgttcttcaacttcagttcaagcagcctctggcattagaagggatattaatgtttcagtaggatcccagcaaccagatacgaaggattctcctgtctgtcctcatttcaccacaaatggtaatgaaaattcaagtatagagaagacaagttcactagaatctgcatctaatattgaactgcaaactactaatacatcttatgaagaaatgaaagctgagcaagaaaatcaggagttaccagatgaaggcactttggaagaaacactgacaaatgagacaaggaatgcagatgatttagaagtatcttctgacataatagaagctgtggctatttcctctaattcttttataacaactggcaaagattcaatgactgtcagtgaagtaactgcttctataagttctccttcagaagaggatgnctcagagatgccagaattcttggataaatctatagtagaggaagaggaagatgatgattatgtggaactgaaagtagaaggcagtcctactgaggaagctaatctacccacagagctccaagataacagtttgtctccagctgcatctgaagccggtgaaaaactggacatgtttggtaatgatgacaaattaatatttcaagaaggaaaacctgttactgaaaagcaaactgatactgaaactcaagattctaaagattctggaattcagactatgacagcatcagggtcttcagctatgtcaccagaaactactgtttcccaaatagctgtagaatcagaccttggtcagatgctggaggaagggaagaaagcaactaacctcactagagaaaccaaattaattaatgattgtcatggtagtgtctctgaggcttcttctgagcaaaagattgcgaagttggatgtttccaatgttgctacagatactgagaggctggagttgaaggccagtcccaacgtggaagcacctcaacctcatcgacatgtgcttgagatatcaaggcaacatgagcagccagggcaaggaatagcaccagatgcagttaatggacaaaggagggattccagatctactgtgtttcgtattcctgagttcaactggtctcagatgcatcaacgtttgctcactgatctattattttcaatagaaacagatatacagatgtggagaagccattcaacaaagacagttatggacttcgtgaatagcagtgataatgtcatctttgtacacaacacaattcatctcatctctcaagtgatggacaatatggtcatggcttgtgggggtatactgccattgctttcagctgctacatcggctacacatgaactggaaaatattgaacctactcaaggcctttcaatagaagcctctgtgacatttttgcagaggctaattagccttgtggatgtgcttatatttgcaagttctcttggctttactgaaattgaagctgaaaaaagtatgtcatctggaggaattttgcggcagtgtctccgactagtttgtgcagtcgcagtaaggaattgcttggagtgtcaacagcattcacaactgaaaactaggggagataaagccttgaaaccaatgcatagccttattcctttagggaaatctgcagcgaagagcccagtggacattgtgactggcggtatatctccagtaagagatcttgacaggcttctacaggacatggatattaatcggcttagggcagttgttttcagagacatagaggatagcaaacaagctcaatttttagccttggcagtagtatactttatctctgttcttatggtctccaagtacagagacattttggaaccccaaaatgaaaggcatagccagtcatgtacagaaactggcagtgaaaatgagaatgtatcactctctgaaatcacaccagcagcattcagcactttaactacggcatcagtggaagaatctgaaagcacatcatctgctcgaaggagggactcaggcattggggaagaaacagccactggtttaggaagccatgtggaagtaactcctcacacagcacctcctggtgtcagtgcaggcccagatgcaatcagcgaggtgctatctactctttctttagaagtcaataagtctccggaaaccaaaaatgatagaggaaatgacttggacactaaggctacaccgtcagtttcagtttcaaaaaacgtcaatgtgaaagacattctccgaagcttggttaacataccagcagatggagtcacagtggatcctgcccttctgccaccagcctgccttggagcccttggtgatctatctgtggaacaacccgtgcagttcagatcttttgacagaagtgtcattgttgcagcaaaaaagtcagcagtctcaccttccacctttaatacaagcatacctaccaatgctgtcagtgtggtttcctcagtagattcagcccaagcctcagatatgggaggagaatcaccaggcagtagatcatctaatgcaaaattgccctcagttccaacagttgattcagtttcacaagatccggtttcaaatatgagtattacagagaggcttgaacacgctttggaaaaggcagctcctctccttcgtgagatttttgtggattttgcaccttttctttctcggacacttttgggtagccatggacaagaactgcttatagaaggaacaagtctggtttgcatgaagtcgagtagttcagttgtggaattggttatgctactgtgttctcaggagtggcaaaattctattcagaagaatgcaggccttgcttttatcgaacttgtcaatgaaggaaggttgcttagccagacaatgaaggatcatctagtaagagtagcaaatgaagctgaatttatcctgagcaggcagagagcagaagatattcacagacatgcggaatttgagtcactgtgtgcccagtattctgcagacaaacgagaagatgagaagatgtgtgatcatttgataagagcagcaaaatatcgtgaccacgtgacagcaactcaactaatccagaaaattatcaacattctcacagacaagcatggagcctggggaaattctgcagtgagtcgtcctcttgagttctggcgccttgactactgggaagatgacttgcggcgccggcgacgatttgtgcgtaaccctctaggatcgacacatcctgaagcgacactaaaaacagccgtggaacatgccacagatgaagatatccttgctaaaggaaaacagtccatcaggagtcaggctttaggaaatcagaactcagaaaacgagatcctcctggaaggcgatgatgatactctgtcatccgtggatgagaaagatttagagaatcttgccggtcctgttagcctgagcacaccagctcagcttgtggccccctctgttgtagtaaagggcactctttctgtcacctcctccgaactctattttgaggtggatgaagaggatcctaacttcaaaaaaatcgaccccaagatcttggcatatacagaagggctgcatggaaaatggctgttcacagagatacgatcaatcttttctcgtcgttatcttttgcaaaatacagccctggagatctttatggcaaacagagttgctgtgatgttcaacttcccagaccctgcaacagtaaagaaagtggttaactatctacctcgtgttggcgttggaacaagttttggattgcctcaaaccagacgtatttcattagctagtccacgtcagctttttaaggcttctaatatgacccagcgatggcaacacagagagatatctaattttgagtacttgatgtttctcaacacgatagcaggacggagttataatgacttaaatcagtatccagtgtttccttgggtcatcactaattatgaatcagaagaactggatcttaccttgcccaccaacttcagagatttgtccaagccaataggagctctgaacccaaaaagagcagcattcttcgctgagcgttatgaatcatgggaagatgatcaagttccaaagtttcactatggtactcattactcaactgcaagttttgttcttgcatggctgctaagaataagccccatcctcccagaggttctgccatgcaagtgagtccattgatgttcacagacaaagcccagcaggatgttatcatggtcctcaagtttccctccaactcccctgttactcacgtggcagccaacacccagcctggtttggcaactcccgctgtgatcacagtcactgctaacaggttatttgcggtgaacaaatggcacaaccttcctgctcatcaaggtgctgtacaagaccagccataccagctgccagtggaaatcgatcctctcatagccagcaatacaggaatgcacaggaggcaaatcactgaccttttagaccaaagtattcaagtgcattcccagtgctttgtcatcacttcagacaaccgctatattctcgtctgtggcttctgggataaaagtttcagagtctattctacagacacaggaagattgatccaagtggtgtttggccattgggatgtcgtcacttgccttgctcgttctgagtcatatattgggggaaattgctacattctctcagggtcacgtgatgcaactcttttgctgtggtattggaatggaaaatgcagtgggattggagataacccaggcagtgagactgctgctcctcgggccattttgaccggccatgactatgaggtcacatgtgctgcggtgtgtgcggagctaggcctggtgttgagtggttcacaagaaggaccatgtctcatacattccatgaatggagacttgttgaggaccttggagggtcctgaaaactgcctgaaaccaaaactcattcaggcttcaagagagggtcattgtgtcatattctatgaaaacggcctcttctgtacattcagtgtgaatggaaaactccaggccacgatggaaacagatgataacataagagccatccagctgagccgagatgggcagtacctgctcacaggaggagacagaggagtggtcgtggtccggcaggtgtcggacctcaagcagctctttgcctatccaggatgtgacgctggaatccgggccatggcgctgtcttacgaccagaggtgcatcatttctggcatggcttcaggaagcattgtgctattttacaacgactttaaccggtggcatcatgaataccaaacccgctactgatggtgacagctgtacatcaactctgcccctaggatgagcagaagtacctggagcatcattctcttctaccacatctgaatgtaacttaaatttgctcaaagaagcaaaatattttttaaagttattaataattgctatttttgtagtctttgcttgacttttttgggggggattagcaaagcagaaaactggctgctgggttctgtagttttaaaaaatctatatttttagtcataatgagaagtctattttcaccaattatggaaacatacagtggagcaagtaaaccacttattccagctataatattatgaagaacatttcccatgcatctacaagcttgagaaataggattttcacagtggggaagtgggttacaatattggaataggaaaatttgatgctgtaatttgggtcctgtatttttccaaacaactgtgcttcttcagcactaatatttctgggatttaaatagtaatgtttaaattatggtaaatgtaatttaaaacatctcaattaagtctgtctatcaatattgttcttcaagcatgttttagacctagaaaagtatggtttgggggaggctattttattgtgtggttagcacaaggaatctaatttatagcaagtgtgaaatagttaccattttttcctgatctgtcatcttcatagcacaacaaaacgaaatgatggaaatgctcttgagctcacaacatttgtttttcttttaaagtaaatgcaagtaccaaagctcactactgcggtttgcctgtgcctggacaatgaggcggagccactgttgttggggcacccccttccctccccgggtttgcaaatagaggctaccgggtgctgtattcagcaacacctgttttactatttgttattaaactatcatctccaccttccttttgattagcaatttgtactaagaaacgaaacaatgttatttggtggtgtataattctacttttctagtagattactgtgtggaattctgtgaaaaatatttgagaaaaggcctgtattgcataaataaaatcatggcctcgttggactcagcggtggaggtctgcngcaagn

SEQ ID NO: 435078 - DNA, 2331 bp, Homo sapiens
cgaggcgatctagaggatccctagctgttgaagctcaaatccgaagttttggacagactccttctcaactactcatagagccccatcctcccagaggttctgccatgcaagtgagtccattgatgttcacagacaaagcccagcaggatgttatcatggtcctcaagtttccctccaactcccctgttactcacgtggcagccaacacccagcctggtttggcaactcccgctgtgatcacagtcactgctaacaggttatttgcggtgaacaaatggcacaaccttcctgctcatcaaggtgctgtacaagaccagccataccagctgccagtggaaatcgatcctctcatagccagcaatacaggaatgcacaggaggcaaatcactgaccttttagaccaaagtattcaagtgcattcccagtgctttgtcatcacttcagacaaccgctatattctcgtctgtggcttctgggataaaagtttcagagtctattctacagacacaggaagattgatccaagtggtgtttggccattgggatgtcgtcacttgccttgctcgttctgagtcatatattgggggaaattgctacattctctcagggtcacgtgatgcaactcttttgctgtggtattggaatggaaaatgcagtgggattggagataacccaggcagtgagactgctgctcctcgggccattttgaccggccatgactatgaggtcacatgtgctgcggtgtgtgcggagctaggcctggtgttgagtggttcacaagaaggaccatgtctcatacattccatgaatggagacttgttgaggaccttggagggtcctgaaaactgcctgaaaccaaaactcattcaggcttcaagagagggtcattgtgtcatattctatgaaaacggcctcttctgtacattcagtgtgaatggaaaactccaggccacgatggaaacagatgataacataagagccatccagctgagccgagatgggcagtacctgctcacaggaggagacagaggagtggtcgtggtccggcaggtgtcggacctcaagcagctctttgcctatccaggatgtgacgctggaatccgggccatggcgctgtcttacgaccagaggtgcatcatttctggcatggcttcaggaagcattgtgctattttacaacgactttaaccggtggcatcatgaataccaaacccgctactgatggtgacagctgtacatcaactctgcccctaggatgagcagaagtacctggagcatcattctcttctaccacatctgaatgtaacttaaatttgctcaaagaagcaaaatattttttaaagttattaataattgctatttttgtagtctttgcttgacttttttgggggggattagcaaagcagaaaactggctgctgggttctgtagttttaaaaaatctatatttttagtcataatgagaagtctattttcaccaattatggaaacatacagtggagcaagtaaaccacttattccagctataatattatgaagaacatttcccatgcatctacaagcttgagaaataggattttcacagtggggaagtgggttacaatattggaataggaaaatttgatgctgtaatttgggtcctgtatttttccaaacaactgtgcttcttcagcactaatatttctgggatttaaatagtaatgtttaaattatggtaaatgtaatttaaaacatctcaattaagtctgtctatcaatattgttcttcaagcatgttttagacctagaaaagtatggtttgggggaggctattttattgtgtggttagcacaaggaatctaatttatagcaagtgtgaaatagttaccattttttcctgatctgtcatcttcatagcacaacaaaacgaaatgatggaaatgctcttgagctcacaacatttgtttttcttttaaagtaaatgcaagtaccaaagctcactactgcggtttgcctgtgcctggacaatgaggcggagccactgttgttggggcacccccttccctccccgggtttgcaaatagaggctaccgggtgctgtattcagcaacacctgttttactatttgttattaaactatcatctccaccttccttttgattagcaatttgtactaagaaacgaaacaatgttatttggtggtgtataattctacttttctagtagattactgtgtggaattctgtgaaaaatatttgagaaaaggcctgtattgcataaataaattctttgtatgttgtgaaaaatatttgagaaaaggcctgtattgcataaataaattctttgtatgttgtga

SEQ ID NO: 435079 - DNA, 2346 bp, Homo sapiens
ctcagattggagagtagacggatagcatggggacttgtgctgttgaagctcaaatccgaagttttggacagactccttctcaactactcatagagccccatcctcccagaggttctgccatgcaagtgagtccattgatgttcacagacaaagcccagcaggatgttatcatggtcctcaagtttccctccaactcccctgttactcacgtggcagccaacacccagcctggtttggcaactcccgctgtgatcacagtcactgctaacaggttatttgcggtgaacaaatggcacaaccttcctgctcatcaaggtgctgtacaagaccagccataccagctgccagtggaaatcgatcctctcatagccagcaatacaggaatgcacaggaggcaaatcactgaccttttagaccaaagtattcaagtgcattcccagtgctttgtcatcacttcagacaaccgctatattctcgtctgtggcttctgggataaaagtttcagagtctattctacagacacaggaagattgatccaagtggtgtttggccattgggatgtcgtcacttgccttgctcgttctgagtcatatattgggggaaattgctacattctctcagggtcacgtgatgcaactcttttgctgtggtattggaatggaaaatgcagtgggattggagataacccaggcagtgagactgctgctcctcgggccattttgaccggccatgactatgaggtcacatgtgctgcggtgtgtgcggagctaggcctggtgttgagtggttcacaagaaggaccatgtctcatacattccatgaatggagacttgttgaggaccttggagggtcctgaaaactgcctgaaaccaaaactcattcaggcttcaagagagggtcattgtgtcatattctatgaaaacggcctcttctgtacattcagtgtgaatggaaaactccaggccacgatggaaacagatgataacataagagccatccagctgagccgagatgggcagtacctgctcacaggaggagacagaggagtggtcgtggtccggcaggtgtcggacctcaagcagctctttgcctatccaggatgtgacgctggaatccgggccatggcgctgtcttacgaccagaggtgcatcatttctggcatggcttcaggaagcattgtgctattttacaacgactttaaccggtggcatcatgaataccaaacccgctactgatggtgacagctgtacatcaactctgcccctaggatgagcagaagtacctggagcatcattctcttctaccacatctgaatgtaacttaaatttgctcaaagaagcaaaatattttttaaagttattaataattgctatttttgtagtctttgcttgacttttttgggggggattagcaaagcagaaaactggctgctgggttctgtagttttaaaaaatctatatttttagtcataatgagaagtctattttcaccaattatggaaacatacagtggagcaagtaaaccacttattccagctataatattatgaagaacatttcccatgcatctacaagcttgagaaataggattttcacagtggggaagtgggttacaatattggaataggaaaatttgatgctgtaatttgggtcctgtatttttccaaacaactgtgcttcttcagcactaatatttctgggatttaaatagtaatgtttaaattatggtaaatgtaatttaaaacatctcaattaagtctgtctatcaatattgttcttcaagcatgttttagacctagaaaagtatggtttgggggaggctattttattgtgtggttagcacaaggaatctaatttatagcaagtgtgaaatagttaccattttttcctgatctgtcatcttcatagcacaacaaaacgaaatgatggaaatgctcttgagctcacaacatttgtttttcttttaaagtaaatgcaagtaccaaagctcactactgcggtttgcctgtgcctggacaatgaggcggagccactgttgttggggcacccccttccctccccgggtttgcaaatagaggctaccgggtgctgtattcagcaacacctgttttactatttgttattaaactatcatctccaccttccttttgattagcaatttgtactaagaaacgaaacaatgttatttggtggtgtataattctacttttctagtagattactgtgtggaattctgtgaaaaatatttgagaaaaggcctgtattgcataaataaattctttgtatgttgtgaaaaatatttgagaaaaggcctgtattgcataaataaattctttgtatgttgtga

SEQ ID NO: 435080 - DNA, 2070 bp, Homo sapiens
ctgcaaaacctctcttcaattataaaataactcatcaaggtgctgtacaagaccagccataccagctgccagtggaaatcgatcctctcatagccagcaatacaggaatgcacaggaggcaaatcactgaccttttagaccaaagtattcaagtgcattcccagtgctttgtcatcacttcagacaaccgctatattctcgtctgtggcttctgggataaaagtttcagagtctattctacagacacaggaagattgatccaagtggtgtttggccattgggatgtcgtcacttgccttgctcgttctgagtcatatattgggggaaattgctacattctctcagggtcacgtgatgcaactcttttgctgtggtattggaatggaaaatgcagtgggattggagataacccaggcagtgagactgctgctcctcgggccattttgaccggccatgactatgaggtcacatgtgctgcggtgtgtgcggagctaggcctggtgttgagtggttcacaagaaggaccatgtctcatacattccatgaatggagacttgttgaggaccttggagggtcctgaaaactgcctgaaaccaaaactcattcaggcttcaagagagggtcattgtgtcatattctatgaaaacggcctcttctgtacattcagtgtgaatggaaaactccaggccacgatggaaacagatgataacataagagccatccagctgagccgagatgggcagtacctgctcacaggaggagacagaggagtggtcgtggtccggcaggtgtcggacctcaagcagctctttgcctatccaggatgtgacgctggaatccgggccatggcgctgtcttacgaccagaggtgcatcatttctggcatggcttcaggaagcattgtgctattttacaacgactttaaccggtggcatcatgaataccaaacccgctactgatggtgacagctgtacatcaactctgcccctaggatgagcagaagtacctggagcatcattctcttctaccacatctgaatgtaacttaaatttgctcaaagaagcaaaatattttttaaagttattaataattgctatttttgtagtctttgcttgacttttttgggggggattagcaaagcagaaaactggctgctgggttctgtagttttaaaaaatctatatttttagtcataatgagaagtctattttcaccaattatggaaacatacagtggagcaagtaaaccacttattccagctataatattatgaagaacatttcccatgcatctacaagcttgagaaataggattttcacagtggggaagtgggttacaatattggaataggaaaatttgatgctgtaatttgggtcctgtatttttccaaacaactgtgcttcttcagcactaatatttctgggatttaaatagtaatgtttaaattatggtaaatgtaatttaaaacatctcaattaagtctgtctatcaatattgttcttcaagcatgttttagacctagaaaagtatggtttgggggaggctattttattgtgtggttagcacaaggaatctaatttatagcaagtgtgaaatagttaccattttttcctgatctgtcatcttcatagcacaacaaaacgaaatgatggaaatgctcttgagctcacaacatttgtttttcttttaaagtaaatgcaagtaccaaagctcactactgcggtttgcctgtgcctggacaatgaggcggagccactgttgttggggcacccccttccctccccgggtttgcaaatagaggctaccgggtgctgtattcagcaacacctgttttactatttgttattaaactatcatctccaccttccttttgattagcaatttgtactaagaaacgaaacaatgttatttggtggtgtataattctacttttctagtagattactgtgtggaattctgtgaaaaatatttgagaaaaggcctgtattgcataaataaattctttgtatgttgtgaaaaatatttgagaaaaggcctgtattgcataaataaattctttgtatgttgtga

SEQ ID NO: 435081 - DNA, 1357 bp, Homo sapiens
agccatcgttcggggcgcagtcctctccccggctggccctcctttctccggggcattcgccaccgcttccctgggctgagacgaccggttcgtcgcctccttgcccgtgaccgtcgctagaactcagttgtgcgttgcggccagtcgccactgctgtgcatcatttctggcatggcttcaggaagcattgtgctattttacaacgactttaaccggtggcatcatgaataccaaacccgctactgatggtgacagctgtacatcaactctgcccctaggatgagcagaagtacctggagcatcattctcttctaccacatctgaatgtaacttaaatttgctcaaagaagcaaaatattttttaaagttattaataattgctatttttgtagtctttgcttgacttttttgggggggattagcaaagcagaaaactggctgctgggttctgtagttttaaaaaatctatatttttagtcataatgagaagtctattttcaccaattatggaaacatacagtggagcaagtaaaccacttattccagctataatattatgaagaacatttcccatgcatctacaagcttgagaaataggattttcacagtggggaagtgggttacaatattggaataggaaaatttgatgctgtaatttgggtcctgtatttttccaaacaactgtgcttcttcagcactaatatttctgggatttaaatagtaatgtttaaattatggtaaatgtaatttaaaacatctcaattaagtctgtctatcaatattgttcttcaagcatgttttagacctagaaaagtatggtttgggggaggctattttattgtgtggttagcacaaggaatctaatttatagcaagtgtgaaatagttaccattttttcctgatctgtcatcttcatagcacaacaaaacgaaatgatggaaatgctcttgagctcacaacatttgtttttcttttaaagtaaatgcaagtaccaaagctcactactgcggtttgcctgtgcctggacaatgaggcggagccactgttgttggggcacccccttccctccccgggtttgcaaatagaggctaccgggtgctgtattcagcaacacctgttttactatttgttattaaactatcatctccaccttccttttgattagcaatttgtactaagaaacgaaacaatgttatttggtggtgtataattctacttttctagtagattactgtgtggaattctgtgaaaaatatttgagaaaaggcctgtattgcataaataaattctttgtatgttgtgaaaaatatttgagaaaaggcctgtattgcataaataaattctttgtatgttgtga

SEQ ID NO: 435082 - DNA, 874 bp, Homo sapiens
gaagaacatttcccatgcatctacataatattatagctggaataagtggtttacttattccagctataatattatgaagaacatttcccatgcatctacaagcttgagaaataggattttcacagtggggaagtgggttacaatattggaataggaaaatttgatgctgtaatttgggtcctgtatttttccaaacaactgtgcttcttcagcactaatatttctgggatttaaatagtaatgtttaaattatggtaaatgtaatttaaaacatctcaattaagtctgtctatcaatattgttcttcaagcatgttttagacctagaaaagtatggtttgggggaggctattttattgtgtggttagcacaaggaatctaatttatagcaagtgtgaaatagttaccattttttcctgatctgtcatcttcatagcacaacaaaacgaaatgatggaaatgctcttgagctcacaacatttgtttttcttttaaagtaaatgcaagtaccaaagctcactactgcggtttgcctgtgcctggacaatgaggcggagccactgttgttggggcacccccttccctccccgggtttgcaaatagaggctaccgggtgctgtattcagcaacacctgttttactatttgttattaaactatcatctccaccttccttttgattagcaatttgtactaagaaacgaaacaatgttatttggtggtgtataattctacttttctagtagattactgtgtggaattctgtgaaaaatatttgagaaaaggcctgtattgcataaataaattctttgtatgttgtgaaaaatatttgagaaaaggcctgtattgcataaataaattctttgtatgttgtga

SEQ ID NO: 435083 - DNA, 582 bp, Homo sapiens
tctggtccgatatataaattaatcagacataaaaacagagtcaaagatcctgtttttaaaagatatattacacagaaaaaccccacaaaatttagaaaagaaaggaaacccccttccctccccgggtttgcaaatagaggctaccgggtgctgtattcagcaacacctgttttactatttgttattaaactatcatctccaccttccttttgattagcaatttgtactaagaaacgaaacaatgttatttggtggtgtataattctacttttctagtagattactgtgtggaattctgtgaaaaatatttgagaaaaggcctgtattgcataaataaattctttgtatgttgtgaactttgatctctatttctcttgcaacagacttcaagtggtccctctttttttcctacacactcagctcttctctaaaagcaaggatttggaatgaacaattcagtttgacagaaaaagctgaataaaatggcatctgtaattgaattgttggaaatgcctgttttgctcctaaattttaaacatcatcattaataaaataatgattcacaaagaaagaaaaaaaaaa

SEQ ID NO: 435084 - DNA, 577 bp, Homo sapiens
gaggaagaatgtgagtagttattgttaatctaatgtttaggaacatgctatagtgatattgaggatactaatgcttttaatgtgttttttttttttccttgtaagttggtaggaggacagtttgatctggaaatgaatttcattatccaagaaggtgagagtattaactgcatggtggacctactggaaaaatgtgacattacgtgccaagcagaagtctggagcatgtttacagccattctgaagaaaagcatacggaatcttcaagtctgcactgaagtaggccttgttgaaaaagtgcttgggaaaattgaaaaagttgacaatatgatagcaggtatgattttttctatagtacaatatatgcaaagaaataaagtttgattttcaaatacatatttttcttattccatttagcaatatttaagaaatatttgagcatgtagcatgcacctagaactttagtgtccaagcccttaaataagcacagtttattttaaatattcgagaaatataactagctgagttattttatcgttttcttttgtttccagatcttttggttgacatgttggga

SEQ ID NO: 435085 - DNA, 356 bp, Homo sapiens
tggtagttttgaagccagctttgaactaactatagtgtaccttatttgatcatgtgattaaatgtgcactattaatagtctgaaaaaataatttgaagaaacagtttggatgaaattgtaacaaatcctcatttgttttctttataacttcttttttaaaattctctttaaaataggtctggtttgcatgaagtcgagtagttcagttgtggaattggttatgctactgtgttctcaggtgagtggcaagaataaatgttgaattaaaagtagattatcacatgaatttgttttcatgggggattttatatttgcattactgaaatttttggtataataaaattgtgagtttgctg

SEQ ID NO: 435086 - DNA, 1598 bp, Homo sapiens
agagacagagagaagaagaaatatttccaaatataccaggctgatctttcgtagtttctcagtcttgctgtctgttgtcgtttgaaatctgtttcccacgagactctgggaagatggaggtgcagggcttgggtaacagctgccttcctcagggctgggtacctgctctccgagtctgtgtctccaggctgtgtgctcagacttgaccatgtttgggcatggaggcttgccccagatggggaccaaaagctgcttccctggagacgggcggggaggccaaacttcctgctgaagctctgtggcctcttttggggtgggggcgggggtccaggcagaaagaaactgtctgctgctcaagacccacaggacgccgggaagactaaatgatcactgcccccagtgaatatggtgaagaagctggtgatggcccagaagcggggagagacacgagccctttgcctgggtgtaaccatggtggtgtgtgccgtcatcacctactacatcctggtcacgactgtgctgcccctctaccagaaaagcgtgtggacccaggaatccaagtgccacctgattgagaccaacatcagggaccaggaggagctgaagggcaagaaggtgccccagtacccatgcctgtgggtcaacgtgtcagctgccggcaggtgggctgtgctgtaccacacggaggacactcgggaccagaaccagcagtgctcctacatcccaggcagcgtggacaattaccagacggcccgggccgacgtggagaaggtcagagccaaattccaagagcagcaggtcttctactgcttctccgcacctcgggggaacgaaaccagcgtcctattccagcgcctctacgggccccaggccctcctcttctccctcttctggcccaccttcctgctgaccggtggcctcctcattatcgccatggtgaagagcaaccagtacctgtccatcctggcggcccagaagtagagccatccatccatgccataccacttgtcagggcacaggggactggctgggcccccagggctgctccccacttgcagcacaatgccttctccacctgccctcccactcttccagtccaatccacgctgtcttctgttgcaggactaacctttgagaaatccttttgtgaagtcattgcctgctcaagaatgtacagtggctccccaatgccttggaggccataaggccagccagttctagctctctattacctgtccccactcaactgactcatacctgtttccggctgcatcactatgtgccccacagagaacgatgatcgtcacctctgtgcctgagttctccctgttgtctcaaagcggtacccatcctcccccagaagctgtccccagcgagcctcccttctttgtttgaattctctaataagagcaacagcagctcccatttctagaacacatttacagtattactattttctaggatataaagtgccatatatatttttaattccaatattaataaatgtatgccaaacaacaaaaaaaacagctgcaaggaaacacatgagaactcatcaaaattttagcggtgggatggtggttaatttctgttttctt

SEQ ID NO: 435087 - DNA, 1520 bp, Homo sapiens
agagacagagagaagaagaaatatttccaaatataccaggctgatctttcgtagtttctcagtcttgctgtctgttgtcgtttgaaatctgtttcccacgagactctgggaagatggaggtgcagggcttgggtaacagctgccttcctcagggctgggtacctgctctccgagtctgtgtctccaggctgtgtgctcagacttgaccatgtttgggcatggaggcttgccccagatggggaccaaaagctgcttccctggagacgggcggggaggccaaacttcctgctgaagctctgtggcctcttttggggtgggggcgggggtccaggcagaaagaaactgtctgctgctcaagacccacaggacgccgggaagactaaatgatcactgcccccagtgaatatggtgaagaagctggtgatggcccagaagcggggagagacacgagccctttgcctgggtgtaaccatggtggtgtgtgccgtcatcacctactacatcctggtcacgactgtgctgcccctctaccagaaaagcgtgtggacccaggaatccaagtgccacctgattgagaccaacatcagggaccaggaggagctgaagggcaagaaggtgccccagtacccatgcctgtgggtcaacgtgtcagctgccggcaggtgggctgtgctgtaccacacggaggacactcgggaccagaaccagcagtgctcctacatcccaggcagcgtggacaattaccagacggcccgggccgacgtggagaaggtcagagccaaattccaagagcagcaggtcttctactgcttctccgcacctcgggggaacgaaaccagcgtcctattccagcgcctctacgggccccaggccctcctcttctccctcttctggcccaccttcctgctgaccggtggcctcctcattatcgccatggtgaagagcaaccagtacctgtccatcctggcggcccagaagtagagccatccatccatgccataccacttgtcagggcacaggggactggctgggcccccagggctgctccccacttgcagcacaatgccttctccacctgccctcccactcttccagtccaatccacgctgtcttctgttgcaggactaacctttgagaaatccttttgtgaagtcattgcctgctcaagaatgtacagtggctccccaatgccttggaggccataaggccagccagttctagctctctattacctgtccccactcaactgactcatacctgtttccggctgcatcactatgtgccccacagagaacgatgatcgtcacctctgtgcctgagttctccctgttgtctcaaagcggtacccatcctcccccagaagctgtccccagcgagcctcccttctttgtttgaattctctaataagagcaacagcagctcccatttctagaacacatttacagtattactattttctaggatataaagtgccatatatatttttaattccaatattaataaatgtatgccaaacaaca

SEQ ID NO: 435088 - DNA, 1001 bp, Homo sapiens
agagacagagagaagaagaaatatttccaaatataccaggctgatctttcgtagtttctcagtcttgctgtctgttgtcgtttgaaatctgtttcccacgagactctgggaagatggaggtgcagggcttgggtaacagctgccttcctcagggctgggtacctgctctccgagtctgtgtctccaggctgtgtgctcagacttgaccatgtttgggcatggaggcttgccccagatggggaccaaaagctgcttccctggagacgggcggggaggccaaacttcctgctgaagctctgtggcctcttttggggtgggggcgggggtccaggcagaaagaaactgtctgctgctcaagacccacaggacgccgggaagactaaatgatcactgcccccagtgaatatggtgaagaagctggtgatggcccagaagcggggagagacacgagccctttgcctgggtgtaaccatggtggtgtgtgccgtcatcacctactacatcctggtcacgactgtgctgcccctctaccagaaaagcgtgtggacccaggaatccaagtgccacctgattgagtccaatccacgctgtcttctgttgcaggactaacctttgagaaatccttttgtgaagtcattgcctgctcaagaatgtacagtggctccccaatgccttggaggccataaggccagccagttctagctctctattacctgtccccactcaactgactcatacctgtttccggctgcatcactatgtgccccacagagaacgatgatcgtcacctctgtgcctgagttctccctgttgtctcaaagcggtacccatcctcccccagaagctgtccccagcgagcctcccttctttgtttgaattctctaataagagcaacagcagctcccatttctagaacacatttacagtattactattttctaggatataaagtgccatatatatttttaattccaatattaataaatgtatgccaaacaaca

SEQ ID NO: 435089 - DNA, 907 bp, Homo sapiens
agagacagagagaagaagaaatatttccaaatataccaggctgatctttcgtagtttctcagtcttgctgtctgttgtcgtttgaaatctgtttcccacgagactctgggaagatggaggtgcagggcttgggtaacagctgccttcctcagggctgggtacctgctctccgagtctgtgtctccaggctgtgtgctcagacttgaccatgtttgggcatggaggcttgccccagatggggaccaaaagctgcttccctggagacgggcggggaggccaaacttcctgctgaagctctgtggcctcttttggggtgggggcgggggtccaggcagaaagaaactgtctgctgctcaagacccacaggacgccgggaagactaaatgatcactgcccccagtgaatatggtgaagaagctggtgatggcccagaagcggggagagacacgagccctttgcctgggtgtaaccatggtggtgtgtgccgtcatcacctactacatcctggtcacgactgtgctgcccctctaccagaaaagcgtgtggacccaggaatccaagtgccacctgattgagaccaacatcagggaccaggaggagctgaagggcaagaaggtgccccagtacccatgcctgtgggtcaacgtgtcagctgccggcaggtgggctgtgctgtaccacacggaggacactcgggaccagaaccagcagtgctcctacatcccaggcagcgtggacaattaccagacggcccgggccgacgtggagaaggtcagagccaaattccaagagcagcctgggggcccagccagtcccctgtgccctgacaagtggtatggcatggatggatggctctcttctgggccgccaggatgtacaggtactggtgctctcaccatacgatagt

SEQ ID NO: 435090 - DNA, 2243 bp, Homo sapiens
cgcggcagaaggagcgaagctctggcccggcgtgtagcgggcgcactacggggacgctgggccgggcaccgggctgtgtggagaagtgagcgcgctcgtctgacccccgtgcccgccaccccgagccactaacggcgatctcccaaggcctgcccgaggcctctgtcctctgtcctcagccccgcagcggcaacgtcttgcactcggcgagctcgccgctcccgaccctcccgcgcccccgccctgccgcgctgctccccgcccagccgcgggtctgtggtccaagccgccccgaagcagcccgaacaagatcactcaaggtgaaggataatctactaataccagcactttgaatgaaaatttgtttctctgccacaaactgaacatcttttttttttttttttttttttggtgggggagttgaaacctaattttgtggcgtagcagctatgcagcttgaaatccaagtagcactaaattttattatttcgtatttgtacaataagcttcccaggagacgtgtcaacatttttggtgaagaacttgaaagacttcttaagaagaaatatgaagggcactggtatcctgaaaagccatacaaaggatcggggtttagatgtatacacataggggagaaagtggacccagtgattgaacaagcatccaaagagagtggtttggacattgatgatgttcgtggcaatctgccacaggatcttagtgtttggatcgacccatttgaggtttcttaccaaattggtgaaaagggaccagtgaaggtgctttacgtggatgataataatgaaaatggatgtgagttggataaggagatcaaaaacagctttaacccagaggcccaggtttttatgcccataagtgacccagcctcatcagtgtccagctctccatcgcctccttttggtcactctgctgctgtaagccctaccttcatgccccggtccactcagcctttaacctttaccactgccacttttgctgccaccaagttcggctctaccaaaatgaagaatagtggccgtagcaacaaggttgcacgtacttctcccatcaacctcggcttgaatgtgaatgacctcttgaagcagaaagccatctcttcctcaatgcactctctgtatgggcttggcttgggtagccagcagcagccacagcaacagcagcagccagcccagccgccaccgccaccaccaccaccacagcagcaacaacagcagaaaacctctgctctttctcctaatgccaaggaatttatttttcctaatatgcagggtcaaggtagtagtaccaatggaatgttcccaggtgacagcccccttaacctcagtcctctccagtacagtaatgcctttgatgtgtttgcagcctatggaggcctcaatgagaagtcttttgtagatggcttgaattttagcttaaataacatgcagtattctaaccagcaattccagcctgttatggctaactaaaaaaaagaaaatgtatcgtacaagttaaaatgcacgggcccaagggggattttttttttcacctccttgagaattttttttttttaagcttatagtaaggatacattcaagcttgggttaaaaaaataataataaaacatgcatcatttttcatttgccaaccaagcacaaagttattttatactgactgtatattttaaagtatactctcagatatggcctcttacagtatttaagatatagcaaggacatggctgatttttttttataaaaattggcactaataagtgggtttattggtcttttctaattgtataatttaatttagtacaaagtttgtaaaatatcagaggatatatatatattgtttctacgacatggtattgcatttatatctttttactacagtgatctgtgacagcagcagcttcatgttgtattttttttactgaaattgtaaaatatccatcttaaagacatcaactattctaaaaattgtgtacaggatattcctttagtggtggaattaaaatgtacgaatacttgctttttcaaaaaaatgtattttctgttaaaagtttaaagatttttgctatatattatggaagaaaaatgtaatcgtaaatattaattttgtacctatattgtgcaatacttgaaaaaaacggtataaaagtattttgagtcagtgtcttacatgttaagagggactgaaatagtttatattaagtttgtattaaaattctttaaaattaa

SEQ ID NO: 435091 - DNA, 1827 bp, Homo sapiens
cggacgcgtgggtcgacccacgcgtccgcagctatgcagcttgaaatccaagtagcactaaattttattatttcgtatttgtacaataagcttcccaggagacgtgtcaacatttttggtgaagaacttgaaagacttcttaagaagaaatatgaagggcactggtatcctgaaaagccatacaaaggatcggggtttagatgtatacacataggggagaaagtggacccagtgattgaacaagcatccaaagagagtggtttggacattgatgatgttcgtggcaatctgccacaggatcttagtgtttggatcgacccatttgaggtttcttaccaaattggtgaaaagggaccagtgaaggtgctttacgtggatgataataatgaaaatggatgtgagttggataaggagatcaaaaacagctttaacccagaggcccaggtttttatgcccataagtgacccagcctcatcagtgtccagctctccatcgcctccttttggtcactctgctgctgtaagccctaccttcatgccccggtccactcagcctttaacctttaccactgccacttttgctgccaccaagttcggctctaccaaaatgaagaatagtggccgtagcaacaaggttgcacgtacttctcccatcaacctcggcttgaatgtgaatgacctcttgaagcagaaagccatctcttcctcaatgcactctctgtatgggcttggcttgggtagccagcagcagccacagcaacagcagcagccagcccagccgccaccgccaccaccaccaccacagcagcaacaacagcagaaaacctctgctctttctcctaatgccaaggaatttatttttcctaatatgcagggtcaaggtagtagtaccaatggaatgttcccaggtgacagcccccttaacctcagtcctctccagtacagtaatgcctttgatgtgtttgcagcctatggaggcctcaatgagaagtcttttgtagatggcttgaattttagcttaaataacatgcagtattctaaccagcaattccagcctgttatggctaactaaaaaaaagaaaatgtatcgtacaagttaaaatgcacgggcccaagggggattttttttttcacctccttgagaattttttttttttaagcttatagtaaggatacattcaagcttgggttaaaaaaataataataaaacatgcatcatttttcatttgccaaccaagcacaaagttattttatactgactgtatattttaaagtatactctcagatatggcctcttacagtatttaagatatagcaaggacatggctgatttttttttataaaaattggcactaataagtgggtttattggtcttttctaattgtataatttaatttagtacaaagtttgtaaaatatcagaggatatatatatattgtttctacgacatggtattgcatttatatctttttactacagtgatctgtgacagcagcagcttcatgttgtattttttttactgaaattgtaaaatatccatcttaaagacatcaactattctaaaaattgtgtacaggatattcctttagtggtggaattaaaatgtacgaatacttgctttttcaaaaaaatgtattttctgttaaaagtttaaagatttttgctatatattatggaagaaaaatgtaatcgtaaatattaattttgtacctatattgtgcaatacttgaaaaaaacggtataaaagtattttgagtcagtgtcttacatgttaagagggactgaaatagtttatattaagtttgtattaaaattctttaaaattaa

SEQ ID NO: 435092 - DNA, 1639 bp, Homo sapiens
acagagttccccattggatgctgaggcaggagtttgagatagcctgggcaacatagcatccaaagagagtggtttggacattgatgatgttcgtggcaatctgccacaggatcttagtgtttggatcgacccatttgaggtttcttaccaaattggtgaaaagggaccagtgaaggtgctttacgtggatgataataatgaaaatggatgtgagttggataaggagatcaaaaacagctttaacccagaggcccaggtttttatgcccataagtgacccagcctcatcagtgtccagctctccatcgcctccttttggtcactctgctgctgtaagccctaccttcatgccccggtccactcagcctttaacctttaccactgccacttttgctgccaccaagttcggctctaccaaaatgaagaatagtggccgtagcaacaaggttgcacgtacttctcccatcaacctcggcttgaatgtgaatgacctcttgaagcagaaagccatctcttcctcaatgcactctctgtatgggcttggcttgggtagccagcagcagccacagcaacagcagcagccagcccagccgccaccgccaccaccaccaccacagcagcaacaacagcagaaaacctctgctctttctcctaatgccaaggaatttatttttcctaatatgcagggtcaaggtagtagtaccaatggaatgttcccaggtgacagcccccttaacctcagtcctctccagtacagtaatgcctttgatgtgtttgcagcctatggaggcctcaatgagaagtcttttgtagatggcttgaattttagcttaaataacatgcagtattctaaccagcaattccagcctgttatggctaactaaaaaaaagaaaatgtatcgtacaagttaaaatgcacgggcccaagggggattttttttttcacctccttgagaattttttttttttaagcttatagtaaggatacattcaagcttgggttaaaaaaataataataaaacatgcatcatttttcatttgccaaccaagcacaaagttattttatactgactgtatattttaaagtatactctcagatatggcctcttacagtatttaagatatagcaaggacatggctgatttttttttataaaaattggcactaataagtgggtttattggtcttttctaattgtataatttaatttagtacaaagtttgtaaaatatcagaggatatatatatattgtttctacgacatggtattgcatttatatctttttactacagtgatctgtgacagcagcagcttcatgttgtattttttttactgaaattgtaaaatatccatcttaaagacatcaactattctaaaaattgtgtacaggatattcctttagtggtggaattaaaatgtacgaatacttgctttttcaaaaaaatgtattttctgttaaaagtttaaagatttttgctatatattatggaagaaaaatgtaatcgtaaatattaattttgtacctatattgtgcaatacttgaaaaaaacggtataaaagtattttgagtcagtgtcttacatgttaagagggactgaaatagtttatattaagtttgtattaaaattctttaaaattaa

SEQ ID NO: 435093 - DNA, 2189 bp, Homo sapiens
cgcggcagaaggagcgaagctctggcccggcgtgtagcgggcgcactacggggacgctgggccgggcaccgggctgtgtggagaagtgagcgcgctcgtctgacccccgtgcccgccaccccgagccactaacggcgatctcccaaggcctgcccgaggcctctgtcctctgtcctcagccccgcagcggcaacgtcttgcactcggcgagctcgccgctcccgaccctcccgcgcccccgccctgccgcgctgctccccgcccagccgcgggtctgtggtccaagccgccccgaagcagcccgaacaagatcactcaaggtgaaggataatctactaataccagcactttgaatgaaaatttgtttctctgccacaaactgaacatcttttttttttttttttttttttggtgggggagttgaaacctaattttgtggcgtagcagctatgcagcttgaaatccaagtagcactaaattttattatttcgtatttgtacaataagcttcccaggagacgtgtcaacatttttggtgaagaacttgaaagacttcttaagaagaaatatgaagggcactggtatcctgaaaagccatacaaaggatcggggtttagatgtatacacataggggagaaagtggacccagtgattgaacaagcatccaaagagagtggtttggacattgatgatgttcgtggcaatctgccacaggatcttagtgtttggatcgacccatttgaggtttcttaccaaattggtgaaaagggaccagtgaaggtgctttacgtggatgataataatgaaaatggatgtgagttggataaggagatcaaaaacagctttaacccagaggcccaggtttttatgcccataagtgacccagcctcatcagtgtccagctctccatcgcctccttttggtcactctgctgctgtaagccctaccttcatgccccggtccactcagcctttaacctttaccactgccacttttgctgccaccaagttcggctctaccaaaatgaagaatagtggccgtagcaacaaggttgcacgtacttctcccatcaacctcggcttgaatgtgaatgacctcttgaagcagaaagccatctcttcctcaatgcactctctgtatgggcttggcttgggtagccagcagcagccacagcaacagcagcagccagcccagccgccaccgccaccaccaccaccacagcagcaacaacagcagggtcaaggtagtagtaccaatggaatgttcccaggtgacagcccccttaacctcagtcctctccagtacagtaatgcctttgatgtgtttgcagcctatggaggcctcaatgagaagtcttttgtagatggcttgaattttagcttaaataacatgcagtattctaaccagcaattccagcctgttatggctaactaaaaaaaagaaaatgtatcgtacaagttaaaatgcacgggcccaagggggattttttttttcacctccttgagaattttttttttttaagcttatagtaaggatacattcaagcttgggttaaaaaaataataataaaacatgcatcatttttcatttgccaaccaagcacaaagttattttatactgactgtatattttaaagtatactctcagatatggcctcttacagtatttaagatatagcaaggacatggctgatttttttttataaaaattggcactaataagtgggtttattggtcttttctaattgtataatttaatttagtacaaagtttgtaaaatatcagaggatatatatatattgtttctacgacatggtattgcatttatatctttttactacagtgatctgtgacagcagcagcttcatgttgtattttttttactgaaattgtaaaatatccatcttaaagacatcaactattctaaaaattgtgtacaggatattcctttagtggtggaattaaaatgtacgaatacttgctttttcaaaaaaatgtattttctgttaaaagtttaaagatttttgctatatattatggaagaaaaatgtaatcgtaaatattaattttgtacctatattgtgcaatacttgaaaaaaacggtataaaagtattttgagtcagtgtcttacatgttaagagggactgaaatagtttatattaagtttgtattaaaattctttaaaattaa

SEQ ID NO: 435094 - DNA, 2174 bp, Homo sapiens
cgcggcagaaggagcgaagctctggcccggcgtgtagcgggcgcactacggggacgctgggccgggcaccgggctgtgtggagaagtgagcgcgctcgtctgacccccgtgcccgccaccccgagccactaacggcgatctcccaaggcctgcccgaggcctctgtcctctgtcctcagccccgcagcggcaacgtcttgcactcggcgagctcgccgctcccgaccctcccgcgcccccgccctgccgcgctgctccccgcccagccgcgggtctgtggtccaagccgccccgaagcagcccgaacaagatcactcaaggtgaaggataatctactaataccagcactttgaatgaaaatttgtttctctgccacaaactgaacatcttttttttttttttttttttttggtgggggagttgaaacctaattttgtggcgtagcagctatgcagcttgaaatccaagtagcactaaattttattatttcgtatttgtacaataagcttcccaggagacgtgtcaacatttttggtgaagaacttgaaagacttcttaagaagaaatatgaagggcactggtatcctgaaaagccatacaaaggatcggggtttagatgtatacacataggggagaaagtggacccagtgattgaacaagcatccaaagagagtggtttggacattgatgatgttcgtggcaatctgccacaggatcttagtgtttggatcgacccatttgaggtttcttaccaaattggtgaaaagggaccagtgaaggtgctttacgtggatgataataatgaaaatggatgtgagttggataaggagatcaaaaacagctttaacccagaggcccaggtttttatgcccataagtgacccagcctcatcagtgtccagctctccatcgcctccttttggtcactctgctgctgtaagccctaccttcatgccccggtccactcagcctttaacctttaccactgccacttttgctgccaccaagttcggctctaccaaaatgaagaatagtggccgtagcaacaaggttgcacgtacttctcccatcaacctcggcttgaatgtgaatgacctcttgaagcagaaagccatctcttcctcaatgcactcgccaccaccaccaccacagcagcaacaacagcagaaaacctctgctctttctcctaatgccaaggaatttatttttcctaatatgcagggtcaaggtagtagtaccaatggaatgttcccaggtgacagcccccttaacctcagtcctctccagtacagtaatgcctttgatgtgtttgcagcctatggaggcctcaatgagaagtcttttgtagatggcttgaattttagcttaaataacatgcagtattctaaccagcaattccagcctgttatggctaactaaaaaaaagaaaatgtatcgtacaagttaaaatgcacgggcccaagggggattttttttttcacctccttgagaattttttttttttaagcttatagtaaggatacattcaagcttgggttaaaaaaataataataaaacatgcatcatttttcatttgccaaccaagcacaaagttattttatactgactgtatattttaaagtatactctcagatatggcctcttacagtatttaagatatagcaaggacatggctgatttttttttataaaaattggcactaataagtgggtttattggtcttttctaattgtataatttaatttagtacaaagtttgtaaaatatcagaggatatatatatattgtttctacgacatggtattgcatttatatctttttactacagtgatctgtgacagcagcagcttcatgttgtattttttttactgaaattgtaaaatatccatcttaaagacatcaactattctaaaaattgtgtacaggatattcctttagtggtggaattaaaatgtacgaatacttgctttttcaaaaaaatgtattttctgttaaaagtttaaagatttttgctatatattatggaagaaaaatgtaatcgtaaatattaattttgtacctatattgtgcaatacttgaaaaaaacggtataaaagtattttgagtcagtgtcttacatgttaagagggactgaaatagtttatattaagtttgtattaaaattctttaaaattaa

SEQ ID NO: 435095 - DNA, 1918 bp, Homo sapiens
cgcggcagaaggagcgaagctctggcccggcgtgtagcgggcgcactacggggacgctgggccgggcaccgggctgtgtggagaagtgagcgcgctcgtctgacccccgtgcccgccaccccgagccactaacggcgatctcccaaggcctgcccgaggcctctgtcctctgtcctcagccccgcagcggcaacgtcttgcactcggcgagctcgccgctcccgaccctcccgcgcccccgccctgccgcgctgctccccgcccagccgcgggtctgtggtccaagccgccccgaagcagcccgaacaagatcactcaaggtgaaggataatctactaataccagcactttgaatgaaaatttgtttctctgccacaaactgaacatcttttttttttttttttttttttggtgggggagttgaaacctaattttgtggcgtagcagctatgcagcttgaaatccaagtagcactaaattttattatttcgtatttgtacaataagcttcccaggagacgtgtcaacatttttggtgaagaacttgaaagacttcttaagaagaaatatgaagggcactggtatcctgaaaagccatacaaaggatcggggtttagatgtatacacataggggagaaagtggacccagtgattgaacaagcatccaaagagagtggtttggacattgatgatgttcgtggcaatctgccacaggatcttagtgtttggatcgacccatttgaggtttcttaccaaattggtgaaaagggaccagtgaaggtgctttacgtggatgataataatgaaaatggatgtgagttggataaggagatcaaaaacagctttaacccagaggcccaggtttttatgcccataagtgacccagcctcatcagtgtccagctctccatcgcctccttttggtcactctgctgctgtaagccctaccttcatgccccggtccactcagcctttaacctttaccactgccacttttgctgccaccaagttcggctctaccaaaatgaagaatagtggccgtagcaacaaggttgcacgtacttctcccatcaacctcggcttgaatgtgaatgacctttgaattttagcttaaataacatgcagtattctaaccagcaattccagcctgttatggctaactaaaaaaaagaaaatgtatcgtacaagttaaaatgcacgggcccaagggggattttttttttcacctccttgagaattttttttttttaagcttatagtaaggatacattcaagcttgggttaaaaaaataataataaaacatgcatcatttttcatttgccaaccaagcacaaagttattttatactgactgtatattttaaagtatactctcagatatggcctcttacagtatttaagatatagcaaggacatggctgatttttttttataaaaattggcactaataagtgggtttattggtcttttctaattgtataatttaatttagtacaaagtttgtaaaatatcagaggatatatatatattgtttctacgacatggtattgcatttatatctttttactacagtgatctgtgacagcagcagcttcatgttgtattttttttactgaaattgtaaaatatccatcttaaagacatcaactattctaaaaattgtgtacaggatattcctttagtggtggaattaaaatgtacgaatacttgctttttcaaaaaaatgtattttctgttaaaagtttaaagatttttgctatatattatggaagaaaaatgtaatcgtaaatattaattttgtacctatattgtgcaatacttgaaaaaaacggtataaaagtattttgagtcagtgtcttacatgttaagagggactgaaatagtttatattaagtttgtattaaaattctttaaaattaa

SEQ ID NO: 435096 - DNA, 1710 bp, Homo sapiens
cgcggcagaaggagcgaagctctggcccggcgtgtagcgggcgcactacggggacgctgggccgggcaccgggctgtgtggagaagtgagcgcgctcgtctgacccccgtgcccgccaccccgagccactaacggcgatctcccaaggcctgcccgaggcctctgtcctctgtcctcagccccgcagcggcaacgtcttgcactcggcgagctcgccgctcccgaccctcccgcgcccccgccctgccgcgctgctccccgcccagccgcgggtctgtggtccaagccgccccgaagcagccccaggagacgtgtcaacatttttggtgaagaacttgaaagacttcttaagaagaaatatgaagggcactggtatcctgaaaagccatacaaaggatcggggtttagatgtatacacataggggagaaagtggacccagtgattgaacaagcatccaaagagagtggtttggacattgatgatgttcgtggcaatctgccacaggatcttagtgtttggatcgacccatttgaggtttcttaccaaattggtgaaaagggaccagtgaaggtgctttacgtggatgataataatgaaaatggatgtgagttggataaggagatcaaaaacagctttaacccagaggcccaggtttttatgcccataagtgacccagcctcatcagtgtccagctctccatcgcctccttttggtcactctgctgctgtaagccctaccttcatgccccggtccactcagcctttaacctttaccactgccacttttgctgccaccaagttcggctctaccaaaatgaagaatagtggccgtagcaacaaggttgcacgtacttctcccatcaacctcggcttgaatgtgaatgacctttgaattttagcttaaataacatgcagtattctaaccagcaattccagcctgttatggctaactaaaaaaaagaaaatgtatcgtacaagttaaaatgcacgggcccaagggggattttttttttcacctccttgagaattttttttttttaagcttatagtaaggatacattcaagcttgggttaaaaaaataataataaaacatgcatcatttttcatttgccaaccaagcacaaagttattttatactgactgtatattttaaagtatactctcagatatggcctcttacagtatttaagatatagcaaggacatggctgatttttttttataaaaattggcactaataagtgggtttattggtcttttctaattgtataatttaatttagtacaaagtttgtaaaatatcagaggatatatatatattgtttctacgacatggtattgcatttatatctttttactacagtgatctgtgacagcagcagcttcatgttgtattttttttactgaaattgtaaaatatccatcttaaagacatcaactattctaaaaattgtgtacaggatattcctttagtggtggaattaaaatgtacgaatacttgctttttcaaaaaaatgtattttctgttaaaagtttaaagatttttgctatatattatggaagaaaaatgtaatcgtaaatattaattttgtacctatattgtgcaatacttgaaaaaaacggtataaaagtattttgagtcagtgtcttacatgttaagagggactgaaatagtttatattaagtttgtattaaaattctttaaaattaa

SEQ ID NO: 435097 - DNA, 515 bp, Homo sapiens
cggacgcgtgggtcgacccacgcgtccgaaaaattggcactaataagtgggtttattggtcttttctaattgtataatttaatttagtacaaagtttgtaaaatatcagaggatatatatatattgtttctacgacatggtattgcatttatatctttttactacagtgatctgtgacagcagcagcttcatgttgtattttttttactgaaattgtaaaatatccatcttaaagacatcaactattctaaaaattgtgtacaggatattcctttagtggtggaattaaaatgtacgaatacttgctttttcaaaaaaatgtattttctgttaaaagtttaaagatttttgctatatattatggaagaaaaatgtaatcgtaaatattaattttgtacctatattgtgcaatacttgaaaaaaacggtataaaagtattttgagtcagtgtcttacatgttaagagggactgaaatagtttatattaagtttgtattaaaattctttaaaattaa

SEQ ID NO: 435098 - DNA, 527 bp, Homo sapiens
ttttttttttttgagaattgctaaatggaaagctagcctagaagcaccaagtaaatatattcaaggaatataagttgtttaaacattagaaaaatttttgcactcattttttagctgtattaggaatgtcaataatcctgtagcaaattttcacagagaactttaagaaattcttgcattggtcgatttcaatttgaaagctttttggtttgtttgctttttaaattttcatgttctaggaaactatgattctggttgttcaggattgttattattatagttgtgtaaaattattttattttgtgtgtattgtgcacagcttgggggggggcgggaaatgcactaattgtgctcttccttataaatggtacatattactgacacagacaaataaagtttctaattgtttctgatttaatcactagtgatacagcatattctgtatgaaatgttttctcctttctcattgtcatctacttcattttttgttttcatgttttgaagaaataaaaaccaaaatggtatta

SEQ ID NO: 435099 - DNA, 1178 bp, Homo sapiens
ctctgctcactgcaagctccgcctcctgagttcatgccattctcctgcttcagccttctgagtagctgggacaacaggtgtccgccaccatgcccaattaatttttttgtatttgtagagatggggtttcaccgtgttagctaggatggtctcgatctcctgaccttgtgatccgcccgccttggcctcccaaagtgctgggattacaggcgtgagctaccgtgcccggctattaataatgttaacaataactaatgattattgagcatttactacatgtcaggtcctgaattatgtatattatttcatttactcctcataaaagggttccttctaggagctaggggagaaaaccagccattatatagtcaataataatattaatggtaataatagttattatatataacagttatatattacataacatatgctggccctgaattgaacatattctctaatttgatttttgaatatttaaaaatatacacatatatttgttttttttttttaagagatggaggagtctcaccatgttgcccaagctggcctcaaacccctggcctcaagtgagcctcccacctcagcctcccaagtagctgccaccatgcagtctctaatttaaattttaaacaaaccctagatgttattattatcttagagtaggctgcttctaaaatagctcccaatgatcctcttgctggtctttacatccttgtgtaatctccttgagtgtgggctggacctaatgacttacttctaactcacaggatgtggcaacagtgatgggatgtcacatctgtgattggattacgaaagactgtgccttctgttttgctattactgtctctggtgagtcctctctcttgctcttgcttgcttgcactgatgaagtaagctgccacgttgtgagatgctcaacgaagaggcccatgaggcagggcaccgagggaggcttctggccaacagctcctggggaaccaaggccttaggaagtgagtcctgccaaccttgttccagcgtggaaagcagcgtggcacttcccggtggtgaaagcaccccagcttgaaagggtgaaaacaccttctcccagatagtctccctttgtttagccagtgcttttgccttaaggaaatcaaatgaaggtatgctccttggttggctgctgaatctgtcct

SEQ ID NO: 435100 - DNA, 3501 bp, Homo sapiens
ggtgggcctgttgtcatgggggaggtggtggcgcttggtggccactggcggccgaggtagaggcagtggcgcttgagttggtcgggggcagcggcagatttgaggcttaagcaacttcttccggggaagagtgccagtgcagccactgttacaattcaagatcttgatctatatccatagattggaatattggtgggccagcaatcctcagacgcctcacttaggacaaatgaggaaactgaggcttggtgaagttacgaaacttgtccaaaatcacacaacttgtaaagggcacagccaagattcagagccaggctgtaaaaattaaaatgaacaaattacggcaaagttttaggagaaagaaggatgtttatgttccagaggccagtcgtccacatcagtggcagacagatgaagaaggcgttcgcaccggaaaatgtagcttcccggttaagtaccttggccatgtagaagttgatgaatcaagaggaatgcacatctgtgaagatgctgtaaaaagattgaaagctgaaaggaagttcttcaaaggcttctttggaaaaactggaaagaaagcagttaaagcagttctgtgggtctcagcagatggactcagagttgtggatgaaaaaactaaggacctcatagttgaccagacgatagagaaagtttctttctgtgccccagacaggaactttgatagagccttttcttacatatgccgtgatggcaccactcgtcgctggatctgtcactgcttcatggctgtcaaggacacaggtgaaaggttgagccatgcagtaggctgtgcttttgcagcctgtttagagcgcaagcagaagcgggagaaggaatgtggagtgactgctacttttgatgctagtcggaccacttttacaagagaaggatcattccgtgtcacaacagccactgaacaagcagaaagagaggagatcatgaaacaaatgcaagatgccaagaaagctgaaacagataagatagtcgttggttcatcagttgcccctggcaacactgccccatccccatcctctcccacctctcctacttctgatgccacgacctctctggagatgaacaatcctcatgccatcccacgccggcatgctccaattgaacagcttgctcgccaaggctctttccgaggttttcctgctcttagccagaagatgtcaccctttaaacgccaactatccctacgcatcaatgagttgccttccactatgcagaggaagactgatttccccattaaaaatgcagtgccagaagtagaaggggaggcagagagcatcagctccctgtgctcacagatcaccaatgccttcagcacacctgaggaccccttctcatctgctccgatgaccaaaccagtgacagtggtggcaccacaatctcctaccttccaagggaccgagtggggtcaatcttctggtgctgcctctccaggtctcttccaggccggtcatagacgtactccctctgaggccgaccgatggttagaagaggtgtctaagagcgtccgggctcagcagccccaggcctcagctgctcctctgcagccagttctccagcctcctccacccactgccatctcccagccagcatcacctttccaagggaatgcattcctcacctctcagcctgtgccagtgggtgtggtcccagccctgcaaccagcctttgtccctgcccagtcctatcctgtggccaatggaatgccctatccagcccctaatgtgcctgtggtgggcatcactccctcccagatggtggccaacgtatttggcactgcaggccaccctcaggctgcccatccccatcagtcacccagcctggtcaggcagcagacattccctcactacgaggcaagcagtgctaccaccagtcccttctttaagcctcctgctcagcacctcaacggttctgcagctttcaatggtgtagatgatggcaggttggcctcagcagacaggcatacagaggttcctacaggcacctgcccagtggatccttttgaagcccagtgggctgcattagaaaataagtccaagcagcgtactaatccctcccctaccaaccctttctccagtgacttacagaagacgtttgaaattgaactttaagcaatcattatggctatgtatcttgtccataccagacagggagcagggggtagcggtcaaaggagcaaaacagactttgtctcctgattagtactcttttcactaatcccaaaggtcccaaggaacaagtccaggcccagagtactgtgaggggtgattttgaaagacatgggaaaaagcattcctagagaaaagctgccttgcaattaggctaaagaagtcaaggaaatgttgctttctgtactccctcttcccttacccccttacaaatctctggcaacagagaggcaaagtatctgaacaagaatctatattccaagcacatttactgaaatgtaaaacacaacaggaagcaaagcaatctccctttgtttttcaggccattcacctgcctcctgtcagtagtggcctgtattagagatcaagaagagtggtttgtgctcaggctggggaacagagaggcacgctatgctgccagaattcccaggagggcatatcagcaactgcccagcagagctatattttgggggagaagttgagcttccattttgagtaacagaataaatattatatatatcaaaagccaaaatctttatttttatgcatttagaatattttaaatagttctcagatattaagaagttgtatgagttgtaagtaatcttgccaaaggtaaaggggctagttgtaagaaattgtacataagattgatttatcattgatgcctactgaaataaaaagaggaaaggctggaagctgcagacaggatccctagcttgttttctgtcagtcattcattgtaagtagcacattgcaacaacaatcatgcttatgaccaatacagtcactaggttgtagttttttttaaataaaggaaaagcagtattgtcctggttttaaacctatgatggaattctaatgtcattattttaatggaatcaatcgaaatatgctctatagagaatatatcttttatatattgctgcagtttccttatgttaatcctttaacactaaggtaacatgacataatcataccatagaagggaacacaggttaccatattggtttgtaatatgggtcttggtgggttttgttttatcctttaaattttgttcccatgagttttgtggggatggggattctggttttattagctttgtgtgtgtcctcttcccccaaacccccttttggtgagaacatccccttgacagttgcagcctcttgacctcggataacaataagagagctcatctcatttttacttttgaacgttggccttacaatcaaatgtaagttatatatatttgtactgatgaaaatttataatctgctttaacaaaaataaatgttcatggtag

SEQ ID NO: 435101 - DNA, 3645 bp, Homo sapiens
ggtgggcctgttgtcatgggggaggtggtggcgcttggtggccactggcggccgaggtagaggcagtggcgcttgagttggtcgggggcagcggcagatttgaggcttaagcaacttcttccggggaagagtgccagtgcagccactgttacaattcaagatcttgatctatatccatagattggaatattggtgggccagcaatcctcagacgcctcacttaggacaaatgaggaaactgaggcttggtgaagttacgaaacttgtccaaaatcacacaacttgtaaagggcacagccaagattcagagccaggctgtaaaaattaaaatgaacaaattacggcaaagttttaggagaaagaaggatgtttatgttccagaggccagtcgtccacatcagtggcagacagatgaagaaggcgttcgcaccggaaaatgtagcttcccggttaagtaccttggccatgtagaagttgatgaatcaagaggaatgcacatctgtgaagatgctgtaaaaagattgaaagctgaaaggaagttcttcaaaggcttctttggaaaaactggaaagaaagcagttaaagcagttctgtgggtctcagcagatggactcagagttgtggatgaaaaaactaaggacctcatagttgaccagacgatagagaaagtttctttctgtgccccagacaggaactttgatagagccttttcttacatatgccgtgatggcaccactcgtcgctggatctgtcactgcttcatggctgtcaaggacacaggtgaaaggttgagccatgcagtaggctgtgcttttgcagcctgtttagagcgcaagcagaagcgggagaaggaatgtggagtgactgctacttttgatgctagtcggaccacttttacaagagaaggatcattccgtgtcacaacagccactgaacaagcagaaagagaggagatcatgaaacaaatgcaagatgccaagaaagctgaaacagataagatagtcgttggttcatcagttgcccctggcaacactgccccatccccatcctctcccacctctcctacttctgatgccacgacctctctggagatgaacaatcctcatgccatcccacgccggcatgctccaattgaacagcttgctcgccaaggctctttccgaggttttcctgctcttagccagaagatgtcaccctttaaacgccaactatccctacgcatcaatgagttgccttccactatgcagaggaagactgatttccccattaaaaatgcagtgccagaagtagaaggggaggcagagagcatcagctccctgtgctcacagatcaccaatgccttcagcacacctgaggaccccttctcatctgctccgatgaccaaaccagtgacagtggtggcaccacaatctcctaccttccaagctaatggcactgactcagccttccatgtgcttgctaagccagcccatactgctctagcacccgtagcaatgcctgtgcgtgaaaccaacccttgggcccatgcccctgatgctgctaacaaggaaattgcagccacatgttcggggaccgagtggggtcaatcttctggtgctgcctctccaggtctcttccaggccggtcatagacgtactccctctgaggccgaccgatggttagaagaggtgtctaagagcgtccgggctcagcagccccaggcctcagctgctcctctgcagccagttctccagcctcctccacccactgccatctcccagccagcatcacctttccaagggaatgcattcctcacctctcagcctgtgccagtgggtgtggtcccagccctgcaaccagcctttgtccctgcccagtcctatcctgtggccaatggaatgccctatccagcccctaatgtgcctgtggtgggcatcactccctcccagatggtggccaacgtatttggcactgcaggccaccctcaggctgcccatccccatcagtcacccagcctggtcaggcagcagacattccctcactacgaggcaagcagtgctaccaccagtcccttctttaagcctcctgctcagcacctcaacggttctgcagctttcaatggtgtagatgatggcaggttggcctcagcagacaggcatacagaggttcctacaggcacctgcccagtggatccttttgaagcccagtgggctgcattagaaaataagtccaagcagcgtactaatccctcccctaccaaccctttctccagtgacttacagaagacgtttgaaattgaactttaagcaatcattatggctatgtatcttgtccataccagacagggagcagggggtagcggtcaaaggagcaaaacagactttgtctcctgattagtactcttttcactaatcccaaaggtcccaaggaacaagtccaggcccagagtactgtgaggggtgattttgaaagacatgggaaaaagcattcctagagaaaagctgccttgcaattaggctaaagaagtcaaggaaatgttgctttctgtactccctcttcccttacccccttacaaatctctggcaacagagaggcaaagtatctgaacaagaatctatattccaagcacatttactgaaatgtaaaacacaacaggaagcaaagcaatctccctttgtttttcaggccattcacctgcctcctgtcagtagtggcctgtattagagatcaagaagagtggtttgtgctcaggctggggaacagagaggcacgctatgctgccagaattcccaggagggcatatcagcaactgcccagcagagctatattttgggggagaagttgagcttccattttgagtaacagaataaatattatatatatcaaaagccaaaatctttatttttatgcatttagaatattttaaatagttctcagatattaagaagttgtatgagttgtaagtaatcttgccaaaggtaaaggggctagttgtaagaaattgtacataagattgatttatcattgatgcctactgaaataaaaagaggaaaggctggaagctgcagacaggatccctagcttgttttctgtcagtcattcattgtaagtagcacattgcaacaacaatcatgcttatgaccaatacagtcactaggttgtagttttttttaaataaaggaaaagcagtattgtcctggttttaaacctatgatggaattctaatgtcattattttaatggaatcaatcgaaatatgctctatagagaatatatcttttatatattgctgcagtttccttatgttaatcctttaacactaaggtaacatgacataatcataccatagaagggaacacaggttaccatattggtttgtaatatgggtcttggtgggttttgttttatcctttaaattttgttcccatgagttttgtggggatggggattctggttttattagctttgtgtgtgtcctcttcccccaaacccccttttggtgagaacatccccttgacagttgcagcctcttgacctcggataacaataagagagctcatctcatttttacttttgaacgttggccttacaatcaaatgtaagttatatatatttgtactgatgaaaatttataatctgctttaacaaaaataaatgttcatggtag

SEQ ID NO: 435102 - DNA, 2329 bp, Homo sapiens
tgtattggtggtgctccgtctagacagtgcttcagtgtggctgacacagcagcatggtcttgacaagttttcttcatcctaccacaaaatcccagttggtaatagagactttactcctacctatcaaaaccacaaaatgtcccattagggggggacatgttgtacatgttaggatcattcaaataaccaagattataaggtgaggaaagatgcccctaactgattcttttgtctctcatcttgttggttccagggaccgagtggggtcaatcttctggtgctgcctctccaggtctcttccaggccggtcatagacgtactccctctgaggccgaccgatggttagaagaggtgtctaagagcgtccgggctcagcagccccaggcctcagctgctcctctgcagccagttctccagcctcctccacccactgccatctcccagccagcatcacctttccaagggaatgcattcctcacctctcagcctgtgccagtgggtgtggtcccagccctgcaaccagcctttgtccctgcccagtcctatcctgtggccaatggaatgccctatccagcccctaatgtgcctgtggtgggcatcactccctcccagatggtggccaacgtatttggcactgcaggccaccctcaggctgcccatccccatcagtcacccagcctggtcaggcagcagacattccctcactacgaggcaagcagtgctaccaccagtcccttctttaagcctcctgctcagcacctcaacggttctgcagctttcaatggtgtagatgatggcaggttggcctcagcagacaggcatacagaggttcctacaggcacctgcccagtggatccttttgaagcccagtgggctgcattagaaaataagtccaagcagcgtactaatccctcccctaccaaccctttctccagtgacttacagaagacgtttgaaattgaactttaagcaatcattatggctatgtatcttgtccataccagacagggagcagggggtagcggtcaaaggagcaaaacagactttgtctcctgattagtactcttttcactaatcccaaaggtcccaaggaacaagtccaggcccagagtactgtgaggggtgattttgaaagacatgggaaaaagcattcctagagaaaagctgccttgcaattaggctaaagaagtcaaggaaatgttgctttctgtactccctcttcccttacccccttacaaatctctggcaacagagaggcaaagtatctgaacaagaatctatattccaagcacatttactgaaatgtaaaacacaacaggaagcaaagcaatctccctttgtttttcaggccattcacctgcctcctgtcagtagtggcctgtattagagatcaagaagagtggtttgtgctcaggctggggaacagagaggcacgctatgctgccagaattcccaggagggcatatcagcaactgcccagcagagctatattttgggggagaagttgagcttccattttgagtaacagaataaatattatatatatcaaaagccaaaatctttatttttatgcatttagaatattttaaatagttctcagatattaagaagttgtatgagttgtaagtaatcttgccaaaggtaaaggggctagttgtaagaaattgtacataagattgatttatcattgatgcctactgaaataaaaagaggaaaggctggaagctgcagacaggatccctagcttgttttctgtcagtcattcattgtaagtagcacattgcaacaacaatcatgcttatgaccaatacagtcactaggttgtagttttttttaaataaaggaaaagcagtattgtcctggttttaaacctatgatggaattctaatgtcattattttaatggaatcaatcgaaatatgctctatagagaatatatcttttatatattgctgcagtttccttatgttaatcctttaacactaaggtaacatgacataatcataccatagaagggaacacaggttaccatattggtttgtaatatgggtcttggtgggttttgttttatcctttaaattttgttcccatgagttttgtggggatggggattctggttttattagctttgtgtgtgtcctcttcccccaaacccccttttggtgagaacatccccttgacagttgcagcctcttgacctcggataacaataagagagctcatctcatttttacttttgaacgttggccttacaatcaaatgtaagttatatatatttgtactgatgaaaatttataatctgctttaacaaaaataaatgttcatggtag

SEQ ID NO: 435103 - DNA, 3612 bp, Homo sapiens
ggtgggcctgttgtcatgggggaggtggtggcgcttggtggccactggcggccgaggtagaggcagtggcgcttgagttggtcgggggcagcggcagatttgaggcttaagcaacttcttccggggaagagtgccagtgcagccactgttacaattcaagatcttgatctatatccatagattggaatattggtgggccagcaatcctcagacgcctcacttaggacaaatgaggaaactgaggcttggtgaagttacgaaacttgtccaaaatcacacaacttgtaaagggcacagccaagattcagagccaggctgtaaaaattaaaatgaacaaattacggcaaagttttaggagaaagaaggatgtttatgttccagaggccagtcgtccacatcagtggcagacagatgaagaaggcgttcgcaccggaaaatgtagcttcccggttaagtaccttggccatgtagaagttgatgaatcaagaggaatgcacatctgtgaagatgctgtaaaaagattgaaagctactggaaagaaagcagttaaagcagttctgtgggtctcagcagatggactcagagttgtggatgaaaaaactaaggacctcatagttgaccagacgatagagaaagtttctttctgtgccccagacaggaactttgatagagccttttcttacatatgccgtgatggcaccactcgtcgctggatctgtcactgcttcatggctgtcaaggacacaggtgaaaggttgagccatgcagtaggctgtgcttttgcagcctgtttagagcgcaagcagaagcgggagaaggaatgtggagtgactgctacttttgatgctagtcggaccacttttacaagagaaggatcattccgtgtcacaacagccactgaacaagcagaaagagaggagatcatgaaacaaatgcaagatgccaagaaagctgaaacagataagatagtcgttggttcatcagttgcccctggcaacactgccccatccccatcctctcccacctctcctacttctgatgccacgacctctctggagatgaacaatcctcatgccatcccacgccggcatgctccaattgaacagcttgctcgccaaggctctttccgaggttttcctgctcttagccagaagatgtcaccctttaaacgccaactatccctacgcatcaatgagttgccttccactatgcagaggaagactgatttccccattaaaaatgcagtgccagaagtagaaggggaggcagagagcatcagctccctgtgctcacagatcaccaatgccttcagcacacctgaggaccccttctcatctgctccgatgaccaaaccagtgacagtggtggcaccacaatctcctaccttccaagctaatggcactgactcagccttccatgtgcttgctaagccagcccatactgctctagcacccgtagcaatgcctgtgcgtgaaaccaacccttgggcccatgcccctgatgctgctaacaaggaaattgcagccacatgttcggggaccgagtggggtcaatcttctggtgctgcctctccaggtctcttccaggccggtcatagacgtactccctctgaggccgaccgatggttagaagaggtgtctaagagcgtccgggctcagcagccccaggcctcagctgctcctctgcagccagttctccagcctcctccacccactgccatctcccagccagcatcacctttccaagggaatgcattcctcacctctcagcctgtgccagtgggtgtggtcccagccctgcaaccagcctttgtccctgcccagtcctatcctgtggccaatggaatgccctatccagcccctaatgtgcctgtggtgggcatcactccctcccagatggtggccaacgtatttggcactgcaggccaccctcaggctgcccatccccatcagtcacccagcctggtcaggcagcagacattccctcactacgaggcaagcagtgctaccaccagtcccttctttaagcctcctgctcagcacctcaacggttctgcagctttcaatggtgtagatgatggcaggttggcctcagcagacaggcatacagaggttcctacaggcacctgcccagtggatccttttgaagcccagtgggctgcattagaaaataagtccaagcagcgtactaatccctcccctaccaaccctttctccagtgacttacagaagacgtttgaaattgaactttaagcaatcattatggctatgtatcttgtccataccagacagggagcagggggtagcggtcaaaggagcaaaacagactttgtctcctgattagtactcttttcactaatcccaaaggtcccaaggaacaagtccaggcccagagtactgtgaggggtgattttgaaagacatgggaaaaagcattcctagagaaaagctgccttgcaattaggctaaagaagtcaaggaaatgttgctttctgtactccctcttcccttacccccttacaaatctctggcaacagagaggcaaagtatctgaacaagaatctatattccaagcacatttactgaaatgtaaaacacaacaggaagcaaagcaatctccctttgtttttcaggccattcacctgcctcctgtcagtagtggcctgtattagagatcaagaagagtggtttgtgctcaggctggggaacagagaggcacgctatgctgccagaattcccaggagggcatatcagcaactgcccagcagagctatattttgggggagaagttgagcttccattttgagtaacagaataaatattatatatatcaaaagccaaaatctttatttttatgcatttagaatattttaaatagttctcagatattaagaagttgtatgagttgtaagtaatcttgccaaaggtaaaggggctagttgtaagaaattgtacataagattgatttatcattgatgcctactgaaataaaaagaggaaaggctggaagctgcagacaggatccctagcttgttttctgtcagtcattcattgtaagtagcacattgcaacaacaatcatgcttatgaccaatacagtcactaggttgtagttttttttaaataaaggaaaagcagtattgtcctggttttaaacctatgatggaattctaatgtcattattttaatggaatcaatcgaaatatgctctatagagaatatatcttttatatattgctgcagtttccttatgttaatcctttaacactaaggtaacatgacataatcataccatagaagggaacacaggttaccatattggtttgtaatatgggtcttggtgggttttgttttatcctttaaattttgttcccatgagttttgtggggatggggattctggttttattagctttgtgtgtgtcctcttcccccaaacccccttttggtgagaacatccccttgacagttgcagcctcttgacctcggataacaataagagagctcatctcatttttacttttgaacgttggccttacaatcaaatgtaagttatatatatttgtactgatgaaaatttataatctgctttaacaaaaataaatgttcatggtag

SEQ ID NO: 435104 - DNA, 3468 bp, Homo sapiens
ggtgggcctgttgtcatgggggaggtggtggcgcttggtggccactggcggccgaggtagaggcagtggcgcttgagttggtcgggggcagcggcagatttgaggcttaagcaacttcttccggggaagagtgccagtgcagccactgttacaattcaagatcttgatctatatccatagattggaatattggtgggccagcaatcctcagacgcctcacttaggacaaatgaggaaactgaggcttggtgaagttacgaaacttgtccaaaatcacacaacttgtaaagggcacagccaagattcagagccaggctgtaaaaattaaaatgaacaaattacggcaaagttttaggagaaagaaggatgtttatgttccagaggccagtcgtccacatcagtggcagacagatgaagaaggcgttcgcaccggaaaatgtagcttcccggttaagtaccttggccatgtagaagttgatgaatcaagaggaatgcacatctgtgaagatgctgtaaaaagattgaaagctactggaaagaaagcagttaaagcagttctgtgggtctcagcagatggactcagagttgtggatgaaaaaactaaggacctcatagttgaccagacgatagagaaagtttctttctgtgccccagacaggaactttgatagagccttttcttacatatgccgtgatggcaccactcgtcgctggatctgtcactgcttcatggctgtcaaggacacaggtgaaaggttgagccatgcagtaggctgtgcttttgcagcctgtttagagcgcaagcagaagcgggagaaggaatgtggagtgactgctacttttgatgctagtcggaccacttttacaagagaaggatcattccgtgtcacaacagccactgaacaagcagaaagagaggagatcatgaaacaaatgcaagatgccaagaaagctgaaacagataagatagtcgttggttcatcagttgcccctggcaacactgccccatccccatcctctcccacctctcctacttctgatgccacgacctctctggagatgaacaatcctcatgccatcccacgccggcatgctccaattgaacagcttgctcgccaaggctctttccgaggttttcctgctcttagccagaagatgtcaccctttaaacgccaactatccctacgcatcaatgagttgccttccactatgcagaggaagactgatttccccattaaaaatgcagtgccagaagtagaaggggaggcagagagcatcagctccctgtgctcacagatcaccaatgccttcagcacacctgaggaccccttctcatctgctccgatgaccaaaccagtgacagtggtggcaccacaatctcctaccttccaagggaccgagtggggtcaatcttctggtgctgcctctccaggtctcttccaggccggtcatagacgtactccctctgaggccgaccgatggttagaagaggtgtctaagagcgtccgggctcagcagccccaggcctcagctgctcctctgcagccagttctccagcctcctccacccactgccatctcccagccagcatcacctttccaagggaatgcattcctcacctctcagcctgtgccagtgggtgtggtcccagccctgcaaccagcctttgtccctgcccagtcctatcctgtggccaatggaatgccctatccagcccctaatgtgcctgtggtgggcatcactccctcccagatggtggccaacgtatttggcactgcaggccaccctcaggctgcccatccccatcagtcacccagcctggtcaggcagcagacattccctcactacgaggcaagcagtgctaccaccagtcccttctttaagcctcctgctcagcacctcaacggttctgcagctttcaatggtgtagatgatggcaggttggcctcagcagacaggcatacagaggttcctacaggcacctgcccagtggatccttttgaagcccagtgggctgcattagaaaataagtccaagcagcgtactaatccctcccctaccaaccctttctccagtgacttacagaagacgtttgaaattgaactttaagcaatcattatggctatgtatcttgtccataccagacagggagcagggggtagcggtcaaaggagcaaaacagactttgtctcctgattagtactcttttcactaatcccaaaggtcccaaggaacaagtccaggcccagagtactgtgaggggtgattttgaaagacatgggaaaaagcattcctagagaaaagctgccttgcaattaggctaaagaagtcaaggaaatgttgctttctgtactccctcttcccttacccccttacaaatctctggcaacagagaggcaaagtatctgaacaagaatctatattccaagcacatttactgaaatgtaaaacacaacaggaagcaaagcaatctccctttgtttttcaggccattcacctgcctcctgtcagtagtggcctgtattagagatcaagaagagtggtttgtgctcaggctggggaacagagaggcacgctatgctgccagaattcccaggagggcatatcagcaactgcccagcagagctatattttgggggagaagttgagcttccattttgagtaacagaataaatattatatatatcaaaagccaaaatctttatttttatgcatttagaatattttaaatagttctcagatattaagaagttgtatgagttgtaagtaatcttgccaaaggtaaaggggctagttgtaagaaattgtacataagattgatttatcattgatgcctactgaaataaaaagaggaaaggctggaagctgcagacaggatccctagcttgttttctgtcagtcattcattgtaagtagcacattgcaacaacaatcatgcttatgaccaatacagtcactaggttgtagttttttttaaataaaggaaaagcagtattgtcctggttttaaacctatgatggaattctaatgtcattattttaatggaatcaatcgaaatatgctctatagagaatatatcttttatatattgctgcagtttccttatgttaatcctttaacactaaggtaacatgacataatcataccatagaagggaacacaggttaccatattggtttgtaatatgggtcttggtgggttttgttttatcctttaaattttgttcccatgagttttgtggggatggggattctggttttattagctttgtgtgtgtcctcttcccccaaacccccttttggtgagaacatccccttgacagttgcagcctcttgacctcggataacaataagagagctcatctcatttttacttttgaacgttggccttacaatcaaatgtaagttatatatatttgtactgatgaaaatttataatctgctttaacaaaaataaatgttcatggtag

SEQ ID NO: 435105 - DNA, 1908 bp, Homo sapiens
tctgtgttaactctgagagaacaaataatggctttttaaagactgttaatagaataatgaagacttactgtgtttttaacgtgaaaattttaggtgaccaagggtcctgctataacatactgggggtcataggatagtagaatggtcaacatctcaatttagacatgttacttcctgctctaaatacacttgtggacgctacttgtggtgtaactccttatgtatttaataattatctgactctggttttcttggttgatttttttaaatgggtgaagaatctagttatgaattctttgccctttatggaatgtgatatcttggtttttattccatctgttacttcccttttacttaattttatcttattgttttgcgttgtgtttctaaaataatggctttggcttgttttttcctgaatgtttctgcagtttggtttgagtatctgggtttgggcaccactcctgaacttggactccatctgtacttgtgacttttggaaggcagagtcagtgttttctgtggaagatgacatttttttaatattatatatgtgtatctccccctcccctttttggtttctcttaaaagactggaaagaaagcagttaaagcagttctgtgggtctcagcagatggactcagagttgtggatgaaaaaactaaggacctcatagttgaccagacgatagagaaagtttctttctgtgccccagacaggaactttgatagagccttttcttacatatgccgtgatggcaccactcgtcgctggatctgtcactgcttcatggctgtcaaggacacaggtgaaaggttgagccatgcagtaggctgtgcttttgcagcctgtttagagcgcaagcagaagcgggagaaggaatgtggagtgactgctacttttgatgctagtcggaccacttttacaagagaaggatcattccgtgtcacaacagccactgaacaagcagaaagagaggagatcatgaaacaaatgcaagatgccaagaaaggtacaatctgttctacagtgtgtatttatggaatgcagtttttcccaacaaggtattattttgaagctaccaggggtaaattttctcataatcaaagagaacccttagcaatataaaaccttataacaaagttgaaaatcttaaaaaccgcttcctttagagtggctagtttaatggcttcaaaaatatttactccattatagtaagctatctgaggaatcagagtgcagttgaagaagctgcagagacatctcttacccccttcctcccatcctgaaatacctttttaattctgatgtatctgatctctttgagaagcaaatgaatcaagtacctgcatcttaaaggaagcagcagaggtcccagggcttaaggctgcaaagcatccacggactatgatgctagcagagagatttaacagtaatactgtttatatgatattattgctgttttttagtgctttctagtcacaaaagtctatagattttgagaggtaagcctataactcttttttctatagccctgttaatttaatttagtgtgtgattttatagagtgtgagttttatttaggtacacatggcatcacagcagaaatgcctgtacaaacattcaagttagttggcagtctataaatgtgagttgggtatattttacaactaaatgatagggcttgaaaatacttttgaattcttgtatataagtagggttaaaaccaacaagacaagcacaaacaattcaagttaactaatagacattaatataattttgaggccaggtatagtggcttacagctgtaatctcaatactttaggaggctgaggaggaaacatcacttgaggccaggagtttgtgaccagactgtgcaacatagactctatcccttaaaaaaaaaaa

SEQ ID NO: 435106 - DNA, 1111 bp, Homo sapiens
gagcaaacagagctttagcacacataattagcttcctcagtgatacagaagtatcctagagtcagtattaagaataaaggccctagcgtcctacacctctgctcactttttcatgttatcatagatcatatgcttagtactggagactttggagaaaaatgagattgatgacattgtcatagtttgttacagagaaaagcactaagcatccactagtgcccagacttgaacccattttcctgacagaattactaaaggctccagaacctaattcagatcacagtcttgagaacacgttggaaggcatacaggttgcaaatgtcttctacaaagatctggctagctgaacatcttggcacaaaaaggacagatcctcaacagtgttataagaagaagaaatgaagaaatttggggatttgtaagggaggaagatgtgccttagtacattaattgttgacattttatactttcccatctgaaaagccaatgaaattgtggccagtaaattttttgaaactggttttgtagccctgccatacagttaattgagccttttcttacataagcaggagatacagtataaagtgccagcttgcatcatactgtcaaatttcaggattattccatttttctgtctggagccattttctgtttgccttgcagtgccagaagtagaaggggaggcagagagcatcagctccctgtgctcacagatcaccaatgccttcagcacacctgaggaccccttctcatctgctccgatgaccaaaccagtgacagtggtggcaccacaatctcctaccttccaaggttggtgccctctgacctgctcagctgttctctttacaaccagtacttttagtacactgctcactaactgtaagttggcatcctgagcttcccaaggcctggtcagacccattaatttctctatttgatgtcttagattcattgatttctccattcgacgatgtctttgtgcccttcctgttttctaagatgtctgtgtttgtcattctgcatgtgcccatctttcaccccattctataaggaatttctgtagtcccaacctactgccttatttcccacttgactgttaaggatcagcata

SEQ ID NO: 435107 - DNA, 791 bp, Homo sapiens
ggtgggcctgttgtcatgggggaggtggtggcgcttggtggccactggcggccgaggtagaggcagtggcgcttgagttggtcgggggcagcggcagatttgaggcttaagcaacttcttccggggaagagtgccagtgcagccactgttacaattcaagatcttgatctatatccatagattggaatattggtgggccagcaatcctcagacgcctcacttaggacaaatgaggaaactgaggcttggtgaagttacgaaacttgtccaaaatcacacaacttgtaaagggcacagccaagattcagagccaggctgtaaaaattaaaatgaacaaattacggcaaagttttaggagaaagaaggatgtttatgttccagaggccagtcgtccacatcagtggcagacagatgaagaaggcgttcgcaccggaaaatgtagcttcccggttaagtaccttggccatgtagaagttgatgaatcaagaggaatgcacatctgtgaagatgctgtaaaaagattgaaagctactggaaagaaagcagttaaagcagttctgtgggtctcagcagatggactcagagttgtggatgaaaaaactaaggacctcatagttgaccagacgatagagaaagtttctttctgtgccccagacaggaactttgatagagccttttcttacatatgccgtgatggcaccactggtggtgaatctggacggctcaggcgtcagggccaggtaaggttagcgccatagggggctttacgctcgtgcaccagagggtgtggg

SEQ ID NO: 435108 - DNA, 4847 bp, Homo sapiens
ctctgctcactgcaagctccgcctcctgagttcatgccattctcctgcttcagccttctgagtagctgggacaacaggtgtccgccaccatgcccaattaatttttttgtatttgtagagatggggtttcaccgtgttagctaggatggtctcgatctcctgaccttgtgatccgcccgccttggcctcccaaagtgctgggattacaggcgtgagctaccgtgcccggctattaataatgttaacaataactaatgattattgagcatttactacatgtcaggtcctgaattatgtatattatttcatttactcctcataaaagggttccttctaggagctaggggagaaaaccagccattatatagtcaataataatattaatggtaataatagttattatatataacagttatatattacataacatatgctggccctgaattgaacatattctctaatttgatttttgaatatttaaaaatatacacatatatttgttttttttttttaagagatggaggagtctcaccatgttgcccaagctggcctcaaacccctggcctcaagtgagcctcccacctcagcctcccaagtagctgccaccatgcagtctctaatttaaattttaaacaaaccctagatgttattattatcttagagtaggctgcttctaaaatagctcccaatgatcctcttgctggtctttacatccttgtgtaatctccttgagtgtgggctggacctaatgacttacttctaactcacaggatgtggcaacagtgatgggatgtcacatctgtgattggattacgaaagactgtgccttctgttttgctattactgtctctggtgagtcctctctcttgctcttgcttgcttgcactgatgaagtaagctgccacgttgtgagatgctcaacgaagaggcccatgaggcagggcaccgagggaggcttctggccaacagctcctggggaaccaaggccttaggaagtgagtcctgccaacagccttgaactttgaaaccacagtaccttgttccagcgtggaaagcagcgtggcacttcccggtggtgaaagcaccccagcttgaaagggtgaaaacaccttctcccagatagtctccctttgtttagccagtgcttttgccttaaggaaatcaaatgaaggggtcagccaggagtggatctggaagctggagaactctcaatacgccacttcagtttattgacgacatttataattgcaaccgaagttgactgatttctgctaaatgaaagtttgcgctttgccctttagcattgaggctcctggaaagaacttcaatgaaattggatgcattgagaccaaagaaaagaaggggacatttttatctctctgatacctttctccccagggcttggaaacacttcttaaacacaacctctaatgttggtgttttatttgaggcttaagcaacttcttccggggaagagtgccagtgcagccactgttacaattcaagatcttgatctatatccatagattggaatattggtgggccagcaatcctcagacgcctcacttaggacaaatgaggaaactgaggcttggtgaagttacgaaacttgtccaaaatcacacaacttgtaaagggcacagccaagattcagagccaggctgtaaaaattaaaatgaacaaattacggcaaagttttaggagaaagaaggatgtttatgttccagaggccagtcgtccacatcagtggcagacagatgaagaaggcgttcgcaccggaaaatgtagcttcccggttaagtaccttggccatgtagaagttgatgaatcaagaggaatgcacatctgtgaagatgctgtaaaaagattgaaagctgaaaggaagttcttcaaaggcttctttggaaaaactggaaagaaagcagttaaagcagttctgtgggtctcagcagatggactcagagttgtggatgaaaaaactaaggacctcatagttgaccagacgatagagaaagtttctttctgtgccccagacaggaactttgatagagccttttcttacatatgccgtgatggcaccactcgtcgctggatctgtcactgcttcatggctgtcaaggacacaggtgaaaggttgagccatgcagtaggctgtgcttttgcagcctgtttagagcgcaagcagaagcgggagaaggaatgtggagtgactgctacttttgatgctagtcggaccacttttacaagagaaggatcattccgtgtcacaacagccactgaacaagcagaaagagaggagatcatgaaacaaatgcaagatgccaagaaagctgaaacagataagatagtcgttggttcatcagttgcccctggcaacactgccccatccccatcctctcccacctctcctacttctgatgccacgacctctctggagatgaacaatcctcatgccatcccacgccggcatgctccaattgaacagcttgctcgccaaggctctttccgaggttttcctgctcttagccagaagatgtcaccctttaaacgccaactatccctacgcatcaatgagttgccttccactatgcagaggaagactgatttccccattaaaaatgcagtgccagaagtagaaggggaggcagagagcatcagctccctgtgctcacagatcaccaatgccttcagcacacctgaggaccccttctcatctgctccgatgaccaaaccagtgacagtggtggcaccacaatctcctaccttccaagggaccgagtggggtcaatcttctggtgctgcctctccaggtctcttccaggccggtcatagacgtactccctctgaggccgaccgatggttagaagaggtgtctaagagcgtccgggctcagcagccccaggcctcagctgctcctctgcagccagttctccagcctcctccacccactgccatctcccagccagcatcacctttccaagggaatgcattcctcacctctcagcctgtgccagtgggtgtggtcccagccctgcaaccagcctttgtccctgcccagtcctatcctgtggccaatggaatgccctatccagcccctaatgtgcctgtggtgggcatcactccctcccagatggtggccaacgtatttggcactgcaggccaccctcaggctgcccatccccatcagtcacccagcctggtcaggcagcagacattccctcactacgaggcaagcagtgctaccaccagtcccttctttaagcctcctgctcagcacctcaacggttctgcagctttcaatggtgtagatgatggcaggttggcctcagcagacaggcatacagaggttcctacaggcacctgcccagtggatccttttgaagcccagtgggctgcattagaaaataagtccaagcagcgtactaatccctcccctaccaaccctttctccagtgacttacagaagacgtttgaaattgaactttaagcaatcattatggctatgtatcttgtccataccagacagggagcagggggtagcggtcaaaggagcaaaacagactttgtctcctgattagtactcttttcactaatcccaaaggtcccaaggaacaagtccaggcccagagtactgtgaggggtgattttgaaagacatgggaaaaagcattcctagagaaaagctgccttgcaattaggctaaagaagtcaaggaaatgttgctttctgtactccctcttcccttacccccttacaaatctctggcaacagagaggcaaagtatctgaacaagaatctatattccaagcacatttactgaaatgtaaaacacaacaggaagcaaagcaatctccctttgtttttcaggccattcacctgcctcctgtcagtagtggcctgtattagagatcaagaagagtggtttgtgctcaggctggggaacagagaggcacgctatgctgccagaattcccaggagggcatatcagcaactgcccagcagagctatattttgggggagaagttgagcttccattttgagtaacagaataaatattatatatatcaaaagccaaaatctttatttttatgcatttagaatattttaaatagttctcagatattaagaagttgtatgagttgtaagtaatcttgccaaaggtaaaggggctagttgtaagaaattgtacataagattgatttatcattgatgcctactgaaataaaaagaggaaaggctggaagctgcagacaggatccctagcttgttttctgtcagtcattcattgtaagtagcacattgcaacaacaatcatgcttatgaccaatacagtcactaggttgtagttttttttaaataaaggaaaagcagtattgtcctggttttaaacctatgatggaattctaatgtcattattttaatggaatcaatcgaaatatgctctatagagaatatatcttttatatattgctgcagtttccttatgttaatcctttaacactaaggtaacatgacataatcataccatagaagggaacacaggttaccatattggtttgtaatatgggtcttggtgggttttgttttatcctttaaattttgttcccatgagttttgtggggatggggattctggttttattagctttgtgtgtgtcctcttcccccaaacccccttttggtgagaacatccccttgacagttgcagcctcttgacctcggataacaataagagagctcatctcatttttacttttgaacgttggccttacaatcaaatgtaagttatatatatttgtactgatgaaaatttataatctgctttaacaaaaataaatgttcatggtag

SEQ ID NO: 435109 - DNA, 4762 bp, Homo sapiens
ctctgctcactgcaagctccgcctcctgagttcatgccattctcctgcttcagccttctgagtagctgggacaacaggtgtccgccaccatgcccaattaatttttttgtatttgtagagatggggtttcaccgtgttagctaggatggtctcgatctcctgaccttgtgatccgcccgccttggcctcccaaagtgctgggattacaggcgtgagctaccgtgcccggctattaataatgttaacaataactaatgattattgagcatttactacatgtcaggtcctgaattatgtatattatttcatttactcctcataaaagggttccttctaggagctaggggagaaaaccagccattatatagtcaataataatattaatggtaataatagttattatatataacagttatatattacataacatatgctggccctgaattgaacatattctctaatttgatttttgaatatttaaaaatatacacatatatttgttttttttttttaagagatggaggagtctcaccatgttgcccaagctggcctcaaacccctggcctcaagtgagcctcccacctcagcctcccaagtagctgccaccatgcagtctctaatttaaattttaaacaaaccctagatgttattattatcttagagtaggctgcttctaaaatagctcccaatgatcctcttgctggtctttacatccttgtgtaatctccttgagtgtgggctggacctaatgacttacttctaactcacaggatgtggcaacagtgatgggatgtcacatctgtgattggattacgaaagactgtgccttctgttttgctattactgtctctggtgagtcctctctcttgctcttgcttgcttgcactgatgaagtaagctgccacgttgtgagatgctcaacgaagaggcccatgaggcagggcaccgagggaggcttctggccaacagctcctggggaaccaaggccttaggaagtgagtcctgccaacagccttgaactttgaaaccacagtaccttgttccagcgtggaaagcagcgtggcacttcccggtggtgaaagcaccccagcttgaaagggtgaaaacaccttctcccagatagtctccctttgtttagccagtgcttttgccttaaggaaatcaaatgaaggggtcagccaggagtggatctggaagctggagaactctcaatacgccacttcagtttattgacgacatttataattgcaaccgaagttgactgatttctgctaaatgaaagtttgcgctttgccctttagcattgaggctcctggaaagaacttcaatgaaattggatgcattgagaccaaagaaaagaaggggacatttttatctctctgatacctttctccccagggcttggaaacacttcttaaacacaacctctaatgttggtgttttatttgaggcttaagcaacttcttccggggaagagtgccagtgcagccactgttacaattcaagatcttgatctatatccatagattggaatattggtgggccagcaatcctcagacgcctcacttaggacaagctgtaaaaattaaaatgaacaaattacggcaaagttttaggagaaagaaggatgtttatgttccagaggccagtcgtccacatcagtggcagacagatgaagaaggcgttcgcaccggaaaatgtagcttcccggttaagtaccttggccatgtagaagttgatgaatcaagaggaatgcacatctgtgaagatgctgtaaaaagattgaaagctgaaaggaagttcttcaaaggcttctttggaaaaactggaaagaaagcagttaaagcagttctgtgggtctcagcagatggactcagagttgtggatgaaaaaactaaggacctcatagttgaccagacgatagagaaagtttctttctgtgccccagacaggaactttgatagagccttttcttacatatgccgtgatggcaccactcgtcgctggatctgtcactgcttcatggctgtcaaggacacaggtgaaaggttgagccatgcagtaggctgtgcttttgcagcctgtttagagcgcaagcagaagcgggagaaggaatgtggagtgactgctacttttgatgctagtcggaccacttttacaagagaaggatcattccgtgtcacaacagccactgaacaagcagaaagagaggagatcatgaaacaaatgcaagatgccaagaaagctgaaacagataagatagtcgttggttcatcagttgcccctggcaacactgccccatccccatcctctcccacctctcctacttctgatgccacgacctctctggagatgaacaatcctcatgccatcccacgccggcatgctccaattgaacagcttgctcgccaaggctctttccgaggttttcctgctcttagccagaagatgtcaccctttaaacgccaactatccctacgcatcaatgagttgccttccactatgcagaggaagactgatttccccattaaaaatgcagtgccagaagtagaaggggaggcagagagcatcagctccctgtgctcacagatcaccaatgccttcagcacacctgaggaccccttctcatctgctccgatgaccaaaccagtgacagtggtggcaccacaatctcctaccttccaagggaccgagtggggtcaatcttctggtgctgcctctccaggtctcttccaggccggtcatagacgtactccctctgaggccgaccgatggttagaagaggtgtctaagagcgtccgggctcagcagccccaggcctcagctgctcctctgcagccagttctccagcctcctccacccactgccatctcccagccagcatcacctttccaagggaatgcattcctcacctctcagcctgtgccagtgggtgtggtcccagccctgcaaccagcctttgtccctgcccagtcctatcctgtggccaatggaatgccctatccagcccctaatgtgcctgtggtgggcatcactccctcccagatggtggccaacgtatttggcactgcaggccaccctcaggctgcccatccccatcagtcacccagcctggtcaggcagcagacattccctcactacgaggcaagcagtgctaccaccagtcccttctttaagcctcctgctcagcacctcaacggttctgcagctttcaatggtgtagatgatggcaggttggcctcagcagacaggcatacagaggttcctacaggcacctgcccagtggatccttttgaagcccagtgggctgcattagaaaataagtccaagcagcgtactaatccctcccctaccaaccctttctccagtgacttacagaagacgtttgaaattgaactttaagcaatcattatggctatgtatcttgtccataccagacagggagcagggggtagcggtcaaaggagcaaaacagactttgtctcctgattagtactcttttcactaatcccaaaggtcccaaggaacaagtccaggcccagagtactgtgaggggtgattttgaaagacatgggaaaaagcattcctagagaaaagctgccttgcaattaggctaaagaagtcaaggaaatgttgctttctgtactccctcttcccttacccccttacaaatctctggcaacagagaggcaaagtatctgaacaagaatctatattccaagcacatttactgaaatgtaaaacacaacaggaagcaaagcaatctccctttgtttttcaggccattcacctgcctcctgtcagtagtggcctgtattagagatcaagaagagtggtttgtgctcaggctggggaacagagaggcacgctatgctgccagaattcccaggagggcatatcagcaactgcccagcagagctatattttgggggagaagttgagcttccattttgagtaacagaataaatattatatatatcaaaagccaaaatctttatttttatgcatttagaatattttaaatagttctcagatattaagaagttgtatgagttgtaagtaatcttgccaaaggtaaaggggctagttgtaagaaattgtacataagattgatttatcattgatgcctactgaaataaaaagaggaaaggctggaagctgcagacaggatccctagcttgttttctgtcagtcattcattgtaagtagcacattgcaacaacaatcatgcttatgaccaatacagtcactaggttgtagttttttttaaataaaggaaaagcagtattgtcctggttttaaacctatgatggaattctaatgtcattattttaatggaatcaatcgaaatatgctctatagagaatatatcttttatatattgctgcagtttccttatgttaatcctttaacactaaggtaacatgacataatcataccatagaagggaacacaggttaccatattggtttgtaatatgggtcttggtgggttttgttttatcctttaaattttgttcccatgagttttgtggggatggggattctggttttattagctttgtgtgtgtcctcttcccccaaacccccttttggtgagaacatccccttgacagttgcagcctcttgacctcggataacaataagagagctcatctcatttttacttttgaacgttggccttacaatcaaatgtaagttatatatatttgtactgatgaaaatttataatctgctttaacaaaaataaatgttcatggtag

SEQ ID NO: 435110 - DNA, 4520 bp, Homo sapiens
ctctgctcactgcaagctccgcctcctgagttcatgccattctcctgcttcagccttctgagtagctgggacaacaggtgtccgccaccatgcccaattaatttttttgtatttgtagagatggggtttcaccgtgttagctaggatggtctcgatctcctgaccttgtgatccgcccgccttggcctcccaaagtgctgggattacaggcgtgagctaccgtgcccggctattaataatgttaacaataactaatgattattgagcatttactacatgtcaggtcctgaattatgtatattatttcatttactcctcataaaagggttccttctaggagctaggggagaaaaccagccattatatagtcaataataatattaatggtaataatagttattatatataacagttatatattacataacatatgctggccctgaattgaacatattctctaatttgatttttgaatatttaaaaatatacacatatatttgttttttttttttaagagatggaggagtctcaccatgttgcccaagctggcctcaaacccctggcctcaagtgagcctcccacctcagcctcccaagtagctgccaccatgcagtctctaatttaaattttaaacaaaccctagatgttattattatcttagagtaggctgcttctaaaatagctcccaatgatcctcttgctggtctttacatccttgtgtaatctccttgagtgtgggctggacctaatgacttacttctaactcacaggatgtggcaacagtgatgggatgtcacatctgtgattggattacgaaagactgtgccttctgttttgctattactgtctctggtgagtcctctctcttgctcttgcttgcttgcactgatgaagtaagctgccacgttgtgagatgctcaacgaagaggcccatgaggcagggcaccgagggaggcttctggccaacagctcctggggaaccaaggccttaggaagtgagtcctgccaacagccttgaactttgaaaccacagtaccttgttccagcgtggaaagcagcgtggcacttcccggtggtgaaagcaccccagcttgaaagggtgaaaacaccttctcccagatagtctccctttgtttagccagtgcttttgccttaaggaaatcaaatgaaggggtcagccaggagtggatctggaagctggagaactctcaatacgccacttcagtttattgacgacatttataattgcaaccgaagttgactgatttctgctaaatgaaagtttgcgctttgccctttagcattgaggctcctggaaagaacttcaatgaaattggatgcattgagaccaaagaaaagaaggggacatttttatctctctgatacctttctccccagggcttggaaacacttcttaaacacaacctctaatgttggtgttttatttgaggcttaagcaacttcttccggggaagagtgccagtgcagccactgttacaattcaagatcttgatctatatccatagattggaatattggtgggccagcaatcctcagacgcctcacttaggacaaatgaggaaactgaggcttggtgaagttacgaaacttgtccaaaatcacacaacttgtaaagggcacagccaagattcagagccaggctgtaaaaattaaaatgaacaaattacggcaaagttttaggagaaagaaggatgtttatgttccagaggccagtcgtccacatcagtggcagacagatgaagaaggcgttcgcaccggaaaatgtagcttcccggttaagtaccttggccatgtagaagttgatgaatcaagaggaatgcacatctgtgaagatgctgtaaaaagattgaaagctactggaaagaaagcagttaaagcagttctgtgggtctcagcagatggactcagagttgtggatgaaaaaactaaggacctcatagttgaccagacgatagagaaagtttctttctgtgccccagacaggaactttgatagagccttttcttacatatgccgtgatggcaccactcgtcgctggatctgtcactgcttcatggctgtcaaggacacaggtgaaaggttgagccatgcagtaggctgtgcttttgcagcctgtttagagcgcaagcagaagcgggagaaggaatgtggagtgactgctacttttgatgctagtcggaccacttttacaagagaaggatcattccgtgtcacaacagccactgaacaagcagaaagagaggagatcatgaaacaaatgcaagatgccaagaaagtgccagaagtagaaggggaggcagagagcatcagctccctgtgctcacagatcaccaatgccttcagcacacctgaggaccccttctcatctgctccgatgaccaaaccagtgacagtggtggcaccacaatctcctaccttccaagggaccgagtggggtcaatcttctggtgctgcctctccaggtctcttccaggccggtcatagacgtactccctctgaggccgaccgatggttagaagaggtgtctaagagcgtccgggctcagcagccccaggcctcagctgctcctctgcagccagttctccagcctcctccacccactgccatctcccagccagcatcacctttccaagggaatgcattcctcacctctcagcctgtgccagtgggtgtggtcccagccctgcaaccagcctttgtccctgcccagtcctatcctgtggccaatggaatgccctatccagcccctaatgtgcctgtggtgggcatcactccctcccagatggtggccaacgtatttggcactgcaggccaccctcaggctgcccatccccatcagtcacccagcctggtcaggcagcagacattccctcactacgaggcaagcagtgctaccaccagtcccttctttaagcctcctgctcagcacctcaacggttctgcagctttcaatggtgtagatgatggcaggttggcctcagcagacaggcatacagaggttcctacaggcacctgcccagtggatccttttgaagcccagtgggctgcattagaaaataagtccaagcagcgtactaatccctcccctaccaaccctttctccagtgacttacagaagacgtttgaaattgaactttaagcaatcattatggctatgtatcttgtccataccagacagggagcagggggtagcggtcaaaggagcaaaacagactttgtctcctgattagtactcttttcactaatcccaaaggtcccaaggaacaagtccaggcccagagtactgtgaggggtgattttgaaagacatgggaaaaagcattcctagagaaaagctgccttgcaattaggctaaagaagtcaaggaaatgttgctttctgtactccctcttcccttacccccttacaaatctctggcaacagagaggcaaagtatctgaacaagaatctatattccaagcacatttactgaaatgtaaaacacaacaggaagcaaagcaatctccctttgtttttcaggccattcacctgcctcctgtcagtagtggcctgtattagagatcaagaagagtggtttgtgctcaggctggggaacagagaggcacgctatgctgccagaattcccaggagggcatatcagcaactgcccagcagagctatattttgggggagaagttgagcttccattttgagtaacagaataaatattatatatatcaaaagccaaaatctttatttttatgcatttagaatattttaaatagttctcagatattaagaagttgtatgagttgtaagtaatcttgccaaaggtaaaggggctagttgtaagaaattgtacataagattgatttatcattgatgcctactgaaataaaaagaggaaaggctggaagctgcagacaggatccctagcttgttttctgtcagtcattcattgtaagtagcacattgcaacaacaatcatgcttatgaccaatacagtcactaggttgtagttttttttaaataaaggaaaagcagtattgtcctggttttaaacctatgatggaattctaatgtcattattttaatggaatcaatcgaaatatgctctatagagaatatatcttttatatattgctgcagtttccttatgttaatcctttaacactaaggtaacatgacataatcataccatagaagggaacacaggttaccatattggtttgtaatatgggtcttggtgggttttgttttatcctttaaattttgttcccatgagttttgtggggatggggattctggttttattagctttgtgtgtgtcctcttcccccaaacccccttttggtgagaacatccccttgacagttgcagcctcttgacctcggataacaataagagagctcatctcatttttacttttgaacgttggccttacaatcaaatgtaagttatatatatttgtactgatgaaaatttataatctgctttaacaaaaataaatgttcatggtag

SEQ ID NO: 435111 - DNA, 4861 bp, Homo sapiens
ctctgctcactgcaagctccgcctcctgagttcatgccattctcctgcttcagccttctgagtagctgggacaacaggtgtccgccaccatgcccaattaatttttttgtatttgtagagatggggtttcaccgtgttagctaggatggtctcgatctcctgaccttgtgatccgcccgccttggcctcccaaagtgctgggattacaggcgtgagctaccgtgcccggctattaataatgttaacaataactaatgattattgagcatttactacatgtcaggtcctgaattatgtatattatttcatttactcctcataaaagggttccttctaggagctaggggagaaaaccagccattatatagtcaataataatattaatggtaataatagttattatatataacagttatatattacataacatatgctggccctgaattgaacatattctctaatttgatttttgaatatttaaaaatatacacatatatttgttttttttttttaagagatggaggagtctcaccatgttgcccaagctggcctcaaacccctggcctcaagtgagcctcccacctcagcctcccaagtagctgccaccatgcagtctctaatttaaattttaaacaaaccctagatgttattattatcttagagtaggctgcttctaaaatagctcccaatgatcctcttgctggtctttacatccttgtgtaatctccttgagtgtgggctggacctaatgacttacttctaactcacaggatgtggcaacagtgatgggatgtcacatctgtgattggattacgaaagactgtgccttctgttttgctattactgtctctggtgagtcctctctcttgctcttgcttgcttgcactgatgaagtaagctgccacgttgtgagatgctcaacgaagaggcccatgaggcagggcaccgagggaggcttctggccaacagctcctggggaaccaaggccttaggaagtgagtcctgccaacagccttgaactttgaaaccacagtaccttgttccagcgtggaaagcagcgtggcacttcccggtggtgaaagcaccccagcttgaaagggtgaaaacaccttctcccagatagtctccctttgtttagccagtgcttttgccttaaggaaatcaaatgaaggggtcagccaggagtggatctggaagctggagaactctcaatacgccacttcagtttattgacgacatttataattgcaaccgaagttgactgatttctgctaaatgaaagtttgcgctttgccctttagcattgaggctcctggaaagaacttcaatgaaattggatgcattgagaccaaagaaaagaaggggacatttttatctctctgatacctttctccccagggcttggaaacacttcttaaacacaacctctaatgttggtgttttatttgaggcttaagcaacttcttccggggaagagtgccagtgcagccactgttacaattcaagatcttgatctatatccatagattggaatattggtgggccagcaatcctcagacgcctcacttaggacaagctgtaaaaattaaaatgaacaaattacggcaaagttttaggagaaagaaggatgtttatgttccagaggccagtcgtccacatcagtggcagacagatgaagaaggcgttcgcaccggaaaatgtagcttcccggttaagtaccttggccatgtagaagttgatgaatcaagaggaatgcacatctgtgaagatgctgtaaaaagattgaaagctgaaaggaagttcttcaaaggcttctttggaaaaactggaaagaaagcagttaaagcagttctgtgggtctcagcagatggactcagagttgtggatgaaaaaactaaggacctcatagttgaccagacgatagagaaagtttctttctgtgccccagacaggaactttgatagagccttttcttacatatgccgtgatggcaccactcgtcgctggatctgtcactgcttcatggctgtcaaggacacaggtgaaaggttgagccatgcagtaggctgtgcttttgcagcctgtttagagcgcaagcagaagcgggagaaggaatgtggagtgactgctacttttgatgctagtcggaccacttttacaagagaaggatcattccgtgtcacaacagccactgaacaagcagaaagagaggagatcatgaaacaaatgcaagatgccaagaaagctgaaacagataagatagtcgttggttcatcagttgcccctggcaacactgccccatccccatcctctcccacctctcctacttctgatgccacgacctctctggagatgaacaatcctcatgccatcccacgccggcatgctccaattgaacagcttgctcgccaaggctctttccgaggttttcctgctcttagccagaagatgtcaccctttaaacgccaactatccctacgcatcaatgagttgccttccactatgcagaggaagactgatttccccattaaaaatgcagcacagatcaccaatgccttcagcacacctgaggaccccttctcatctgctccgatgaccaaaccagtgacagtggtggcaccacaatctcctaccttccaagctaatggcactgactcagccttccatgtgcttgctaagccagcccatactgctctagcacccgtagcaatgcctgtgcgtgaaaccaacccttgggcccatgcccctgatgctgctaacaaggaaattgcagccacatgttcggggaccgagtggggtcaatcttctggtgctgcctctccaggtctcttccaggccggtcatagacgtactccctctgaggccgaccgatggttagaagaggtgtctaagagcgtccgggctcagcagccccaggcctcagctgctcctctgcagccagttctccagcctcctccacccactgccatctcccagccagcatcacctttccaagggaatgcattcctcacctctcagcctgtgccagtgggtgtggtcccagccctgcaaccagcctttgtccctgcccagtcctatcctgtggccaatggaatgccctatccagcccctaatgtgcctgtggtgggcatcactccctcccagatggtggccaacgtatttggcactgcaggccaccctcaggctgcccatccccatcagtcacccagcctggtcaggcagcagacattccctcactacgaggcaagcagtgctaccaccagtcccttctttaagcctcctgctcagcacctcaacggttctgcagctttcaatggtgtagatgatggcaggttggcctcagcagacaggcatacagaggttcctacaggcacctgcccagtggatccttttgaagcccagtgggctgcattagaaaataagtccaagcagcgtactaatccctcccctaccaaccctttctccagtgacttacagaagacgtttgaaattgaactttaagcaatcattatggctatgtatcttgtccataccagacagggagcagggggtagcggtcaaaggagcaaaacagactttgtctcctgattagtactcttttcactaatcccaaaggtcccaaggaacaagtccaggcccagagtactgtgaggggtgattttgaaagacatgggaaaaagcattcctagagaaaagctgccttgcaattaggctaaagaagtcaaggaaatgttgctttctgtactccctcttcccttacccccttacaaatctctggcaacagagaggcaaagtatctgaacaagaatctatattccaagcacatttactgaaatgtaaaacacaacaggaagcaaagcaatctccctttgtttttcaggccattcacctgcctcctgtcagtagtggcctgtattagagatcaagaagagtggtttgtgctcaggctggggaacagagaggcacgctatgctgccagaattcccaggagggcatatcagcaactgcccagcagagctatattttgggggagaagttgagcttccattttgagtaacagaataaatattatatatatcaaaagccaaaatctttatttttatgcatttagaatattttaaatagttctcagatattaagaagttgtatgagttgtaagtaatcttgccaaaggtaaaggggctagttgtaagaaattgtacataagattgatttatcattgatgcctactgaaataaaaagaggaaaggctggaagctgcagacaggatccctagcttgttttctgtcagtcattcattgtaagtagcacattgcaacaacaatcatgcttatgaccaatacagtcactaggttgtagttttttttaaataaaggaaaagcagtattgtcctggttttaaacctatgatggaattctaatgtcattattttaatggaatcaatcgaaatatgctctatagagaatatatcttttatatattgctgcagtttccttatgttaatcctttaacactaaggtaacatgacataatcataccatagaagggaacacaggttaccatattggtttgtaatatgggtcttggtgggttttgttttatcctttaaattttgttcccatgagttttgtggggatggggattctggttttattagctttgtgtgtgtcctcttcccccaaacccccttttggtgagaacatccccttgacagttgcagcctcttgacctcggataacaataagagagctcatctcatttttacttttgaacgttggccttacaatcaaatgtaagttatatatatttgtactgatgaaaatttataatctgctttaacaaaaataaatgttcatggtag

SEQ ID NO: 435112 - DNA, 3089 bp, Homo sapiens
ggtgggcctgttgtcatgggggaggtggtggcgcttggtggccactggcggccgaggtagaggcagtggcgcttgagttggtcgggggcagcggcagatttgaggcttaagcaacttcttccggggaagagtgccagtgcagccactgttacaattcaagatcttgatctatatccatagattggaatattggtgggccagcaatcctcagacgcctcacttaggacaagctgtaaaaattaaaatgaacaaattacggcaaagttttaggagaaagaaggatgtttatgttccagaggccagtcgtccacatcagtggcagacagatgaagaaggcgttcgcaccggaaaatgtagcttcccggttaagtaccttggccatgtagaagttgatgaatcaagaggaatgcacatctgtgaagatgctgtaaaaagattgaaagctactggaaagaaagcagttaaagcagttctgtgggtctcagcagatggactcagagttgtggatgaaaaaactaaggacctcatagttgaccagacgatagagaaagtttctttctgtgccccagacaggaactttgatagagccttttcttacatatgccgtgatggcaccactcgtcgctggatctgtcactgcttcatggctgtcaaggacacaggtgaaaggttgagccatgcagtaggctgtgcttttgcagcctgtttagagcgcaagcagaagcgggagaaggaatgtggagtgactgctacttttgatgctagtcggaccacttttacaagagaaggatcattccgtgtcacaacagccactgaacaagcagaaagagaggagatcatgaaacaaatgcaagatgccaagaaagtgccagaagtagaaggggaggcagagagcatcagctccctgtgctcacagatcaccaatgccttcagcacacctgaggaccccttctcatctgctccgatgaccaaaccagtgacagtggtggcaccacaatctcctaccttccaagggaccgagtggggtcaatcttctggtgctgcctctccaggtctcttccaggccggtcatagacgtactccctctgaggccgaccgatggttagaagaggtgtctaagagcgtccgggctcagcagccccaggcctcagctgctcctctgcagccagttctccagcctcctccacccactgccatctcccagccagcatcacctttccaagggaatgcattcctcacctctcagcctgtgccagtgggtgtggtcccagccctgcaaccagcctttgtccctgcccagtcctatcctgtggccaatggaatgccctatccagcccctaatgtgcctgtggtgggcatcactccctcccagatggtggccaacgtatttggcactgcaggccaccctcaggctgcccatccccatcagtcacccagcctggtcaggcagcagacattccctcactacgaggcaagcagtgctaccaccagtcccttctttaagcctcctgctcagcacctcaacggttctgcagctttcaatggtgtagatgatggcaggttggcctcagcagacaggcatacagaggttcctacaggcacctgcccagtggatccttttgaagcccagtgggctgcattagaaaataagtccaagcagcgtactaatccctcccctaccaaccctttctccagtgacttacagaagacgtttgaaattgaactttaagcaatcattatggctatgtatcttgtccataccagacagggagcagggggtagcggtcaaaggagcaaaacagactttgtctcctgattagtactcttttcactaatcccaaaggtcccaaggaacaagtccaggcccagagtactgtgaggggtgattttgaaagacatgggaaaaagcattcctagagaaaagctgccttgcaattaggctaaagaagtcaaggaaatgttgctttctgtactccctcttcccttacccccttacaaatctctggcaacagagaggcaaagtatctgaacaagaatctatattccaagcacatttactgaaatgtaaaacacaacaggaagcaaagcaatctccctttgtttttcaggccattcacctgcctcctgtcagtagtggcctgtattagagatcaagaagagtggtttgtgctcaggctggggaacagagaggcacgctatgctgccagaattcccaggagggcatatcagcaactgcccagcagagctatattttgggggagaagttgagcttccattttgagtaacagaataaatattatatatatcaaaagccaaaatctttatttttatgcatttagaatattttaaatagttctcagatattaagaagttgtatgagttgtaagtaatcttgccaaaggtaaaggggctagttgtaagaaattgtacataagattgatttatcattgatgcctactgaaataaaaagaggaaaggctggaagctgcagacaggatccctagcttgttttctgtcagtcattcattgtaagtagcacattgcaacaacaatcatgcttatgaccaatacagtcactaggttgtagttttttttaaataaaggaaaagcagtattgtcctggttttaaacctatgatggaattctaatgtcattattttaatggaatcaatcgaaatatgctctatagagaatatatcttttatatattgctgcagtttccttatgttaatcctttaacactaaggtaacatgacataatcataccatagaagggaacacaggttaccatattggtttgtaatatgggtcttggtgggttttgttttatcctttaaattttgttcccatgagttttgtggggatggggattctggttttattagctttgtgtgtgtcctcttcccccaaacccccttttggtgagaacatccccttgacagttgcagcctcttgacctcggataacaataagagagctcatctcatttttacttttgaacgttggccttacaatcaaatgtaagttatatatatttgtactgatgaaaatttataatctgctttaacaaaaataaatgttcatggtag

SEQ ID NO: 435113 - DNA, 3235 bp, Homo sapiens
tctgtgttaactctgagagaacaaataatggctttttaaagactgttaatagaataatgaagacttactgtgtttttaacgtgaaaattttaggtgaccaagggtcctgctataacatactgggggtcataggatagtagaatggtcaacatctcaatttagacatgttacttcctgctctaaatacacttgtggacgctacttgtggtgtaactccttatgtatttaataattatctgactctggttttcttggttgatttttttaaatgggtgaagaatctagttatgaattctttgccctttatggaatgtgatatcttggtttttattccatctgttacttcccttttacttaattttatcttattgttttgcgttgtgtttctaaaataatggctttggcttgttttttcctgaatgtttctgcagtttggtttgagtatctgggtttgggcaccactcctgaacttggactccatctgtacttgtgacttttggaaggcagagtcagtgttttctgtggaagatgacatttttttaatattatatatgtgtatctccccctcccctttttggtttctcttaaaagactggaaagaaagcagttaaagcagttctgtgggtctcagcagatggactcagagttgtggatgaaaaaactaaggacctcatagttgaccagacgatagagaaagtttctttctgtgccccagacaggaactttgatagagccttttcttacatatgccgtgatggcaccactcgtcgctggatctgtcactgcttcatggctgtcaaggacacaggtgaaaggttgagccatgcagtaggctgtgcttttgcagcctgtttagagcgcaagcagaagcgggagaaggaatgtggagtgactgctacttttgatgctagtcggaccacttttacaagagaaggatcattccgtgtcacaacagccactgaacaagcagaaagagaggagatcatgaaacaaatgcaagatgccaagaaagtgccagaagtagaaggggaggcagagagcatcagctccctgtgctcacagatcaccaatgccttcagcacacctgaggaccccttctcatctgctccgatgaccaaaccagtgacagtggtggcaccacaatctcctaccttccaagggaccgagtggggtcaatcttctggtgctgcctctccaggtctcttccaggccggtcatagacgtactccctctgaggccgaccgatggttagaagaggtgtctaagagcgtccgggctcagcagccccaggcctcagctgctcctctgcagccagttctccagcctcctccacccactgccatctcccagccagcatcacctttccaagggaatgcattcctcacctctcagcctgtgccagtgggtgtggtcccagccctgcaaccagcctttgtccctgcccagtcctatcctgtggccaatggaatgccctatccagcccctaatgtgcctgtggtgggcatcactccctcccagatggtggccaacgtatttggcactgcaggccaccctcaggctgcccatccccatcagtcacccagcctggtcaggcagcagacattccctcactacgaggcaagcagtgctaccaccagtcccttctttaagcctcctgctcagcacctcaacggttctgcagctttcaatggtgtagatgatggcaggttggcctcagcagacaggcatacagaggttcctacaggcacctgcccagtggatccttttgaagcccagtgggctgcattagaaaataagtccaagcagcgtactaatccctcccctaccaaccctttctccagtgacttacagaagacgtttgaaattgaactttaagcaatcattatggctatgtatcttgtccataccagacagggagcagggggtagcggtcaaaggagcaaaacagactttgtctcctgattagtactcttttcactaatcccaaaggtcccaaggaacaagtccaggcccagagtactgtgaggggtgattttgaaagacatgggaaaaagcattcctagagaaaagctgccttgcaattaggctaaagaagtcaaggaaatgttgctttctgtactccctcttcccttacccccttacaaatctctggcaacagagaggcaaagtatctgaacaagaatctatattccaagcacatttactgaaatgtaaaacacaacaggaagcaaagcaatctccctttgtttttcaggccattcacctgcctcctgtcagtagtggcctgtattagagatcaagaagagtggtttgtgctcaggctggggaacagagaggcacgctatgctgccagaattcccaggagggcatatcagcaactgcccagcagagctatattttgggggagaagttgagcttccattttgagtaacagaataaatattatatatatcaaaagccaaaatctttatttttatgcatttagaatattttaaatagttctcagatattaagaagttgtatgagttgtaagtaatcttgccaaaggtaaaggggctagttgtaagaaattgtacataagattgatttatcattgatgcctactgaaataaaaagaggaaaggctggaagctgcagacaggatccctagcttgttttctgtcagtcattcattgtaagtagcacattgcaacaacaatcatgcttatgaccaatacagtcactaggttgtagttttttttaaataaaggaaaagcagtattgtcctggttttaaacctatgatggaattctaatgtcattattttaatggaatcaatcgaaatatgctctatagagaatatatcttttatatattgctgcagtttccttatgttaatcctttaacactaaggtaacatgacataatcataccatagaagggaacacaggttaccatattggtttgtaatatgggtcttggtgggttttgttttatcctttaaattttgttcccatgagttttgtggggatggggattctggttttattagctttgtgtgtgtcctcttcccccaaacccccttttggtgagaacatccccttgacagttgcagcctcttgacctcggataacaataagagagctcatctcatttttacttttgaacgttggccttacaatcaaatgtaagttatatatatttgtactgatgaaaatttataatctgctttaacaaaaataaatgttcatggtag

SEQ ID NO: 435114 - DNA, 2666 bp, Homo sapiens
  misc_feature (24)..(24): n is a, c, g, or t
atcattttcttcttccggctctcnctgctaggggcttaagcggagggagtcgagccagcgtcgccgcgatggtgttgttggagagcgagcagttcctgacctcatagttgaccagacgatagagaaagtttctttctgtgccccagacaggaactttgatagagccttttcttacatatgccgtgatggcaccactcgtcgctggatctgtcactgcttcatggctgtcaaggacacaggtgaaaggttgagccatgcagtaggctgtgcttttgcagcctgtttagagcgcaagcagaagcgggagaaggaatgtggagtgactgctacttttgatgctagtcggaccacttttacaagagaaggatcattccgtgtcacaacagccactgaacaagcagaaagagaggagatcatgaaacaaatgcaagatgccaagaaagtgccagaagtagaaggggaggcagagagcatcagctccctgtgctcacagatcaccaatgccttcagcacacctgaggaccccttctcatctgctccgatgaccaaaccagtgacagtggtggcaccacaatctcctaccttccaagggaccgagtggggtcaatcttctggtgctgcctctccaggtctcttccaggccggtcatagacgtactccctctgaggccgaccgatggttagaagaggtgtctaagagcgtccgggctcagcagccccaggcctcagctgctcctctgcagccagttctccagcctcctccacccactgccatctcccagccagcatcacctttccaagggaatgcattcctcacctctcagcctgtgccagtgggtgtggtcccagccctgcaaccagcctttgtccctgcccagtcctatcctgtggccaatggaatgccctatccagcccctaatgtgcctgtggtgggcatcactccctcccagatggtggccaacgtatttggcactgcaggccaccctcaggctgcccatccccatcagtcacccagcctggtcaggcagcagacattccctcactacgaggcaagcagtgctaccaccagtcccttctttaagcctcctgctcagcacctcaacggttctgcagctttcaatggtgtagatgatggcaggttggcctcagcagacaggcatacagaggttcctacaggcacctgcccagtggatccttttgaagcccagtgggctgcattagaaaataagtccaagcagcgtactaatccctcccctaccaaccctttctccagtgacttacagaagacgtttgaaattgaactttaagcaatcattatggctatgtatcttgtccataccagacagggagcagggggtagcggtcaaaggagcaaaacagactttgtctcctgattagtactcttttcactaatcccaaaggtcccaaggaacaagtccaggcccagagtactgtgaggggtgattttgaaagacatgggaaaaagcattcctagagaaaagctgccttgcaattaggctaaagaagtcaaggaaatgttgctttctgtactccctcttcccttacccccttacaaatctctggcaacagagaggcaaagtatctgaacaagaatctatattccaagcacatttactgaaatgtaaaacacaacaggaagcaaagcaatctccctttgtttttcaggccattcacctgcctcctgtcagtagtggcctgtattagagatcaagaagagtggtttgtgctcaggctggggaacagagaggcacgctatgctgccagaattcccaggagggcatatcagcaactgcccagcagagctatattttgggggagaagttgagcttccattttgagtaacagaataaatattatatatatcaaaagccaaaatctttatttttatgcatttagaatattttaaatagttctcagatattaagaagttgtatgagttgtaagtaatcttgccaaaggtaaaggggctagttgtaagaaattgtacataagattgatttatcattgatgcctactgaaataaaaagaggaaaggctggaagctgcagacaggatccctagcttgttttctgtcagtcattcattgtaagtagcacattgcaacaacaatcatgcttatgaccaatacagtcactaggttgtagttttttttaaataaaggaaaagcagtattgtcctggttttaaacctatgatggaattctaatgtcattattttaatggaatcaatcgaaatatgctctatagagaatatatcttttatatattgctgcagtttccttatgttaatcctttaacactaaggtaacatgacataatcataccatagaagggaacacaggttaccatattggtttgtaatatgggtcttggtgggttttgttttatcctttaaattttgttcccatgagttttgtggggatggggattctggttttattagctttgtgtgtgtcctcttcccccaaacccccttttggtgagaacatccccttgacagttgcagcctcttgacctcggataacaataagagagctcatctcatttttacttttgaacgttggccttacaatcaaatgtaagttatatatatttgtactgatgaaaatttataatctgctttaacaaaaataaatgttcatggtag

SEQ ID NO: 435115 - DNA, 2886 bp, Homo sapiens
gagcaaacagagctttagcacacataattagcttcctcagtgatacagaagtatcctagagtcagtattaagaataaaggccctagcgtcctacacctctgctcactttttcatgttatcatagatcatatgcttagtactggagactttggagaaaaatgagattgatgacattgtcatagtttgttacagagaaaagcactaagcatccactagtgcccagacttgaacccattttcctgacagaattactaaaggctccagaacctaattcagatcacagtcttgagaacacgttggaaggcatacaggttgcaaatgtcttctacaaagatctggctagctgaacatcttggcacaaaaaggacagatcctcaacagtgttataagaagaagaaatgaagaaatttggggatttgtaagggaggaagatgtgccttagtacattaattgttgacattttatactttcccatctgaaaagccaatgaaattgtggccagtaaattttttgaaactggttttgtagccctgccatacagttaattgagccttttcttacataagcaggagatacagtataaagtgccagcttgcatcatactgtcaaatttcaggattattccatttttctgtctggagccattttctgtttgccttgcagtgccagaagtagaaggggaggcagagagcatcagctccctgtgctcacagatcaccaatgccttcagcacacctgaggaccccttctcatctgctccgatgaccaaaccagtgacagtggtggcaccacaatctcctaccttccaagggaccgagtggggtcaatcttctggtgctgcctctccaggtctcttccaggccggtcatagacgtactccctctgaggccgaccgatggttagaagaggtgtctaagagcgtccgggctcagcagccccaggcctcagctgctcctctgcagccagttctccagcctcctccacccactgccatctcccagccagcatcacctttccaagggaatgcattcctcacctctcagcctgtgccagtgggtgtggtcccagccctgcaaccagcctttgtccctgcccagtcctatcctgtggccaatggaatgccctatccagcccctaatgtgcctgtggtgggcatcactccctcccagatggtggccaacgtatttggcactgcaggccaccctcaggctgcccatccccatcagtcacccagcctggtcaggcagcagacattccctcactacgaggcaagcagtgctaccaccagtcccttctttaagcctcctgctcagcacctcaacggttctgcagctttcaatggtgtagatgatggcaggttggcctcagcagacaggcatacagaggttcctacaggcacctgcccagtggatccttttgaagcccagtgggctgcattagaaaataagtccaagcagcgtactaatccctcccctaccaaccctttctccagtgacttacagaagacgtttgaaattgaactttaagcaatcattatggctatgtatcttgtccataccagacagggagcagggggtagcggtcaaaggagcaaaacagactttgtctcctgattagtactcttttcactaatcccaaaggtcccaaggaacaagtccaggcccagagtactgtgaggggtgattttgaaagacatgggaaaaagcattcctagagaaaagctgccttgcaattaggctaaagaagtcaaggaaatgttgctttctgtactccctcttcccttacccccttacaaatctctggcaacagagaggcaaagtatctgaacaagaatctatattccaagcacatttactgaaatgtaaaacacaacaggaagcaaagcaatctccctttgtttttcaggccattcacctgcctcctgtcagtagtggcctgtattagagatcaagaagagtggtttgtgctcaggctggggaacagagaggcacgctatgctgccagaattcccaggagggcatatcagcaactgcccagcagagctatattttgggggagaagttgagcttccattttgagtaacagaataaatattatatatatcaaaagccaaaatctttatttttatgcatttagaatattttaaatagttctcagatattaagaagttgtatgagttgtaagtaatcttgccaaaggtaaaggggctagttgtaagaaattgtacataagattgatttatcattgatgcctactgaaataaaaagaggaaaggctggaagctgcagacaggatccctagcttgttttctgtcagtcattcattgtaagtagcacattgcaacaacaatcatgcttatgaccaatacagtcactaggttgtagttttttttaaataaaggaaaagcagtattgtcctggttttaaacctatgatggaattctaatgtcattattttaatggaatcaatcgaaatatgctctatagagaatatatcttttatatattgctgcagtttccttatgttaatcctttaacactaaggtaacatgacataatcataccatagaagggaacacaggttaccatattggtttgtaatatgggtcttggtgggttttgttttatcctttaaattttgttcccatgagttttgtggggatggggattctggttttattagctttgtgtgtgtcctcttcccccaaacccccttttggtgagaacatccccttgacagttgcagcctcttgacctcggataacaataagagagctcatctcatttttacttttgaacgttggccttacaatcaaatgtaagttatatatatttgtactgatgaaaatttataatctgctttaacaaaaataaatgttcatggtag

SEQ ID NO: 435116 - DNA, 3585 bp, Homo sapiens
ggtgggcctgttgtcatgggggaggtggtggcgcttggtggccactggcggccgaggtagaggcagtggcgcttgagttggtcgggggcagcggcagatttgaggcttaagcaacttcttccggggaagagtgccagtgcagccactgttacaattcaagatcttgatctatatccatagattggaatattggtgggccagcaatcctcagacgcctcacttaggacaaatgaggaaactgaggcttggtgaagttacgaaacttgtccaaaatcacacaacttgtaaagggcacagccaagattcagagccaggctgtaaaaattaaaatgaacaaattacggcaaagttttaggagaaagaaggatgtttatgttccagaggccagtcgtccacatcagtggcagacagatgaagaaggcgttcgcaccggaaaatgtagcttcccggttaagtaccttggccatgtagaagttgatgaatcaagaggaatgcacatctgtgaagatgctgtaaaaagattgaaagctgaaaggaagttcttcaaaggcttctttggaaaaactggaaagaaagcagttaaagcagttctgtgggtctcagcagatggactcagagttgtggatgaaaaaactaaggacctcatagttgaccagacgatagagaaagtttctttctgtgccccagacaggaactttgatagagccttttcttacatatgccgtgatggcaccactcgtcgctggatctgtcactgcttcatggctgtcaaggacacaggtgaaaggttgagccatgcagtaggctgtgcttttgcagcctgtttagagcgcaagcagaagcgggagaaggaatgtggagtgactgctacttttgatgctagtcggaccacttttacaagagaaggatcattccgtgtcacaacagccactgaacaagcagaaagagaggagatcatgaaacaaatgcaagatgccaagaaagctgaaacagataagatagtcgttggttcatcagttgcccctggcaacactgccccatccccatcctctcccacctctcctacttctgatgccacgacctctctggagatgaacaatcctcatgccatcccacgccggcatgctccaattgaacagcttgctcgccaaggctctttccgaggttttcctgctcttagccagaagatgtcaccctttaaacgccaactatccctacgcatcaatgagttgccttccactatgcagaggaagactgatttccccattaaaaatgcagtgccagaagtagaaggggaggcagagagcatcagctccctgtgctcacagatcaccaatgccttcagcacacctgaggaccccttctcatctgctccgatgaccaaaccagtgacagtggtggcaccacaatctcctaccttccaagggaccgagtggggtcaatcttctggtgctgcctctccaggtctcttccaggccggtcatagacgtactccctctgaggccgaccgatggttagaagaggtgtctaagagcgtccgggctcagcagccccaggcctcagctgctcctctgcagccagttctccagcctcctccacccactgccatctcccagccagcatcacctttccaagggaatgcattcctcacctctcagcctgtgccagtgggtgtggtcccagccctgcaaccagcctttgtccctgcccagtcctatcctgtggccaatggaatgccctatccagcccctaatgtgcctgtggtgggcatcactccctcccagatggtggccaacgtatttggcactgcaggccaccctcaggctgcccatccccatcagtcacccagcctggtcaggcagcagacattccctcactacgaggcaagcagtgctaccaccagtcccttctttaagcctcctgctcagcacctcaacggttctgcagctttcaatggtgtagatgatggcaggttggcctcagcagacaggcatacagaggttcctacaggcacctgcccagtggatccttttgaagcccagtgggctgcattagaaaataagtccaagcagcgtactaatccctcccctaccaaccctttctccagtgacttacagaagacgtttgaaattgaactttaagcaatcattatggctatgtatcttgtccataccagacagggagcagggggtagcggtcaaaggagcaaaacagactttgtctcctgattagtactcttttcactaatcccaaaggtcccaaggaacaagtccaggcccagagtactgtgaggggtgattttgaaagacatgggaaaaagcattcctagagaaaagctgccttgcaattaggctaaagaagtcaaggaaatgttgctttctgtactccctcttcccttacccccttacaaatctctggcaacagagaggcaaagtatctgaacaagaatctatattccaagcacatttactgaaatgtaaaacacaacaggaagcaaagcaatctccctttgtttttcaggccattcacctgcctcctgtcagtagtggcctgtattagagatcaagaagagtggtttgtgctcaggctggggaacagagaggcacgctatgctgccagaattcccaggagggcatatcagcaactgcccagcagagctatattttgggggagaagttgagcttccattttgagtaacagaataaatattatatatatcaaaagccaaaatctttatttttatgcatttagaatattttaaatagttctcagatattaagaagttgtatgagttgtaagtaatcttgccaaaggtaaaggggctagttgtaagaaattgtacataagattgatttatcattgatgcctactgaaataaaaagaggaaaggctggaagctgcagacaggatccctagcttgttttctgtcagtcattcattgtaagtagcacattgcaacaacaatcatgcttatgaccaatacagtcactaggttgtagttttttttaaataaaggaaaagcagtattgtcctggttttaaacctatgatggaattctaatgtcattattttaatggaatcaatcgaaatatgctctatagagaatatatcttttatatattgctgcagtttccttatgttaatcctttaacactaaggtaacatgacataatcataccatagaagggaacacaggttaccatattggtttgtaatatgggtcttggtgggttttgttttatcctttaaattttgttcccatgagttttgtggggatggggattctggttttattagctttgtgtgtgtcctcttcccccaaacccccttttggtgagaacatccccttgacagttgcagcctcttgacctcggataacaataagagagctcatctcatttttacttttgaacgttggccttacaatcaaatgtaagttatatatatttgtactgatgaaaatttataatctgctttaacaaaaataaatgttcatggtagaagcttttgcccatgaagggctgttctttcccctttcctttattagtaaatgaatttatttttcgttcttttggtcttactctc

SEQ ID NO: 435117 - DNA, 3552 bp, Homo sapiens
ggtgggcctgttgtcatgggggaggtggtggcgcttggtggccactggcggccgaggtagaggcagtggcgcttgagttggtcgggggcagcggcagatttgaggcttaagcaacttcttccggggaagagtgccagtgcagccactgttacaattcaagatcttgatctatatccatagattggaatattggtgggccagcaatcctcagacgcctcacttaggacaaatgaggaaactgaggcttggtgaagttacgaaacttgtccaaaatcacacaacttgtaaagggcacagccaagattcagagccaggctgtaaaaattaaaatgaacaaattacggcaaagttttaggagaaagaaggatgtttatgttccagaggccagtcgtccacatcagtggcagacagatgaagaaggcgttcgcaccggaaaatgtagcttcccggttaagtaccttggccatgtagaagttgatgaatcaagaggaatgcacatctgtgaagatgctgtaaaaagattgaaagctgaaaggaagttcttcaaaggcttctttggaaaaactggaaagaaagcagttaaagcagttctgtgggtctcagcagatggactcagagttgtggatgaaaaaactaaggacctcatagttgaccagacgatagagaaagtttctttctgtgccccagacaggaactttgatagagccttttcttacatatgccgtgatggcaccactcgtcgctggatctgtcactgcttcatggctgtcaaggacacaggtgaaaggttgagccatgcagtaggctgtgcttttgcagcctgtttagagcgcaagcagaagcgggagaaggaatgtggagtgactgctacttttgatgctagtcggaccacttttacaagagaaggatcattccgtgtcacaacagccactgaacaagcagaaagagaggagatcatgaaacaaatgcaagatgccaagaaagctgaaacagataagatagtcgttggttcatcagttgcccctggcaacactgccccatccccatcctctcccacctctcctacttctgatgccacgacctctctggagatgaacaatcctcatgccatcccacgccggcatgctccaattgaacagcttgctcgccaaggctctttccgaggttttcctgctcttagccagaagatgtcaccctttaaacgccaactatccctacgcatcaatgagttgccttccactatgcagaggaagactgatttccccattaaaaatgcagtgccagaagtagaaggggaggcagagagcatcagctccctgtgctcacagatcaccaatgccttcagcacacctgaggaccccttctcatctgctccgatgaccaaaccagtgacagtggtggcaccacaatctcctaccttccaagggaccgagtggggtcaatcttctggtgctgcctctccaggtctcttccaggccggtcatagacgtactccctctgaggccgaccgatggttagaagaggtgtctaagagcgtccgggctcagcagccccaggcctcagctgctcctctgcagccagttctccagcctcctccacccactgccatctcccagccagcatcacctttccaagggaatgcattcctcacctctcagcctgtgccagtgggtgtggtcccagccctgcaaccagcctttgtccctgcccagtcctatcctgtggccaatggaatgccctatccagcccctaatgtgcctgtggtgggcatcactccctcccagatggtggccaacgtatttggcactgcaggccaccctcaggctgcccatccccatcagtcacccagcctggtcaggcagcagacattccctcactacgaggcaagcagtgctaccaccagtcccttctttaagcctcctgctcagcacctcaacggttctgcagctttcaatggtgtagatgatggcaggttggcctcagcagacaggcatacagaggttcctacaggcacctgcccagtggatccttttgaagcccagtgggctgcattagaaaataagtccaagcagcgtactaatccctcccctaccaaccctttctccagtgacttacagaagacgtttgaaattgaactttaagcaatcattatggctatgtatcttgtccataccagacagggagcagggggtagcggtcaaaggagcaaaacagactttgtctcctgattagtactcttttcactaatcccaaaggtcccaaggaacaagtccaggcccagagtactgtgaggggtgattttgaaagacatgggaaaaagcattcctagagaaaagctgccttgcaattaggctaaagaagtcaaggaaatgttgctttctgtactccctcttcccttacccccttacaaatctctggcaacagagaggcaaagtatctgaacaagaatctatattccaagcacatttactgaaatgtaaaacacaacaggaagcaaagcaatctccctttgtttttcaggccattcacctgcctcctgtcagtagtggcctgtattagagatcaagaagagtggtttgtgctcaggctggggaacagagaggcacgctatgctgccagaattcccaggagggcatatcagcaactgcccagcagagctatattttgggggagaagttgagcttccattttgagtaacagaataaatattatatatatcaaaagccaaaatctttatttttatgcatttagaatattttaaatagttctcagatattaagaagttgtatgagttgtaagtaatcttgccaaaggtaaaggggctagttgtaagaaattgtacataagattgatttatcattgatgcctactgaaataaaaagaggaaaggctggaagctgcagacaggatccctagcttgttttctgtcagtcattcattgtaagtagcacattgcaacaacaatcatgcttatgaccaatacagtcactaggttgtagttttttttaaataaaggaaaagcagtattgtcctggttttaaacctatgatggaattctaatgtcattattttaatggaatcaatcgaaatatgctctatagagaatatatcttttatatattgctgcagtttccttatgttaatcctttaacactaaggtaacatgacataatcataccatagaagggaacacaggttaccatattggtttgtaatatgggtcttggtgggttttgttttatcctttaaattttgttcccatgagttttgtggggatggggattctggttttattagctttgtgtgtgtcctcttcccccaaacccccttttggtgagaacatccccttgacagttgcagcctcttgacctcggataacaataagagagctcatctcatttttacttttgaacgttggccttacaatcaaatgtaagttatatatatttgtactgatgggagaagactgcagtcttctcccatcagttataaccaaacaagaggtcaatgtatagaaatccgctgatgggacgcagatgcggggtcctctaa

SEQ ID NO: 435118 - DNA, 3539 bp, Homo sapiens
ctctgctcactgcaagctccgcctcctgagttcatgccattctcctgcttcagccttctgagtagctgggacaacaggtgtccgccaccatgcccaattaatttttttgtatttgtagagatggggtttcaccgtgttagctaggatggtctcgatctcctgaccttgtgatccgcccgccttggcctcccaaagtgctgggattacaggcgtgagctaccgtgcccggctattaataatgttaacaataactaatgattattgagcatttactacatgtcaggtcctgaattatgtatattatttcatttactcctcataaaagggttccttctaggagctaggggagaaaaccagccattatatagtcaataataatattaatggtaataatagttattatatataacagttatatattacataacatatgctggccctgaattgaacatattctctaatttgatttttgaatatttaaaaatatacacatatatttgttttttttttttaagagatggaggagtctcaccatgttgcccaagctggcctcaaacccctggcctcaagtgagcctcccacctcagcctcccaagtagctgccaccatgcagtctctaatttaaattttaaacaaaccctagatgttattattatcttagagtaggctgcttctaaaatagctcccaatgatcctcttgctggtctttacatccttgtgtaatctccttgagtgtgggctggacctaatgacttacttctaactcacaggatgtggcaacagtgatgggatgtcacatctgtgattggattacgaaagactgtgccttctgttttgctattactgtctctggtgagtcctctctcttgctcttgcttgcttgcactgatgaagtaagctgccacgttgtgagatgctcaacgaagaggcccatgaggcagggcaccgagggaggcttctggccaacagctcctggggaaccaaggccttaggaagtgagtcctgccaacagccttgaactttgaaaccacagtaccttgttccagcgtggaaagcagcgtggcacttcccggtggtgaaagcaccccagcttgaaagggtgaaaacaccttctcccagatagtctccctttgtttagccagtgcttttgccttaaggaaatcaaatgaaggggtcagccaggagtggatctggaagctggagaactctcaatacgccacttcagtttattgacgacatttataattgcaaccgaagttgactgatttctgctaaatgaaagtttgcgctttgccctttagcattgaggctcctggaaagaacttcaatgaaattggatgcattgagaccaaagaaaagaaggggacatttttatctctctgatacctttctccccagggcttggaaacacttcttaaacacaacctctaatgttggtgttttatttgaggcttaagcaacttcttccggggaagagtgccagtgcagccactgttacaattcaagatcttgatctatatccatagattggaatattggtgggccagcaatcctcagacgcctcacttaggacaagctgtaaaaattaaaatgaacaaattacggcaaagttttaggagaaagaaggatgtttatgttccagaggccagtcgtccacatcagtggcagacagatgaagaaggcgttcgcaccggaaaatgtagcttcccggttaagtaccttggccatgtagaagttgatgaatcaagaggaatgcacatctgtgaagatgctgtaaaaagattgaaagctgaaaggaagttcttcaaaggcttctttggaaaaactggaaagaaagcagttaaagcagttctgtgggtctcagcagatggactcagagttgtggatgaaaaaactaaggacctcatagttgaccagacgatagagaaagtttctttctgtgccccagacaggaactttgatagagccttttcttacatatgccgtgatggcaccactcgtcgctggatctgtcactgcttcatggctgtcaaggacacaggtgaaaggttgagccatgcagtaggctgtgcttttgcagcctgtttagagcgcaagcagaagcgggagaaggaatgtggagtgactgctacttttgatgctagtcggaccacttttacaagagaaggatcattccgtgtcacaacagccactgaacaagcagaaagagaggagatcatgaaacaaatgcaagatgccaagaaagctgaaacagataagatagtcgttggttcatcagttgcccctggcaacactgccccatccccatcctctcccacctctcctacttctgatgccacgacctctctggagatgaacaatcctcatgccatcccacgccggcatgctccaattgaacagcttgctcgccaaggctctttccgaggttttcctgctcttagccagaagatgtcaccctttaaacgccaactatccctacgcatcaatgagttgccttccactatgcagaggaagactgatttccccattaaaaatgcagtgccagaagtagaaggggaggcagagagcatcagctccctgtgctcacagatcaccaatgccttcagcacacctgaggaccccttctcatctgctccgatgaccaaaccagtgacagtggtggcaccacaatctcctaccttccaagctaatggcactgactcagccttccatgtgcttgctaagccagcccatactgctctagcacccgtagcaatgcctgtgcgtgaaaccaacccttgggcccatgcccctgatgctgctaacaaggaaattgcagccacatgttcggggaccgagtggggtcaatcttctggtgctgcctctccaggtctcttccaggccggtcatagacgtactccctctgaggccgaccgatggttagaagaggtgtctaagagcgtccgggctcagcagccccaggcctcagctgctcctctgcagccagttctccagcctcctccacccactgccatctcccagccagcatcacctttccaagggaatgcattcctcacctctcagcctgtgccagtgggtgtggtcccagccctgcaaccagcctttgtccctgcccagtcctatcctgtggccaatggaatgccctatccagcccctaatgtgcctgtggtgggttttgtatgttcaaactgtcattttatttttacgttgttagatatgggaactgtttgggtttagggcatcttagagttgattgatggaaaaagcagacaggaactggtgggaggtcaagtggggaagttggtgaatgtggaataacttacctttgtgctccacttaaaccagatgtgttgcagctttcctgacatgcaaggatctactttaattccacactctcattaataaattgaataaaagggaatgttttggcacctgatataatctgccaggctatgtgacagtaggaaggaatggtttcccctaacaagcccaatgcactggtctgactttataaattatttaataaaatgaactattat

SEQ ID NO: 435119 - DNA, 3173 bp, Homo sapiens
ctctgctcactgcaagctccgcctcctgagttcatgccattctcctgcttcagccttctgagtagctgggacaacaggtgtccgccaccatgcccaattaatttttttgtatttgtagagatggggtttcaccgtgttagctaggatggtctcgatctcctgaccttgtgatccgcccgccttggcctcccaaagtgctgggattacaggcgtgagctaccgtgcccggctattaataatgttaacaataactaatgattattgagcatttactacatgtcaggtcctgaattatgtatattatttcatttactcctcataaaagggttccttctaggagctaggggagaaaaccagccattatatagtcaataataatattaatggtaataatagttattatatataacagttatatattacataacatatgctggccctgaattgaacatattctctaatttgatttttgaatatttaaaaatatacacatatatttgttttttttttttaagagatggaggagtctcaccatgttgcccaagctggcctcaaacccctggcctcaagtgagcctcccacctcagcctcccaagtagctgccaccatgcagtctctaatttaaattttaaacaaaccctagatgttattattatcttagagtaggctgcttctaaaatagctcccaatgatcctcttgctggtctttacatccttgtgtaatctccttgagtgtgggctggacctaatgacttacttctaactcacaggatgtggcaacagtgatgggatgtcacatctgtgattggattacgaaagactgtgccttctgttttgctattactgtctctggtgagtcctctctcttgctcttgcttgcttgcactgatgaagtaagctgccacgttgtgagatgctcaacgaagaggcccatgaggcagggcaccgagggaggcttctggccaacagctcctggggaaccaaggccttaggaagtgagtcctgccaacagccttgaactttgaaaccacagtaccttgttccagcgtggaaagcagcgtggcacttcccggtggtgaaagcaccccagcttgaaagggtgaaaacaccttctcccagatagtctccctttgtttagccagtgcttttgccttaaggaaatcaaatgaaggggtcagccaggagtggatctggaagctggagaactctcaatacgccacttcagtttattgacgacatttataattgcaaccgaagttgactgatttctgctaaatgaaagtttgcgctttgccctttagcattgaggctcctggaaagaacttcaatgaaattggatgcattgagaccaaagaaaagaaggggacatttttatctctctgatacctttctccccagggcttggaaacacttcttaaacacaacctctaatgttggtgttttatttgaggcttaagcaacttcttccggggaagagtgccagtgcagccactgttacaattcaagatcttgatctatatccatagattggaatattggtgggccagcaatcctcagacgcctcacttaggacaagctgtaaaaattaaaatgaacaaattacggcaaagttttaggagaaagaaggatgtttatgttccagaggccagtcgtccacatcagtggcagacagatgaagaaggcgttcgcaccggaaaatgtagcttcccggttaagtaccttggccatgtagaagttgatgaatcaagaggaatgcacatctgtgaagatgctgtaaaaagattgaaagctgaaaggaagttcttcaaaggcttctttggaaaaactggaaagaaagcagttaaagcagttctgtgggtctcagcagatggactcagagttgtggatgaaaaaactaaggacctcatagttgaccagacgatagagaaagtttctttctgtgccccagacaggaactttgatagagccttttcttacatatgccgtgatggcaccactcgtcgctggatctgtcactgcttcatggctgtcaaggacacaggtgaaaggttgagccatgcagtaggctgtgcttttgcagcctgtttagagcgcaagcagaagcgggagaaggaatgtggagtgactgctacttttgatgctagtcggaccacttttacaagagaaggatcattccgtgtcacaacagccactgaacaagcagaaagagaggagatcatgaaacaaatgcaagatgccaagaaagctgaaacagataagatagtcgttggttcatcagttgcccctggcaacactgccccatccccatcctctcccacctctcctacttctgatgccacgacctctctggagatgaacaatcctcatgccatcccacgccggcatgctccaattgaacagcttgctcgccaaggctctttccgaggttttcctgctcttagccagaagatgtcaccctttaaacgccaactatccctacgcatcaatgagttgccttccactatgcagaggaagactgatttccccattaaaaatgcagaggtaatgtagcatctacctgactcactgggtactcgagcactgaagcattctcatcacttcccatgaagacactaatcccattaaactaggcattcctctttccctgaggttcgttgatagttgtatcttttgtcatttcccatagtgggaaaactaaggtccgtggagggggatgtgaatccataatttctcttcaacaaacaggcagcagagccattgtggaatttctagcctaagccataagatttgtggtttgtcctgatgtaagtgcattcactgcctttcagccaacctgctcccaaacatcaagggtctcaagtttctattcttattctgccattgggacccagcagggaattaattaaagaggccttagaaacacatagcattaccagcagaagaaatggatatgtgctcattgtccttctggctggttggctccataaggaggaaactctagacaggtctttcgtgtacatctaagatctgttgttcatcacagacagtggacttgttcacaagtattcattacctttcagaaccgtctcacaggcctttgtgtggcctctgtacagctatgccagcctctataggtctatcctcgtcataaaatctgtagctaaagtattaga

SEQ ID NO: 435120 - DNA, 2987 bp, Homo sapiens
ctctgctcactgcaagctccgcctcctgagttcatgccattctcctgcttcagccttctgagtagctgggacaacaggtgtccgccaccatgcccaattaatttttttgtatttgtagagatggggtttcaccgtgttagctaggatggtctcgatctcctgaccttgtgatccgcccgccttggcctcccaaagtgctgggattacaggcgtgagctaccgtgcccggctattaataatgttaacaataactaatgattattgagcatttactacatgtcaggtcctgaattatgtatattatttcatttactcctcataaaagggttccttctaggagctaggggagaaaaccagccattatatagtcaataataatattaatggtaataatagttattatatataacagttatatattacataacatatgctggccctgaattgaacatattctctaatttgatttttgaatatttaaaaatatacacatatatttgttttttttttttaagagatggaggagtctcaccatgttgcccaagctggcctcaaacccctggcctcaagtgagcctcccacctcagcctcccaagtagctgccaccatgcagtctctaatttaaattttaaacaaaccctagatgttattattatcttagagtaggctgcttctaaaatagctcccaatgatcctcttgctggtctttacatccttgtgtaatctccttgagtgtgggctggacctaatgacttacttctaactcacaggatgtggcaacagtgatgggatgtcacatctgtgattggattacgaaagactgtgccttctgttttgctattactgtctctggtgagtcctctctcttgctcttgcttgcttgcactgatgaagtaagctgccacgttgtgagatgctcaacgaagaggcccatgaggcagggcaccgagggaggcttctggccaacagctcctggggaaccaaggccttaggaagtgagtcctgccaacagccttgaactttgaaaccacagtaccttgttccagcgtggaaagcagcgtggcacttcccggtggtgaaagcaccccagcttgaaagggtgaaaacaccttctcccagatagtctccctttgtttagccagtgcttttgccttaaggaaatcaaatgaaggggtcagccaggagtggatctggaagctggagaactctcaatacgccacttcagtttattgacgacatttataattgcaaccgaagttgactgatttctgctaaatgaaagtttgcgctttgccctttagcattgaggctcctggaaagaacttcaatgaaattggatgcattgagaccaaagaaaagaaggggacatttttatctctctgatacctttctccccagggcttggaaacacttcttaaacacaacctctaatgttggtgttttatttgaggcttaagcaacttcttccggggaagagtgccagtgcagccactgttacaattcaagatcttgatctatatccatagattggaatattggtgggccagcaatcctcagacgcctcacttaggacaagctgtaaaaattaaaatgaacaaattacggcaaagttttaggagaaagaaggatgtttatgttccagaggccagtcgtccacatcagtggcagacagatgaagaaggcgttcgcaccggaaaatgtagcttcccggttaagtaccttggccatgtagaagttgatgaatcaagaggaatgcacatctgtgaagatgctgtaaaaagattgaaagctgaaaggaagttcttcaaaggcttctttggaaaaactggaaagaaagcagttaaagcagttctgtgggtctcagcagatggactcagagttgtggatgaaaaaactaaggacctcatagttgaccagacgatagagaaagtttctttctgtgccccagacaggaactttgatagagccttttcttacatatgccgtgatggcaccactcgtcgctggatctgtcactgcttcatggctgtcaaggacacaggtgaaaggttgagccatgcagtaggctgtgcttttgcagcctgtttagagcgcaagcagaagcgggagaaggaatgtggagtgactgctacttttgatgctagtcggaccacttttacaagagaaggatcattccgtgtcacaacagccactgaacaagcagaaagagaggagatcatgaaacaaatgcaagatgccaagaaagctgaaacagataagatagtcgttggttcatcagttgcccctggcaacactgccccatccccatcctctcccacctctcctacttctgatgccacgacctctctggagatgaacaatcctcatgccatcccacgccggcatgctccaattgaacagcttgctcgccaaggctctttccgaggttttcctgctcttagccagaagatgtcaccctttaaacgccaactatccctacgcatcaatgagttgccttccactatgcagaggaagactgatttccccattaaaaatgcagtgccagaagtagaaggggaggcagagagcatcagctccctgtgctcacagatcaccaatgccttcagcacacctgaggaccccttctcatctgctccgatgaccaaaccagtgacagtggtggcaccacaatctcctaccttccaaggttggtgccctctgacctgctcagctgttctctttacaaccagtacttttagtacactgctcactaactgtaagttggcatcctgagcttcccaaggcctggtcagacccattaatttctctatttgatgtcttagattcattgatttctccattcgacgatgtctttgtgcccttcctgttttctaagatgtctgtgtttgtcattctgcatgtgcccatctttcaccccattctataaggaatttctgtagtcccaacctactgccttatttcccacttgactgttaaggatcagcata

SEQ ID NO: 435121 - DNA, 2430 bp, Homo sapiens
ctctgctcactgcaagctccgcctcctgagttcatgccattctcctgcttcagccttctgagtagctgggacaacaggtgtccgccaccatgcccaattaatttttttgtatttgtagagatggggtttcaccgtgttagctaggatggtctcgatctcctgaccttgtgatccgcccgccttggcctcccaaagtgctgggattacaggcgtgagctaccgtgcccggctattaataatgttaacaataactaatgattattgagcatttactacatgtcaggtcctgaattatgtatattatttcatttactcctcataaaagggttccttctaggagctaggggagaaaaccagccattatatagtcaataataatattaatggtaataatagttattatatataacagttatatattacataacatatgctggccctgaattgaacatattctctaatttgatttttgaatatttaaaaatatacacatatatttgttttttttttttaagagatggaggagtctcaccatgttgcccaagctggcctcaaacccctggcctcaagtgagcctcccacctcagcctcccaagtagctgccaccatgcagtctctaatttaaattttaaacaaaccctagatgttattattatcttagagtaggctgcttctaaaatagctcccaatgatcctcttgctggtctttacatccttgtgtaatctccttgagtgtgggctggacctaatgacttacttctaactcacaggatgtggcaacagtgatgggatgtcacatctgtgattggattacgaaagactgtgccttctgttttgctattactgtctctggtgagtcctctctcttgctcttgcttgcttgcactgatgaagtaagctgccacgttgtgagatgctcaacgaagaggcccatgaggcagggcaccgagggaggcttctggccaacagctcctggggaaccaaggccttaggaagtgagtcctgccaacagccttgaactttgaaaccacagtaccttgttccagcgtggaaagcagcgtggcacttcccggtggtgaaagcaccccagcttgaaagggtgaaaacaccttctcccagatagtctccctttgtttagccagtgcttttgccttaaggaaatcaaatgaaggggtcagccaggagtggatctggaagctggagaactctcaatacgccacttcagtttattgacgacatttataattgcaaccgaagttgactgatttctgctaaatgaaagtttgcgctttgccctttagcattgaggctcctggaaagaacttcaatgaaattggatgcattgagaccaaagaaaagaaggggacatttttatctctctgatacctttctccccagggcttggaaacacttcttaaacacaacctctaatgttggtgttttatttgaggcttaagcaacttcttccggggaagagtgccagtgcagccactgttacaattcaagatcttgatctatatccatagattggaatattggtgggccagcaatcctcagacgcctcacttaggacaaatgaggaaactgaggcttggtgaagttacgaaacttgtccaaaatcacacaacttgtaaagggcacagccaagattcagagccaggctgtaaaaattaaaatgaacaaattacggcaaagttttaggagaaagaaggatgtttatgttccagaggccagtcgtccacatcagtggcagacagatgaagaaggcgttcgcaccggaaaatgtagcttcccggttaagtaccttggccatgtagaagttgatgaatcaagaggaatgcacatctgtgaagatgctgtaaaaagattgaaagctgtatgtatttgatggttgccagtgttgatctatatgctatcaatattttcttaaaagattttgctcagtacattttagtgacccagtaaaaactgtgtttctgttaaaaagatgtgggcttgctaataaggagcatctcagccaagcgcggtggctcactcctgtaatcctagcactttgggaggctgaggcaggaggattacatgaggccaggagtttgagaccagcctgggcaacatttcaagaccctgtctctattaatttcaaaaattttttcttaaataataaaataataattaaaaaatttaaaagcatctcatgttgcccatccagaggtataaattattagatgagccgtttaaatttaggccagatattatcctaaaggtacttttgatttataacccatatgaaacaaatgttgtgaaatctgatagaagaatagtattctaagactaggattaaactgttacagttaacatcttaccctaactgtgataactgggctataaattaggggttttaaatatactgtaaaaaatagcttcctgggg

SEQ ID NO: 435122 - DNA, 1958 bp, Homo sapiens
ctctgctcactgcaagctccgcctcctgagttcatgccattctcctgcttcagccttctgagtagctgggacaacaggtgtccgccaccatgcccaattaatttttttgtatttgtagagatggggtttcaccgtgttagctaggatggtctcgatctcctgaccttgtgatccgcccgccttggcctcccaaagtgctgggattacaggcgtgagctaccgtgcccggctattaataatgttaacaataactaatgattattgagcatttactacatgtcaggtcctgaattatgtatattatttcatttactcctcataaaagggttccttctaggagctaggggagaaaaccagccattatatagtcaataataatattaatggtaataatagttattatatataacagttatatattacataacatatgctggccctgaattgaacatattctctaatttgatttttgaatatttaaaaatatacacatatatttgttttttttttttaagagatggaggagtctcaccatgttgcccaagctggcctcaaacccctggcctcaagtgagcctcccacctcagcctcccaagtagctgccaccatgcagtctctaatttaaattttaaacaaaccctagatgttattattatcttagagtaggctgcttctaaaatagctcccaatgatcctcttgctggtctttacatccttgtgtaatctccttgagtgtgggctggacctaatgacttacttctaactcacaggatgtggcaacagtgatgggatgtcacatctgtgattggattacgaaagactgtgccttctgttttgctattactgtctctggtgagtcctctctcttgctcttgcttgcttgcactgatgaagtaagctgccacgttgtgagatgctcaacgaagaggcccatgaggcagggcaccgagggaggcttctggccaacagctcctggggaaccaaggccttaggaagtgagtcctgccaacagccttgaactttgaaaccacagtaccttgttccagcgtggaaagcagcgtggcacttcccggtggtgaaagcaccccagcttgaaagggtgaaaacaccttctcccagatagtctccctttgtttagccagtgcttttgccttaaggaaatcaaatgaaggggtcagccaggagtggatctggaagctggagaactctcaatacgccacttcagtttattgacgacatttataattgcaaccgaagttgactgatttctgctaaatgaaagtttgcgctttgccctttagcattgaggctcctggaaagaacttcaatgaaattggatgcattgagaccaaagaaaagaaggggacatttttatctctctgatacctttctccccagggcttggaaacacttcttaaacacaacctctaatgttggtgttttatttgaggcttaagcaacttcttccggggaagagtgccagtgcagccactgttacaattcaagatcttgatctatatccatagattggaatattggtgggccagcaatcctcagacgcctcacttaggacaaatgaggaaactgaggcttggtgaagttacgaaacttgtccaaaatcacacaacttgtaaagggcacagccaagattcagagccaggctgtaaaaattaaaatgaacaaattacggcaaagttttaggagaaagaaggatgtttatgttccagaggccagtcgtccacatcagtggcagacagatgaagaaggcgttcgcaccggaaaatgtagcttcccggttaagtaccttggccatgtagaagttgatgaatcaagaggaatgcacatctgtgaagatgctgtaaaaagattgaaagctactggaaagaaagcagttaaagcaggggagtgacaggcttggatttgtgtgtggggaaaactggtctggtctcagcgtgagg

SEQ ID NO: 435123 - DNA, 565 bp, Homo sapiens
tgacttttggaaggcagagtcagtgttttctgtggaagatgacatttttttaatattatatatgtgtatctccccctcccctttttggtttctcttaaaagactggaaagaaagcagttaaagcagttctgtgggtctcagcagatggactcagagttgtggatgaaaaaactaaggtaagattctttatttttattttgatttattttattttttttggagatggagtttcactcttgtcacccaggctggagtgcaatggcacgatctcggcccaccgcaacctccacctcccaggttcaagcgattctcctgcctcagcctccctagtagctgggattacaggcatgtgccaccatgcccagctaattttgtatttttagtagaaatggggtttctccatgttggtcaggctggtctcgaactcctgacctcaggtgatccgcccacctcggcctcccaaagtgctgggattacaggtgtgagccactgcgcccggcctcgcctggctaatttttgtattattagtagatacggggtttcaccatgttggccaggctgatct

SEQ ID NO: 435124 - DNA, 1015 bp, Homo sapiens
gatccattagcgtataattgaatatcaaagggaattttaccttaaacatatatcaagtctatactcagctaatcgttttgtctaaacacagccttgttagcatttgaatttacaaatattcatttgcttatttgcagtgttccttttgcttttagaataaatcataaatatttccccaatactgtcaagatacttcttcaactttgtccctgaaccatcagctttctttagggtccgggtatcctttacacttcaatggggttttcttgtgtgtgtcattgggggtaactccattgacctcagcatttctatctcaagagatggctctggaacacagaaccagaggcaacaggtactaatggttgataaaattaacagcgactgcataaccattttccacatggcagggctgtgcttaagccccacacctccaataatcaatttctatgacggtactaataaccttaactatatgcaaattcttcaccacttatgatatggtacaaactggagtttacagatggccttggccttgcctagcccatttgttcatcctaacttcttcatcacttcctgatgcacttggggaagcatgttgacacaacgttaccaatatttgattacctatggttatctgcaattacctacgcttatcttatcagaccctagatgccatttgagccccttacttctttgggcagtgggtgaaatgggagaacatagagaaatgttcactttgacctaagaaacgcataaaagggaatgccatgcacaatgtaagataaaatgtttggggacaggggatcatcgtgaaatttatttctgctattctgccctattgaggtcattaattataatggatttaaagatttttttttaaactctacaaacactaagccaaggaattcaggttatctgctatgttaacctaataaagcaaaggaaaatatgttgctttaatccttgcttgttaacctaataaagcaaaggaaaatatgttgctttaaaacttgct

SEQ ID NO: 435125 - DNA, 929 bp, Homo sapiens
tgctagtagaagcctggaaataactgagatgccaataaacaggaaaattactaattatatctatacaatgaaatctatgcaactgatttaaaattaaggatgcaccctcttatttttagtgtgtatgtataaatggatacgtggtatgttgtcaaagaaggtttagaagttcaatttaaataatactgaagatacctgctattgtataagcaatgaaaatgctatacagatgttctgaaataaaacaaacacacccatactctgaccactgaactttggaccagtattgctcttcattagtatcctaaaatgtatggacattttatgggtcattgttccaaacctgtctttggagctatttggagtagcacagaaccaacctgtctttagagcttccttgagcagcacagaaaagggactttcagagcttcaggagacagtatttcatccaagtgcagcttctggaagtgaaatgtatttagaaggtttgctctgctattgtaatttcccaagtaggcccatgtgactctgcaaaccctaggcctgagccagatttgtttgaaatgtcagccaaactaccagcaccttacatcatgatatggtctgactctgtgttcccatccaaatctcatatcaaattgtaattcccagtgttgcaggaggggcccagtgggaggtgatcgaatcatgggggtggacctcccccttgctgttcttgtgatagaattttccttatatctgcttgtttaaaagtgtgtttaaaggcaccttccccacacttcctgccagccatatgaagatgggcttgcttccctttcaacttctgccatgattgtaagtttcctgaggcctacccagaaacagaagcctgtacagcctgcagaactatgagctgattaaacctcttttctttataaattacccagtct

SEQ ID NO: 435126 - DNA, 777 bp, Homo sapiens
gagagggagtttcgctcttgttgcccatgctggagtgcaatggcacgatcttggcccactgcaacctccatctcctgggttcaagcgatcttcccgcctcagccttccaagtagctgggattacagacgtgtgccatcaggcctggctaattttgtatttttagtagagacagggtttcgccatgttggtcaggatggtctcgaactcctgacctcaactgatccacccgcctcagcctcccaaagtgctaggattacaggtgtgagccactgcacccggccctgcccccagtcttgaccattctactaattttaaagaacatcttggaattttacactcttggaatcatagtcgtagaatcctttttttgagacagagtctcactctgtcgcccaggctggagtgcagtggccagatctcagctcactgaaacctcagcctcccaagttcaagtgattctcgtacctcagcctcctgagtagctggaattccaggctgtactcactgctttgctcatatcctcgctcattaccagggacaggccagcacccctgcattgcatctcacatatccactgatggatggagaacagactgaaattcagtgccttagagaccacacactccaaccccctcattgtgcagatgggaaaactgagagccatagaagggaagtggcttgcccaaagccacacttactgttttccccacactgtaccacaaactttcaccattcttcaggtttggaaaaatactaataaactgatcaacactaaa

SEQ ID NO: 435127 - DNA, 430 bp, Homo sapiens
  misc_feature (54)..(54): n is a, c, g, or t
ctagaggatccgacagcatagaatgcatagaatggtcaagactgggggcaggcngggtgcagtggccagatctcagctcactgaaacctcagcctcccaagttcaagtgattctcgtacctcagcctcctgagtagctggaattccaggctgtactcactgctttgctcatatcctcgctcattaccagggacaggccagcacccctgcattgcatctcacatatccactgatggatggagaacagactgaaattcagtgccttagagaccacacactccaaccccctcattgtgcagatgggaaaactgagagccatagaagggaagtggcttgcccaaagccacacttactgttttccccacactgtaccacaaactttcaccattcttcaggtttggaaaaatactaataaactgatcaacactaaa

SEQ ID NO: 435128 - DNA, 321 bp, Homo sapiens
acttgataaataatttacagttatctaaatacagtgcctgactcaacataaagacacagaggaagtttaaatggaaagtttaattcaggttacttttgtcaggtatctctcttacataccaaaataaaaatgtataaatacaaaaaaaaaattagccaggcgtggtggctaattgagaggagatggggaaaagtgatgtggggttccccaatgttgtccaaggggatttcttcttagaaatctctccctacatcactcttgtagtgaaataaaaccatctccatgtaatttattaattttgttttttgaaaaatatccact

SEQ ID NO: 435129 - DNA, 256 bp, Homo sapiens
gcagtgtttgaagaagatattctttgccagatcccagttcttcttttggaggaaatgaagcaaaacctcacacgtccgtaactcgttttccataatgctagcagggtcatttggcaaagcgcaccgaagcaagactctctgcaggggtcagcatccggctgcctccgcagactgagctctttacgaggcaggcagggagtcgttttgcttggtggtagcagtgttcagagtgatttttatcgccatgcacggggat

SEQ ID NO: 435130 - DNA, 714 bp, Homo sapiens
cataaatttgattttgccatggtgcttagaaacagtctaataaaaaggaaaaaagtgtacagagagagaaaaataactacactaaaacagaactgtttttacctttttaaaaaatttggtgggaggttaggatcatattctgaattagttcggtaaacctcaaaatactgtctcccaccgcacatggtttcaccacttaagaaatgatgatcgtatctgctcacaaccattttacttgcatctcatttacagatgctaaatctagtctcagaggaggcaaaacatgtatgcattcttaagttataaagtgtactgatttcacaaatatgaagaattttagaaattcaaatttttaatggatgtgtcaccatctacagctgtcatcctgcatggctgatatctgctgcaaatcttgaataaatttccagttcagttgggcagcaaaaactcaattagctctaaaggcagcttgtgtttcaggattccgccactgcccattttccccaatatgtcaaaatatggaataggtgaaatcagccccttatgtatagtacatggacacatctgttgtgactacaccatgttcgaactgctactaaatatcagctattgtatgaatttatggtgttgaatgagcaccagcaatgtgttttaaataatttgtgtatatgtgtagcccagtttgttttatattggtcaataaattctaaagac

SEQ ID NO: 435131 - DNA, 5137 bp, Homo sapiens
  misc_feature (193)..(193): n is a, c, g, or t
actggcgaggagatgaaggggtcgtcttcatcttcgccggatgatttccgcccacatagagggcgccagtgacgcccacacacgtgctggtgtcccgggaagagttcctggcaaagagctcaggaacgttggatcttaatcaaggctttctccgtcggggtggatgggttggactttaggctccagcaagccncgccccactcggcgggtcggtgccgccgggtcccaggtgcccgctacttcccagaacctccgcctcccgctccgggccctcgaaccagcgcggacaccacaatggaccgggcgtccgagctgctcttctacgtgaacggccgcaaggtgatagaaaaaaatgtcgatcctgaaacaatgctgttgccttatttgaggaagaagcttcgactcacaggaactaagtatggctgtggaggaggaggctgtggtgcttgtacagtgatgatatcacgatacaaccccatcaccaagaggataaggcatcacccagccaatgcctgtctgattcccatctgttctctgtatggtgctgccgtcaccacagtagaaggcataggaagcacccacaccagaattcatcctgttcaggagaggattgccaagtgtcatggcacccagtgtggcttctgcacacctgggatggtgatgtccatctacacgctgctcaggaaccacccagagcccactctggatcagttaactgatgcccttggtggtaacctgtgccgttgcactggatacaggcccataattgatgcatgcaagactttctgtaaaacttcgggctgctgtcaaagtaaagaaaatggggtttgctgtttggatcaaggaatcaatggattgccagaatttgaggaaggaagtaagacaagtccaaaactcttcgcagaagaggagtttctgccattggatccaacccaggaactgatatttcctcctgagctaatgataatggctgagaaacagtcgcaaaggaccagggtgtttggcagtgagagaatgatgtggttttcccccgtgaccctgaaggaactgctggaatttaaattcaagtatccccaggctcctgttatcatgggaaacacctctgtggggcctgaagtgaaatttaaaggcgtctttcacccagttataatttctcctgatagaattgaagaactgagtgttgtaaaccatgcatataatggactcacccttggtgctggtctcagcctagcccaggtgaaggacattttggctgatgtagtccagaagcttccagaggagaagacacagatgtaccatgctctcctgaagcatttgggaactctggctgggtcccagatcaggaacatggcttctttagggggacacatcattagcaggcatccagattcagatctgaatcccatcctggctgtgggtaactgtaccctcaacttgctatcaaaagaaggaaaacgacagattcctttaaatgagcaattcctcagcaagtgccctaatgcagatcttaagcctcaagaaatcttggtctcagtgaacatcccctactcaaggaagtgggaatttgtgtcagccttccgacaagcccagcgacaggagaatgcgctagcgatagtcaattcaggaatgagagtcttttttggagaaggggatggcattattagagagttatgcatctcatatggaggcgttggtccagccaccatctgtgccaagaattcctgccagaaactcattggaaggcactggaacgaacagatgctggatatagcctgcaggcttattctgaatgaagtctcccttttgggctcggcgccaggtgggaaagtggagttcaagaggactctcatcatcagcttcctcttcaagttctacctggaagtgtcacagattttgaaaaagatggatccagttcactatcctagccttgcagacaagtatgaaagtgctttagaagatcttcattccaaacatcactgcagtacattaaagtaccagaatataggcccaaagcagcatcctgaagacccaattggccaccccatcatgcatctgtctggtgtgaagcatgccacgggggaggccatctactgtgatgacatgcctctggtggaccaggaacttttcttgacttttgtgactagttcaagagctcatgctaagattgtgtctattgatctgtcagaagctctcagcatgcccggtgtggtggacatcatgacagcagaacatcttagtgacgtcaactccttctgcttttttactgaagctgagaaatttctggcgacagataaggtgttctgtgtgggtcagcttgtctgtgctgtgcttgccgattctgaggttcaggcaaagcgagctgctaagcgagtgaagattgtctatcaagacttggagccgctgatactaacaattgaggaaagtatacaacacaactcctccttcaagccagaaaggaaactggaatatggaaatgttgacgaagcatttaaagtggttgatcaaattcttgaaggtgaaatacatatgggaggtcaagaacatttttatatggaaacccaaagcatgcttgtcgttcccaagggagaggatcaagaaatggatgtctacgtgtccacacagtttcccaaatatatacaggacattgttgcctcaaccttgaagctcccagctaacaaggtcatgtgccatgtaaggcgtgttggtggagcgtttggagggaaggtgttaaaaaccggaatcattgcagccgtcactgcatttgccgcaaacaaacatggccgtgcagttcgctgtgttctggaacgaggagaagacatgttaataactggaggccgccatccttaccttggaaagtacaaagctggattcatgaacgatggcagaatcttggccctggacatggagcattacagcaatgcaggcgcctccttggatgaatcattattcgtgatagaaatgggacttctgaaaatggacaatgcttacaagtttcccaatctccgctgccggggttgggcatgcagaaccaaccttccatccaacacagcttttcgtgggtttggctttcctcaggcagcgctgatcaccgaatcttgtatcacggaagttgcagccaaatgtggactatcccctgagaaggtgcgaatcataaacatgtacaaggaaattgatcaaacaccctacaaacaagagatcaatgccaagaacctaatccagtgttggagagaatgtatggccatgtcttcctactccttgaggaaagttgctgtggaaaagttcaatgcagagaattattggaagaagaaaggactggccatggtccccctgaagtttcctgttggccttggctcacgtgctgctggtcaggctgctgccttggttcacatttatcttgatggctctgtgctggtcactcacggtggaattgaaatggggcagggggtccacactaaaatgattcaggtggtcagccgtgaattaagaatgccaatgtcgaatgtccacctgcgtggaacaagcacagaaactgtccctaatgcaaatatctctggaggttctgtggtggcagatctcaacggtttggcagtaaaggatgcctgtcaaactcttctaaaacgcctcgaacccatcatcagcaagaatcctaaaggaacttggaaagactggctcggcacagactgcttttgatgaaagcattaacctttcagctgttggatacttcagaggttatgagtcagacatgaactgggagaaaggcgaaggccagcccttcgaatactttgtttatggagctgcctgttccgaggttgaaatagactgcctgacgggggatcataagaacatcagaacagacattgtcatggatgttggctgcagtataaatccagccattgacataggccagattgaaggtgcatttattcaaggcatgggactttatacaatagaggaactgaattattctccccagggcattctgcacactcgtggtccagaccaatataaaatccctgccatctgtgacatgcccacggagttgcacattgctttgttgcctccttctcaaaactcaaatactctttattcatctaagggtctgggagagtcgggggtgttcctggggtgttccgtgtttttcgctatccatgacgcagtgagtgcagcacgacaggagagaggcctgcatggacccttgacccttaatagtccactgaccccggagaagattaggatggcctgtgaagacaagttcacaaaaatgattccgagagatgaacctggatcctacgttccttggaatgtacccatctgaatcaaatgcaaacttctggagaaaacagagtgcctcttcccagatggcaatctgtcctatctctgtgctggaagatgctagatctgaaagacagagtttccacagttcagaaatcatcccacagtgttgcttttctatggagctgatttaaagtattccatttagatttgatagatatgcttaagcaatctataaatcattttcaatgttataaacactaattggtttcctctagggtgatattcgtcattactctgtctcttcaatccatccagctaaatggaataggtgatgacttgcatgtgactcctacttggcttctatccaccaacagaaattataccatatagtgaaaggcaattttctaaataatttcattactaatatgaactgtgaagttgtcattttttcatttgtccttttctgctatcaccttcctcttgtcagaatgaatatagacactgtatctaagtgggaccaaagaaaaaatagcgaactttcaccaaagttttcatgaaaacccaaaagctttaaaagttactatcaagaaattgaaaggaaacccacagaataggataaaatatttgtaaatcatatatttgataaaagtcttgtaaccagatacataaagagctcttacaactcaataaaaggcaagtaatttaaaaataggcaaaagaattgctggatggtatggtagttctatttttagtttttaccctaactactctgacttgatcatttaacattctgtgtatgtaacaaaatatcacatgcataaatattatgtatcaataaaattttttaatgggcaaaaaaaat

SEQ ID NO: 435132 - DNA, 1289 bp, Homo sapiens
cggtacgagctcgtgccgaattcggcacgagtataaatccagccattgacataggccagattgaaggtgcatttattcaaggcatgggactttatacaatagaggaactgaattattctccccagggcattctgcacactcgtggtccagaccaatataaaatccctgccatctgtgacatgcccacggagttgcacattgctttgttgcctccttctcaaaactcaaatactctttattcatctaagggtctgggagagtcgggggtgttcctggggtgttccgtgtttttcgctatccatgacgcagtgagtgcagcacgacaggagagaggcctgcatggacccttgacccttaatagtccactgaccccggagaagattaggatggcctgtgaagacaagttcacaaaaatgattccgagagatgaacctggatcctacgttccttggaatgtacccatctgaatcaaatgcaaacttctggagaaaacagagtgcctcttcccagatggcaatctgtcctatctctgtgctggaagatgctagatctgaaagacagagtttccacagttcagaaatcatcccacagtgttgcttttctatggagctgatttaaagtattccatttagatttgatagatatgcttaagcaatctataaatcattttcaatgttataaacactaattggtttcctctagggtgatattcgtcattactctgtctcttcaatccatccagctaaatggaataggtgatgacttgcatgtgactcctacttggcttctatccaccaacagaaattataccatatagtgaaaggcaattttctaaataatttcattactaatatgaactgtgaagttgtcattttttcatttgtccttttctgctatcaccttcctcttgtcagaatgaatatagacactgtatctaagtgggaccaaagaaaaaatagcgaactttcaccaaagttttcatgaaaacccaaaagctttaaaagttactatcaagaaattgaaaggaaacccacagaataggataaaatatttgtaaatcatatatttgataaaagtcttgtaaccagatacataaagagctcttacaactcaataaaaggcaagtaatttaaaaataggcaaaagaattgctggatggtatggtagttctatttttagtttttaccctaactactctgacttgatcatttaacattctgtgtatgtaacaaaatatcacatgcataaatattatgtatcaataaaattttttaatgggcaaaaaaaat

SEQ ID NO: 435133 - DNA, 403 bp, Homo sapiens
ccatatggttgcaatgcccaattgttaaatttcacaaaagccaccaaagtcaaagtaattaagctagctttactccagaggagaccagagctcctctgctcacatgcccatggttggtcaaaaacattcttgctggaaattgggagactgaggtttactcctggccctggcaacaggagttggcaaatggcagctgagtccatttgctctgggctcagactgctcatgtggaaagcaggagggtgggactgatgacctccaagactcctcttccagtgtccgcaattcggtgtcgctggaccatgaaatagaaatgaggagctgcaaggttttgggtgctccactccttctgggtgggttggaataaattaaattcagaaaaataaatcactttttaaataga

SEQ ID NO: 435134 - DNA, 5083 bp, Homo sapiens
  misc_feature (193)..(193): n is a, c, g, or t
actggcgaggagatgaaggggtcgtcttcatcttcgccggatgatttccgcccacatagagggcgccagtgacgcccacacacgtgctggtgtcccgggaagagttcctggcaaagagctcaggaacgttggatcttaatcaaggctttctccgtcggggtggatgggttggactttaggctccagcaagccncgccccactcggcgggtcggtgccgccgggtcccaggtgcccgctacttcccagaacctccgcctcccgctccgggccctcgaaccagcgcggacaccacaatggaccgggcgtccgagctgctcttctacgtgaacggccgcaaggtgatagaaaaaaatgtcgatcctgaaacaatgctgttgccttatttgaggaagaagcttcgactcacaggaactaagtatggctgtggaggaggaggctgtggtgcttgtacagtgatgatatcacgatacaaccccatcaccaagaggataaggcatcacccagccaatgcctgtctgattcccatctgttctctgtatggtgctgccgtcaccacagtagaaggcataggaagcacccacaccagaattcatcctgttcaggagaggattgccaagtgtcatggcacccagtgtggcttctgcacacctgggatggtgatgtccatctacacgctgctcaggaaccacccagagcccactctggatcagttaactgatgcccttggtggtaacctgtgccgttgcactggatacaggcccataattgatgcatgcaagactttctgtaaaacttcgggctgctgtcaaagtaaagaaaatggggtttgctgtttggatcaaggaatcaatggattgccagaatttgaggaaggaagtaagacaagtccaaaactcttcgcagaagaggagtttctgccattggatccaacccaggaactgatatttcctcctgagctaatgataatggctgagaaacagtcgcaaaggaccagggtgtttggcagtgagagaatgatgtggttttcccccgtgaccctgaaggaactgctggaatttaaattcaagtatccccaggctcctgttatcatgggaaacacctctgtggggcctgaagtgaaatttaaaggcgtctttcacccagttataatttctcctgatagaattgaagaactgagtgttgtaaaccatgcatataatggactcacccttggtgctggtctcagcctagcccaggtgaaggacattttggctgatgtagtccagaagcttccagaggagaagacacagatgtaccatgctctcctgaagcatttgggaactctggctgggtcccagatcaggaacatggcttctttagggggacacatcattagcaggcatccagattcagatctgaatcccatcctggctgtgggtaactgtaccctcaacttgctatcaaaagaaggaaaacgacagattcctttaaatgagcaattcctcagcaagtgccctaatgcagatcttaagcctcaagaaatcttggtctcagtgaacatcccctactcaaggaagtgggaatttgtgtcagccttccgacaagcccagcgacaggagaatgcgctagcgatagtcaattcaggaatgagagtcttttttggagaaggggatggcattattagagagttatgcatctcatatggaggcgttggtccagccaccatctgtgccaagaattcctgccagaaactcattggaaggcactggaacgaacagatgctggatatagcctgcaggcttattctgaatgaagtctcccttttgggctcggcgccaggtgggaaagtggagttcaagaggactctcatcatcagcttcctcttcaagttctacctggaagtgtcacagattttgaaaaagatggatccagttcactatcctagccttgcagacaagtatgaaagtgctttagaagatcttcattccaaacatcactgcagtacattaaagtaccagaatataggcccaaagcagcatcctgaagacccaattggccaccccatcatgcatctgtctggtgtgaagcatgccacgggggaggccatctactgtgatgacatgcctctggtggaccaggaacttttcttgacttttgtgactagttcaagagctcatgctaagattgtgtctattgatctgtcagaagctctcagcatgcccggtgtggtggacatcatgacagcagaacatcttagtgacgtcaactccttctgcttttttactgaagctgagaaatttctggcgacagataaggtgttctgtgtgggtcagcttgtctgtgctgtgcttgccgattctgaggttcaggcaaagcgagctgctaagcgagtgaagattgtctatcaagacttggagccgctgatactaacaattgaggaaagtatacaacacaactcctccttcaagccagaaaggaaactggaatatggaaatgttgacgaagcatttaaagtggttgatcaaattcttgaaggtgaaatacatatgggaggtcaagaacatttttatatggaaacccaaagcatgcttgtcgttcccaagggagaggatcaagaaatggatgtctacgtgtccacacagtttcccaaatatatacaggacattgttgcctcaaccttgaagctcccagctaacaaggtcatgtgccatgtaaggcgtgttggtggagcgtttggagggaaggtgttaaaaaccggaatcattgcagccgtcactgcatttgccgcaaacaaacatggccgtgcagttcgctgtgttctggaacgaggagaagacatgttaataactggaggccgccatccttaccttggaaagtacaaagctggattcatgaacgatggcagaatcttggccctggacatggagcattacagcaatgcaggcgcctccttggatgaatcattattcgtgatagaaatgggacttctgaaaatggacaatgcttacaagtttcccaatctccgctgccggggttgggcatgcagaaccaaccttccatccaacacagcttttcgtgggtttggctttcctcaggcagcgctgatcaccgaatcttgtatcacggaagttgcagccaaatgtggactatcccctgagaaggtgcgaatcataaacatgtacaaggaaattgatcaaacaccctacaaacaagagatcaatgccaagaacctaatccagtgttggagagaatgtatggccatgtcttcctactccttgaggaaagttgctgtggaaaagttcaatgcagagaattattggaagaagaaaggactggccatggtccccctgaagtttcctgttggccttggctcacgtgctgctggtcaggctgctgccttggttcacatttatcttgatggctctgtgctggtcactcacggtggaattgaaatggggcagggggtccacactaaaatgattcaggtggtcagccgtgaattaagaatgccaatgtcgaatgtccacctgcgtggaacaagcacagaaactgtccctaatgcaaatatctctggaggttctgtggtggcagatctcaacggtttggcagtaaaggatgcctgtcaaactcttctaaaacgcctcgaacccatcatcagcaagaatcctaaaggaacttggaaagactggctcggcacagactgcttttgatgaaagcattaacctttcagctgttggatacttcagaggttatgagtcagacatgaactgggagaaaggcgaaggccagcccttcgaatactttgtttatggagctgcctgttccgaggttgaaatagactgcctgacgggggatcataagaacatcagaacagacattgtcatggatgttggctgcagtataaatccagccattgacataggccagattgaaggtgcatttattcaaggcatgggactttatacaatagaggaactgaattattctccccagggcattctgcacactcgtggtccagaccaatataaaatccctgccatctgtgacatgcccacggagttgcacattgctttgttgcctccttctcaaaactcaaatactctttattcatctaagggtctgggagagtcgggggtgttcctggggtgttccgtgtttttcgctatccatgacgcagtgagtgcagcacgacaggagagaggcctgcatggacccttgacccttaatagtccactgaccccggagaagattaggatggcctgtgaagacaagttcacaaaaatgattccgagagatgaacctggatcctacgttccttggaatgtacccatctgaatcaaatgcaaacttctggagaaaacagagtgcctcttcccagatggcaatctgtcctatctctgtgctggaagatgctagatctgaaagacagagtttccacagttcagaatttgatagatatgcttaagcaatctataaatcattttcaatgttataaacactaattggtttcctctagggtgatattcgtcattactctgtctcttcaatccatccagctaaatggaataggtgatgacttgcatgtgactcctacttggcttctatccaccaacagaaattataccatatagtgaaaggcaattttctaaataatttcattactaatatgaactgtgaagttgtcattttttcatttgtccttttctgctatcaccttcctcttgtcagaatgaatatagacactgtatctaagtgggaccaaagaaaaaatagcgaactttcaccaaagttttcatgaaaacccaaaagctttaaaagttactatcaagaaattgaaaggaaacccacagaataggataaaatatttgtaaatcatatatttgataaaagtcttgtaaccagatacataaagagctcttacaactcaataaaaggcaagtaatttaaaaataggcaaaagaattgctggatggtatggtagttctatttttagtttttaccctaactactctgacttgatcatttaacattctgtgtatgtaacaaaatatcacatgcataaatattatgtatcaataaaattttttaatgggcaaaaaaaat

SEQ ID NO: 435135 - DNA, 5062 bp, Homo sapiens
  misc_feature (193)..(193): n is a, c, g, or t
actggcgaggagatgaaggggtcgtcttcatcttcgccggatgatttccgcccacatagagggcgccagtgacgcccacacacgtgctggtgtcccgggaagagttcctggcaaagagctcaggaacgttggatcttaatcaaggctttctccgtcggggtggatgggttggactttaggctccagcaagccncgccccactcggcgggtcggtgccgccgggtcccaggtgcccgctacttcccagaacctccgcctcccgctccgggccctcgaaccagcgcggacaccacaatggaccgggcgtccgagctgctcttctacgtgaacggccgcaaggtgatagaaaaaaatgtcgatcctgaaacaatgctgttgccttatttgaggaagaagcttcgactcacaggaactaagtatggctgtggaggaggaggctgtggtgcttgtacagtgatgatatcacgatacaaccccatcaccaagaggataaggcatcacccagccaatgcctgtctgattcccatctgttctctgtatggtgctgccgtcaccacagtagaaggcataggaagcacccacaccagaattcatcctgttcaggagaggattgccaagtgtcatggcacccagtgtggcttctgcacacctgggatggtgatgtccatctacacgctgctcaggaaccacccagagcccactctggatcagttaactgatgcccttggtggtaacctgtgccgttgcactggatacaggcccataattgatgcatgcaagactttctgtaaaacttcgggctgctgtcaaagtaaagaaaatggggtttgctgtttggatcaaggaatcaatggattgccagaatttgaggaaggaagtaagacaagtccaaaactcttcgcagaagaggagtttctgccattggatccaacccaggaactgatatttcctcctgagctaatgataatggctgagaaacagtcgcaaaggaccagggtgtttggcagtgagagaatgatgtggttttcccccgtgaccctgaaggaactgctggaatttaaattcaagtatccccaggctcctgttatcatgggaaacacctctgtggggcctgaagtgaaatttaaaggcgtctttcacccagttataatttctcctgatagaattgaagaactgagtgttgtaaaccatgcatataatggactcacccttggtgctggtctcagcctagcccaggtgaaggacattttggctgatgtagtccagaagcttccagaggagaagacacagatgtaccatgctctcctgaagcatttgggaactctggctgggtcccagatcaggaacatggcttctttagggggacacatcattagcaggcatccagattcagatctgaatcccatcctggctgtgggtaactgtaccctcaacttgctatcaaaagaaggaaaacgacagattcctttaaatgagcaattcctcagcaagtgccctaatgcagatcttaagcctcaagaaatcttggtctcagtgaacatcccctactcaaggaagtgggaatttgtgtcagccttccgacaagcccagcgacaggagaatgcgctagcgatagtcaattcaggaatgagagtcttttttggagaaggggatggcattattagagagttatgcatctcatatggaggcgttggtccagccaccatctgtgccaagaattcctgccagaaactcattggaaggcactggaacgaacagatgctggatatagcctgcaggcttattctgaatgaagtctcccttttgggctcggcgccaggtgggaaagtggagttcaagaggactctcatcatcagcttcctcttcaagttctacctggaagtgtcacagattttgaaaaagatggatccagttcactatcctagccttgcagacaagtatgaaagtgctttagaagatcttcattccaaacatcactgcagtacattaaagtaccagaatataggcccaaagcagcatcctgaagacccaattggccaccccatcatgcatctgtctggtgtgaagcatgccacgggggaggccatctactgtgatgacatgcctctggtggaccaggaacttttcttgacttttgtgactagttcaagagctcatgctaagattgtgtctattgatctgtcagaagctctcagcatgcccggtgtggtggacatcatgacagcagaacatcttagtgacgtcaactccttctgcttttttactgaagctgagaaatttctggcgacagataaggtgttctgtgtgggtcagcttgtctgtgctgtgcttgccgattctgaggttcaggcaaagcgagctgctaagcgagtgaagattgtctatcaagacttggagccgctgatactaacaattgaggaaagtatacaacacaactcctccttcaagccagaaaggaaactggaatatggaaatgttgacgaagcatttaaagtggttgatcaaattcttgaaggtgaaatacatatgggaggtcaagaacatttttatatggaaacccaaagcatgcttgtcgttcccaagggagaggatcaagaaatggatgtctacgtgtccacacagtttcccaaatatatacaggacattgttgcctcaaccttgaagctcccagctaacaaggtcatgtgccatgtaaggcgtgttggtggagcgtttggagggaaggtgttaaaaaccggaatcattgcagccgtcactgcatttgccgcaaacaaacatggccgtgcagttcgctgtgttctggaacgaggagaagacatgttaataactggaggccgccatccttaccttggaaagtacaaagctggattcatgaacgatggcagaatcttggccctggacatggagcattacagcaatgcaggcgcctccttggatgaatcattattcgtgatagaaatgggacttctgaaaatggacaatgcttacaagtttcccaatctccgctgccggggttgggcatgcagaaccaaccttccatccaacacagcttttcgtgggtttggctttcctcaggcagcgctgatcaccgaatcttgtatcacggaagttgcagccaaatgtggactatcccctgagaaggtgcgaatcataaacatgtacaaggaaattgatcaaacaccctacaaacaagagatcaatgccaagaacctaatccagtgttggagagaatgtatggccatgtcttcctactccttgaggaaagttgctgtggaaaagttcaatgcagagaattattggaagaagaaaggactggccatggtccccctgaagtttcctgttggccttggctcacgtgctgctggtcaggctgctgccttggttcacatttatcttgatggctctgtgctggtcactcacggtggaattgaaatggggcagggggtccacactaaaatgattcaggtggtcagccgtgaattaagaatgccaatgtcgaatgtccacctgcgtggaacaagcacagaaactgtccctaatgcaaatatctctggaggttctgtggtggcagatctcaacggtttggcagtaaagctcggcacagactgcttttgatgaaagcattaacctttcagctgttggatacttcagaggttatgagtcagacatgaactgggagaaaggcgaaggccagcccttcgaatactttgtttatggagctgcctgttccgaggttgaaatagactgcctgacgggggatcataagaacatcagaacagacattgtcatggatgttggctgcagtataaatccagccattgacataggccagattgaaggtgcatttattcaaggcatgggactttatacaatagaggaactgaattattctccccagggcattctgcacactcgtggtccagaccaatataaaatccctgccatctgtgacatgcccacggagttgcacattgctttgttgcctccttctcaaaactcaaatactctttattcatctaagggtctgggagagtcgggggtgttcctggggtgttccgtgtttttcgctatccatgacgcagtgagtgcagcacgacaggagagaggcctgcatggacccttgacccttaatagtccactgaccccggagaagattaggatggcctgtgaagacaagttcacaaaaatgattccgagagatgaacctggatcctacgttccttggaatgtacccatctgaatcaaatgcaaacttctggagaaaacagagtgcctcttcccagatggcaatctgtcctatctctgtgctggaagatgctagatctgaaagacagagtttccacagttcagaaatcatcccacagtgttgcttttctatggagctgatttaaagtattccatttagatttgatagatatgcttaagcaatctataaatcattttcaatgttataaacactaattggtttcctctagggtgatattcgtcattactctgtctcttcaatccatccagctaaatggaataggtgatgacttgcatgtgactcctacttggcttctatccaccaacagaaattataccatatagtgaaaggcaattttctaaataatttcattactaatatgaactgtgaagttgtcattttttcatttgtccttttctgctatcaccttcctcttgtcagaatgaatatagacactgtatctaagtgggaccaaagaaaaaatagcgaactttcaccaaagttttcatgaaaacccaaaagctttaaaagttactatcaagaaattgaaaggaaacccacagaataggataaaatatttgtaaatcatatatttgataaaagtcttgtaaccagatacataaagagctcttacaactcaataaaaggcaagtaatttaaaaataggcaaaagaattgctggatggtatggtagttctatttttagtttttaccctaactactctgacttgatcatttaacattctgtgtatgtaacaaaatatcacatgcataaatattatgtatcaataaaattttttaatgggcaaaaaaaat

SEQ ID NO: 435136 - DNA, 4956 bp, Homo sapiens
  misc_feature (193)..(193): n is a, c, g, or t
actggcgaggagatgaaggggtcgtcttcatcttcgccggatgatttccgcccacatagagggcgccagtgacgcccacacacgtgctggtgtcccgggaagagttcctggcaaagagctcaggaacgttggatcttaatcaaggctttctccgtcggggtggatgggttggactttaggctccagcaagccncgccccactcggcgggtcggtgccgccgggtcccaggtgcccgctacttcccagaacctccgcctcccgctccgggccctcgaaccagcgcggacaccacaatggaccgggcgtccgagctgctcttctacgtgaacggccgcaaggtgatagaaaaaaatgtcgatcctgaaacaatgctgttgccttatttgaggaagaagcttcgactcacaggaactaagtatggctgtggaggaggaggctgtggtgcttgtacagtgatgatatcacgatacaaccccatcaccaagaggataaggcatcacccagccaatgcctgtctgattcccatctgttctctgtatggtgctgccgtcaccacagtagaaggcataggaagcacccacaccagaattcatcctgttcaggagaggattgccaagtgtcatggcacccagtgtggcttctgcacacctgggatggtgatgtccatctacacgctgctcaggaaccacccagagcccactctggatcagttaactgatgcccttggtggtaacctgtgccgttgcactggatacaggcccataattgatgcatgcaagactttctgtaaaacttcgggctgctgtcaaagtaaagaaaatggggtttgctgtttggatcaaggaatcaatggattgccagaatttgaggaaggaagtaagacaagtccaaaactcttcgcagaagaggagtttctgccattggatccaacccaggaactgatatttcctcctgagctaatgataatggctgagaaacagtcgcaaaggaccagggtgtttggcagtgagagaatgatgtggttttcccccgtgaccctgaaggaactgctggaatttaaattcaagtatccccaggctcctgttatcatgggaaacacctctgtggggcctgaagtgaaatttaaaggcgtctttcacccagttataatttctcctgatagaattgaagaactgagtgttgtaaaccatgcatataatggactcacccttggtgctggtctcagcctagcccaggtgaaggacattttggctgatgtagtccagaagcttccagaggagaagacacagatgtaccatgctctcctgaagcatttgggaactctggctgggtcccagatcaggaacatggcttctttagggggacacatcattagcaggcatccagattcagatctgaatcccatcctggctgtgggtaactgtaccctcaacttgctatcaaaagaaggaaaacgacagattcctttaaatgagcaattcctcagcaagtgccctaatgcagatcttaagcctcaagaaatcttggtctcagtgaacatcccctactcaaggaagtgggaatttgtgtcagccttccgacaagcccagcgacaggagaatgcgctagcgatagtcaattcaggaatgagagtcttttttggagaaggggatggcattattagagagttatgcatctcatatggaggcgttggtccagccaccatctgtgccaagaattcctgccagaaactcattggaaggcactggaacgaacagatgctggatatagcctgcaggcttattctgaatgaagtctcccttttgggctcggcgccaggtgggaaagtggagttcaagaggactctcatcatcagcttcctcttcaagttctacctggaagtgtcacagattttgaaaaagatggatccagttcactatcctagccttgcagacaagtatgaaagtgctttagaagatcttcattccaaacatcactgcagtacattaaagtaccagaatataggcccaaagcagcatcctgaagacccaattggccaccccatcatgcatctgtctggtgtgaagcatgccacgggggaggccatctactgtgatgacatgcctctggtggaccaggaacttttcttgacttttgtgactagttcaagagctcatgctaagattgtgtctattgatctgtcagaagctctcagcatgcccggtgtggtggacatcatgacagcagaacatcttagtgacgtcaactccttctgcttttttactgaagctgagaaatttctggcgacagataaggtgttctgtgtgggtcagcttgtctgtgctgtgcttgccgattctgaggttcaggcaaagcgagctgctaagcgagtgaagattgtctatcaagacttggagccgctgatactaacaattgaggaaagtatacaacacaactcctccttcaagccagaaaggaaactggaatatggaaatgttgacgaagcatttaaagtggttgatcaaattcttgaaggtgaaatacatatgggaggtcaagaacatttttatatggaaacccaaagcatgcttgtcgttcccaagggagaggatcaagaaatggatgtctacgtgtccacacagtttcccaaatatatacaggacattgttgcctcaaccttgaagctcccagctaacaaggtcatgtgccatgtaaggcgtgttggtggagcgtttggagggaaggtgttaaaaaccggaatcattgcagccgtcactgcatttgccgcaaacaaacatggccgtgcagttcgctgtgttctggaacgaggagaagacatgttaataactggaggccgccatccttaccttggaaagtacaaagctggattcatgaacgatggcagaatcttggccctggacatggagcattacagcaatgcaggcgcctccttggatgaatcattattcgtgatagaaatgggacttctgaaaatggacaatgcttacaagtttcccaatctccgctgccggggttgggcatgcagaaccaaccttccatccaacacagcttttcgtgggtttggctttcctcaggcagcgctgatcaccgaatcttgtatcacggaagttgcagccaaatgtggactatcccctgagaaggtgcgaatcataaacatgtacaaggaaattgatcaaacaccctacaaacaagagatcaatgccaagaacctaatccagtgttggagagaatgtatggccatgtcttcctactccttgaggaaagttgctgtggaaaagttcaagtggtcagccgtgaattaagaatgccaatgtcgaatgtccacctgcgtggaacaagcacagaaactgtccctaatgcaaatatctctggaggttctgtggtggcagatctcaacggtttggcagtaaaggatgcctgtcaaactcttctaaaacgcctcgaacccatcatcagcaagaatcctaaaggaacttggaaagactggctcggcacagactgcttttgatgaaagcattaacctttcagctgttggatacttcagaggttatgagtcagacatgaactgggagaaaggcgaaggccagcccttcgaatactttgtttatggagctgcctgttccgaggttgaaatagactgcctgacgggggatcataagaacatcagaacagacattgtcatggatgttggctgcagtataaatccagccattgacataggccagattgaaggtgcatttattcaaggcatgggactttatacaatagaggaactgaattattctccccagggcattctgcacactcgtggtccagaccaatataaaatccctgccatctgtgacatgcccacggagttgcacattgctttgttgcctccttctcaaaactcaaatactctttattcatctaagggtctgggagagtcgggggtgttcctggggtgttccgtgtttttcgctatccatgacgcagtgagtgcagcacgacaggagagaggcctgcatggacccttgacccttaatagtccactgaccccggagaagattaggatggcctgtgaagacaagttcacaaaaatgattccgagagatgaacctggatcctacgttccttggaatgtacccatctgaatcaaatgcaaacttctggagaaaacagagtgcctcttcccagatggcaatctgtcctatctctgtgctggaagatgctagatctgaaagacagagtttccacagttcagaaatcatcccacagtgttgcttttctatggagctgatttaaagtattccatttagatttgatagatatgcttaagcaatctataaatcattttcaatgttataaacactaattggtttcctctagggtgatattcgtcattactctgtctcttcaatccatccagctaaatggaataggtgatgacttgcatgtgactcctacttggcttctatccaccaacagaaattataccatatagtgaaaggcaattttctaaataatttcattactaatatgaactgtgaagttgtcattttttcatttgtccttttctgctatcaccttcctcttgtcagaatgaatatagacactgtatctaagtgggaccaaagaaaaaatagcgaactttcaccaaagttttcatgaaaacccaaaagctttaaaagttactatcaagaaattgaaaggaaacccacagaataggataaaatatttgtaaatcatatatttgataaaagtcttgtaaccagatacataaagagctcttacaactcaataaaaggcaagtaatttaaaaataggcaaaagaattgctggatggtatggtagttctatttttagtttttaccctaactactctgacttgatcatttaacattctgtgtatgtaacaaaatatcacatgcataaatattatgtatcaataaaattttttaatgggcaaaaaaaat

SEQ ID NO: 435137 - DNA, 5095 bp, Homo sapiens
  misc_feature (193)..(193): n is a, c, g, or t
actggcgaggagatgaaggggtcgtcttcatcttcgccggatgatttccgcccacatagagggcgccagtgacgcccacacacgtgctggtgtcccgggaagagttcctggcaaagagctcaggaacgttggatcttaatcaaggctttctccgtcggggtggatgggttggactttaggctccagcaagccncgccccactcggcgggtcggtgccgccgggtcccaggtgcccgctacttcccagaacctccgcctcccgctccgggccctcgaaccagcgcggacaccacaatggaccgggcgtccgagctgctcttctacgtgaacggccgcaaggtgatagaaaaaaatgtcgatcctgaaacaatgctgttgccttatttgaggaagaagcttcgactcacaggaactaagtatggctgtggaggaggaggctgtggtgcttgtacagtgatgatatcacgatacaaccccatcaccaagaggataaggcatcacccagccaatgcctgtctgattcccatctgttctctgtatggtgctgccgtcaccacagtagaaggcataggaagcacccacaccagaattcatcctgttcaggagaggattgccaagtgtcatggcacccagtgtggcttctgcacacctgggatggtgatgtccatctacacgctgctcaggaaccacccagagcccactctggatcagttaactgatgcccttggtggtaacctgtgccgttgcactggatacaggcccataattgatgcatgcaagactttctgtaaaacttcgggctgctgtcaaagtaaagaaaatggggtttgctgtttggatcaaggaatcaatggattgccagaatttgaggaaggaagtaagacaagtccaaaactcttcgcagaagaggagtttctgccattggatccaacccaggaactgatatttcctcctgagctaatgataatggctgagaaacagtcgcaaaggaccagggtgtttggcagtgagagaatgatgtggttttcccccgtgaccctgaaggaactgctggaatttaaattcaagtatccccaggctcctgttatcatgggaaacacctctgtggggcctgaagtgaaatttaaaggcgtctttcacccagttataatttctcctgatagaattgaagaactgagtgttgtaaaccatgcatataatggactcacccttggtgctggtctcagcctagcccaggtgaaggacattttggctgatgtagtccagaagcttccagaggagaagacacagatgtaccatgctctcctgaagcatttgggaactctggctgggtcccagatcaggaacatggcttctttagggggacacatcattagcaggcatccagattcagatctgaatcccatcctggctgtgggtaactgtaccctcaacttgctatcaaaagaaggaaaacgacagattcctttaaatgagcaattcctcagcaagtgccctaatgcagatcttaagcctcaagaaatcttggtctcagtgaacatcccctactcaaggaagtgggaatttgtgtcagccttccgacaagcccagcgacaggagaatgcgctagcgatagtcaattcaggaatgagagtcttttttggagaaggggatggcattattagagagttatgcatctcatatggaggcgttggtccagccaccatctgtgccaagaattcctgccagaaactcattggaaggcactggaacgaacagatgctggatatagcctgcaggcttattctgaatgaagtctcccttttgggctcggcgccaggtgggaaagtggagttcaagaggactctcatcatcagcttcctcttcaagttctacctggaagtgtcacagattttgaaaaagatggatccagttcactatcctagccttgcagacaagtatgaaagtgctttagaagatcttcattccaaacatcactgcagtacattaaagtaccagaatataggcccaaagcagcatcctgaagacccaattggccaccccatcatgcatctgtctggtgtgaagcatgccacgggggaggccatctactgtgatgacatgcctctggtggaccaggaacttttcttgacttttgtgactagttcaagagctcatgctaagattgtgtctattgatctgtcagaagctctcagcatgcccggtgtggtggacatcatgacagcagaacatcttagtgacgtcaactccttctgcttttttactgaagctgagaaatttctggcgacagataaggtgttctgtgtgggtcagcttgtctgtgctgtgcttgccgattctgaggttcaggcaaagcgagctgctaagcgagtgaagattgtctatcaagacttggagccgctgatactaacaattgaggaaagtatacaacacaactcctccttcaagccagaaaggaaactggaatatggaaatgttgacgaagcatttaaagtggttgatcaaattcttgaaggtgaaatacatatgggaggtcaagaacatttttatatggaaacccaaagcatgcttgtcgttcccaagggagaggatcaagaaatggatgtctacgtgtccacacagtttcccaaatatatacaggacattgttgcctcaaccttgaagctcccagctaacaaggtcatgtgccatgtaaggcgtgttggtggagcgtttggagggaaggtgttaaaaaccggaatcattgcagccgtcactgcatttgccgcaaacaaacatggccgtgcagttcgctgtgttctggaacgaggagaagacatgttaataactggaggccgccatccttaccttggaaagtacaaagctggattcatgaacgatggcagaatcttggccctggacatggagcattacagcaatgcaggcgcctccttggatgaatcattattcgtgatagaaatgggacttctgaaaatggacaatgcttacaagtttcccaatctccgctgccggggttgggcatgcagaaccaaccttccatccaacacagcttttcgtgggtttggctttcctcaggcagcgctgatcaccgaatcttgtatcacggaagttgcagccaaatgtggactatcccctgagaaggtgcgaatcataaacatgtacaaggaaattgatcaaacaccctacaaacaagagatcaatgccaagaacctaatccagtgttggagagaatgtatggccatgtcttcctactccttgaggaaagttgctgtggaaaagttcaatgcagagaattattggaagaagaaaggactggccatggtccccctgaagtttcctgttggccttggctcacgtgctgctggtcaggctgctgccttggttcacatttatcttgatggctctgtgctggtcactcacggtggaattgaaatggggcagggggtccacactaaaatgattcagctgcgtggaacaagcacagaaactgtccctaatgcaaatatctctggaggttctgtggtggcagatctcaacggtttggcagtaaaggatgcctgtcaaactcttctaaaacgcctcgaacccatcatcagcaagaatcctaaaggaacttggaaagactggctcggcacagactgcttttgatgaaagcattaacctttcagctgttggatacttcagaggttatgagtcagacatgaactgggagaaaggcgaaggccagcccttcgaatactttgtttatggagctgcctgttccgaggttgaaatagactgcctgacgggggatcataagaacatcagaacagacattgtcatggatgttggctgcagtataaatccagccattgacataggccagattgaaggtgcatttattcaaggcatgggactttatacaatagaggaactgaattattctccccagggcattctgcacactcgtggtccagaccaatataaaatccctgccatctgtgacatgcccacggagttgcacattgctttgttgcctccttctcaaaactcaaatactctttattcatctaagggtctgggagagtcgggggtgttcctggggtgttccgtgtttttcgctatccatgacgcagtgagtgcagcacgacaggagagaggcctgcatggacccttgacccttaatagtccactgaccccggagaagattaggatggcctgtgaagacaagttcacaaaaatgattccgagagatgaacctggatcctacgttccttggaatgtacccatctgaatcaaatgcaaacttctggagaaaacagagtgcctcttcccagatggcaatctgtcctatctctgtgctggaagatgctagatctgaaagacagagtttccacagttcagaaatcatcccacagtgttgcttttctatggagctgatttaaagtattccatttagatttgatagatatgcttaagcaatctataaatcattttcaatgttataaacactaattggtttcctctagggtgatattcgtcattactctgtctcttcaatccatccagctaaatggaataggtgatgacttgcatgtgactcctacttggcttctatccaccaacagaaattataccatatagtgaaaggcaattttctaaataatttcattactaatatgaactgtgaagttgtcattttttcatttgtccttttctgctatcaccttcctcttgtcagaatgaatatagacactgtatctaagtgggaccaaagaaaaaatagcgaactttcaccaaagttttcatgaaaacccaaaagctttaaaagttactatcaagaaattgaaaggaaacccacagaataggataaaatatttgtaaatcatatatttgataaaagtcttgtaaccagatacataaagagctcttacaactcaataaaaggcaagtaatttaaaaataggcaaaagaattgctggatggtatggtagttctatttttagtttttaccctaactactctgacttgatcatttaacattctgtgtatgtaacaaaatatcacatgcataaatattatgtatcaataaaattttttaatgggcaaaaaaaat

SEQ ID NO: 435138 - DNA, 3341 bp, Homo sapiens
gcacaaaacaaaaatttattgggagaaagatggctgatgggaggcaagatctggattcaggaatcctcaattttagctctcgctctgtcaccaaaaccctccgtccctcccagagctcgtgactctcatcatcagcttcctcttcaagttctacctggaagtgtcacagattttgaaaaagatggatccagttcactatcctagccttgcagacaagtatgaaagtgctttagaagatcttcattccaaacatcactgcagtacattaaagtaccagaatataggcccaaagcagcatcctgaagacccaattggccaccccatcatgcatctgtctggtgtgaagcatgccacgggggaggccatctactgtgatgacatgcctctggtggaccaggaacttttcttgacttttgtgactagttcaagagctcatgctaagattgtgtctattgatctgtcagaagctctcagcatgcccggtgtggtggacatcatgacagcagaacatcttagtgacgtcaactccttctgcttttttactgaagctgagaaatttctggcgacagataaggtgttctgtgtgggtcagcttgtctgtgctgtgcttgccgattctgaggttcaggcaaagcgagctgctaagcgagtgaagattgtctatcaagacttggagccgctgatactaacaattgaggaaagtatacaacacaactcctccttcaagccagaaaggaaactggaatatggaaatgttgacgaagcatttaaagtggttgatcaaattcttgaaggtgaaatacatatgggaggtcaagaacatttttatatggaaacccaaagcatgcttgtcgttcccaagggagaggatcaagaaatggatgtctacgtgtccacacagtttcccaaatatatacaggacattgttgcctcaaccttgaagctcccagctaacaaggtcatgtgccatgtaaggcgtgttggtggagcgtttggagggaaggtgttaaaaaccggaatcattgcagccgtcactgcatttgccgcaaacaaacatggccgtgcagttcgctgtgttctggaacgaggagaagacatgttaataactggaggccgccatccttaccttggaaagtacaaagctggattcatgaacgatggcagaatcttggccctggacatggagcattacagcaatgcaggcgcctccttggatgaatcattattcgtgatagaaatgggacttctgaaaatggacaatgcttacaagtttcccaatctccgctgccggggttgggcatgcagaaccaaccttccatccaacacagcttttcgtgggtttggctttcctcaggcagcgctgatcaccgaatcttgtatcacggaagttgcagccaaatgtggactatcccctgagaaggtgcgaatcataaacatgtacaaggaaattgatcaaacaccctacaaacaagagatcaatgccaagaacctaatccagtgttggagagaatgtatggccatgtcttcctactccttgaggaaagttgctgtggaaaagttcaatgcagagaattattggaagaagaaaggactggccatggtccccctgaagtttcctgttggccttggctcacgtgctgctggtcaggctgctgccttggttcacatttatcttgatggctctgtgctggtcactcacggtggaattgaaatggggcagggggtccacactaaaatgattcaggtggtcagccgtgaattaagaatgccaatgtcgaatgtccacctgcgtggaacaagcacagaaactgtccctaatgcaaatatctctggaggttctgtggtggcagatctcaacggtttggcagtaaagctcggcacagactgcttttgatgaaagcattaacctttcagctgttggatacttcagaggttatgagtcagacatgaactgggagaaaggcgaaggccagcccttcgaatactttgtttatggagctgcctgttccgaggttgaaatagactgcctgacgggggatcataagaacatcagaacagacattgtcatggatgttggctgcagtataaatccagccattgacataggccagattgaaggtgcatttattcaaggcatgggactttatacaatagaggaactgaattattctccccagggcattctgcacactcgtggtccagaccaatataaaatccctgccatctgtgacatgcccacggagttgcacattgctttgttgcctccttctcaaaactcaaatactctttattcatctaagggtctgggagagtcgggggtgttcctggggtgttccgtgtttttcgctatccatgacgcagtgagtgcagcacgacaggagagaggcctgcatggacccttgacccttaatagtccactgaccccggagaagattaggatggcctgtgaagacaagttcacaaaaatgattccgagagatgaacctggatcctacgttccttggaatgtacccatctgaatcaaatgcaaacttctggagaaaacagagtgcctcttcccagatggcaatctgtcctatctctgtgctggaagatgctagatctgaaagacagagtttccacagttcagaaatcatcccacagtgttgcttttctatggagctgatttaaagtattccatttagatttgatagatatgcttaagcaatctataaatcattttcaatgttataaacactaattggtttcctctagggtgatattcgtcattactctgtctcttcaatccatccagctaaatggaataggtgatgacttgcatgtgactcctacttggcttctatccaccaacagaaattataccatatagtgaaaggcaattttctaaataatttcattactaatatgaactgtgaagttgtcattttttcatttgtccttttctgctatcaccttcctcttgtcagaatgaatatagacactgtatctaagtgggaccaaagaaaaaatagcgaactttcaccaaagttttcatgaaaacccaaaagctttaaaagttactatcaagaaattgaaaggaaacccacagaataggataaaatatttgtaaatcatatatttgataaaagtcttgtaaccagatacataaagagctcttacaactcaataaaaggcaagtaatttaaaaataggcaaaagaattgctggatggtatggtagttctatttttagtttttaccctaactactctgacttgatcatttaacattctgtgtatgtaacaaaatatcacatgcataaatattatgtatcaataaaattttttaatgggcaaaaaaaat

SEQ ID NO: 435139 - DNA, 4535 bp, Homo sapiens
  misc_feature (193)..(193): n is a, c, g, or t
actggcgaggagatgaaggggtcgtcttcatcttcgccggatgatttccgcccacatagagggcgccagtgacgcccacacacgtgctggtgtcccgggaagagttcctggcaaagagctcaggaacgttggatcttaatcaaggctttctccgtcggggtggatgggttggactttaggctccagcaagccncgccccactcggcgggtcggtgccgccgggtcccaggtgcccgctacttcccagaacctccgcctcccgctccgggccctcgaaccagcgcggacaccacaatggaccgggcgtccgagctgctcttctacgtgaacggccgcaaggtgatagaaaaaaatgtcgatcctgaaacaatgctgttgccttatttgaggaagaagcttcgactcacaggaactaagtatggctgtggaggaggaggctgtggtgcttgtacagtgatgatatcacgatacaaccccatcaccaagaggataaggcatcacccagccaatgcctgtctgattcccatctgttctctgtatggtgctgccgtcaccacagtagaaggcataggaagcacccacaccagaattcatcctgttcaggagaggattgccaagtgtcatggcacccagtgtggcttctgcacacctgggatggtgatgtccatctacacgctgctcaggaaccacccagagcccactctggatcagttaactgatgcccttggtggtaacctgtgccgttgcactggatacaggcccataattgatgcatgcaagactttctgtaaaacttcgggctgctgtcaaagtaaagaaaatggggtttgctgtttggatcaaggaatcaatggattgccagaatttgaggaaggaagtaagacaagtccaaaactcttcgcagaagaggagtttctgccattggatccaacccaggaactgatatttcctcctgagctaatgataatggctgagaaacagtcgcaaaggaccagggtgtttggcagtgagagaatgatgtggttttcccccgtgaccctgaaggaactgctggaatttaaattcaagtatccccaggctcctgttatcatgggaaacacctctgtggggcctgaagtgaaatttaaaggcgtctttcacccagttataatttctcctgatagaattgaagaactgagtgttgtaaaccatgcatataatggactcacccttggtgctggtctcagcctagcccaggtgaaggacattttggctgatgtagtccagaagcttccagaggagaagacacagatgtaccatgctctcctgaagcatttgggaactctggctgggtcccagatcaggaacatggcttctttagggggacacatcattagcaggcatccagattcagatctgaatcccatcctggctgtgggtaactgtaccctcaacttgctatcaaaagaaggaaaacgacagattcctttaaatgagcaattcctcagcaagtgccctaatgcagatcttaagcctcaagaaatcttggtctcagtgaacatcccctactcaaggaagtgggaatttgtgtcagccttccgacaagcccagcgacaggagaatgcgctagcgatagtcaattcaggaatgagagtcttttttggagaaggggatggcattattagagagttatgcatctcatatggaggcgttggtccagccaccatctgtgccaagaattcctgccagaaactcattggaaggcactggaacgaacagatgctggatatagcctgcaggcttattctgaatgaagtctcccttttgggctcggcgccaggtgggaaagtggagttcaagaggactctcatcatcagcttcctcttcaagttctacctggaagtgtcacagattttgaaaaagatggatccagttcactatcctagccttgcagacaagtatgaaagtgctttagaagatcttcattccaaacatcactgcagtacattaaagtaccagaatataggcccaaagcagcatcctgaagacccaattggccaccccatcatgcatctgtctggtgtgaagcatgccacgggggaggccatctactgtgatgacatgcctctggtggaccaggaacttttcttgacttttgtgactagttcaagagctcatgctaagattgtgtctattgatctgtcagaagctctcagcatgcccggtgtggtggacatcatgacagcagaacatcttagtgacgtcaactccttctgcttttttactgaagctgagaaatttctggcgacagataaggtgttctgtgtgggtcagcttgtctgtgctgtgcttgccgattctgaggttcaggcaaagcgagctgctaagcgagtgaagattgtctatcaagacttggagccgctgatactaacaattgaggaaagtatacaacacaactcctccttcaagccagaaaggaaactggaatatggaaatgttgacgaagcatttaaagtggttgatcaaattcttgaaggtgaaatacatatgggaggtcaagaacatttttatatggaaacccaaagcatgcttgtcgttcccaagggagaggatcaagaaatggatgtctacgtgtccacacagtttcccaaatatatacaggacattgttgcctcaaccttgaagctcccagctaacaaggtcatgtgccatgtaaggcgtgttggtggagcgtttggagggaaggtgttaaaaaccggaatcattgcagccgtcactgcatttgccgcaaacaaacatggccgtgcagttcgctgtgttctggaacgaggagaagacatgttaataactggaggccgccatccttaccttggaaagtacaaagctggattcatgaacgatggcagaatcttggccctggacatggagcattacagcaatgcaggcgcctccttggatgaatcattattcgtgatagaaatgggacttctgaaaatggacaatgcttacaagtttcccaatctccgctgccggggttgggcatgcagaaccaaccttccatccaacacagcttttcgtgggtttggctttcctcaggcagcgctgatcaccgaatcttgtatcacggaagttgcagccaaatgtggactatcccctgagaaggtgcgaatcataaacatgtacaaggaaattgatcaaacaccctacaaacaagagatcaatgccaagaacctaatccagtgttggagagaatgtatggccatgtcttcctactccttgaggaaagttgctgtggaaaagttcaatgcagagaattattggaagaagaaaggactggccatggtccccctgaagtttcctgttggccttggctcacgtgctgctggtcaggctgctgccttggttcacatttatcttgatggctctgtgctggtcactcacggtggaattgaaatggggcagggggtccacactaaaatgattcaggtggtcagccgtgaattaagaatgccaatgtcgaatgtccacctgcgtggaacaagcacagaaactgtccctaatgcaaatatctctggaggttctgtggtggcagatctcaacggtttggcagtaaaggatgcctgtcaaactcttctaaaacgcctcgaacccatcatcagcaagaatcctaaaggaacttggaaagactggctcggcacagactgcttttgatgaaagcattaacctttcagctgttggatacttcagaggttatgagtcagacatgaactgggagaaaggcgaaggccagcccttcgaatactttgtttatggagctgcctgttccgaggttgaaatagactgcctgacgggggatcataagaacatcagaacagacattgtcatggatgttggctgcagtataaatccagccattgacataggccagattgaaggtgcatttattcaaggcatgggactttatacaatagaggaactgaattattctccccagggcattctgcacactcgtggtccagaccaatataaaatccctgccatctgtgacatgcccacggagttgcacattgctttgttgcctccttctcaaaactcaaatactctttattcatctaagggtctgggagagtcgggggtgttcctggggtgttccgtgtttttcgctatccatgacgcagtgagtgcagcacgacaggagagaggcctgcatggacccttgacccttaatagtccactgaccccggagaagattaggatggcctgtgaagacaagttcacaaaaatgattccgagagatgaacctggatcctacgttccttggaatgtacccatctgaatcaaatgcaaacttctggagaaaacagagtgcctcttcccagatggcaatctgtcctatctctgtgctggaagatgctagatctgaaagacagagtttccacagttcagaaatcatcccacagtgttgcttttctatggagctgatttaaagtattccatttagatttgatagatatgcttaagcaatctataaatcattttcaatgttataaacacta

SEQ ID NO: 435140 - DNA, 1569 bp, Homo sapiens
ggcacgagcggcacgagcggcacgaggatgcctgtcaaactcttctaaaacgcctcgaacccatcatcagcaagaatcctaaaggaacttggaaagactggctcggcacagactgcttttgatgaaagcattaacctttcagctgttggatacttcagaggttatgagtcagacatgaactgggagaaaggcgaaggccagcccttcgaatactttgtttatggagctgcctgttccgaggttgaaatagactgcctgacgggggatcataagaacatcagaacagacattgtcatggatgttggctgcagtataaatccagccattgacataggccagattgaaggtgcatttattcaaggcatgggactttatacaatagaggaactgaattattctccccagggcattctgcacactcgtggtccagaccaatataaaatccctgccatctgtgacatgcccacggagttgcacattgctttgttgcctccttctcaaaactcaaatactctttattcatctaagggtctgggagagtcgggggtgttcctggggtgttccgtgtttttcgctatccatgacgcagtgagtgcagcacgacaggagagaggcctgcatggacccttgacccttaatagtccactgaccccggagaagattaggatggcctgtgaagacaagttcacaaaaatgattccgagagatgaacctggatcctacgttccttggaatgtacccatctgaatcaaatgcaaacttctggagaaaacagagtgcctcttcccagatggcaatctgtcctatctctgtgctggaagatgctagatctgaaagacagagtttccacagttcagaaatcatcccacagtgttgcttttctatggagctgatttaaagtattccatttagatttgatagatatgcttaagcaatctataaatcattttcaatgttataaacactaattggtttcctctagggtgatattcgtcattactctgtctcttcaatccatccagctaaatggaataggtgatgacttgcatgtgactcctacttggcttctatccaccaacagaaattataccatatagtgaaaggcaattttctaaataatttcattactaatatgaactgtgaagttgtcattttttcatttgtccttttctgctatcaccttcctcttgtcagaatgaatatagacactgtatctaagtgggaccaaagaaaaaatagcgaactttcaccaaagttttcatgaaaacccaaaagctttaaaagttactatcaagaaattgaaaggaaacccacagaataggataaaatatttgtaaatcatatatttgataaaagtcttgtaaccagatacataaagagctcttacaactcaataaaaggcaagtaatttaaaaataggcaaaagaattgctggatggtatggtagttctatttttagtttttaccctaactactctgacttgatcatttaacattctgtgtatgtaacaaaatatcacatgcataaatattatgtatcaataaaattttttaatgggcaaaaaaaat

SEQ ID NO: 435141 - DNA, 5008 bp, Homo sapiens
  misc_feature (193)..(193): n is a, c, g, or t
actggcgaggagatgaaggggtcgtcttcatcttcgccggatgatttccgcccacatagagggcgccagtgacgcccacacacgtgctggtgtcccgggaagagttcctggcaaagagctcaggaacgttggatcttaatcaaggctttctccgtcggggtggatgggttggactttaggctccagcaagccncgccccactcggcgggtcggtgccgccgggtcccaggtgcccgctacttcccagaacctccgcctcccgctccgggccctcgaaccagcgcggacaccacaatggaccgggcgtccgagctgctcttctacgtgaacggccgcaaggtgatagaaaaaaatgtcgatcctgaaacaatgctgttgccttatttgaggaagaagcttcgactcacaggaactaagtatggctgtggaggaggaggctgtggtgcttgtacagtgatgatatcacgatacaaccccatcaccaagaggataaggcatcacccagccaatgcctgtctgattcccatctgttctctgtatggtgctgccgtcaccacagtagaaggcataggaagcacccacaccagaattcatcctgttcaggagaggattgccaagtgtcatggcacccagtgtggcttctgcacacctgggatggtgatgtccatctacacgctgctcaggaaccacccagagcccactctggatcagttaactgatgcccttggtggtaacctgtgccgttgcactggatacaggcccataattgatgcatgcaagactttctgtaaaacttcgggctgctgtcaaagtaaagaaaatggggtttgctgtttggatcaaggaatcaatggattgccagaatttgaggaaggaagtaagacaagtccaaaactcttcgcagaagaggagtttctgccattggatccaacccaggaactgatatttcctcctgagctaatgataatggctgagaaacagtcgcaaaggaccagggtgtttggcagtgagagaatgatgtggttttcccccgtgaccctgaaggaactgctggaatttaaattcaagtatccccaggctcctgttatcatgggaaacacctctgtggggcctgaagtgaaatttaaaggcgtctttcacccagttataatttctcctgatagaattgaagaactgagtgttgtaaaccatgcatataatggactcacccttggtgctggtctcagcctagcccaggtgaaggacattttggctgatgtagtccagaagcttccagaggagaagacacagatgtaccatgctctcctgaagcatttgggaactctggctgggtcccagatcaggaacatggcttctttagggggacacatcattagcaggcatccagattcagatctgaatcccatcctggctgtgggtaactgtaccctcaacttgctatcaaaagaaggaaaacgacagattcctttaaatgagcaattcctcagcaagtgccctaatgcagatcttaagcctcaagaaatcttggtctcagtgaacatcccctactcaaggaagtgggaatttgtgtcagccttccgacaagcccagcgacaggagaatgcgctagcgatagtcaattcaggaatgagagtcttttttggagaaggggatggcattattagagagttatgcatctcatatggaggcgttggtccagccaccatctgtgccaagaattcctgccagaaactcattggaaggcactggaacgaacagatgctggatatagcctgcaggcttattctgaatgaagtctcccttttgggctcggcgccaggtgggaaagtggagttcaagaggactctcatcatcagcttcctcttcaagttctacctggaagtgtcacagattttgaaaaagatggatccagttcactatcctagccttgcagacaagtatgaaagtgctttagaagatcttcattccaaacatcactgcagtacattaaagtaccagaatataggcccaaagcagcatcctgaagacccaattggccaccccatcatgcatctgtctggtgtgaagcatgccacgggggaggccatctactgtgatgacatgcctctggtggaccaggaacttttcttgacttttgtgactagttcaagagctcatgctaagattgtgtctattgatctgtcagaagctctcagcatgcccggtgtggtggacatcatgacagcagaacatcttagtgacgtcaactccttctgcttttttactgaagctgagaaatttctggcgacagataaggtgttctgtgtgggtcagcttgtctgtgctgtgcttgccgattctgaggttcaggcaaagcgagctgctaagcgagtgaagattgtctatcaagacttggagccgctgatactaacaattgaggaaagtatacaacacaactcctccttcaagccagaaaggaaactggaatatggaaatgttgacgaagcatttaaagtggttgatcaaattcttgaaggtgaaatacatatgggaggtcaagaacatttttatatggaaacccaaagcatgcttgtcgttcccaagggagaggatcaagaaatggatgtctacgtgtccacacagtttcccaaatatatacaggacattgttgcctcaaccttgaagctcccagctaacaaggtcatgtgccatgtaaggcgtgttggtggagcgtttggagggaaggtgttaaaaaccggaatcattgcagccgtcactgcatttgccgcaaacaaacatggccgtgcagttcgctgtgttctggaacgaggagaagacatgttaataactggaggccgccatccttaccttggaaagtacaaagctggattcatgaacgatggcagaatcttggccctggacatggagcattacagcaatgcaggcgcctccttggatgaatcattattcgtgatagaaatgggacttctgaaaatggacaatgcttacaagtttcccaatctccgctgccggggttgggcatgcagaaccaaccttccatccaacacagcttttcgtgggtttggctttcctcaggcagcgctgatcaccgaatcttgtatcacggaagttgcagccaaatgtggactatcccctgagaaggtgcgaatcataaacatgtacaaggaaattgatcaaacaccctacaaacaagagatcaatgccaagaacctaatccagtgttggagagaatgtatggccatgtcttcctactccttgaggaaagttgctgtggaaaagttcaatgcagagaattattggaagaagaaaggactggccatggtccccctgaagtttcctgttggccttggctcacgtgctgctggtcaggctgctgccttggttcacatttatcttgatggctctgtgctggtcactcacggtggaattgaaatggggcagggggtccacactaaaatgattcaggtggtcagccgtgaattaagaatgccaatgtcgaatgtccacctgcgtggaacaagcacagaaactgtccctaatgcaaatatctctggaggttctgtggtggcagatctcaacggtttggcagtaaagctcggcacagactgcttttgatgaaagcattaacctttcagctgttggatacttcagaggttatgagtcagacatgaactgggagaaaggcgaaggccagcccttcgaatactttgtttatggagctgcctgttccgaggttgaaatagactgcctgacgggggatcataagaacatcagaacagacattgtcatggatgttggctgcagtataaatccagccattgacataggccagattgaaggtgcatttattcaaggcatgggactttatacaatagaggaactgaattattctccccagggcattctgcacactcgtggtccagaccaatataaaatccctgccatctgtgacatgcccacggagttgcacattgctttgttgcctccttctcaaaactcaaatactctttattcatctaagggtctgggagagtcgggggtgttcctggggtgttccgtgtttttcgctatccatgacgcagtgagtgcagcacgacaggagagaggcctgcatggacccttgacccttaatagtccactgaccccggagaagattaggatggcctgtgaagacaagttcacaaaaatgattccgagagatgaacctggatcctacgttccttggaatgtacccatctgaatcaaatgcaaacttctggagtgctagatctgaaagacagagtttccacagttcagaaatcatcccacagtgttgcttttctatggagctgatttaaagtattccatttagatttgatagatatgcttaagcaatctataaatcattttcaatgttataaacactaattggtttcctctagggtgatattcgtcattactctgtctcttcaatccatccagctaaatggaataggtgatgacttgcatgtgactcctacttggcttctatccaccaacagaaattataccatatagtgaaaggcaattttctaaataatttcattactaatatgaactgtgaagttgtcattttttcatttgtccttttctgctatcaccttcctcttgtcagaatgaatatagacactgtatctaagtgggaccaaagaaaaaatagcgaactttcaccaaagttttcatgaaaacccaaaagctttaaaagttactatcaagaaattgaaaggaaacccacagaataggataaaatatttgtaaatcatatatttgataaaagtcttgtaaccagatacataaagagctcttacaactcaataaaaggcaagtaatttaaaaataggcaaaagaattgctggatggtatggtagttctatttttagtttttaccctaactactctgacttgatcatttaacattctgtgtatgtaacaaaatatcacatgcataaatattatgtatcaataaaattttttaatgggcaaaaaaaat

SEQ ID NO: 435142 - DNA, 4153 bp, Homo sapiens
  misc_feature (193)..(193): n is a, c, g, or t
actggcgaggagatgaaggggtcgtcttcatcttcgccggatgatttccgcccacatagagggcgccagtgacgcccacacacgtgctggtgtcccgggaagagttcctggcaaagagctcaggaacgttggatcttaatcaaggctttctccgtcggggtggatgggttggactttaggctccagcaagccncgccccactcggcgggtcggtgccgccgggtcccaggtgcccgctacttcccagaacctccgcctcccgctccgggccctcgaaccagcgcggacaccacaatggaccgggcgtccgagctgctcttctacgtgaacggccgcaaggtgatagaaaaaaatgtcgatcctgaaacaatgctgttgccttatttgaggaagaagcttcgactcacaggaactaagtatggctgtggaggaggaggctgtggtgcttgtacagtgatgatatcacgatacaaccccatcaccaagaggataaggcatcacccagccaatgcctgtctgattcccatctgttctctgtatggtgctgccgtcaccacagtagaaggcataggaagcacccacaccagaattcatcctgttcaggagaggattgccaagtgtcatggcacccagtgtggcttctgcacacctgggatggtgatgtccatctacacgctgctcaggaaccacccagagcccactctggatcagttaactgatgcccttggtggtaacctgtgccgttgcactggatacaggcccataattgatgcatgcaagactttctgtaaaacttcgggctgctgtcaaagtaaagaaaatggggtttgctgtttggatcaaggaatcaatggattgccagaatttgaggaaggaagtaagacaagtccaaaactcttcgcagaagaggagtttctgccattggatccaacccaggaactgatatttcctcctgagctaatgataatggctgagaaacagtcgcaaaggaccagggtgtttggcagtgagagaatgatgtggttttcccccgtgaccctgaaggaactgctggaatttaaattcaagtatccccaggctcctgttatcatgggaaacacctctgtggggcctgaagtgaaatttaaaggcgtctttcacccagttataatttctcctgatagaattgaagaactgagtgttgtaaaccatgcatataatggactcacccttggtgctggtctcagcctagcccaggtgaaggacattttggctgatgtagtccagaagcttccagaggagaagacacagatgtaccatgctctcctgaagcatttgggaactctggctgggtcccagatcaggaacatggcttctttagggggacacatcattagcaggcatccagattcagatctgaatcccatcctggctgtgggtaactgtaccctcaacttgctatcaaaagaaggaaaacgacagattcctttaaatgagcaattcctcagcaagtgccctaatgcagatcttaagcctcaagaaatcttggtctcagtgaacatcccctactcaaggaagtgggaatttgtgtcagccttccgacaagcccagcgacaggagaatgcgctagcgatagtcaattcaggaatgagagtcttttttggagaaggggatggcattattagagagttatgcatctcatatggaggcgttggtccagccaccatctgtgccaagaattcctgccagaaactcattggaaggcactggaacgaacagatgctggatatagcctgcaggcttattctgaatgaagtctcccttttgggctcggcgccaggtgggaaagtggagttcaagaggactctcatcatcagcttcctcttcaagttctacctggaagtgtcacagattttgaaaaagatggatccagttcactatcctagccttgcagacaagtatgaaagtgctttagaagatcttcattccaaacatcactgcagtacattaaagtaccagaatataggcccaaagcagcatcctgaagacccaattggccaccccatcatgcatctgtctggtgtgaagcatgccacgggggaggccatctactgtgatgacatgcctctggtggaccaggaacttttcttgacttttgtgactagttcaagagctcatgctaagattgtgtctattgatctgtcagaagctctcagcatgcccggtgtggtggacatcatgacagcagaacatcttagtgacgtcaactccttctgcttttttactgaagctgagaaatttctggcgacagataaggtgttctgtgtgggtcagcttgtctgtgctgtgcttgccgattctgaggttcaggcaaagcgagctgctaagcgagtgaagattgtctatcaagacttggagccgctgatactaacaattgaggaaagtatacaacacaactcctccttcaagccagaaaggaaactggaatatggaaatgttgacgaagcatttaaagtggttgatcaaattcttgaaggtgaaatacatatgggaggtcaagaacatttttatatggaaacccaaagcatgcttgtcgttcccaagggagaggatcaagaaatggatgtctacgtgtccacacagtttcccaaatatatacaggacattgttgcctcaaccttgaagctcccagctaacaaggtcatgtgccatgtaaggcgtgttggtggagcgtttggagggaaggtgttaaaaaccggaatcattgcagccgtcactgcatttgccgcaaacaaacatggccgtgcagttcgctgtgttctggaacgaggagaagacatgttaataactggaggccgccatccttaccttggaaagtacaaagctggattcatgaacgatggcagaatcttggccctggacatggagcattacagcaatgcaggcgcctccttggatgaatcattattcgtgatagaaatgggacttctgaaaatggacaatgcttacaagtttcccaatctccgctgccggggttgggcatgcagaaccaaccttccatcctacaaacaagagatcaatgccaagaacctaatccagtgttggagagaatgtatggccatgtcttcctactccttgaggaaagttgctgtggaaaagttcaagttccgtgtttttcgctatccatgacgcagtgagtgcagcacgacaggagagaggcctgcatggacccttgacccttaatagtccactgaccccggagaagattaggatggcctgtgaagacaagttcacaaaaatgattccgagagatgaacctggatcctacgttccttggaatgtacccatctgaatcaaatgcaaacttctggagaaaacagagtgcctcttcccagatggcaatctgtcctatctctgtgctggaagatgctagatctgaaagacagagtttccacagttcagaaatcatcccacagtgttgcttttctatggagctgatttaaagtattccatttagatttgatagatatgcttaagcaatctataaatcattttcaatgttataaacactaattggtttcctctagggtgatattcgtcattactctgtctcttcaatccatccagctaaatggaataggtgatgacttgcatgtgactcctacttggcttctatccaccaacagaaattataccatatagtgaaaggcaattttctaaataatttcattactaatatgaactgtgaagttgtcattttttcatttgtccttttctgctatcaccttcctcttgtcagaatgaatatagacactgtatctaagtgggaccaaagaaaaaatagcgaactttcaccaaagttttcatgaaaacccaaaagctttaaaagttactatcaagaaattgaaaggaaacccacagaataggataaaatatttgtaaatcatatatttgataaaagtcttgtaaccagatacataaagagctcttacaactcaataaaaggcaagtaatttaaaaataggcaaaagaattgctggatggtatggtagttctatttttagtttttaccctaactactctgacttgatcatttaacattctgtgtatgtaacaaaatatcacatgcataaatattatgtatcaataaaattttttaatgggcaaaaaaaat

SEQ ID NO: 435143 - DNA, 4364 bp, Homo sapiens
  misc_feature (193)..(193): n is a, c, g, or t
actggcgaggagatgaaggggtcgtcttcatcttcgccggatgatttccgcccacatagagggcgccagtgacgcccacacacgtgctggtgtcccgggaagagttcctggcaaagagctcaggaacgttggatcttaatcaaggctttctccgtcggggtggatgggttggactttaggctccagcaagccncgccccactcggcgggtcggtgccgccgggtcccaggtgcccgctacttcccagaacctccgcctcccgctccgggccctcgaaccagcgcggacaccacaatggaccgggcgtccgagctgctcttctacgtgaacggccgcaaggtgatagaaaaaaatgtcgatcctgaaacaatgctgttgccttatttgaggaagaagcttcgactcacaggaactaagtatggctgtggaggaggaggctgtggtgcttgtacagtgatgatatcacgatacaaccccatcaccaagaggataaggcatcacccagccaatgcctgtctgattcccatctgttctctgtatggtgctgccgtcaccacagtagaaggcataggaagcacccacaccagaattcatcctgttcaggagaggattgccaagtgtcatggcacccagtgtggcttctgcacacctgggatggtgatgtccatctacacgctgctcaggaaccacccagagcccactctggatcagttaactgatgcccttggtggtaacctgtgccgttgcactggatacaggcccataattgatgcatgcaagactttctgtaaaacttcgggctgctgtcaaagtaaagaaaatggggtttgctgtttggatcaaggaatcaatggattgccagaatttgaggaaggaagtaagacaagtccaaaactcttcgcagaagaggagtttctgccattggatccaacccaggaactgatatttcctcctgagctaatgataatggctgagaaacagtcgcaaaggaccagggtgtttggcagtgagagaatgatgtggttttcccccgtgaccctgaaggaactgctggaatttaaattcaagtatccccaggctcctgttatcatgggaaacacctctgtggggcctgaagtgaaatttaaaggcgtctttcacccagttataatttctcctgatagaattgaagaactgagtgttgtaaaccatgcatataatggactcacccttggtgctggtctcagcctagcccaggtgaaggacattttggctgatgtagtccagaagcttccagaggagaagacacagatgtaccatgctctcctgaagcatttgggaactctggctgggtcccagatcaggaacatggcttctttagggggacacatcattagcaggcatccagattcagatctgaatcccatcctggctgtgggtaactgtaccctcaacttgctatcaaaagaaggaaaacgacagattcctttaaatgagcaattcctcagcaagtgccctaatgcagatcttaagcctcaagaaatcttggtctcagtgaacatcccctactcaaggaagtgggaatttgtgtcagccttccgacaagcccagcgacaggagaatgcgctagcgatagtcaattcaggaatgagagtcttttttggagaaggggatggcattattagagagttatgcatctcatatggaggcgttggtccagccaccatctgtgccaagaattcctgccagaaactcattggaaggcactggaacgaacagatgctggatatagcctgcaggcttattctgaatgaagtctcccttttgggctcggcgccaggtgggaaagtggagttcaagaggactctcatcatcagcttcctcttcaagttctacctggaagtgtcacagattttgaaaaagatggatccagttcactatcctagccttgcagacaagtatgaaagtgctttagaagatcttcattccaaacatcactgcagtacattaaagtaccagaatataggcccaaagcagcatcctgaagacccaattggccaccccatcatgcatctgtctggtgtgaagcatgccacgggggaggccatctactgtgatgacatgcctctggtggaccaggaacttttcttgacttttgtgactagttcaagagctcatgctaagattgtgtctattgatctgtcagaagctctcagcatgcccggtgtggtggacatcatgacagcagaacatcttagtgacgtcaactccttctgcttttttactgaagctgagaaatttctggcgacagataaggtgttctgtgtgggtcagcttgtctgtgctgtgcttgccgattctgaggttcaggcaaagcgagctgctaagcgagtgaagattgtctatcaagacttggagccgctgatactaacaattgaggaaagtatacaacacaactcctccttcaagccagaaaggaaactggaatatggaaatgttgacgaagcatttaaagtggttgatcaaattcttgaaggtgaaatacatatgggaggtcaagaacatttttatatggaaacccaaagcatgcttgtcgttcccaagggagaggatcaagaaatggatgtctacgtgtccacacagtttcccaaatatatacaggacattgttgcctcaaccttgaagctcccagctaacaaggtcatgtgccatgtaaggcgtgttggtggagcgtttggagggaaggtgttaaaaaccggaatcattgcagccgtcactgcatttgccgcaaacaaacatggccgtgcagttcgctgtgttctggaacgaggagaagacatgttaataactggaggccgccatccttaccttggaaagtacaaagctggattcatgaacgatggcagaatcttggccctggacatggagcattacagcaatgcaggcgcctccttggatgaatcattattcgtgatagaaatgggacttctgaaaatggacaatgcttacaagtttcccaatctccgctgccggggttgggcatgcagaaccaaccttccatccaacacagcttttcgtgggtttggctttcctcaggcagcgctgatcaccgaatcttgtatcacggaagttgcagccaaatgtggactatcccctgagaaggtgcgaatcataaacatgtacaaggaaattgatcaaacaccctacaaacaagagatcaatgccaagaacctaatccagtgttggagagaatgtatggccatgtcttcctactccttgaggaaagttgctgtggaaaagttcaatgcagagaattattggaagaagaaaggactggccatggtccccctgaagtttcctgttggccttggctcacgtgctgctggtcaggctgctgccttggttcacatttatcttgatggctctgtgctggtcactcacggtggaattgaaatggggcagggggtccacactaaaatgattcaggtggtcagccgtgaattaagaatgccaatgtcgaatgtccacctgcgtggaacaagcacagaaactgtccctaatgcaaatatctctggaggttctgtggtggcagatctcaacggtttggcagtaaagctcggcacagactgcttttgatgaaagcattaacctttcagctgttggatacttcagaggttatgagtcagacatgaactgggagaaaggcgaaggccagcccttcgaatactttgtttatggagctgcctgttccgaggttgaaatagactgcctgacgggggatcataagaacatcagaacagacattgtcatggatgttggctgcagtataaatccagccattgacataggccagattgaaggtgcatttattcaaggcatgggactttatacaatagaggaactgaattattctccccagggcattctgcacactcgtggtccagaccaatataaaatccctgccatctgtgacatgcccacggagttgcacattgctttgttgcctccttctcaaaactcaaatactctttattcatctaagggtctgggagagtcgggggtgttcctggggtgttccgtgtttttcgctatccatgacgcagtgagtgcagcacgacaggagagaggcctgcatggacccttgacccttaatagtccactgaccccggagaagattaggatggcctgtgaagacaagttcacaaaaatgggagcacatggcaagcctgtcaggcggacacaggaacaggtgcttttgatacaacttcacaagattcagccaatgctggtggcataatgtcacattccaaggcgtcagatgaacttggtttgtttgtacgtgaatggaagaacagtaagttttctacattattaatcaattcata

SEQ ID NO: 435144 - DNA, 600 bp, Homo sapiens
gcagatcttggcatgcaataaatgtcctagtgaggacatttattagtgagtaaatgagggtcagttactcctggactgtggattttatatgagttgtcatttatttctctagatcattctgtgagttgggttctaatattccccttttacaggtgaggacatggcgagacccaggctagccaccttgagaatggtgggccaatttgaactcgggctgcctgatccagagcttgtactcttatttcctgtattaaactatggctatttgtcttacccattagatgaagatatggggtaataaaccctgtcaggctaggagtcttctctttggactttccaggcactggaacgaacagatgctggatatagcctgcaggcttattctgaatgaagtctcccttttgggctcggcgccaggtgggaaagtggagttcaagaggactctcatcatcagcttcctcttcaagttctacctggaagtgtcacagattttgaaaaagatggtaaacaactgtttacacattaacttccccagtactgggagctatgatgacaccaaaagtagaggcaatgactccctaccaaatagctgtagaataa

SEQ ID NO: 435145 - DNA, 670 bp, Homo sapiens
tcaatgccaagaacctaatccagtgttggagagaatgtatggccatgtcttcctactccttgaggaaagttgctgtggaaaagttcaatgcagagaattattggaagaagaaaggactggccatggtccccctgaagtttcctgttggccttggctcacgtgctgctggtcaggtgagttctccaaatgcacatgaggatgctgcctggaagcagccctgacaaagcaagaggtgttgaggaaacttctccttaagtcatattagccatatggttgcaatgcccaattgttaaatttcacaaaagccaccaaagtcaaagtaattaagctagctttactccagaggagaccagagctcctctgctcacatgcccatggttggtcaaaaacattcttgctggaaattgggagactgaggtttactcctggccctggcaacaggagttggcaaatggcagctgagtccatttgctctgggctcagactgctcatgtggaaagcaggagggtgggactgatgacctccaagactcctcttccagtgtccgcaattcggtgtcgctggaccatgaaatagaaatgaggagctgcaaggttttgggtgctccactccttctgggtgggttggaataaattaaattcagaaaaataaatcactttttaaatagaat

SEQ ID NO: 435146 - DNA, 2235 bp, Homo sapiens
cgcgagcgcttccagtcgggttacttctgggggacaagaaaggcaccgtctgaacggtcgagacgctttttcccgctacggttttccccggagctgacaggggcagcaaggtcggagttgatccgagggtccctgcctggtcccggggggacggtcagcctcccgcccggagccgcggggagaggaagcaggtcggggtctccgggacgcgcagacacccagacaccggcggcctcctcccaccaggctggcagtcgctgagccctggcgcctccttaaagccgcagctccgccccgaccgccccgcccgccagtccgtcctcagaccctcccaaccgccgggtccccgccgcctcggcggagtgttgtagagcctcgagcctgcgaggagcgcgccgcccgccagctccctgcgtcccgtcccgcgtccccgcgttcccgcgtcctgcgatccgccgccatggccagtgaggagctggcgtgcaagctggagcgccggctgcggcgcgaggaggccgaggagagtggcccccagctggctcccctcggcgccccagccccggagcccaagcccgagcccgagcctcccgcccgtgcgcccacggccagcgccgacgcggagctgagcgcccagctgagccggcggctggacatcaacgagggcgctgcgcggccccggcgctgcagggtcttcaacccctacacggagttccctgagttcagccgccgcctcatcaaggacctggagagcatgttcaaactgtatgacgctgggcgggatggcttcatcgacctgatggagctgaagctgatgatggagaagctgggggccccccagacccacctgggcctgaagagcatgatcaaggaggtggatgaggacttcgatggcaagctcagcttccgggagttcctgctcattttccacaaggccgcggcaggggagctgcaggaggacagtgggctgatggcgctggcaaagctttctgagatcgatgtggccctggagggtgtcaaaggtgccaagaacttctttgaagccaaggtccaagccttgtcatcggccagtaagtttgaagcagagttgaaagctgagcaagatgagcggaagcgggaggaggaggagaggcggctccgccaggcagccttccagaaactcaaggccaacttcaatacatagtcctgctgaccttgccctctgcccacagctgtgcctcacagatgccccgagaagagatgactaggcatcttcatcactgctgtcggtcccctccctgagccagcatctccatccaccaccccgtgccagctcccgtgccagccttcattcctcccagtgtccaagcccctccaggagggtcctggggtgggccagatgcctgcccacctctgtctcctgcctctgctcctctgcccttcttatagccagaacttgtatcttctcagcaaccttcactttgtccttgtccctttaccattccccatcaaagagtagtctgctatatcaatttgtgtagatatgtctgtctttttgggtcctcagagaaaatgcccattttctcggagaattctctgcactcctctctgcttcacattcaacttccctgttctcatctttggtaggattctgccagttgcttttgcatcttctgttcctgggtaatggtgggtcttaatggaggctgggtggaccactgcccgtccactcttcaacaggaggaacagcatgccaccacagtaacacacattagagaaaggacagaggtctgctccttcctgccacctttctcctggccccttagcattcccccagtccctccctcttcaccttgctccgtctatgtcttcccagctcagccttttccccactcttaaatactgtactacttcactgtaagaacgaaagaatagttaggataccaatgagtaaaagggttcctgttcactctgactctgtgcaaattgtattacagtagaccgctgacgttcccaagtgacagatccagggcctttcaaacatccccaaagtcatggccatactcaccattagccagtttctaacatctgtttcagggtatccagctgtagatgttcttatcccccatacttgtgagttcttggggttgctcacaaatactaggggtttttgttgtatttttaacaaatatatcctaatgtcatatttattctcttttgtaactgctgtctttacaataaagaaatcatctgcctttc

SEQ ID NO: 435147 - DNA, 1308 bp, Homo sapiens
  misc_feature (1201)..(1201): n is a, c, g, or t
  misc_feature (1213)..(1213): n is a, c, g, or t
  misc_feature (1225)..(1228): n is a, c, g, or t
  misc_feature (1231)..(1231): n is a, c, g, or t
  misc_feature (1234)..(1234): n is a, c, g, or t
  misc_feature (1239)..(1239): n is a, c, g, or t
  misc_feature (1241)..(1241): n is a, c, g, or t
  misc_feature (1244)..(1244): n is a, c, g, or t
  misc_feature (1271)..(1271): n is a, c, g, or t
cgcgagcgcttccagtcgggttacttctgggggacaagaaaggcaccgtctgaacggtcgagacgctttttcccgctacggttttccccggagctgacaggggcagcaaggtcggagttgatccgagggtccctgcctggtcccggggggacggtcagcctcccgcccggagccgcggggagaggaagcaggtcggggtctccgggacgcgcagacacccagacaccggcggcctcctcccaccaggctggcagtcgctgagccctggcgcctccttaaagccgcagctccgccccgaccgccccgcccgccagtccgtcctcagaccctcccaaccgccgggtccccgccgcctcggcggagtgttgtagagcctcgagcctgcgaggagcgcgccgcccgccagctccctgcgtcccgtcccgcgtccccgcgttcccgcgtcctgcgatccgccgccatggccagtgaggagctggcgtgcaagctggagcgccggctgcggcgcgaggaggccgaggagagtggcccccagctggctcccctcggcgccccagccccggagcccaagcccgagcccgagcctcccgcccgtgcgcccacggccagcgccgacgcggagctgagcgcccagctgagccggcggctggacatcaacgagggcgctgcgcggccccggcgctgcagggtcttcaacccctacacggagttccctgagttcagccgccgcctcatcaaggacctggagagcatgttcaaactgtatgacgctgggcgggatggcttcatcgacctgatggagctgaagctgatgatggagaagctgggggccccccagacccacctgggcctgaagagcatgatcaaggaggtggatgaggacttcgatggcaagctcagcttccgggagttcctgctcattttccacaaggccgcggcaggggagctgcaggaggacagtgggctgatggcgctggcaaagctttctgagatcgatgtggccctggagggtgtcaaaggtgccaagaacttctttgaagccaaggtccaagccttgtcatcggccagtaagtttgaagcagagttgaaagctgagcaagatgagcggaagcgggaggaggaggagaggcggctccgccaggcagccttccagaaactcaaggccaacttcaatacatagtcctgctgaccttgccctctngggagaggtgtnggtgagaaatgnnnnganaanaaatnantanggatgttgatgagttgtttggttgggngggttaaggaagatgtggatggaggaggggttggaag

SEQ ID NO: 435148 - DNA, 1271 bp, Homo sapiens
cgcgagcgcttccagtcgggttacttctgggggacaagaaaggcaccgtctgaacggtcgagacgctttttcccgctacggttttccccggagctgacaggggcagcaaggtcggagttgatccgagggtccctgcctggtcccggggggacggtcagcctcccgcccggagccgcggggagaggaagcaggtcggggtctccgggacgcgcagacacccagacaccggcggcctcctcccaccaggctggcagtcgctgagccctggcgcctccttaaagccgcagctccgccccgaccgccccgcccgccagtccgtcctcagaccctcccaaccgccgggtccccgccgcctcggcggagtgttgtagagcctcgagcctgcgaggagcgcgccgcccgccagctccctgcgtcccgtcccgcgtccccgcgttcccgcgtcctgcgatccgccgccatggccagtgaggagctggcgtgcaagctggagcgccggctgcggcgcgaggaggccgaggagagtggcccccagctggctcccctcggcgccccagccccggagcccaagcccgagcccgagcctcccgcccgtgcgcccacggccagcgccgacgcggagctgagcgcccagctgagccggcggctggacatcaacgagggcgctgcgcggccccggcgctgcagggtcttcaacccctacacggagttccctgagttcagccgccgcctcatcaaggacctggagagcatgttcaaactatgaggacttcgatggcaagctcagcttccgggagttcctgctcattttccacaaggccgcggcaggggagctgcaggaggacagtgggctgatggcgctggcaaagctttctgagatcgatgtggccctggagggtgtcaaaggtgccaagaacttctttgaagccaaggtaggtgcttagttccttctgtgaggagcaaccactcccagccttcacgctgcccaccagactgcagctgtcattttcatctcagcagagcacacctgcagaaacagaccaggagggtcctcccagtgctctgccaaccagcaagtgggtgccagtccacctgagttcagactctgcctcctccatctccctaccctgtccactctgagcctcggtgtcttcatctgtatgatggaggggtgacaatagaattgcctgaatgattaaatgagttcatgtacatgaaagcatttaggaagtgcctggctcactgtgagcccttcataggtggtatgggct

SEQ ID NO: 435149 - DNA, 1041 bp, Homo sapiens
cgcgagcgcttccagtcgggttacttctgggggacaagaaaggcaccgtctgaacggtcgagacgctttttcccgctacggttttccccggagctgacaggggcagcaaggtcggagttgatccgagggtccctgcctggtcccggggggacggtcagcctcccgcccggagccgcggggagaggaagcaggtcggggtctccgggacgcgcagacacccagacaccggcggcctcctcccaccaggctggcagtcgctgagccctggcgcctccttaaagccgcagctccgccccgaccgccccgcccgccagtccgtcctcagaccctcccaaccgccgggtccccgccgcctcggcggagtgttgtagagcctcgagcctgcgaggagcgcgccgcccgccagctccctgcgtcccgtcccgcgtccccgcgttcccgcgtcctgcgatccgccgccatggccagtgaggagctggcgtgcaagctggagcgccggctgcggcgcgaggaggccgaggagagtggcccccagctggctcccctcggcgccccagccccggagcccaagcccgagcccgagcctcccgcccgtgcgcccacggccagcgccgacgcggagctgagcgcccagctgagccggcggctggacatcaacgagggcgctgcgcggccccggcgctgcagggtcttcaacccctacacggagttccctgagttcagccgccgcctcatcaaggacctggagagcatgttcaaactcattcccccagtccctccctcttcaccttgctccgtctatgtcttcccagctcagccttttccccactcttaaatactgtactatcaccattagccagtttctaacatctgtttcagggtatccagctgtagatgttcttatcccccatacttgtgagttcttggggttgctcacaaatactaggggtttttgttgtatttttaacaaatatatcctaatgtcatatttattctcttttgtaactgctgtctttacaataaagaaatcatctgcctttc

SEQ ID NO: 435150 - DNA, 2757 bp, Homo sapiens
cgcgagcgcttccagtcgggttacttctgggggacaagaaaggcaccgtctgaacggtcgagacgctttttcccgctacggttttccccggagctgacaggggcagcaaggtcggagttgatccgagggtccctgcctggtcccggggggacggtcagcctcccgcccggagccgcggggagaggaagcaggtcggggtctccgggacgcgcagacacccagacaccggcggcctcctcccaccaggctggcagtcgctgagccctggcgcctccttaaagccgcagctccgccccgaccgccccgcccgccagtccgtcctcagaccctcccaaccgccgggtccccgccgcctcggcggagtgttgtagagcctcgagcctgcgaggagcgcgccgcccgccagctccctgcgtcccgtcccgcgtccccgcgttcccgcgtcctgcgatccgccgccatggccagtgaggagctggcgtgcaagctggagcgccggctgcggcgcgaggaggccgaggagagtggcccccagctggctcccctcggcgccccagccccggagcccaagcccgagcccgagcctcccgcccgtgcgcccacggccagcgccgacgcggagctgagcgcccagctgagccggcggctggacatcaacgagggcgctgcgcggccccggcgctgcagggtcttcaacccctacacggagttccctgagttcagccgccgcctcatcaaggacctggagagcatgttcaaactgtatgacgctgggcgggatggcttcatcgacctgatggagctgaagctgatgatggagaagctgggggccccccagacccacctgggcctgaagagcatgatcaaggaggtggatgaggacttcgatggcaagctcagcttccgggagttcctgctcattttccacaaggccgcggcaggggagctgcaggaggacagtgggctgatggcgctggcaaagctttctgagatcgatgtggccctggagggtgtcaaaggtgccaagaacttctttgaagccaaggtccaagccttgtcatcggccagtaagtttgaagcagagttgaaagctgagcaagatgagcggaagcgggaggaggaggagaggcggctccgccaggcagccttccagaaactcaaggccaacttcaatacatagtcctgctgaccttgccctctgcccacagctgtgcctcacagatgccccgagaagagatgactaggcatcttcatcactgctgtcggtcccctccctgagccagcatctccatccaccaccccgtgccagctcccgtgccagccttcattcctcccagtgtccaagcccctccaggagggtcctggggtgggccagatgcctgcccacctctgtctcctgcctctgctcctctgcccttcttatagccagaacttgtatcttctcagcaaccttcactttgtccttgtccctttaccattccccatcaaagagtagtctgctatatcaatttgtgtagatatgtctgtctttttgggtcctcagagaaaatgcccattttctcggagaattctctgcactcctctctgcttcacattcaacttccctgttctcatctttggtaggattctgccagttgcttttgcatcttctgttcctgggtaatggtgggtcttaatggaggctgggtggaccactgcccgtccactcttcaacaggaggaacagcatgccaccacagtaacacacattagagaaaggacagaggtctgctccttcctgccacctttctcctggccccttagcattcccccagtccctccctcttcaccttgctccgtctatgtcttcccagctcagccttttccccactcttaaatactgtactacttcactgtaagaacgaaagaatagttaggataccaatgagtaaaagggttcctgttcactctgactctgtgcaaattgtattacagtagaccgctgacgttcccaagtgacagatccagggcctttcaaacatccccaaagtcatggccatactcaccattagccagtttctaacatctgtttcagggtatccagctgtagatgttcttatcccccatacttgtgagttcttggggttgctcacaaatactaggggtttttgttgtatttttaacaaatatatcctaatgtcatatttattctcttttgtaactgctgtctttacaataaagaaatcatctgcctttcaaaaaaaaaaaaaaaaaaaaaaaaaaaaaaaacaacaagaaaagggggcggcgccccactaaaaagttccccccgcggagagccccccagatctacccccactaccccagtgttctgtggtcacaaaggtgggccccctagaggagcgccgatattataacaacccacagacaagcggccccgctctttacaacaaccgttcaggtgacatggagaacacaatctgctatcctgggggacactctggtggggagaagacccacccccaaatcctggcggggggtgggaaccatatgttggaccaatcatctccccctaaacagaatttttgaacagcgccccatgggagtaaaaattaagcaactttctcacggtgttcatcaacgggtgtttaaccactaagctgggcaatattctggttcgcagtgatttgaaaaaaatgttcgtgacctccgacggaagtatttgctctttcgacgaacacatcttttataacccaggggaacttttattttatataag

SEQ ID NO: 435151 - DNA, 2314 bp, Homo sapiens
cgcgagcgcttccagtcgggttacttctgggggacaagaaaggcaccgtctgaacggtcgagacgctttttcccgctacggttttccccggagctgacaggggcagcaaggtcggagttgatccgagggtccctgcctggtcccggggggacggtcagcctcccgcccggagccgcggggagaggaagcaggtcggggtctccgggacgcgcagacacccagacaccggcggcctcctcccaccaggctggcagtcgctgagccctggcgcctccttaaagccgcagctccgccccgaccgccccgcccgccagtccgtcctcagaccctcccaaccgccgggtccccgccgcctcggcggagtgttgtagagcctcgagcctgcgaggagcgcgccgcccgccagctccctgcgtcccgtcccgcgtccccgcgttcccgcgtcctgcgatccgccgccatggccagtgaggagctggcgtgcaagctggagcgccggctgcggcgcgaggaggccgaggagagtggcccccagctggctcccctcggcgccccagccccggagcccaagcccgagcccgagcctcccgcccgtgcgcccacggccagcgccgacgcggagctgagcgcccagctgagccggcggctggacatcaacgagggcgctgcgcggccccggcgctgcagggtcttcaacccctacacggagttccctgagttcagccgccgcctcatcaaggacctggagagcatgttcaaactaatctgaaacggtgatgtcatggatgtcctgccagtgccagagtcccgcgttaccaagacaccagtgaaacccaaaaaggtatgacgctgggcgggatggcttcatcgacctgatggagctgaagctgatgatggagaagctgggggccccccagacccacctgggcctgaagagcatgatcaaggaggtggatgaggacttcgatggcaagctcagcttccgggagttcctgctcattttccacaaggccgcggcaggggagctgcaggaggacagtgggctgatggcgctggcaaagctttctgagatcgatgtggccctggagggtgtcaaaggtgccaagaacttctttgaagccaaggtccaagccttgtcatcggccagtaagtttgaagcagagttgaaagctgagcaagatgagcggaagcgggaggaggaggagaggcggctccgccaggcagccttccagaaactcaaggccaacttcaatacatagtcctgctgaccttgccctctgcccacagctgtgcctcacagatgccccgagaagagatgactaggcatcttcatcactgctgtcggtcccctccctgagccagcatctccatccaccaccccgtgccagctcccgtgccagccttcattcctcccagtgtccaagcccctccaggagggtcctggggtgggccagatgcctgcccacctctgtctcctgcctctgctcctctgcccttcttatagccagaacttgtatcttctcagcaaccttcactttgtccttgtccctttaccattccccatcaaagagtagtctgctatatcaatttgtgtagatatgtctgtctttttgggtcctcagagaaaatgcccattttctcggagaattctctgcactcctctctgcttcacattcaacttccctgttctcatctttggtaggattctgccagttgcttttgcatcttctgttcctgggtaatggtgggtcttaatggaggctgggtggaccactgcccgtccactcttcaacaggaggaacagcatgccaccacagtaacacacattagagaaaggacagaggtctgctccttcctgccacctttctcctggccccttagcattcccccagtccctccctcttcaccttgctccgtctatgtcttcccagctcagccttttccccactcttaaatactgtactacttcactgtaagaacgaaagaatagttaggataccaatgagtaaaagggttcctgttcactctgactctgtgcaaattgtattacagtagaccgctgacgttcccaagtgacagatccagggcctttcaaacatccccaaagtcatggccatactcaccattagccagtttctaacatctgtttcagggtatccagctgtagatgttcttatcccccatacttgtgagttcttggggttgctcacaaatactaggggtttttgttgtatttttaacaaatatatcctaatgtcatatttattctcttttgtaactgctgtctttacaataaagaaatcatctgcctttc

SEQ ID NO: 435152 - DNA, 1650 bp, Homo sapiens
aaagccctgaagcgctctgaggagagaggggttcctctggagcaggtgacccacattggcctcgcagagcgggaggtatttgagtcatttttcgatgaatgaagccaaaggaattacatgtttcggagactaacgagtgtcctttcatcccggtcatgcattcctttgaccctgcaggtatgacgctgggcgggatggcttcatcgacctgatggagctgaagctgatgatggagaagctgggggccccccagacccacctgggcctgaagagcatgatcaaggaggtggatgaggacttcgatggcaagctcagcttccgggagttcctgctcattttccacaaggccgcggcaggggagctgcaggaggacagtgggctgatggcgctggcaaagctttctgagatcgatgtggccctggagggtgtcaaaggtgccaagaacttctttgaagccaaggtccaagccttgtcatcggccagtaagtttgaagcagagttgaaagctgagcaagatgagcggaagcgggaggaggaggagaggcggctccgccaggcagccttccagaaactcaaggccaacttcaatacatagtcctgctgaccttgccctctgcccacagctgtgcctcacagatgccccgagaagagatgactaggcatcttcatcactgctgtcggtcccctccctgagccagcatctccatccaccaccccgtgccagctcccgtgccagccttcattcctcccagtgtccaagcccctccaggagggtcctggggtgggccagatgcctgcccacctctgtctcctgcctctgctcctctgcccttcttatagccagaacttgtatcttctcagcaaccttcactttgtccttgtccctttaccattccccatcaaagagtagtctgctatatcaatttgtgtagatatgtctgtctttttgggtcctcagagaaaatgcccattttctcggagaattctctgcactcctctctgcttcacattcaacttccctgttctcatctttggtaggattctgccagttgcttttgcatcttctgttcctgggtaatggtgggtcttaatggaggctgggtggaccactgcccgtccactcttcaacaggaggaacagcatgccaccacagtaacacacattagagaaaggacagaggtctgctccttcctgccacctttctcctggccccttagcattcccccagtccctccctcttcaccttgctccgtctatgtcttcccagctcagccttttccccactcttaaatactgtactacttcactgtaagaacgaaagaatagttaggataccaatgagtaaaagggttcctgttcactctgactctgtgcaaattgtattacagtagaccgctgacgttcccaagtgacagatccagggcctttcaaacatccccaaagtcatggccatactcaccattagccagtttctaacatctgtttcagggtatccagctgtagatgttcttatcccccatacttgtgagttcttggggttgctcacaaatactaggggtttttgttgtatttttaacaaatatatcctaatgtcatatttattctcttttgtaactgctgtctttacaataaagaaatcatctgcctttc

SEQ ID NO: 435153 - DNA, 2183 bp, Homo sapiens
cgcgagcgcttccagtcgggttacttctgggggacaagaaaggcaccgtctgaacggtcgagacgctttttcccgctacggttttccccggagctgacaggggcagcaaggtcggagttgatccgagggtccctgcctggtcccggggggacggtcagcctcccgcccggagccgcggggagaggaagcaggtcggggtctccgggacgcgcagacacccagacaccggcggcctcctcccaccaggctggcagtcgctgagccctggcgcctccttaaagccgcagctccgccccgaccgccccgcccgccagtccgtcctcagaccctcccaaccgccgggtccccgccgcctcggcggagtgttgtagagcctcgagcctgcgaggagcgcgccgcccgccagctccctgcgtcccgtcccgcgtccccgcgttcccgcgtcctgcgatccgccgccatggccagtgaggagctggcgtgcaagctggagcgccggctgcggcgcgaggaggccgaggagagtggcccccagctggctcccctcggcgccccagccccggagcccaagcccgagcccgagcctcccgcccgtgcgcccacggccagcgccgacgcggagctgagcgcccagctgagccggcggctggacatcaacgagggcgctgcgcggccccggcgctgcagggtcttcaacccctacacggagttccctgagttcagccgccgcctcatcaaggacctggagagcatgttcaaactgtatgacgctgggcgggatggcttcatcgacctgatggagctgaagctgatgatggagaagatgaggacttcgatggcaagctcagcttccgggagttcctgctcattttccacaaggccgcggcaggggagctgcaggaggacagtgggctgatggcgctggcaaagctttctgagatcgatgtggccctggagggtgtcaaaggtgccaagaacttctttgaagccaaggtccaagccttgtcatcggccagtaagtttgaagcagagttgaaagctgagcaagatgagcggaagcgggaggaggaggagaggcggctccgccaggcagccttccagaaactcaaggccaacttcaatacatagtcctgctgaccttgccctctgcccacagctgtgcctcacagatgccccgagaagagatgactaggcatcttcatcactgctgtcggtcccctccctgagccagcatctccatccaccaccccgtgccagctcccgtgccagccttcattcctcccagtgtccaagcccctccaggagggtcctggggtgggccagatgcctgcccacctctgtctcctgcctctgctcctctgcccttcttatagccagaacttgtatcttctcagcaaccttcactttgtccttgtccctttaccattccccatcaaagagtagtctgctatatcaatttgtgtagatatgtctgtctttttgggtcctcagagaaaatgcccattttctcggagaattctctgcactcctctctgcttcacattcaacttccctgttctcatctttggtaggattctgccagttgcttttgcatcttctgttcctgggtaatggtgggtcttaatggaggctgggtggaccactgcccgtccactcttcaacaggaggaacagcatgccaccacagtaacacacattagagaaaggacagaggtctgctccttcctgccacctttctcctggccccttagcattcccccagtccctccctcttcaccttgctccgtctatgtcttcccagctcagccttttccccactcttaaatactgtactacttcactgtaagaacgaaagaatagttaggataccaatgagtaaaagggttcctgttcactctgactctgtgcaaattgtattacagtagaccgctgacgttcccaagtgacagatccagggcctttcaaacatccccaaagtcatggccatactcaccattagccagtttctaacatctgtttcagggtatccagctgtagatgttcttatcccccatacttgtgagttcttggggttgctcacaaatactaggggtttttgttgtatttttaacaaatatatcctaatgtcatatttattctcttttgtaactgctgtctttacaataaagaaatcatctgcctttc

SEQ ID NO: 435154 - DNA, 1520 bp, Homo sapiens
ttgaaaggctggaaatgcatgaggaggaggaacaagaacatgtgtgtctggacaggtgcggcagccctggcggagcccactgtccccattcttatggaccgcctcctggctgctgacccagggactgttctcctaggactggagccttggacacttgggtttgggagtgaacgagaaaaaagcttcatggggtgcctcttgccggcgttcctaggagccgcggcaggggagctgcaggaggacagtgggctgatggcgctggcaaagctttctgagatcgatgtggccctggagggtgtcaaaggtgccaagaacttctttgaagccaaggtccaagccttgtcatcggccagtaagtttgaagcagagttgaaagctgagcaagatgagcggaagcgggaggaggaggagaggcggctccgccaggcagccttccagaaactcaaggccaacttcaatacatagtcctgctgaccttgccctctgcccacagctgtgcctcacagatgccccgagaagagatgactaggcatcttcatcactgctgtcggtcccctccctgagccagcatctccatccaccaccccgtgccagctcccgtgccagccttcattcctcccagtgtccaagcccctccaggagggtcctggggtgggccagatgcctgcccacctctgtctcctgcctctgctcctctgcccttcttatagccagaacttgtatcttctcagcaaccttcactttgtccttgtccctttaccattccccatcaaagagtagtctgctatatcaatttgtgtagatatgtctgtctttttgggtcctcagagaaaatgcccattttctcggagaattctctgcactcctctctgcttcacattcaacttccctgttctcatctttggtaggattctgccagttgcttttgcatcttctgttcctgggtaatggtgggtcttaatggaggctgggtggaccactgcccgtccactcttcaacaggaggaacagcatgccaccacagtaacacacattagagaaaggacagaggtctgctccttcctgccacctttctcctggccccttagcattcccccagtccctccctcttcaccttgctccgtctatgtcttcccagctcagccttttccccactcttaaatactgtactacttcactgtaagaacgaaagaatagttaggataccaatgagtaaaagggttcctgttcactctgactctgtgcaaattgtattacagtagaccgctgacgttcccaagtgacagatccagggcctttcaaacatccccaaagtcatggccatactcaccattagccagtttctaacatctgtttcagggtatccagctgtagatgttcttatcccccatacttgtgagttcttggggttgctcacaaatactaggggtttttgttgtatttttaacaaatatatcctaatgtcatatttattctcttttgtaactgctgtctttacaataaagaaatcatctgcctttc

SEQ ID NO: 435155 - DNA, 2180 bp, Homo sapiens
cgcgagcgcttccagtcgggttacttctgggggacaagaaaggcaccgtctgaacggtcgagacgctttttcccgctacggttttccccggagctgacaggggcagcaaggtcggagttgatccgagggtccctgcctggtcccggggggacggtcagcctcccgcccggagccgcggggagaggaagcaggtcggggtctccgggacgcgcagacacccagacaccggcggcctcctcccaccaggctggcagtcgctgagccctggcgcctccttaaagccgcagctccgccccgaccgccccgcccgccagtccgtcctcagaccctcccaaccgccgggtccccgccgcctcggcggagtgttgtagagcctcgagcctgcgaggagcgcgccgcccgccagctccctgcgtcccgtcccgcgtccccgcgttcccgcgtcctgcgatccgccgccatggccagtgaggagctggcgtgcaagctggagcgccggctgcggcgcgaggaggccgaggagagtggcccccagctggctcccctcggcgccccagccccggagcccaagcccgagcccgagcctcccgcccgtgcgcccacggccagcgccgacgcggagctgagcgcccagctgagccggcggctggacatcaacgagggcgctgcgcggccccggcgctgcagggtcttcaacccctacacggagttccctgagttcagccgccgcctcatcaaggacctggagagcatgttcaaactgtatgacgctgggcgggatggcttcatcgacctgatggagctgaagctgatgatggagaagctgggggccccccagacccacctgggcctgaagagcatgatcaaggaggtggatgaggacttcgatggcaagctcagcttccgggagttcctgctcattttccacaaggccgcggcaggggagctgcaggaggacagtgggctgatggcgctggcaaagctttctgagatcgatgtggccctggagggtgtcaaaggtgccaagaacttctttgaagccaaggtccaagccttgtcatcggccagtaagtttgaagcagagttgaaagctgagcaagatgagcggaagcgggaggaggaggagaggcggctccgccaggcagccttccagaaactcaaggccaacttcaatacatagtcctgctgaccttgccctctgcccacagctgtgcctcacagatgccccgagaagagatgactaggcatcttcatcactgctgtcggtcccctccctgagccagcatctccatccaccaccccgtgccagctcccgtgccagccttcattcctcccagtgtccaagcccctccaggagggtcctggggtgggccagatgcctgcccacctctgtctcctgcctctgctcctctgcccttcttatagccagaacttgtatcttctcagcaaccttcactttgtccttgtccctttaccattccccatcaaagagtagtctgctatatcaatttgtgtagatatgtctgtctttttgggtcctcagagaaaatgcccattttctcggagaattctctgcactcctctctgcttcacattcaacttccctgttctcatctttggtaggattctgccagttgcttttgcatcttctgttcctgggtaatggtgggtcttaatggaggctgggtggaccactgcccgtccactcttcaacaggaggaacagcatgccaccacagtaacacacattagagaaaggacagaggtctgctccttcctgccacctttctcctggccccttagcattcccccagtccctccctcttcaccttgctccgtctatgtcttcccagctcagccttttccccactcttaaatactgtactacttcactgtaagaacgaaagaatagttaggataccaatgatgacgttcccaagtgacagatccagggcctttcaaacatccccaaagtcatggccatactcaccattagccagtttctaacatctgtttcagggtatccagctgtagatgttcttatcccccatacttgtgagttcttggggttgctcacaaatactaggggtttttgttgtatttttaacaaatatatcctaatgtcatatttattctcttttgtaactgctgtctttacaataaagaaatcatctgcctttc

SEQ ID NO: 435156 - DNA, 1779 bp, Homo sapiens
cgcgagcgcttccagtcgggttacttctgggggacaagaaaggcaccgtctgaacggtcgagacgctttttcccgctacggttttccccggagctgacaggggcagcaaggtcggagttgatccgagggtccctgcctggtcccggggggacggtcagcctcccgcccggagccgcggggagaggaagcaggtcggggtctccgggacgcgcagacacccagacaccggcggcctcctcccaccaggctggcagtcgctgagccctggcgcctccttaaagccgcagctccgccccgaccgccccgcccgccagtccgtcctcagaccctcccaaccgccgggtccccgccgcctcggcggagtgttgtagagcctcgagcctgcgaggagcgcgccgcccgccagctccctgcgtcccgtcccgcgtccccgcgttcccgcgtcctgcgatccgccgccatggccagtgaggagctggcgtgcaagctggagcgccggctgcggcgcgaggaggccgaggagagtggcccccagctggctcccctcggcgccccagccccggagcccaagcccgagcccgagcctcccgcccgtgcgcccacggccagcgccgacgcggagctgagcgcccagctgagccggcggctggacatcaacgagggcgctgcgcggccccggcgctgcagggtcttcaacccctacacggagttccctgagttcagccgccgcctcatcaaggacctggagagcatgttcaaactgtatgacgctgggcgggatggcttcatcgacctgatggagctgaagctgatgatggagaagctgggggccccccagacccacctgggccagctcccgtgccagccttcattcctcccagtgtccaagcccctccaggagggtcctggggtgggccagatgcctgcccacctctgtctcctgcctctgctcctctgcccttcttatagccagaacttgtatcttctcagcaaccttcactttgtccttgtccctttaccattccccatcaaagagtagtctgctatatcaatttgtgtagatatgtctgtctttttgggtcctcagagaaaatgcccattttctcggagaattctctgcactcctctctgcttcacattcaacttccctgttctcatctttggtaggattctgccagttgcttttgcatcttctgttcctgggtaatggtgggtcttaatggaggctgggtggaccactgcccgtccactcttcaacaggaggaacagcatgccaccacagtaacacacattagagaaaggacagaggtctgctccttcctgccacctttctcctggccccttagcattcccccagtccctccctcttcaccttgctccgtctatgtcttcccagctcagccttttccccactcttaaatactgtactacttcactgtaagaacgaaagaatagttaggataccaatgagtaaaagggttcctgttcactctgactctgtgcaaattgtattacagtagaccgctgacgttcccaagtgacagatccagggcctttcaaacatccccaaagtcatggccatactcaccattagccagtttctaacatctgtttcagggtatccagctgtagatgttcttatcccccatacttgtgagttcttggggttgctcacaaatactaggggtttttgttgtatttttaacaaatatatcctaatgtcatatttattctcttttgtaactgctgtctttacaataaagaaatcatctgcctttc

SEQ ID NO: 435157 - DNA, 1384 bp, Homo sapiens
cgcgagcgcttccagtcgggttacttctgggggacaagaaaggcaccgtctgaacggtcgagacgctttttcccgctacggttttccccggagctgacaggggcagcaaggtcggagttgatccgagggtccctgcctggtcccggggggacggtcagcctcccgcccggagccgcggggagaggaagcaggtcggggtctccgggacgcgcagacacccagacaccggcggcctcctcccaccaggctggcagtcgctgagccctggcgcctccttaaagccgcagctccgccccgaccgccccgcccgccagtccgtcctcagaccctcccaaccgccgggtccccgccgcctcggcggagtgttgtagagcctcgagcctgcgaggagcgcgccgcccgccagctccctgcgtcccgtcccgcgtccccgcgttcccgcgtcctgcgatccgccgccatggccagtgaggagctggcgtgcaagctggagcgccggctgcggcgcgaggaggccgaggagagtggcccccagctggctcccctcggcgccccagccccggagcccaagcccgagcccgagcctcccgcccgtgcgcccacggccagcgccgacgcggagctgagcgcccagctgagccggcggctggacatcaacgagggcgctgcgcggccccggcgctgcagggtcttcaacccctacacggagttccctgagttcagccgccgcctcatcaaggacctggagagcatgttcaaactgtatgacgctgggcgggatggcttcatcgacctgatggagctgaagctgatgatggagaagctgggggccccccagacccacctgggcctgaagagcatgatcaaggaggtggatgaggacttcgatggcaagctcagcttccgggagttcctgctcattttccacaaggccgcggcaggggagctgcaggaggacagtgggctgatggcgctggcaaagctttctgagatcgatgtggccctggagggtgtcaaaggtgccaagaacttctttgaagccaaggtaggtgcttagttccttctgtgaggagcaaccactcccagccttcacgctgcccaccagactgcagctgtcattttcatctcagcagagcacacctgcagaaacagaccaggagggtcctcccagtgctctgccaaccagcaagtgggtgccagtccacctgagttcagactctgcctcctccatctccctaccctgtccactctgagcctcggtgtcttcatctgtatgatggaggggtgacaatagaattgcctgaatgattaaatgagttcatgtacatgaaagcatttaggaagtgcctggctcactgtgagcccttcataggtggtatgggct

SEQ ID NO: 435158 - DNA, 1426 bp, Homo sapiens
ggcagtacctggggccccggccgggggcggggctgcggatgctcccacttcccccggctccagccggcgcaggcagcggcggcagcagcaggcgagcctcggccccgcaaggccatgaaggtgaagaagggcggcggtggggccgggacggcgacggagtccgctccggggccctcgggccagagcgtggcccccataccacagccgcctgcggaatccgaatctgggtccgagtcggagccggacgcaggcccagggcccaggccggggccgctgcagaggaagcagccgatcgggccggaggacgtgctggggctgcagcggatcaccggtgactacctctgctcccctgaggagaatatctacaagatcgactttgtcaggtttaagattcgggacatggactcaggcactgtcctctttgaaatcaagaagcccccagtctcagaacggttgcccatcaaccggcgggacctggaccccaatgctgggcgctttgtccgctaccagttcacgcctgccttcctccgcctgaggcaggtgggagccacggtggagttcacagtgggagacaagcctgtcaacaacttccgcatgatcgagaggcactacttccgcaaccagctactcaaaagcttcgacttccactttggcttctgcatccccagcagcaagaacacctgcgagcacatttacgacttcccccctctctccgaggagctgatcagcgagatgatccgccacccgtatgagacccagtctgacagcttctacttcgtggatgaccggctggtgatgcacaataaagcagactattcctacagcgggacaccctgaccccacggctgccctgaccccaggaggctccagttctgggctgggagctgtgacctccccaacgctcacccctcaaccccaagtcctctgcttggggagttctccaggagctccggaccctgagtcaatgttgggaggaagggtacctggtgtccccagtcaagcccatgaagcccatgcggcctgctacatggggtggggtcgtagggaggctgtttgcctccacgtctaggaaggcctgtgagaggagcagtcaggacttccggacaacttagctgggccctacttgggcccaagtttcagaatagtgttcccctatcaaggctgtgactagatcaggcagggatccattccctgtcccctgcccactaccttcaggccatttagagttgtaaatttacaaagatccacggtgggctccagctgccaagccacccaagggagtctgggccctaggcctagccccatccctccccatgaggggccaagacactgcctaaggtgtgggagggactggctgagattgcagcccatggtaggagctggaccaactgtatatagttttcaataaactttttccttttctgtt

SEQ ID NO: 435159 - DNA, 1471 bp, Homo sapiens
ggcagtacctggggccccggccgggggcggggctgcggatgctcccacttcccccggctccagccggcgcaggcagcggcggcagcagcaggcgagcctcggccccgcaaggccatgaaggtgaagaagggcggcggtggggccgggacggcgacggagtccgctccggggccctcgggccagagcgtggcccccataccacagccgcctgcggaatccgaatctgggtccgagtcggagccggacgcaggcccagggcccaggccggggccgctgcagaggaagcagccgatcgggccggaggacgtgctggggctgcagcggatcaccggtgactacctctgctcccctgaggagaatatctacaagatcgactttgtcaggtttaagattcgggacatggactcaggcactgtcctctttgaaatcaagaagcccccagtctcagaacggttgcccatcaaccggcgggacctggaccccaatgctgggcgctttgtccgctaccagttcacgcctgccttcctccgcctgaggcaggtgggagccacggtggagttcacagtgggagacaagcctgtcaacaacttccgcatgatcgagaggcactacttccgcaaccagctactcaaaagcttcgacttccactttggcttctgcatccccagcagcaagaacacctgcgagcacatttacgacttcccccctctctccgaggagctgatcagcgagatgatccgccacccgtatgagacccagtctgacagcttctacttcgtggatgaccggctggtgatgcacaataaagcagactattcctacagcgggacaccctgaccccacggctgccctgaccccaggaggctccagttctgggctgggagctgtgacctccccaacgctcacccctcaaccccaagtcctctgcttggggagttctccaggagctccggaccctgagtcaatgttgggaggaagggtacctggtgtccccagtcaagcccatgaagcccatgcggcctgctacatggggtggggtcgtagggaggctgtttgcctccacgtctaggaaggcctgtgagaggagcagtcaggacttccggacaacttagctgggccctacttgggcccaagtttcagaatagtgttcccctatcaaggctgtgactagatcaggcagggatccattccctgtcccctgcccactaccttcaggccatttagagttgtaaatttacaaagatccacggtgggctccagctgccaagccacccaagggagtctgggccctaggcctagccccatccctccccatgaggggccaagacactgcctaaggtgtgggagggactggctgagattgcagcccatggtaggagctggaccaactgtatatagttttcaataaactttttccttttctgttaaaaaaaaaacgaacaaccataccaccacaaacaccaacaggggg

SEQ ID NO: 435160 - DNA, 1693 bp, Homo sapiens
ggcagtacctggggccccggccgggggcggggctgcggatgctcccacttcccccggctccagccggcgcaggcagcggcggcagcagcaggcgagcctcggccccgcaaggccatgaaggtgaagaagggcggcggtggggccgggacggcgacggagtccgctccggggccctcgggccagagcgtggcccccataccacagccgcctgcggaatccgaatctgggtccgagtcggagccggacgcaggcccagggcccaggccggggccgctgcagaggaagcagccgatcgggccggaggacgtgctggggctgcagcggatcaccggtgactacctctgctcccctgaggagaatatctacaagatcgactttgtcaggtttaagattcgggacatggactcaggcactgtcctctttgaaatcaagaagcccccagtctcagaacggttgcccatcaaccggcgggacctggaccccaatgctgggcgctttgtccgctaccagttcacgcctgccttcctccgcctgaggcaggtgggagccacggtggagttcacagtgggagacaagcctgtcaacaacttccgcatgatcgagaggcactacttccgcaaccagctactcaaaagcttcgacttccactttggcttctgcatccccagcagcaagaacacctgcgagcacatttacgacttcccccctctctccgaggagctgagtgcgcgggcagggtcttctgggagtggggaagtgggggcgtctagagactgagctgcgggagggagagggacttgtgggtctgatcccatttctccccaccctggggctcttctgtgtctgccaccattcccatatcatccgtagagaaagaggctggggatatttcaggctgtttggctgtccctgtaccccagtcctgaagcccctgcagtggcgggactcaagctcctgacctttgcccggcctggctgggcctctcttgcagtcagcgagatgatccgccacccgtatgagacccagtctgacagcttctacttcgtggatgaccggctggtgatgcacaataaagcagactattcctacagcgggacaccctgaccccacggctgccctgaccccaggaggctccagttctgggctgggagctgtgacctccccaacgctcacccctcaaccccaagtcctctgcttggggagttctccaggagctccggaccctgagtcaatgttgggaggaagggtacctggtgtccccagtcaagcccatgaagcccatgcggcctgctacatggggtggggtcgtagggaggctgtttgcctccacgtctaggaaggcctgtgagaggagcagtcaggacttccggacaacttagctgggccctacttgggcccaagtttcagaatagtgttcccctatcaaggctgtgactagatcaggcagggatccattccctgtcccctgcccactaccttcaggccatttagagttgtaaatttacaaagatccacggtgggctccagctgccaagccacccaagggagtctgggccctaggcctagccccatccctccccatgaggggccaagacactgcctaaggtgtgggagggactggctgagattgcagcccatggtaggagctggaccaactgtatatagttttcaataaactttttccttttctgtt

SEQ ID NO: 435161 - DNA, 1598 bp, Homo sapiens
ctgtgtggccccctttacaggtggttctcaaaggcagggtaccagagaagttgatacactgagttgcagtagaagagacaggtcagactgcaggaagttgttcccatatgagaagagaggctcccaccaggctggatacctaattctcccaaagtcatctagccagccttggcagagcggaggccagaatgaggaccctcaactccagagtgggagagagagtgttcaggaggtggccttgtcctctacccttctctgccctgcccttccctggcccccagagaccagtaggatggcactccttatcccctgttagatccccatggcggagttatgtctcttccacactgggggtgtaccccaagggcagggactgaggtccctctttccagagggcagtgatcccagggatgagaagatggtagctactctggggtcccacacaagctgacctggcagcaggggctttgcggccccttccttgctcagctgcctgtttcccctagactacctctgctcccctgaggagaatatctacaagatcgactttgtcaggtttaagattcgggacatggactcaggcactgtcctctttgaaatcaagaagcccccagtctcagaacggttgcccatcaaccggcgggacctggaccccaatgctgggcgctttgtccgctaccagttcacgcctgccttcctccgcctgaggcaggtgggagccacggtggagttcacagtgggagacaagcctgtcaacaacttccgcatgatcgagaggcactacttccgcaaccagctactcaaaagcttcgacttccactttggcttctgcatccccagcagcaagaacacctgcgagcacatttacgacttcccccctctctccgaggagctgatcagcgagatgatccgccacccgtatgagacccagtctgacagcttctacttcgtggatgaccggctggtgatgcacaataaagcagactattcctacagcgggacaccctgaccccacggctgccctgaccccaggaggctccagttctgggctgggagctgtgacctccccaacgctcacccctcaaccccaagtcctctgcttggggagttctccaggagctccggaccctgagtcaatgttgggaggaagggtacctggtgtccccagtcaagcccatgaagcccatgcggcctgctacatggggtggggtcgtagggaggctgtttgcctccacgtctaggaaggcctgtgagaggagcagtcaggacttccggacaacttagctgggccctacttgggcccaagtttcagaatagtgttcccctatcaaggctgtgactagatcaggcagggatccattccctgtcccctgcccactaccttcaggccatttagagttgtaaatttacaaagatccacggtgggctccagctgccaagccacccaagggagtctgggccctaggcctagccccatccctccccatgaggggccaagacactgcctaaggtgtgggagggactggctgagattgcagcccatggtaggagctggaccaactgtatatagttttcaataaactttttccttttctgtt

SEQ ID NO: 435162 - DNA, 1915 bp, Homo sapiens
ggcagtacctggggccccggccgggggcggggctgcggatgctcccacttcccccggctccagccggcgcaggcagcggcggcagcagcaggcgagcctcggccccgcaaggccatgaaggtgaagaagggcggcggtggggccgggacggcgacggagtccgctccggggccctcgggccagagcgtggcccccataccacagccgcctgcggaatccgaatctgggtccgagtcggagccggacgcaggcccagggcccaggccggggccgctgcagaggaagcagccgatcgggccggaggacgtgctggggctgcagcggatcaccggtgactacctctgctcccctgaggagaatatctacaagatcgactttgtcaggtttaagattcgggacatggactcaggcactgtcctctttgaaatcaagaagcccccagtctcaggtgagtgggctgggtgggccattgatggggaggcagataggagctgcggagtgggctgcccaggaatccttgggccacagaggagtccacagagctggggcttggaccccagcattctcaggagtctgcaggcaggggggccctttcttttccttcccatatgtttctgaggctggacatcttgcgaggtcagccctaccccttcggtccctgccaacctgccctctgcagggctctctgggaactgcagtcctacgggtcccaggcctcagcatcctgtggcccggggaagcacagtggcgattgggaacatgcagacctagaacccctaggtggcactatttggccaatggtctgagccctcagtgtgccccggaatttcttggggagtttaaaaaaaatcagatagatggggacccaagggtagaaccctgggtggacaagggcccagcctgaagcccactgagccccagctggggtacattgcagaacggttgcccatcaaccggcgggacctggaccccaatgctgggcgctttgtccgctaccagttcacgcctgccttcctccgcctgaggcaggtgggagccacggtggagttcacagtgggagacaagcctgtcaacaacttccgcatgatcgagaggcactacttccgcaaccagctactcaaaagcttcgacttccactttggcttctgcatccccagcagcaagaacacctgcgagcacatttacgacttcccccctctctccgaggagctgatcagcgagatgatccgccacccgtatgagacccagtctgacagcttctacttcgtggatgaccggctggtgatgcacaataaagcagactattcctacagcgggacaccctgaccccacggctgccctgaccccaggaggctccagttctgggctgggagctgtgacctccccaacgctcacccctcaaccccaagtcctctgcttggggagttctccaggagctccggaccctgagtcaatgttgggaggaagggtacctggtgtccccagtcaagcccatgaagcccatgcggcctgctacatggggtggggtcgtagggaggctgtttgcctccacgtctaggaaggcctgtgagaggagcagtcaggacttccggacaacttagctgggccctacttgggcccaagtttcagaatagtgttcccctatcaaggctgtgactagatcaggcagggatccattccctgtcccctgcccactaccttcaggccatttagagttgtaaatttacaaagatccacggtgggctccagctgccaagccacccaagggagtctgggccctaggcctagccccatccctccccatgaggggccaagacactgcctaaggtgtgggagggactggctgagattgcagcccatggtaggagctggaccaactgtatatagttttcaataaactttttccttttctgtt

SEQ ID NO: 435163 - DNA, 1958 bp, Homo sapiens
  misc_feature (1449)..(1449): n is a, c, g, or t
  misc_feature (1455)..(1455): n is a, c, g, or t
ggcagtacctggggccccggccgggggcggggctgcggatgctcccacttcccccggctccagccggcgcaggcagcggcggcagcagcaggcgagcctcggccccgcaaggccatgaaggtgaagaagggcggcggtggggccgggacggcgacggagtccgctccggggccctcgggccagagcgtggcccccataccacagccgcctgcggaatccgaatctgggtccgagtcggagccggacgcaggcccagggcccaggccggggccgctgcagaggaagcagccgatcgggccggaggacgtgctggggctgcagcggatcaccggtgactacctctgctcccctgaggagaatatctacaagatcgactttgtcaggtttaagattcgggacatggactcaggcactgtcctctttgaaatcaagaagcccccagtctcagaacggttgcccatcaaccggcgggacctggaccccaatgctgggcgctttgtccgctaccagttcacgcctgccttcctccgcctgaggcaggtgggagccacggtggagttcacagtgggagacaagcctgtcaacaacttccgcatgatcgagaggcactacttccgcaaccagctactcaaaagcttcgacttccactttggcttctgcatccccagcagcaagaacacctgcgagcacatttacgacttcccccctctctccgaggagctgatcagcgagatgatccgccacccgtatgagacccagtctgacagcttctacttcgtggatgaccggctggtgatgcacaataaagcagactattcctacagcgggacaccctgaccccacggctgccctgaccccaggaggctccagttctgggctgggagctgtgacctccccaacgctcacccctcaaccccaagtcctctgcttggggagttctccaggagctccggaccctgagtcaatgttgggaggaagggtacctggtgtccccagtcaagcccatgaagcccatgcggcctgctacatggggtggggtcgtagggaggctgtttgcctccacgtctaggaaggcctgtgagaggagcagtcaggacttccggacaacttagctgggccctacttgggcccaagtttcagaatagtgttcccctatcaaggctgtgactagatcaggcagggatccattccctgtcccctgcccactaccttcaggccatttagagttgtaaatttacaaagatccacggtgggctccagctgccaagccacccaagggagtctgggccctaggcctagccccatccctccccatgaggggccaagacactgcctaaggtgtgggagggactggctgagattgcagcccatggtaggagctggaccaactgtatatagttttcaataaactttttccttttctgttaaaaaaaaacaaaaaaaaaaaanaaaaanaaaaaaaaaaaaaaaaaaaaaacaaaaaaaaaaacaaaaagagaggaggggcgcgcgcgccccacaaatactatccccgcgggggggcccacaaagctagagccgcgcaccccgcctttttttgaacaaggggggcgccccaatgggaggggctttatataaaaagagcgagagcgacgagcgagcgcggcgcgggtataaaacacagcgggcgcgcgcgggagacaaacacgcgcgccagggaggaaatcattgggatcagagaacaccccctacacggggggggggacaacaaatatggggaaaaaacccccgccccaccaaggagaatcagaaacgcacccaccaagaggagaaggataaaactaacaacattcgcggcgtgttataatgtcgcggtgatcacaaacacacccggataattctggcgggccgcgctaagaaaacatcgtatgcgctacacagtagcactttgtacccgaaacaaaatttttaacacaggg

SEQ ID NO: 435164 - DNA, 2066 bp, Homo sapiens
ggcagtacctggggccccggccgggggcggggctgcggatgctcccacttcccccggctccagccggcgcaggcagcggcggcagcagcaggcgagcctcggccccgcaaggccatgaaggtgaagaagggcggcggtggggccgggacggcgacggagtccgctccggggccctcgggccagagcgtggcccccataccacagccgcctgcggaatccgaatctgggtccgagtcggagccggacgcaggcccagggcccaggccggggccgctgcagaggaagcagccgatcgggccggaggacgtgctggggctgcagcggatcaccggtgactacctctgctcccctgaggagaatatctacaagatcgactttgtcaggtttaagattcgggacatggactcaggcactgtcctctttgaaatcaagaagcccccagtctcaggtgagtgggctgggtgggccattgatggggaggcagataggagctgcggagtgggctgcccaggaatccttgggccacagaggagtccacagagctggggcttggaccccagcattctcaggagtctgcaggcaggggggccctttcttttccttcccatatgtttctgaggctggacatcttgcgaggtcagccctaccccttcggtccctgccaacctgccctctgcagggctctctgggaactgcagtcctacgggtcccaggcctcagcatcctgtggcccggggaagcacagtggcgattgggaacatgcagacctagaacccctaggtggcactatttggccaatggtctgagccctcagtgtgccccggaatttcttggggagtttaaaaaaaatcagatagatggggacccaagggtagaaccctgggtggacaagggcccagcctgaagcccactgagccccagctggggtacattgcagaacggttgcccatcaaccggcgggacctggaccccaatgctgggcgctttgtccgctaccagttcacgcctgccttcctccgcctgaggcaggtgggagccacgtgagtcgctgggctatgggtggtggtgggggtgagggagagggtgtgacgtgggcccttctcagcctctcgtaggggtggcctgtcctgagcctggctggctagttgacttcaaggaccagacttagccctgcctccttttcttgctcagggtggagttcacagtgggagacaagcctgtcaacaacttccgcatgatcgagaggcactacttccgcaaccagctactcaaaagcttcgacttccactttggcttctgcatccccagcagcaagaacacctgcgagcacatttacgacttcccccctctctccgaggagctgatcagcgagatgatccgccacccgtatgagacccagtctgacagcttctacttcgtggatgaccggctggtgatgcacaataaagcagactattcctacagcgggacaccctgaccccacggctgccctgaccccaggaggctccagttctgggctgggagctgtgacctccccaacgctcacccctcaaccccaagtcctctgcttggggagttctccaggagctccggaccctgagtcaatgttgggaggaagggtacctggtgtccccagtcaagcccatgaagcccatgcggcctgctacatggggtggggtcgtagggaggctgtttgcctccacgtctaggaaggcctgtgagaggagcagtcaggacttccggacaacttagctgggccctacttgggcccaagtttcagaatagtgttcccctatcaaggctgtgactagatcaggcagggatccattccctgtcccctgcccactaccttcaggccatttagagttgtaaatttacaaagatccacggtgggctccagctgccaagccacccaagggagtctgggccctaggcctagccccatccctccccatgaggggccaagacactgcctaaggtgtgggagggactggctgagattgcagcccatggtaggagctggaccaactgtatatagttttcaataaactttttccttttctgtt

SEQ ID NO: 435165 - DNA, 3843 bp, Homo sapiens
gtatgattccatttatatgaagtatctggaataagcaaatctattagacacagaaagtagatgagtggttgcctaggactgagagggagtttgggaggaaatggagattcactgctactgagtacagagtttcttttggggaggtgataaaaatgctctgaaattgactgtggtggttgtacaattcagaatacactaaacaccattaaattatacactttaagtgggtcagttgtatatagtgcctcaataatatgtaataaaacaatcaattagctcagaaatctgttagagcagggctcagcagggaagcctcatctgttcctcagtgtctcagaggtgatctagcagctggaggctagggttgcctgaagacattcactcaagcatgtggcagttgctgctgagggccagctggaatatcagctgctgtcatcaaccggcacacacgtgacctctgcatgtggcttccaagggagcacatcccaggcaaactaggcagaagccatgtggccttttatgtcccagcctcagaagtccataacatcactcttgtgtcctgggaggagagtcaaagatacctgtgcaaagagcacgtgagagaatggagtggttatctttggaaaataaactgtaacacttggagcaacagtcctgagtggagaaggtgagccccgggacctgccaggagactgtgtcttgactatccccatcagagatgcattttctgctatgtcacatcccatccgttagaatcttccggatactatatctcatagttgatggtctcttgaattcagcaatttcatatctaaagagattcttgaagacaccatgttgtacaccttaaatatatatacaatttttatttgttaattaaaaaataaataagtgaggccagagtgctgggattgcaggcgtgagccaccatgcctggccgattttttattttaacgttttgttttatcttactgtttttccttaggtgagaaaaatgtacccttccatgcctgtgctttctaaattttgggactgatacagatccacagaggccacacctaaaattaaattatcgttagtgctaaaacttaattgactgtgtatataactgtgcaattgctgttactgatataactgtttggggttcattcaacagattaaagaagcaaggtcttgcatttaacacacaaactaatgagatactgctttatacaagaattttaaaaacactgtcatatggtttagtgtagttaatgtcatgcttatgtcatataacatagcatgttagagttctctagagggacagaactaacaggatatatgtacataagaaagggagttgattggccaggtgtggcggcttatgcctgtaatcccagcactttgggaggccgagacaggtggattatctgaggtcagcagttcgagaccagcctgaccaacatggtgaaaccccatcctactaaaaaaatacaaagattagctgggcgtgttggcaggtgcctgtaatcccagctatgcaggagtctgagacagtatcacttgaacccagggggtggaggttgcggtgagccgagattgtgccactgcactccagcctgggcaacagagtgagactctgtttcaacaaacaaacaaacaaacaaaggggggggagtttattaaggataattgactcacacgttcacaaggtcaagtcccatgataggccggccgcaagttgaggagcaaggaagccagtggtggatcagcctgagtcccaaaacctcaaaagtagggaagccaacagttcagccttcagtctgtggccaaaggcctgagagcccccgacaaaccaatggtgtaagtccaagagtccaaaagctgaagaacttggagtttcatgttcaagggcaggaagcatccagcacaggagaaaaatgaaagctggaagactcagcaagtctgctcttccatcttctcttgcctgctctattctagctgggctggcaggtgattagatggtgcccacccagattgagggtggatctgcctgtcccagtccactgactcaaatgttaatctcctttggcaacaccctcacagacacaccaggaacagtaatttgcatccttcaatcctatcatgttgatgctcaatattaaccattatacattggttcaagttctttcttcagtcacaagagtaacacaggtagaagagacaaatgaataagtgccaagtcttgctgcagagtttccttcataagttttgtttgcaacctggccatttcttttctaaggtcactttgttcatcagtaagatgaactctgattctcttctaggtcctccaaactccgtaggaattgctgatttcagtttaatttgtttcagtgtctctgtctctgaaccattctagcttatagacaactcttttgttgctctcgaaacattgtagctagtttttgttcctctggttcctcagccttcactgttcgtgttccaatcttgaaacaaagtcagaaactgcttagaatatttgtaatgaagtttctgcctttcctcttgtgttttcaaaacatgttcaattctcttcttagtggtgtggataaaagcattcatatactcctgtaatcccagcactttgggaggctgagacgggtggatcacgaggtcaggagttcgagaccagcctggccaacatggtgaaaccccgtctctactaaaaataaaaaaattagccgagcatggtggcagcgcctgtaatcccagctagtcaggaggctgaggcaggagaactgcttgaacccgggaggcggaggttgcagtgagccgagatcgcgccattgcaccccagctctgggcaacagaacaagactctgtctcggaaaaaaaaaaaaaaagcattcatatacattctagcctttttctctgtgtagcaaaatcctgtttaatatcagctccgcttacttgtaacttctgtacatcatcccccacgtcttcctcatctgttcctacaaagtgctttctttctccatgctcatcagttcctgaatgctttcctcccagctcatttcctgggctgccataacctgggcctccactgccttggcaaccttcacgatgcactccctgtccacaggctccatggctggctgtcctggaacttctgaaccttgtgagtgcaatgatgcactggaagtaggtggagatgtgtgtgatctgcaggcttgggtatctggaggccagtgggcacactggacactccctgtgatctaagaacttatttaggcagatagtgagggtaaggaagtccttggtaaggttttccttttaatgaaaagcagcccccgaatcatttctttcctaacgaagtgcagcctgtaaaatcaagctgcagacatagatcagcaagctggaagcttgcaggggtgaatgccagcagctctggcaataggaaaaggccccctggaggctaggcatgttcaacatggtggctccatctcccctttttctttatcaaccacatgtacagtaaggagcaggcaacgtggcgccagccaggtagagaagccatttgtggccaggtgcggtggcacacgcctataatcccaacactttgggaggctgaggcgggcagatcacctgaggtcagaagttcaagaccagcctggccaacacgttgaaatggtgtctctactaaaaatacaaaaattagctgggtgtagtggcaggcgtctgtaatcccagctactcaggaggctgaggcaggagaatctgttgaacttgggaggtggaggttgcagtgagccgagatcacaccactgcactccagcctgggaaataggagtgaacctccatctc

SEQ ID NO: 435166 - DNA, 2556 bp, Homo sapiens
agcggaatgacaggcggcaggcggtgaccgccgcagggcctgcggagaccgtccgcctggctcgcccgagctcgcccgctgtccgccagcccgcgggagggaggagagaagcgaagcgtttccgcggttggctactcagtgtcttggtctcaagttgcctcattgcggctggcgttcccaatacagacgcatcgtttcttttttaatactccctaagaaagggaataaccttcaagctggcgggagcaatggttcacataaagaaaggcgagctgacccaggaggagaaggagctactggaagtcatcgggaaaggtactgtccaagaagctggaacattattatccagcaagaatgttcgtgtcaactgtttggacgagaatggaatgactcctctaatgcatgcagcatataaaggaaaactcgatatgtgcaaattactactgcgacatggagccgatgtaaattgtcatcagcatgaacatggatacacagccctcatgtttgctgcactttctggtaataaagacatcacatgggtaatgttagaagctggtgctgagacagatgttgtcaactctgtgggaagaacagcagctcagatggcagcctttgtgggtcaacatgattgtgtgaccataatcaacaatttctttcctcgagagagactggattattacactaagccccagggactggataaagagccaaaactgcccccaaagttggcaggcccgctgcacaaaattatcaccacaacgaatcttcatcctgtcaagatcgtgatgcttgtaaatgagaatcctctgctgacagaagaagcagccctgaataaatgctacagagtgatggatttgatttgtgagaaatgtatgaagcaaagagacatgaatgaagtattggctatgaagatgcattacataagctgtatctttcagaaatgcattaacttcttaaaagatggagagaataaactggacaccttgatcaaaagcttgttaaaaggccgagcttctgatggctttccagtgtatcaagaaaagatcattagagaaagtatcagaaaatttccttactgtgaagctacactcctccagcagctggttcgaagcattgctcctgttgaaattggttctgatcccactgcattctccgtccttacccaagccatcactggccaggtgggttttgtggatgtggaattttgcactacctgtggagaaaagggagcaagtaaaagatgttcagtttgcaaaatggtaatatattgtgatcaaacctgccagaaaacacactggtttactcataagaaaatctgtaagaatctgaaggacatttacgaaaagcaacagttggaggctgccaaagaaaagagacaagaggaaaaccacggcaaacttgatgtcaattctaactgtgttaatgaagagcaaccagaggctgaagtaggtatctctcaaaaggattccaatcctgaagattccggggaaggaaagaaagaatctcttgaaagcgaagctgagttggaaggcttacaggatgctcctgcagggccacaggtgtctgaggagtaaaagccagagcaagtgccagtgtggatggtcctcaccctgcaagaagctggaaaactcctaggaatgcattgtcctcaccttgttatacctgcgtggcaccatggcaggattccacatttcatagaatacaggttttcaagcaaacccctgttgaccatgccctaatttcctattgatttctgttctataattgaatggatattcctatggaaaattttttgtttcaaaatacaggaaaaacattcctattacctttctgaggctggctttccagcaattgtttcaaaggaaaatagatccccttaaagaaaaaatacaggctttagggaacaaagggacaagcagaacaggtgtggaagagagattttcaggaagggaaaaatttatagctacagagggtagttagaaaaatcataacttatatgtgaataaaatacatataagcagcatttacggtagtggcattctacttattaagatgcaatgaaatgaagaaaggctttatgttcaaggacctttgccatagttcagctaattgtagttttatatagaaatgatcctgaacactctgaacttgacgtagtcctgcggtgatattctatctgcagtatttgtacctccagaatggcagatccctcagcaggaacaaaggcatattgacggttctctcagcgtatgcattaaaaaaggtacttcctgaaacttttgattcaataatgactaaacatactatgtacacaattactgtaaggctaattcacgtgccatactccacctgaaagcctgagttatcttgctataagcttttcatggagcacttcctttccagaaactgatttgtaactcatttagagaatgtcctggcgtcggtttttagcatatgtggtatttaaacagagctagaatgtgatgtctgaagataatgctgcatttctgggtttcttgtgtggattttaaaataaattgtgcctacaaatataaa

SEQ ID NO: 435167 - DNA, 2668 bp, Homo sapiens
agcggaatgacaggcggcaggcggtgaccgccgcagggcctgcggagaccgtccgcctggctcgcccgagctcgcccgctgtccgccagcccgcgggagggaggagagaagcgaagcgtttccgcggttggctactcagtgtcttggtctcaagttgcctcattgcggctggcgttcccaatacagacgcatcgtttcttttttaatactccctaagaaagggaataaccttcaagctggcgggagcaatggttcacataaagaaaggcgagctgacccaggaggagaaggagctactggaagtcatcgggaaaggtactgtccaagaagctggaacattattatccagcaagaatgttcgtgtcaactgtttggacgagaatggaatgactcctctaatgcatgcagcatataaaggaaaactcgatatgtgcaaattactactgcgacatggagccgatgtaaattgtcatcagcatgaacatggatacacagccctcatgtttgctgcactttctggtaataaagacatcacatgggtaatgttagaagctggtgctgagacagatgttgtcaactctgtgggaagaacagcagctcagatggcagcctttgtgggtcaacatgattgtgtgaccataatcaacaatttctttcctcgagagagactggattattacactaagccccagggactggataaagagccaaaactgcccccaaagttggcaggcccgctgcacaaaattatcaccacaacgaatcttcatcctgtcaagatcgtgatgcttgtaaatgagaatcctctgctgacagaagaagcagccctgaataaatgctacagagtgatggatttgatttgtgagaaatgtatgaagcaaagagacatgaatgaagtattggctatgaagatgcattacataagctgtatctttcagaaatgcattaacttcttaaaagatggagagaataaactggacaccttgatcaaaagcttgttaaaaggccgagcttctgatggctttccagtgtatcaagaaaagatcattagagaaagtatcagaaaatttccttactgtgaagctacactcctccagcagctggttcgaagcattgctcctgttgaaattggttctgatcccactgcattctccgtccttacccaagccatcactggccaggtgggttttgtggatgtggaattttgcactacctgtggagaaaagggagcaagtaaaagatgttcagtttgcaaaatgtgcagagaactttgaaatcatgtgagaaagtgtatgaatgcaaggatgaatgaagaattggggccaataatacaatatatgtataagggcctaccacagtgcttggcatacagtaatatattgtgatcaaacctgccagaaaacacactggtttactcataagaaaatctgtaagaatctgaaggacatttacgaaaagcaacagttggaggctgccaaagaaaagagacaagaggaaaaccacggcaaacttgatgtcaattctaactgtgttaatgaagagcaaccagaggctgaagtaggtatctctcaaaaggattccaatcctgaagattccggggaaggaaagaaagaatctcttgaaagcgaagctgagttggaaggcttacaggatgctcctgcagggccacaggtgtctgaggagtaaaagccagagcaagtgccagtgtggatggtcctcaccctgcaagaagctggaaaactcctaggaatgcattgtcctcaccttgttatacctgcgtggcaccatggcaggattccacatttcatagaatacaggttttcaagcaaacccctgttgaccatgccctaatttcctattgatttctgttctataattgaatggatattcctatggaaaattttttgtttcaaaatacaggaaaaacattcctattacctttctgaggctggctttccagcaattgtttcaaaggaaaatagatccccttaaagaaaaaatacaggctttagggaacaaagggacaagcagaacaggtgtggaagagagattttcaggaagggaaaaatttatagctacagagggtagttagaaaaatcataacttatatgtgaataaaatacatataagcagcatttacggtagtggcattctacttattaagatgcaatgaaatgaagaaaggctttatgttcaaggacctttgccatagttcagctaattgtagttttatatagaaatgatcctgaacactctgaacttgacgtagtcctgcggtgatattctatctgcagtatttgtacctccagaatggcagatccctcagcaggaacaaaggcatattgacggttctctcagcgtatgcattaaaaaaggtacttcctgaaacttttgattcaataatgactaaacatactatgtacacaattactgtaaggctaattcacgtgccatactccacctgaaagcctgagttatcttgctataagcttttcatggagcacttcctttccagaaactgatttgtaactcatttagagaatgtcctggcgtcggtttttagcatatgtggtatttaaacagagctagaatgtgatgtctgaagataatgctgcatttctgggtttcttgtgtggattttaaaataaattgtgcctacaaatataaa

SEQ ID NO: 435168 - DNA, 1957 bp, Homo sapiens
  misc_feature (1957)..(1957): n is a, c, g, or t
attaaatttcagaactacaggtgaaattacagagtatatttataaatcattcattaaattgcagatctaatatacagatcaaatttctacaagtgtcatagcagtgaattttgtatttttttttctccatccctcttgaggttttgtgacccattttcatcagaaatagtgagttgcttcagcagtgattatcagattggagaggagaactgcccccaccctcatgcctcattccagagaatgtatcatatgttctgggggagtgcatgtaatttgaaaaagatgcctcggttattctgataccaggcatttctgcctccatctctcaaggaaccatatccgctttactactgggttgagatatactctcagtggaattaaatggtttgtacacaattaaaccatttatccttaagagaatagtcaggctttctgactgccatgccttctcttgttttcttgaccaaacttttttattctatgtgctaaggacagaaagtaacaaatgttcattactaacacactattgagggagaataagattgtcagtagaatgggcactcccagttgttaagcatcattcatgcaccaaacactgctctaaatgttacagacaactttattcttcaccaatgtaggatagcctttattacctgcatattatagacaagggaaacaacttcatgcaggcaattacctctccaaggacatcaaataaattcacagaaaagctgtattcaaatacaggctttgtcaaatcccaagcaacaatcttgatttagagatggctttggagccagcggcctgagttcaaatgctggttctgctgtttcactagccaggaaacttgcagcaagctaccaaacctctctcttctcagttttctcatttgtaaaataacgttagcgatgacagtagagatactaatatacctcatgtagttgataggaagattaaataatacatgtaaagcattgagaagagtgtctgacacatggtaggaacaaaataacttcttctttttttaatcagacggcaaacttgatgtcaattctaactgtgttaatgaagagcaaccagaggctgaagtaggtatctctcaaaaggattccaatcctgaagattccggggaaggaaagaaagaatctcttgaaagcgaagctgagttggaaggcttacaggatgctcctgcagggccacaggtgtctgaggagtaaaagccagagcaagtgccagtgtggatggtcctcaccctgcaagaagctggaaaactcctaggaatgcattgtcctcaccttgttatacctgcgtggcaccatggcaggattccacatttcatagaatacaggttttcaagcaaacccctgttgaccatgccctaatttcctattgatttctgttctataattgaatggatattcctatggaaaattttttgtttcaaaatacaggaaaaacattcctattacctttctgaggctggctttccagcaattgtttcaaaggaaaatagatccccttaaagaaaaaatacaggctttagggaacaaagggacaagcagaacaggtgtggaagagagattttcaggaagggaaaaatttatagctacagagggtagttagaaaaatcataacttatatgtgaataaaatacatataagcagcatttacggtagtggcattctacttattaagatgcaatgaaatgaagaaaggctttatgttcaaggacctttgccatagttcagctaattgtagttttatatagaaatgatctgaccctgaatgggtatcgggggaattaatgcgattgccccaaagggccccccagacacgtttgcggtcccggtttaaaagccgcacggtgacacaaaatcagaggggagtgaccaccgcatttgatggcacaaaaagcgtgtgtatatatgtctgtatcaccagaaacaaatcacctggn

SEQ ID NO: 435169 - DNA, 2420 bp, Homo sapiens
agcggaatgacaggcggcaggcggtgaccgccgcagggcctgcggagaccgtccgcctggctcgcccgagctcgcccgctgtccgccagcccgcgggagggaggagagaagcgaagcgtttccgcggttggctactcagtgtcttggtctcaagttgcctcattgcggctggcgttcccaatacagacgcatcgtttcttttttaatactccctaagaaagggaataaccttcaagctggcgggagcaatggttcacataaagaaaggcgagctgacccaggaggagaaggagctactggaagtcatcgggaaaggtactgtccaagaagctggaacattattatccagcaagaatgttcgtgtcaactgtttggacgagaatggaatgactcctctaatgcatgcagcatataaaggaaaactcgatatgtgcaaattactactgcgacatggagccgatgtaaattgtcatcagcatgaacatggatacacagccctcatgtttgctgcactttctggtaataaagacatcacatgggtaatgttagaagctggtgctgagacagatgttgtcaactctgtgggaagaacagcagctcagatggcagcctttgtgggtcaacatgattgtgtgaccataatcaacaatttctttcctcgagagagactggattattacactaagccccagggactggataaagagccaaaactgcccccaaagttggcaggcccgctgcacaaaattatcaccacaacgaatcttcatcctgtcaagatcgtgatgcttgtaaatgagaatcctctgctgacagaagaagcagccctgaataaatgctacagagtgatggatttgatttgtgagaaatgtatgaagcaaagagacatgaatgaagtattggctatgaagatgcattacataagctgtatctttcagaaatgcattaacttcttaaaagatggagagaataaactggacaccttgatcaaaagggttctgatcccactgcattctccgtccttacccaagccatcactggccaggtgggttttgtggatgtggaattttgcactacctgtggagaaaagggagcaagtaaaagatgttcagtttgcaaaatggtaatatattgtgatcaaacctgccagaaaacacactggtttactcataagaaaatctgtaagaatctgaaggacatttacgaaaagcaacagttggaggctgccaaagaaaagagacaagaggaaaaccacggcaaacttgatgtcaattctaactgtgttaatgaagagcaaccagaggctgaagtaggtatctctcaaaaggattccaatcctgaagattccggggaaggaaagaaagaatctcttgaaagcgaagctgagttggaaggcttacaggatgctcctgcagggccacaggtgtctgaggagtaaaagccagagcaagtgccagtgtggatggtcctcaccctgcaagaagctggaaaactcctaggaatgcattgtcctcaccttgttatacctgcgtggcaccatggcaggattccacatttcatagaatacaggttttcaagcaaacccctgttgaccatgccctaatttcctattgatttctgttctataattgaatggatattcctatggaaaattttttgtttcaaaatacaggaaaaacattcctattacctttctgaggctggctttccagcaattgtttcaaaggaaaatagatccccttaaagaaaaaatacaggctttagggaacaaagggacaagcagaacaggtgtggaagagagattttcaggaagggaaaaatttatagctacagagggtagttagaaaaatcataacttatatgtgaataaaatacatataagcagcatttacggtagtggcattctacttattaagatgcaatgaaatgaagaaaggctttatgttcaaggacctttgccatagttcagctaattgtagttttatatagaaatgatcctgaacactctgaacttgacgtagtcctgcggtgatattctatctgcagtatttgtacctccagaatggcagatccctcagcaggaacaaaggcatattgacggttctctcagcgtatgcattaaaaaaggtacttcctgaaacttttgattcaataatgactaaacatactatgtacacaattactgtaaggctaattcacgtgccatactccacctgaaagcctgagttatcttgctataagcttttcatggagcacttcctttccagaaactgatttgtaactcatttagagaatgtcctggcgtcggtttttagcatatgtggtatttaaacagagctagaatgtgatgtctgaagataatgctgcatttctgggtttcttgtgtggattttaaaataaattgtgcctacaaatataaa

SEQ ID NO: 435170 - DNA, 3354 bp, Homo sapiens
agcggaatgacaggcggcaggcggtgaccgccgcagggcctgcggagaccgtccgcctggctcgcccgagctcgcccgctgtccgccagcccgcgggagggaggagagaagcgaagcgtttccgcggttggctactcagtgtcttggtctcaagttgcctcattgcggctggcgttcccaatacagacgcatcgtttcttttttaatactccctaagaaagggaataaccttcaagctggcgggagcaatggttcacataaagaaaggcgagctgacccaggaggagaaggagctactggaagtcatcgggaaaggtactgtccaagaagctggaacattattatccagcaagaatgttcgtgtcaactgtttggacgagaatggaatgactcctctaatgcatgcagcatataaaggaaaactcgatatgtgcaaattactactgcgacatggagccgatgtaaattgtcatcagcatgaacatggatacacagccctcatgtttgctgcactttctggtaataaagacatcacatgggtaatgttagaagctggtgctgagacagatgttgtcaactctgtgggaagaacagcagctcagatggcagcctttgtgggtcaacatgattgtgtgaccataatcaacaatttctttcctcgagagagactggattattacactaagccccagggactggataaagagccaaaactgcccccaaagttggcaggcccgctgcacaaaattatcaccacaacgaatcttcatcctgtcaagatcgtgatgcttgtaaatgagaatcctctgctgacagaagaagcagccctgaataaatgctacagagtgatggatttgatttgtgagaaatgtatgaagcaaagagacatgaatgaagtattggctatgaagatgcattacataagctgtatctttcagaaatgcattaacttcttaaaagatggagagaataaactggacaccttgatcaaaagcttgttaaaaggccgagcttctgatggctttccagtgtatcaagaaaagatcattagagaaagtatcagaaaatttccttactgtgaagctacactcctccagcagctggttcgaagcattgctcctgttgaaattggttctgatcccactgcattctccgtccttacccaagccatcactggccaggtgggttttgtggatgtggaattttgcactacctgtggagaaaagggagcaagtaaaagatgttcagtttgcaaaatggtaatatattgtgatcaaacctgccagaaaacacactggtttactcataagaaaatctgtaagaatctgaaggacatttacgaaaagcaacagttggaggctgccaaagaaaagagacaagaggaaaaccacggcaaacttgatgtcaattctaactgtgttaatgaagagcaaccagaggctgaagtaggtatctctcaaaaggattccaatcctgaagattccggggaaggaaagaaagaatctcttgaaagcgaagctgagttggaaggcttacaggatgctcctgcagggccacaggtgtctgaggagtaaaagccagagcaagtgccagtgtggatggtcctcaccctgcaagaagctggaaaactcctaggaatgcattgtcctcaccttgttatacctgcgtggcaccatggcaggattccacatttcatagaatacaggttttcaagcaaacccctgttgaccatgccctaatttcctattgatttctgttctataattgaatggatattcctatggaaaattttttgtttcaaaatacaggaaaaacattcctattacctttctgaggctggctttccagcaattgtttcaaaggaaaatagatccccttaaagaaaaaatacaggctttagggaacaaagggacaagcagaacaggtgtggaagagagattttcaggaagggaaaaatttatagctacagagggtagttagaaaaatcataacttatatgtgaataaaatacatataagcagcatttacggtagtggcattctacttattaagatgcaatgaaatgaagaaaggctttatgttcaaggacctttgccatagttcagctaattgtagttttatatagaaatgatcctgaacactctgaacttgacgtagtcctgcggtgatattctatctgcagtatttgtacctccagaatggcagatccctcagcaggaacaaaggcatattgacggttctctcagcgtatgcattaaaaaaggtacttcctgaaacttttgattcaataatgactaaacatactatgtacacaattactgtaaggctaattcacgtgccatactccacctgaaagcctgagttatcttgctataagcttttcatggagcacttcctttccagaaactgatttgtaactcatttagagaatgtcctggcgtcggtttttagcatatgtggtatttaaacagagctagaatgtgatgtctgaagataatgctgcatttctgggtttcttgtgtggattttaaaataaattgtgcctacaaatataaaaaaaaaaaaaaaaaaaaagaaaaaaccaaaaaaacagaaaaaaaaaccaacaaacaaagcaagacaagaaaaaaaaaaaaagagggagggagacggcagccgaggaaggaagcaccccggggggacgaccagaagcggggcgccgcccagttctggcgggcagggagggccgccccacggcggggccgcccagccaccgcgcggcgccgcccgcccgccccgcccccccgccgggcgcggcaaaccgacccgcccagccggcgcacatcggtctaggcaagcgacccgactgacggagggaggacaacacactagtgcgccaaaacactccccagaagaaaaaattctgagcgacccaccagtgcgaacatagaacatctaccagggcggtctgagagccaaaacagacgccgaaaaagtaggaggcaagacaagtcacgctagccacgaggaagaacacagaacaaaagtatgagccaggcagcgcaaataggcgacgtgacggacttgcgtatgcgtgcgggaggccaggtgagtagccggagtgcgacttggacgcgcagtagcaaccacaaaaaaggggaggagtgacgcggcagagagaaagagcgaagaagaacaacgaagacaaagacgactagaggagaccaagagccgcaaggacagaacagcagacagaagcagtcaacacaaaaggagatcggcggccggaggagaggaaaaagaacgagggaggactgtatagaatgggcacgagagacagtagacgcgaagcgtacaaagaagagcgagcatcaa

SEQ ID NO: 435171 - DNA, 2314 bp, Homo sapiens
  misc_feature (2314)..(2314): n is a, c, g, or t
agcggaatgacaggcggcaggcggtgaccgccgcagggcctgcggagaccgtccgcctggctcgcccgagctcgcccgctgtccgccagcccgcgggagggaggagagaagcgaagcgtttccgcggttggctactcagtgtcttggtctcaagttgcctcattgcggctggcgttcccaatacagacgcatcgtttcttttttaatactccctaagaaagggaataaccttcaagctggcgggagcaatggttcacataaagaaaggcgagctgacccaggaggagaaggagctactggaagtcatcgggaaaggtactgtccaagaagctggaacattattatccagcaagaatgttcgtgtcaactgtttggacgagaatggaatgactcctctaatgcatgcagcatataaaggaaaactcgatatgtgcaaattactactgcgacatggagccgatgtaaattgtcatcagcatgaacatggatacacagccctcatgtttgctgcactttctggtaataaagacatcacatgggtaatgttagaagctggtgctgagacagatgttgtcaactctgtgggaagaacagcagctcagatggcagcctttgtgggtcaacatgattgtgtgaccataatcaacaatttctttcctcgagagagactggattattacactaagccccagggactggataaagagccaaaactgcccccaaagttggcaggcccgctgcacaaaattatcaccacaacgaatcttcatcctgtcaagatcgtgatgcttgtaaatgagaatcctctgctgacagaagaagcagccctgaataaatgctacagagtgatggatttgatttgtgagaaatgtatgaagcaaagagacatgaatgaagtattggctatgaagatgcattacataagctgtatctttcagaaatgcattaacttcttaaaagatggagagaataaactggacaccttgatcaaaagcttgttaaaaggccgagcttctgatggctttccagtgtatcaagaaaagatcattagagaaagtatcagaaaatttccttactgtgaagctacactcctccagcagctggttcgaagcattgctcctgttgaaattggttctgatcccactgcattctccgtccttacccaagccatcactggccaggtgggttttgtggatgtggaattttgcactacctgtggagaaaagggagcaagtaaaagatgttcagtttgcaaaatggtaatatattgtgatcaaacctgccagaaaacacactggtttactcataagaaaatctgtaagaatctgaaggacatttacgaaaagcaacagttggaggctgccaaagaaaagagacaagaggaaaaccacggcaaacttgatgtcaattctaactgtgttaatgaagagcaaccagaggctgaagtaggtatctctcaaaaggattccaatcctgaagattccggggaaggaaagaaagaatctcttgaaagcgaagctgagttggaaggcttacaggatgctcctgcagggccacaggtgtctgaggagtaaaagccagagcaagtgccagtgtggatggtcctcaccctgcaagaagctggaaaactcctaggaatgcattgtcctcaccttgttatacctgcgtggcaccatggcaggattccacatttcatagaatacaggttttcaagcaaacccctgttgaccatgccctaatttcctattgatttctgttctataattgaatggatattcctatggaaaattttttgtttcaaaatacaggaaaaacattcctattacctttctgaggctggctttccagcaattgtttcaaaggaaaatagatccccttaaagaaaaaatacaggctttagggaacaaagggacaagcagaacaggtgtggaagagagattttcaggaagggaaaaatttatagctacagagggtagttagaaaaatcataacttatatgtgaataaaatacatataagcagcatttacggtagtggcattctacttattaagatgcaatgaaatgaagaaaggctttatgttcaaggacctttgccatagttcagctaattgtagttttatatagaaatgatctgaccctgaatgggtatcgggggaattaatgcgattgccccaaagggccccccagacacgtttgcggtcccggtttaaaagccgcacggtgacacaaaatcagaggggagtgaccaccgcatttgatggcacaaaaagcgtgtgtatatatgtctgtatcaccagaaacaaatcacctggn

SEQ ID NO: 435172 - DNA, 2199 bp, Homo sapiens
attaaatttcagaactacaggtgaaattacagagtatatttataaatcattcattaaattgcagatctaatatacagatcaaatttctacaagtgtcatagcagtgaattttgtatttttttttctccatccctcttgaggttttgtgacccattttcatcagaaatagtgagttgcttcagcagtgattatcagattggagaggagaactgcccccaccctcatgcctcattccagagaatgtatcatatgttctgggggagtgcatgtaatttgaaaaagatgcctcggttattctgataccaggcatttctgcctccatctctcaaggaaccatatccgctttactactgggttgagatatactctcagtggaattaaatggtttgtacacaattaaaccatttatccttaagagaatagtcaggctttctgactgccatgccttctcttgttttcttgaccaaacttttttattctatgtgctaaggacagaaagtaacaaatgttcattactaacacactattgagggagaataagattgtcagtagaatgggcactcccagttgttaagcatcattcatgcaccaaacactgctctaaatgttacagacaactttattcttcaccaatgtaggatagcctttattacctgcatattatagacaagggaaacaacttcatgcaggcaattacctctccaaggacatcaaataaattcacagaaaagctgtattcaaatacaggctttgtcaaatcccaagcaacaatcttgatttagagatggctttggagccagcggcctgagttcaaatgctggttctgctgtttcactagccaggaaacttgcagcaagctaccaaacctctctcttctcagttttctcatttgtaaaataacgttagcgatgacagtagagatactaatatacctcatgtagttgataggaagattaaataatacatgtaaagcattgagaagagtgtctgacacatggtaggaacaaaataacttcttctttttttaatcagacggcaaacttgatgtcaattctaactgtgttaatgaagagcaaccagaggctgaagtaggtatctctcaaaaggattccaatcctgaagattccggggaaggaaagaaagaatctcttgaaagcgaagctgagttggaaggcttacaggatgctcctgcagggccacaggtgtctgaggagtaaaagccagagcaagtgccagtgtggatggtcctcaccctgcaagaagctggaaaactcctaggaatgcattgtcctcaccttgttatacctgcgtggcaccatggcaggattccacatttcatagaatacaggttttcaagcaaacccctgttgaccatgccctaatttcctattgatttctgttctataattgaatggatattcctatggaaaattttttgtttcaaaatacaggaaaaacattcctattacctttctgaggctggctttccagcaattgtttcaaaggaaaatagatccccttaaagaaaaaatacaggctttagggaacaaagggacaagcagaacaggtgtggaagagagattttcaggaagggaaaaatttatagctacagagggtagttagaaaaatcataacttatatgtgaataaaatacatataagcagcatttacggtagtggcattctacttattaagatgcaatgaaatgaagaaaggctttatgttcaaggacctttgccatagttcagctaattgtagttttatatagaaatgatcctgaacactctgaacttgacgtagtcctgcggtgatattctatctgcagtatttgtacctccagaatggcagatccctcagcaggaacaaaggcatattgacggttctctcagcgtatgcattaaaaaaggtacttcctgaaacttttgattcaataatgactaaacatactatgtacacaattactgtaaggctaattcacgtgccatactccacctgaaagcctgagttatcttgctataagcttttcatggagcacttcctttccagaaactgatttgtaactcatttagagaatgtcctggcgtcggtttttagcatatgtggtatttaaacagagctagaatgtgatgtctgaagataatgctgcatttctgggtttcttgtgtggattttaaaataaattgtgcctacaaatataaa

SEQ ID NO: 435173 - DNA, 2040 bp, Homo sapiens
attgcccactagtagtaagtttcacacatttggtttttcttaatactttgattcaattgctgcatgtgtgtttcttaacaaatttggaacataccaattataatggtgataatttatttgaattacaagccaacatcaagtaaatgagtttaaatatattgtctttaaaatacttagattgtactaaacttttcagaattaagacagttaaacatttttgatgtgccctataattgtctcatggaatatgaatattttctggatgtcagttctcagaaaaaaattctgctctggagttattgtcctaaatctgaaacgctatgggcttactgaattatccttattggaaaaatactttttttctagattaagggtgtttttttctctttaattatctggacatatgactgacttttcatatgttttgtacagaaaatggtatattctaaaagatttttgtcattttgtcttaaagcctgtgtaatctatagccttaatgatttcttcctttttgtgtcacattgtaggacggcagtgtccgtgggctgatacctctgtagtgtttccatggtgatttcagaatttgttttttctcctcttcatgcccactctagggttctgatcccactgcattctccgtccttacccaagccatcactggccaggtgggttttgtggatgtggaattttgcactacctgtggagaaaagggagcaagtaaaagatgttcagtttgcaaaatggtaatatattgtgatcaaacctgccagaaaacacactggtttactcataagaaaatctgtaagaatctgaaggacatttacgaaaagcaacagttggaggctgccaaagaaaagagacaagaggaaaaccacggcaaacttgatgtcaattctaactgtgttaatgaagagcaaccagaggctgaagtaggtatctctcaaaaggattccaatcctgaagattccggggaaggaaagaaagaatctcttgaaagcgaagctgagttggaaggcttacaggatgctcctgcagggccacaggtgtctgaggagtaaaagccagagcaagtgccagtgtggatggtcctcaccctgcaagaagctggaaaactcctaggaatgcattgtcctcaccttgttatacctgcgtggcaccatggcaggattccacatttcatagaatacaggttttcaagcaaacccctgttgaccatgccctaatttcctattgatttctgttctataattgaatggatattcctatggaaaattttttgtttcaaaatacaggaaaaacattcctattacctttctgaggctggctttccagcaattgtttcaaaggaaaatagatccccttaaagaaaaaatacaggctttagggaacaaagggacaagcagaacaggtgtggaagagagattttcaggaagggaaaaatttatagctacagagggtagttagaaaaatcataacttatatgtgaataaaatacatataagcagcatttacggtagtggcattctacttattaagatgcaatgaaatgaagaaaggctttatgttcaaggacctttgccatagttcagctaattgtagttttatatagaaatgatcctgaacactctgaacttgacgtagtcctgcggtgatattctatctgcagtatttgtacctccagaatggcagatccctcagcaggaacaaaggcatattgacggttctctcagcgtatgcattaaaaaaggtacttcctgaaacttttgattcaataatgactaaacatactatgtacacaattactgtaaggctaattcacgtgccatactccacctgaaagcctgagttatcttgctataagcttttcatggagcacttcctttccagaaactgatttgtaactcatttagagaatgtcctggcgtcggtttttagcatatgtggtatttaaacagagctagaatgtgatgtctgaagataatgctgcatttctgggtttcttgtgtggattttaaaataaattgtgcctacaaatataaa

SEQ ID NO: 435174 - DNA, 1683 bp, Homo sapiens
actgaccaccccagaggccgccccattagctcgcttgctttgggcggcgtcgctcccacggcgcccagggtacccccgccgctgtctgcctgtcttcctccattaccgcgcaggcttggtcaccgcattaaggcattcccgctctccgcggaactgctctgccgtctcggcggtgaaagtgtgagagggtccgtagttgggtcaactttgactcctctcgcctgcccggatccttaagggcctcctcgtcctcccggtctccggtcgctgccgggtctgtgcgccggtccgcgcccgccctcgctctgccatgggcgcttccagctcctccgcgctggcccgcctcggcctcccagcccggccctggcccaggtggctcggcgtcgccgcgctaggactggccgccgtggccctggggactgtcgcctggcgccgcgcatggcccaggcggcgccggcggctgcagcaggtgggcaccgtggcgaagctctggatctacccggtgaaatcctgcaaaggggtgccggtgagcgaggctgagtgcacggccatggggctgcgcagcggcaacctgcgggacaggttttggctggtgattaaggaagatggacacatggtcactgcccgacaggagcctcgcctcgtgctcatctccatcatttatgagaataactgcctgatcttcagggctccagacatggaccagctggttttgcctagcaagcagccttcctcaaacaaactccacaactgcaggatatttggccttgacattaaaggcagagactgtggcaatgaggcagctaagtggttcaccaacttcttgaaaactgaagcgtatagattggttcaatttgagacaaacatgaagggaagaacatcaagaaaacttctccccactcttgatcagaatttccaggtggcctacccagactactgcccgctcctgatcatgacagatgcctccctggtagatttgaataccaggatggagaagaaaatgaaaatggagaatttcaggccaaatattgtggtgaccggctgtgatgcttttgaggaggatacctgggatgaactcctaattggtagtgtagaagtgaaaaaggtaatggcatgccccaggtgtattttgacaacggtggacccagacactggagtcatagacaggaaacagccactggacaccctgaagagctaccgcctgtgtgatccttctgagagggaattgtacaagttgtctccactttttgggatctattattcagtggaaaaaattggaagcctgagagttggtgaccctgtgtatcggatggtgtagtgatgagtgatggatccactagggtgatatggcttcagcaaccaggagggattgactgagatcttaacaacagcagcaacgatacatcagcaaatccttattatccagccttcaactatctttaccctggaaaacaatctcgatttttgacttttcaaagttgtgtatgctccaggttaatgcaaggaaagtattagaggggggaatatgaaagtatatatataaattttaggtactgaaggctttaaaaataattaagatcatcaaaaatgctattttgaatgttatcatggctattacacttttacttcctgactttaatattgatgaataaagcaagtttaatgaatcaactaaaaagctgc

SEQ ID NO: 435175 - DNA, 1007 bp, Homo sapiens
gtgcatcttacaattggtatatcttggatttgatgaaatacaataagtattaatactagaggggaaactgtgaagctcctaagtacctggcatttctaaaagccccatttggggagagtggacccaagcctgagccatctagcttgagtgaaactgatcctgtgtcctgctgttccagtcatgattgactggacctggatcattgtgtgagccaagggctttcatgtgttctctgcatctgagggagcccaatggctgtgagataccataacgattgagggttttccatatcactccgtcacaaactcatccaatcagatcctgttttgcagtggatggaggcaacaaacatctgtggttcactcagcctcaatttccaattgtctctgctgcccagaaggccttgtgtaatctttatctgtgagaggatctctgtgagatagatatgataacaggcactttatggatgagaaacaaaggcttagataggtcagctgacgtagggcctgggagctgatgtgagttagagctaatgggccatgctttctgcacagcactgcaccatacatttatatgtgtaacctcaataagtgactgttttgtgggagtttgaattatttatgaacagtaggataaacaaccaaataaccagagattcttattatttattcaggcttcagcaaccaggagggattgactgagatcttaacaacagcagcaacgatacatcagcaaatccttattatccagccttcaactatctttaccctggaaaacaatctcgatttttgacttttcaaagttgtgtatgctccaggttaatgcaaggaaagtattagaggggggaatatgaaagtatatatataaattttaggtactgaaggctttaaaaataattaagatcatcaaaaatgctattttgaatgttatcatggctattacacttttacttcctgactttaatattgatgaataaagcaagtttaatgaatcaactaaaaagctgc

SEQ ID NO: 435176 - DNA, 2244 bp, Homo sapiens
actgaccaccccagaggccgccccattagctcgcttgctttgggcggcgtcgctcccacggcgcccagggtacccccgccgctgtctgcctgtcttcctccattaccgcgcaggcttggtcaccgcattaaggcattcccgctctccgcggaactgctctgccgtctcggcggtgaaagtgtgagagggtccgtagttgggtcaactttgactcctctcgcctgcccggatccttaagggcctcctcgtcctcccggtctccggtcgctgccgggtctgtgcgccggtccgcgcccgccctcgctctgccatgggcgcttccagctcctccgcgctggcccgcctcggcctcccagcccggccctggcccaggtggctcggcgtcgccgcgctaggactggccgccgtggccctggggactgtcgcctggcgccgcgcatggcccaggcggcgccggcggctgcagcaggtgggcaccgtggcgaagctctggatctacccggtgaaatcctgcaaaggggtgccggtgagcgaggctgagtgcacggccatggggctgcgcagcggcaacctgcgggacaggttttggctggtgattaaggaagatggacacatggtcactgcccgacaggagcctcgcctcgtgctcatctccatcatttatgagaataactgcctgatcttcagggctccagacatggaccagctggttttgcctagcaagcagccttcctcaaacaaactccacaactgcaggatatttggccttgacattaaaggcagagactgtggcaatgaggcagctaagtggttcaccaacttcttgaaaactgaagcgtatagattggttcaatttgagacaaacatgaagggaagaacatcaagaaaacttctccccactcttgatcagaatttccaggtggcctacccagactactgcccgctcctgatcatgacagatgcctccctggtagatttgaataccaggatggagaagaaaatgaaaatggagaatttcaggccaaatattgtggtgaccggctgtgatgcttttgaggaggatacctgggatgaactcctaattggtagtgtagaagtgaaaaaggtaatggcatgccccaggtgtattttgacaacggtggacccagacactggagtcatagacaggaaacagccactggacaccctgaagagctaccgcctgtgtgatccttctgagagggaattgtacaagttgtctccactttttgggatctattattcagtggaaaaaattggaagcctgagagttggtgaccctgtgtatcggatggtgtagtgatgagtgatggatccactagggtgatatggcttcagcaaccaggagggattgactgagatcttaacaacagcagcaacgatacatcagcaaatccttattatccagccttcaactatctttaccctggaaaacaatctcgatttttgacttttcaaagttgtgtatgctccaggttaatgcaaggaaagtattagaggggggaatatgaaagtatatatataaattttaggtactgaaggctttaaaaataattaagatcatcaaaaatgctattttgaatgttatcatggctattacacttttacttcctgactttaatattgatgaataaagcaagtttaatgaatcaactaaaaagctgcaaaaatgtttttaaaatgtgtgccttttattacctatcagtctatgttttgggagaaatgggaagcaacagatcactgtgtcctgatgtgcaggacgcatgttaccacactcacaaatgcctaatattggtctttatgtggccattgagtcctgttgactttccactcatgtgctttttactctagcattatggaatctgggctgtacttgagtatggaaattctcttatagacttagttttagtactctattacacctttactaagccacataaaagtaatctgtttgtgtgtaactgccagatataccacctggaattccaagtaagataaggaagaggatgacatttaaaagagaatggaattttgagagtaggaatgcaaggaagacagcatgaacatatttttttcagtgcaaataattttttcgtaacaaagaaacgaacaactttggtatgatcttaagcaaaaatactcactgaaatagtatgtggatgaattcacctacttacaattttatggtttctttgtaaataataaatgtgaatctcaatcctgctt

SEQ ID NO: 435177 - DNA, 2309 bp, Homo sapiens
actgaccaccccagaggccgccccattagctcgcttgctttgggcggcgtcgctcccacggcgcccagggtacccccgccgctgtctgcctgtcttcctccattaccgcgcaggcttggtcaccgcattaaggcattcccgctctccgcggaactgctctgccgtctcggcggtgaaagtgtgagagggtccgtagttgggtcaactttgactcctctcgcctgcccggatccttaagggcctcctcgtcctcccggtctccggtcgctgccgggtctgtgcgccggtccgcgcccgccctcgctctgccatgggcgcttccagctcctccgcgctggcccgcctcggcctcccagcccggccctggcccaggtggctcggcgtcgccgcgctaggactggccgccgtggccctggggactgtcgcctggcgccgcgcatggcccaggcggcgccggcggctgcagcaggtgggcaccgtggcgaagctctggatctacccggtgaaatcctgcaaaggggtgccggtgagcgaggctgagtgcacggccatggggctgcgcagcggcaacctgcgggacagaatgtgtgcatgaagaggaaaggctgtttgggaggtttcctgatgtaggacccccgcatgccgcggttttggctggtgattaaggaagatggacacatggtcactgcccgacaggagcctcgcctcgtgctcatctccatcatttatgagaataactgcctgatcttcagggctccagacatggaccagctggttttgcctagcaagcagccttcctcaaacaaactccacaactgcaggatatttggccttgacattaaaggcagagactgtggcaatgaggcagctaagtggttcaccaacttcttgaaaactgaagcgtatagattggttcaatttgagacaaacatgaagggaagaacatcaagaaaacttctccccactcttgatcagaatttccaggtggcctacccagactactgcccgctcctgatcatgacagatgcctccctggtagatttgaataccaggatggagaagaaaatgaaaatggagaatttcaggccaaatattgtggtgaccggctgtgatgcttttgaggaggatacctgggatgaactcctaattggtagtgtagaagtgaaaaaggtaatggcatgccccaggtgtattttgacaacggtggacccagacactggagtcatagacaggaaacagccactggacaccctgaagagctaccgcctgtgtgatccttctgagagggaattgtacaagttgtctccactttttgggatctattattcagtggaaaaaattggaagcctgagagttggtgaccctgtgtatcggatggtgtagtgatgagtgatggatccactagggtgatatggcttcagcaaccaggagggattgactgagatcttaacaacagcagcaacgatacatcagcaaatccttattatccagccttcaactatctttaccctggaaaacaatctcgatttttgacttttcaaagttgtgtatgctccaggttaatgcaaggaaagtattagaggggggaatatgaaagtatatatataaattttaggtactgaaggctttaaaaataattaagatcatcaaaaatgctattttgaatgttatcatggctattacacttttacttcctgactttaatattgatgaataaagcaagtttaatgaatcaactaaaaagctgcaaaaatgtttttaaaatgtgtgccttttattacctatcagtctatgttttgggagaaatgggaagcaacagatcactgtgtcctgatgtgcaggacgcatgttaccacactcacaaatgcctaatattggtctttatgtggccattgagtcctgttgactttccactcatgtgctttttactctagcattatggaatctgggctgtacttgagtatggaaattctcttatagacttagttttagtactctattacacctttactaagccacataaaagtaatctgtttgtgtgtaactgccagatataccacctggaattccaagtaagataaggaagaggatgacatttaaaagagaatggaattttgagagtaggaatgcaaggaagacagcatgaacatatttttttcagtgcaaataattttttcgtaacaaagaaacgaacaactttggtatgatcttaagcaaaaatactcactgaaatagtatgtggatgaattcacctacttacaattttatggtttctttgtaaataataaatgtgaatctcaatcctgctt

SEQ ID NO: 435178 - DNA, 1072 bp, Homo sapiens
ccagggctcagaggggagcctcagattactccgtgaactctcatcttacgctttttcaagcaaagcgtctaagctgaaatccacaactcatggttcccaattttcaaaagtctgaagcaataattcactgaattcagtatttcaggatatttggccttgacattaaaggcagagactgtggcaatgaggcagctaagtggttcaccaacttcttgaaaactgaagcgtatagattggttcaatttgagacaaacatgaagggaagaacatcaagaaaacttctccccactcttgatcagaatttccaggtggcctacccagactactgcccgctcctgatcatgacagatgcctccctggtagatttgaataccaggatggagaagaaaatgaaaatggagaatttcaggccaaatattgtggtgaccggctgtgatgcttttgaggaggatacctgggatgaactcctaattggtagtgtagaagtgaaaaaggtaatggcatgccccaggtgtattttgacaacggtggacccagacactggagtcatagacaggaaacagccactggacaccctgaagagctaccgcctgtgtgatccttctgagagggaattgtacaagttgtctccactttttgggatctattattcagtggaaaaaattggaagcctgagagttggtgaccctgtgtatcggatggtgtagtgatgagtgatggatccactagggtgatatggcttcagcaaccaggagggattgactgagatcttaacaacagcagcaacgatacatcagcaaatccttattatccagccttcaactatctttaccctggaaaacaatctcgatttttgacttttcaaagttgtgtatgctccaggttaatgcaaggaaagtattagaggggggaatatgaaagtatatatataaattttaggtactgaaggctttaaaaataattaagatcatcaaaaatgctattttgaatgttatcatggctattacacttttacttcctgactttaatattgatgaataaagcaagtttaatgaatcaactaaaaagctgc

SEQ ID NO: 435179 - DNA, 1568 bp, Homo sapiens
gtgcatcttacaattggtatatcttggatttgatgaaatacaataagtattaatactagaggggaaactgtgaagctcctaagtacctggcatttctaaaagccccatttggggagagtggacccaagcctgagccatctagcttgagtgaaactgatcctgtgtcctgctgttccagtcatgattgactggacctggatcattgtgtgagccaagggctttcatgtgttctctgcatctgagggagcccaatggctgtgagataccataacgattgagggttttccatatcactccgtcacaaactcatccaatcagatcctgttttgcagtggatggaggcaacaaacatctgtggttcactcagcctcaatttccaattgtctctgctgcccagaaggccttgtgtaatctttatctgtgagaggatctctgtgagatagatatgataacaggcactttatggatgagaaacaaaggcttagataggtcagctgacgtagggcctgggagctgatgtgagttagagctaatgggccatgctttctgcacagcactgcaccatacatttatatgtgtaacctcaataagtgactgttttgtgggagtttgaattatttatgaacagtaggataaacaaccaaataaccagagattcttattatttattcaggcttcagcaaccaggagggattgactgagatcttaacaacagcagcaacgatacatcagcaaatccttattatccagccttcaactatctttaccctggaaaacaatctcgatttttgacttttcaaagttgtgtatgctccaggttaatgcaaggaaagtattagaggggggaatatgaaagtatatatataaattttaggtactgaaggctttaaaaataattaagatcatcaaaaatgctattttgaatgttatcatggctattacacttttacttcctgactttaatattgatgaataaagcaagtttaatgaatcaactaaaaagctgcaaaaatgtttttaaaatgtgtgccttttattacctatcagtctatgttttgggagaaatgggaagcaacagatcactgtgtcctgatgtgcaggacgcatgttaccacactcacaaatgcctaatattggtctttatgtggccattgagtcctgttgactttccactcatgtgctttttactctagcattatggaatctgggctgtacttgagtatggaaattctcttatagacttagttttagtactctattacacctttactaagccacataaaagtaatctgtttgtgtgtaactgccagatataccacctggaattccaagtaagataaggaagaggatgacatttaaaagagaatggaattttgagagtaggaatgcaaggaagacagcatgaacatatttttttcagtgcaaataattttttcgtaacaaagaaacgaacaactttggtatgatcttaagcaaaaatactcactgaaatagtatgtggatgaattcacctacttacaattttatggtttctttgtaaataataaatgtgaatctcaatcctgctt

SEQ ID NO: 435180 - DNA, 1814 bp, Homo sapiens
actgaccaccccagaggccgccccattagctcgcttgctttgggcggcgtcgctcccacggcgcccagggtacccccgccgctgtctgcctgtcttcctccattaccgcgcaggcttggtcaccgcattaaggcattcccgctctccgcggaactgctctgccgtctcggcggtgaaagtgtgagagggtccgtagttgggtcaactttgactcctctcgcctgcccggatccttaagggcctcctcgtcctcccggtctccggtcgctgccgggtctgtgcgccggtccgcgcccgccctcgctctgccatgggcgcttccagctcctccgcgctggcccgcctcggcctcccagcccggccctggcccaggtggctcggcgtcgccgcgctaggactggccgccgtggccctggggactgtcgcctggcgccgcgcatggcccaggcggcgccggcggctgcagcaggtgggcaccgtggcgaagctctggatctacccggtgaaatcctgcaaaggggtgccggtgagcgaggctgagtgcacggccatggggctgcgcagcggcaacctgcgggacaggttttggctggtgattaaggaagatggacacatggtcactgcccgacaggagcctcgcctcgtgctcatctccatcatttatgagaataactgcctgatcttcagggctccagacatggaccagctggttttgcctagcaagcagccttcctcaaacaaactccacaactgcaggatatttggccttgacattaaaggcagagactgtggcaatgaggcagctaagtggttcaccaacttcttgaaaactgaagcgtatagattggttcaatttgagacaaacatgaagggaagaacatcaagaaaacttctccccactcttgatcagaatttccaggtggcctacccagactactgcccgctcctgatcatgacagatgcctccctggtagatttgaataccaggatggagaagaaaatgaaaatggagaatttcaggccaaatattgtggtgaccggctgtgatgcttttgaggaggatacctgggatgaactcctaattggtagtgtagaagtgaaaaaggtaatggcatgccccaggtgtattttgacaacggtggacccagacactggagtcatagacaggaaacagccactggacaccctgaagagctaccgcctgtgtgatccttctgagagggaattgtacaagttgtctccactttttgggatctattattcagtggaaaaaattggaagcctgagagttggtgaccctgtgtatcggatggtgtagtgatgagtgatggatccactagggtgatatggtaaagggtcagctttgcttctgaatacgctgtcttgaagccattgctgcattttcttgtgttaattttttttatgttatgctgctttaattcttgagagaatgaacagttttatattctgatctttggagttggaaaatgcccttaatttctgttccctgcagtaatttgtgtactcctacctcagccttctccacccctatttcccatttaatggtaaaatgctgatggaagaggctcagcagaaagacaggtatatgttcacagctcattacagaatatcattaaggaatagggaaatgaaggtgattgattctcagagttatgtacattctcagagttatgtatttattttttctgtctcagatagaagggaaaatgtttaaattattcaacatcagcttgggaaatgtttaaattgaatgtcttttatcaaatgtatttttaaagtataattgaagtttg

SEQ ID NO: 435181 - DNA, 418 bp, Homo sapiens
gttttgagactgggagtcaagaggtggacctgaacttgccagcattctgcctccctttgagtcctctgggagatatttcttggtgtcaccttgtgctgctttcttctgctataatagtttcatacttaatatgagccaaagaataaacagactcaaaggctaatgaagccaccatttaaaagataactttctcttttctcttaggatacctgggatgaactcctaattggtagtgtagaagtgaaaaaggtaatggcatgccccaggtaaggagcctagctagaccccaggactgtggtgtggcccattcattggttcctaagcatcacctaacccttggttactgcataacaggtgtattttgacaacggtggacccagacactggagtcatagacaggaaacagccactggacacc

SEQ ID NO: 435182 - DNA, 189 bp, Homo sapiens
aaagttgtgtatgctccaggttaatgcaaggaaagtattagaggggggaatatgaaagtatatatataaattttaggtactgaaggctttaaaaataattaagatcatcaaaaatgctattttgaatgttatcatggctattacacttttacttcctgactttaatattgatgaataaagcaagtttaa

SEQ ID NO: 435183 - DNA, 1394 bp, Homo sapiens
actgaccaccccagaggccgccccattagctcgcttgctttgggcggcgtcgctcccacggcgcccagggtacccccgccgctgtctgcctgtcttcctccattaccgcgcaggcttggtcaccgcattaaggcattcccgctctccgcggaactgctctgccgtctcggcggtgaaagtgtgagagggtccgtagttgggtcaactttgactcctctcgcctgcccggatccttaagggcctcctcgtcctcccggtctccggtcgctgccgggtctgtgcgccggtccgcgcccgccctcgctctgccatgggcgcttccagctcctccgcgctggcccgcctcggcctcccagcccggccctggcccaggtggctcggcgtcgccgcgctaggactggccgccgtggccctggggactgtcgcctggcgccgcgcatggcccaggcggcgccggcggctgcagcaggtgggcaccgtggcgaagctctggatctacccggtgaaatcctgcaaaggggtgccggtgagcgaggctgagtgcacggccatggggctgcgcagcggcaacctgcgggacaggttttggctggtgattaaggaagatggacacatggtcactgcccgacaggagcctcgcctcgtgctcatctccatcatttatgagaataactgcctgatcttcagggctccagacatggaccagctggttttgcctagcaagcagccttcctcaaacaaactccacaactgcaggatatttggccttgacattaaaggcagagactgtggcaatgaggcagctaagtggttcaccaacttcttgaaaactgaagcgtatagattggttcaatttgagacaaacatgaagggaagaacatcaagaaaacttctccccactcttgatcagaatttccaggtggcctacccagactactgcccgctcctgatcatgacagatgcctccctggtagatttgaataccaggatggagaagaaaatgaaaatggagaatttcaggccaaatattgtggtgaccggctgtgatgcttttgaggaggcttcagcaaccaggagggattgactgagatcttaacaacagcagcaacgatacatcagcaaatccttattatccagccttcaactatctttaccctggaaaacaatctcgatttttgacttttcaaagttgtgtatgctccaggttaatgcaaggaaagtattagaggggggaatatgaaagtatatatataaattttaggtactgaaggctttaaaaataattaagatcatcaaaaatgctattttgaatgttatcatggctattacacttttacttcctgactttaatattgatgaataaagcaagtttaatgaatcaactaaaaagctgc

SEQ ID NO: 435184 - DNA, 1733 bp, Homo sapiens
ggaagcgggaggaactccgtcgtcctccgcgcgcgcctgcccgcggctgcgcagcggcaacctgcgggacagttttggctggtgattaaggaagatggacacatggtcactgcccgacaggagcctcgcctcgtgctcatctccatcatttatgagaataactgcctgatcttcagggctccagacatggaccagctggttttgcctagcaagcagccttcctcaaacaaactccacaactgcaggatatttggccttgacattaaaggcagagactgtggcaatgaggcagctaagtggttcaccaacttcttgaaaactgaagcgtatagattggttcaatttgagacaaacatgaagggaagaacatcaagaaaacttctccccactcttgatcagaatttccaggtggcctacccagactactgcccgctcctgatcatgacagatgcctccctggtagatttgaataccaggatggagaagaaaatgaaaatggagaatttcaggccaaatattgtggtgaccggctgtgatgcttttgaggaggatacctgggatgaactcctaattggtagtgtagaagtgaaaaaggtaatggcatgccccaggtgtattttgacaacggtggacccagacactggagtcatagacaggaaacagccactggacaccctgaagagctaccgcctgtgtgatccttctgagagggaattgtacaagttgtctccactttttgggatctattattcagtggaaaaaattggaagcctgagagttggtgaccctgtgtatcggatggtgtagtgatgagtgatggatccactagggtgatatggcttcagcaaccaggagggattgactgagatcttaacaacagcagcaacgatacatcagcaaatccttattatccagccttcaactatctttaccctggaaaacaatctcgatttttgacttttcaaagttgtgtatgctccaggttaatgcaaggaaagtattagaggggggaatatgaaagtatatatataaattttaggtactgaaggctttaaaaataattaagatcatcaaaaatgctattttgaatgttatcatggctattacacttttacttcctgactttaatattgatgaataaagcaagtttaatgaatcaactaaaaagctgcaaaaatgtttttaaaatgtgtgccttttattacctatcagtctatgttttgggagaaatgggaagcaacagatcactgtgtcctgatgtgcaggacgcatgttaccacactcacaaatgcctaatattggtctttatgtggccattgagtcctgttgactttccactcatgtgctttttactctagcattatggaatctgggctgtacttgagtatggaaattctcttatagacttagttttagtactctattacacctttactaagccacataaaagtaatctgtttgtgtgtaactgccagatataccacctggaattccaagtaagataaggaagaggatgacatttaaaagagaatggaattttgagagtaggaatgcaaggaagacagcatgaacatatttttttcagtgcaaataattttttcgtaacaaagaaacgaacaactttggtatgatcttaagcaaaaatactcactgaaatagtatgtggatgaattcacctacttacaattttatggtttctttgtaaataataaatgtgaatctcaatcctgctt

SEQ ID NO: 435185 - DNA, 1559 bp, Homo sapiens
  misc_feature (1529)..(1529): n is a, c, g, or t
actgaccaccccagaggccgccccattagctcgcttgctttgggcggcgtcgctcccacggcgcccagggtacccccgccgctgtctgcctgtcttcctccattaccgcgcaggcttggtcaccgcattaaggcattcccgctctccgcggaactgctctgccgtctcggcggtgaaagtgtgagagggtccgtagttgggtcaactttgactcctctcgcctgcccggatccttaagggcctcctcgtcctcccggtctccggtcgctgccgggtctgtgcgccggtccgcgcccgccctcgctctgccatgggcgcttccagctcctccgcgctggcccgcctcggcctcccagcccggccctggcccaggtggctcggcgtcgccgcgctaggactggccgccgtggccctggggactgtcgcctggcgccgcgcatggcccaggcggcgccggcggctgcagcaggtgggcaccgtggcgaagctctggatctacccggtgaaatcctgcaaaggggtgccggtgagcgaggctgagtgcacggccatggggctgcgcagcggcaacctgcgggacaggttttggctggtgattaaggaagatggacacatggtcactgcccgacaggagcctcgcctcgtgctcatctccatcatttatgagaataactgcctgatcttcagggctccagacatggaccagctggttttgcctagcaagcagccttcctcaaacaaactccacaactgcaggatatttggccttgacattaaaggcagagactgtggcaatgaggcagctaagtggttcaccaacttcttgaaaactgaagcgtatagattggttcaatttgagacaaacatgaagggaagaacatcaagaaaacttctccccactcttgatcagaatttccaggtggcctacccagactactgcccgctcctgatcatgacagatgcctccctggtagatttgaataccaggatggagaagaaaatgaaaatggagaatttcaggccaaatattgtggtgaccggctgtgatgcttttgaggaggatacctgggatgaactcctaattggtagtgtagaagtgaaaaaggtaatggcatgccccaggtgtattttgacaacggtggacccagacactggagtcatagacaggaaacagccactggacaccctgaagagctaccgcctgtgtgatccttctgagagggaattgtacaagttgtctccactttttgggatctattattcagtggaaaaaattggaagcctgagagttggtgaccctgtgtatcggatggtgtagtgatgagtgatggatccactagggtgatatggcttcagcaaccaggagggattgactgagatcttaacaacagcagcaacgatacatcagcaaatccttattatccagccttcaactatctttaccctggaaaacaatctcgatttttgacttttcaaagttgtgtatgctccaggttaatgcaaggaaagtattagagggggggttgacncggccgcgaatttagtagtagtagtcgacc

SEQ ID NO: 435186 - DNA, 1444 bp, Homo sapiens
  misc_feature (64)..(64): n is a, c, g, or t
  misc_feature (1161)..(1161): n is a, c, g, or t
  misc_feature (1303)..(1303): n is a, c, g, or t
  misc_feature (1309)..(1309): n is a, c, g, or t
tggggcgggctgtgagcggaccgcgagcgctgggcgggtccgcggcgcggtcggtcggcgcctnttctcgggctgtttggcggacgaagcttcacaaaagatgtctaagcaacagccaactcagtttataaatccagaaacacctggctatgttggatttgcaaacctccccaatcaagttcaccgaaaatcagtgaaaaaaggttttgagttcacactgatggtggtcggtgaatcaggtctaggaaaatcgactctcataaacagcctattcctaactgatctgtacccagaaagagtcatacctggagcagcagaaaaaattgaaagaactgtccagattgaggcttcaactgttgaaattgaagagcgaggggtcaagctacgcctgacagtggtagatacccctggctatggtgacgctatcaactgcagagattgttttaagacaattatctcctatattgatgagcaatttgagaggtacctgcatgacgagagcggcttgaacaggcggcacatcattgataatagggtgcattgttgcttttactttatttcaccttttggacatggacttaagcccttagatgtggcgtttatgaaggcaatacacaacaaggtgaatattgtgcctgtcattgcaaaagctgacactctcaccctgaaggaacgggagcggctgaagaaaaggattctggatgaaattgaagaacataacatcaaaatctatcacttacctgatgcagaatcagatgaagatgaagattttaaagagcagactagacttctcaaggctagcatcccattctctgtggttggatccaatcagttgattgaagccaaaggaaagaaggtcagaggccgcctctacccctggggtgttgtggaagtggagaacccagagcacaatgactttctgaagctgagaaccatgctcatcacccacatgcaggatctccaggaggtgacccaggaccttcattatgaaaacttccgttctgagagactcaagagaggcggcaggaaagtggagaatgaggacatgaataaagaccagatcttgctggaaaaagaagctgagctccgccgcatgcaagagatgattgcaaggatgcaggcgcagatgcagatgcagatgcagggcggggatggcgatgngggggctctcgggcaccacgtgtaaggtgatgtgcccatatcaagaagtcagagaaaacactttcctggttaaaaagaaacatttcagatgcatgatcagctgtgtgttcatcctgggagggccatccacttttacagaccntgccgnaaatcattctaaacacttgatcgtctcctgttaaaactccaactctttataagtggccacatcgtgcggaggaagtctcatttcccacacatgtgaagttacaaaggtataatagtctataacaaaagacacacc

SEQ ID NO: 435187 - DNA, 1175 bp, Homo sapiens
  misc_feature (64)..(64): n is a, c, g, or t
tggggcgggctgtgagcggaccgcgagcgctgggcgggtccgcggcgcggtcggtcggcgcctnttctcgggctgtttggcggacgaagcttcacaaaagatgtctaagcaacagccaactcagtttataaatccagaaacacctggctatgttggatttgcaaacctccccaatcaagttcaccgaaaatcagtgaaaaaaggttttgagttcacactgatggtggtcggtgaatcaggtctaggaaaatcgactctcataaacagcctattcctaactgatctgtacccagaaagagtcatacctggagcagcagaaaaaattgaaagaactgtccagattgaggcttcaactgttgaaattgaagagcgaggggtcaagctacgcctgacagtggtagatacccctggctatggtgacgctatcaactgcagagattgttttaagacaattatctcctatattgatgagcaatttgagaggtacctgcatgacgagagcggcttgaacaggcggcacatcattgataatagggtgcattgttgcttttactttatttcaccttttggacatggacttaagcccttagatgtggcgtttatgaaggcaatacacaacaaggtgaatattgtgcctgtcattgcaaaagctgacactctcaccctgaaggaacgggagcggctgaagaaaaggattctggatgaaattgaagaacataacatcaaaatctatcacttacctgatgcagaatcagatgaagatgaagattttaaagagcagactagacttctcaaggctagcatcccattctctgtggttggatccaatcagttgattgaagccaaaggaaagaaggtcagaggccgcctctacccctggggtgttgtggaagtggagaacccagagcacaatgactttctgaagctgagaaccatgctcatcacccacatgcaggatctccaggaggtgacccaggaccttcattatgaaaacttccgttctgagagactcaagagaggcggcaggtcatcacactgtgcccctttctctgtattgtgtcaccctgagccacaatgttcctcctcctctatgtgttcagctcagccttcttgaccattaagcaacatggtttggtttcctactcaaaagttattataaaagagttgttaattta

SEQ ID NO: 435188 - DNA, 1418 bp, Homo sapiens
  misc_feature (64)..(64): n is a, c, g, or t
  misc_feature (1135)..(1135): n is a, c, g, or t
  misc_feature (1277)..(1277): n is a, c, g, or t
  misc_feature (1283)..(1283): n is a, c, g, or t
tggggcgggctgtgagcggaccgcgagcgctgggcgggtccgcggcgcggtcggtcggcgcctnttctcgggctgtttggcggcaacagccaactcagtttataaatccagaaacacctggctatgttggatttgcaaacctccccaatcaagttcaccgaaaatcagtgaaaaaaggttttgagttcacactgatggtggtcggtgaatcaggtctaggaaaatcgactctcataaacagcctattcctaactgatctgtacccagaaagagtcatacctggagcagcagaaaaaattgaaagaactgtccagattgaggcttcaactgttgaaattgaagagcgaggggtcaagctacgcctgacagtggtagatacccctggctatggtgacgctatcaactgcagagattgttttaagacaattatctcctatattgatgagcaatttgagaggtacctgcatgacgagagcggcttgaacaggcggcacatcattgataatagggtgcattgttgcttttactttatttcaccttttggacatggacttaagcccttagatgtggcgtttatgaaggcaatacacaacaaggtgaatattgtgcctgtcattgcaaaagctgacactctcaccctgaaggaacgggagcggctgaagaaaaggattctggatgaaattgaagaacataacatcaaaatctatcacttacctgatgcagaatcagatgaagatgaagattttaaagagcagactagacttctcaaggctagcatcccattctctgtggttggatccaatcagttgattgaagccaaaggaaagaaggtcagaggccgcctctacccctggggtgttgtggaagtggagaacccagagcacaatgactttctgaagctgagaaccatgctcatcacccacatgcaggatctccaggaggtgacccaggaccttcattatgaaaacttccgttctgagagactcaagagaggcggcaggaaagtggagaatgaggacatgaataaagaccagatcttgctggaaaaagaagctgagctccgccgcatgcaagagatgattgcaaggatgcaggcgcagatgcagatgcagatgcagggcggggatggcgatgngggggctctcgggcaccacgtgtaaggtgatgtgcccatatcaagaagtcagagaaaacactttcctggttaaaaagaaacatttcagatgcatgatcagctgtgtgttcatcctgggagggccatccacttttacagaccntgccgnaaatcattctaaacacttgatcgtctcctgttaaaactccaactctttataagtggccacatcgtgcggaggaagtctcatttcccacacatgtgaagttacaaaggtataatagtctataacaaaagacacacc

SEQ ID NO: 435189 - DNA, 1035 bp, Homo sapiens
  misc_feature (752)..(752): n is a, c, g, or t
  misc_feature (894)..(894): n is a, c, g, or t
  misc_feature (900)..(900): n is a, c, g, or t
agtcgacggagactctcgtcatgcagagattgttttaagacaattatctcctatattgatgagcaatttgagaggtacctgcatgacgagagcggcttgaacaggcggcacatcattgataatagggtgcattgttgcttttactttatttcaccttttggacatggacttaagcccttagatgtggcgtttatgaaggcaatacacaacaaggtgaatattgtgcctgtcattgcaaaagctgacactctcaccctgaaggaacgggagcggctgaagaaaaggattctggatgaaattgaagaacataacatcaaaatctatcacttacctgatgcagaatcagatgaagatgaagattttaaagagcagactagacttctcaaggctagcatcccattctctgtggttggatccaatcagttgattgaagccaaaggaaagaaggtcagaggccgcctctacccctggggtgttgtggaagtggagaacccagagcacaatgactttctgaagctgagaaccatgctcatcacccacatgcaggatctccaggaggtgacccaggaccttcattatgaaaacttccgttctgagagactcaagagaggcggcaggaaagtggagaatgaggacatgaataaagaccagatcttgctggaaaaagaagctgagctccgccgcatgcaagagatgattgcaaggatgcaggcgcagatgcagatgcagatgcagggcggggatggcgatgngggggctctcgggcaccacgtgtaaggtgatgtgcccatatcaagaagtcagagaaaacactttcctggttaaaaagaaacatttcagatgcatgatcagctgtgtgttcatcctgggagggccatccacttttacagaccntgccgnaaatcattctaaacacttgatcgtctcctgttaaaactccaactctttataagtggccacatcgtgcggaggaagtctcatttcccacacatgtgaagttacaaaggtataatagtctataacaaaagacacacc

SEQ ID NO: 435190 - DNA, 1445 bp, Homo sapiens
  misc_feature (64)..(64): n is a, c, g, or t
  misc_feature (1162)..(1162): n is a, c, g, or t
  misc_feature (1304)..(1304): n is a, c, g, or t
  misc_feature (1310)..(1310): n is a, c, g, or t
tggggcgggctgtgagcggaccgcgagcgctgggcgggtccgcggcgcggtcggtcggcgcctnttctcgggctgtttggcggacgaagcttcacaaaagatgtctaagcaacagccaactcagtttataaatccagaaacacctggctatgttggatttgcaaacctccccaatcaagttcaccgaaaatcagtgaaaaaaggttttgagttcacactgatggtggtcggtgaatcaggtctaggaaaatcgactctcataaacagcctattcctaactgatctgtacccagaaagagtcatacctggagcagcagaaaaaattgaaagaactgtccagattgaggcttcaactgttgaaattgaagagcgaggggtcaagctacgcctgacagtggtagatacccctggctatggtgacgctatcaactgcagagattgttttaagacaattatctcctatattgatgagcaatttgagaggtacctgcatgacgagagcggcttgaacaggcggcacatcattgataatagggtgcattgttgcttttactttatttcaccttttggacatggacttaagcccttagatgtggcgtttatgaaggcaatacacaacaaggtgaatattgtgcctgtcattgcaaaagctgacactctcaccctgaaggaacgggagcggctgaagaaaaggattctggatgaaattgaagaacataacatcaaaatctatcacttacctgatgcagaatcagatgaagatgaagattttaaagagcagactagacttctcaaggctagcatcccattctcctgtggttggatccaatcagttgattgaagccaaaggaaagaaggtcagaggccgcctctacccctggggtgttgtggaagtggagaacccagagcacaatgactttctgaagctgagaaccatgctcatcacccacatgcaggatctccaggaggtgacccaggaccttcattatgaaaacttccgttctgagagactcaagagaggcggcaggaaagtggagaatgaggacatgaataaagaccagatcttgctggaaaaagaagctgagctccgccgcatgcaagagatgattgcaaggatgcaggcgcagatgcagatgcagatgcagggcggggatggcgatgngggggctctcgggcaccacgtgtaaggtgatgtgcccatatcaagaagtcagagaaaacactttcctggttaaaaagaaacatttcagatgcatgatcagctgtgtgttcatcctgggagggccatccacttttacagaccntgccgnaaatcattctaaacacttgatcgtctcctgttaaaactccaactctttataagtggccacatcgtgcggaggaagtctcatttcccacacatgtgaagttacaaaggtataatagtctataacaaaagacacacc

SEQ ID NO: 435191 - DNA, 1324 bp, Homo sapiens
  misc_feature (64)..(64): n is a, c, g, or t
  misc_feature (1041)..(1041): n is a, c, g, or t
  misc_feature (1183)..(1183): n is a, c, g, or t
  misc_feature (1189)..(1189): n is a, c, g, or t
tggggcgggctgtgagcggaccgcgagcgctgggcgggtccgcggcgcggtcggtcggcgcctnttctcgggctgtttggcggacgaagcttcacaaaagatgtctaaggtgaatcaggtctaggaaaatcgactctcataaacagcctattcctaactgatctgtacccagaaagagtcatacctggagcagcagaaaaaattgaaagaactgtccagattgaggcttcaactgttgaaattgaagagcgaggggtcaagctacgcctgacagtggtagatacccctggctatggtgacgctatcaactgcagagattgttttaagacaattatctcctatattgatgagcaatttgagaggtacctgcatgacgagagcggcttgaacaggcggcacatcattgataatagggtgcattgttgcttttactttatttcaccttttggacatggacttaagcccttagatgtggcgtttatgaaggcaatacacaacaaggtgaatattgtgcctgtcattgcaaaagctgacactctcaccctgaaggaacgggagcggctgaagaaaaggattctggatgaaattgaagaacataacatcaaaatctatcacttacctgatgcagaatcagatgaagatgaagattttaaagagcagactagacttctcaaggctagcatcccattctcctgtggttggatccaatcagttgattgaagccaaaggaaagaaggtcagaggccgcctctacccctggggtgttgtggaagtggagaacccagagcacaatgactttctgaagctgagaaccatgctcatcacccacatgcaggatctccaggaggtgacccaggaccttcattatgaaaacttccgttctgagagactcaagagaggcggcaggaaagtggagaatgaggacatgaataaagaccagatcttgctggaaaaagaagctgagctccgccgcatgcaagagatgattgcaaggatgcaggcgcagatgcagatgcagatgcagggcggggatggcgatgngggggctctcgggcaccacgtgtaaggtgatgtgcccatatcaagaagtcagagaaaacactttcctggttaaaaagaaacatttcagatgcatgatcagctgtgtgttcatcctgggagggccatccacttttacagaccntgccgnaaatcattctaaacacttgatcgtctcctgttaaaactccaactctttataagtggccacatcgtgcggaggaagtctcatttcccacacatgtgaagttacaaaggtataatagtctataacaaaagacacacc

SEQ ID NO: 435192 - DNA, 448 bp, Homo sapiens
taaatgcagatttcagcgctatctaataaacaaccaaagcataagccagacacaattaaatatgtttttcattgtaagtaccatcattactgatttaatagcaattaatattttctttctaatttaaaaatcctcagaaagcaaaaaggcttcaagaaaaagctatagaagcctccagataccataaacgaccacaaaatgcaatatttcaccaaacacatattaaaggccttaacacaatggtaagattctttctccataacattttcttaatagacattaaatttagagtgtttgaacaactgtgcaaatatactgaaaaccattgaattttacccattaaatggatggattgtgtggtattgaattatatctcaataaaactgttcaaaaaaaattttaaatttaaaaattagaagttaaaaaaattaataaaaaaaaaacttag

SEQ ID NO: 435193 - DNA, 529 bp, Homo sapiens
caatggtccagtcaatgaccttgcttgaaaatcaacttgttgagaaactttgggtacttaaagttctgcagcatctctcaacttctgaagttaattgtactataatgatgaaagcacaagcagccagtggaatctgtactcacctcaatgacccagatccctctggacagcttttatttcgttcatcagaaatactttggaacttgctggaaaaatcttcaaaagaagaagtcatacaacagcttagtaacttggaatgtttgctgtaagcgtatgtggttagataggaatgttcttttaatcttaaaatgacagccagtgacataactaacatctttgtttgaatctgtgttcaattatgttttagattcatgtaatggctatgtttcaggacatcttttttgttccatggtataaatgaatctgcacaataacaagccacacttttctatgtggaaggctcttgaagtagcttcttaacactaaaatataacttggaatatagataaagtaaaattagactttagaa

SEQ ID NO: 435194 - DNA, 3063 bp, Homo sapiens
caatggtccagtcaatgaccttgcttgaaaatcaacttgttgagaaactttgggtacttaaagttctgcagcatctctcaacttctgaagttaattgtactataatgatgaaagcacaagcagccagtggaatctgtactcacctcaatgacccagatccctctggacagcttttatttcgttcatcagaaatactttggaacttgctggaaaaatcttcaaaagaagaagtcatacaacagcttagtaacttggaatgtttgctggctttgaaggaagtatttaaaaatctgtttatgagaggtttcagtcattatgaccgtcagcttagaaatgacatattagtgatcactacaattatagctcaaaatcctgaagcaccaatgattgaatgtggctttaccaaggatttgatactgtttgccacctttaatgaagttaaaagtcaaaatcttttggtaaaaggacttaagctttctaattcctatgaagattttgagttgaagaaattactattcaacgtaattgtgatcttatgtaaagatttacctactgtacagctattaattgatggcaaagttattttggctttgtttacctatgttaagaagcctgagaagcaaaaaataattgactggtctgcagcacagcatgaagaattacaactgcatgcaattgccactttgtcatcagtggctcctttattaatagaagaatacatgtcatgccagggaaatgctcgagtccttgcatttctagaatggtgtgagagtgaagatccgtttttcagtcatggtaacagttttcatggtacaggtggccgaggcaacaagtttgcccagatgcgttacagtttaagactcctgagagccatggtctaccttgaagatgagactgtaaacaaagatctttgtgaaaagggaacaattcagcaaatgataggaatctttaaaaatataataagcaagcctaatgaaaaggaagaagccattgttttggaaatccagtctgatatattacttatcctatctggcctttgtgagaatcacattcaaaggaaggaaattttcggaactgaaggagtagatatcgttcttcatgtgatgaaaacagaccccaggaagttacagagtggcttaggctataatgtacttctttttagtacattggacagcatttggtgctgtattttgggatgttatccctcagaggattattttcttgaaaaggaaggcatttttctccttttggatttgttagcattgaaccaaaaaaaattctgtaatctaatacttggaataatggttgaattttgtgataatcccaaaactgcagctcatgtcaatgcttggcaagggaagaaggatcagacagctgctagtcttttaattaaattgtggagaaaggaggaaaaagaactaggagtaaaacgtgataaaaatgggaagatcattgatacaaaaaaacctctatttactagctttcaagaagagcaaaaaatcatcccactgcctgctaactgcccatctattgcggttatggatgtttctgagaatattagagcaaaaatttatgctatattgggcaaactagattttgaaaatttacctggcctatctgctgaagattttgtcaccctttgtatcatacatagatatcttgattttaaaattggagaaatatggaatgaaatatatgaagaaataaaattagaaaaattaagaccagtcactacagataaaaaagctttggaagctattacaacagcatcagaaaatattggaaagatggttgcttctctgcaaagtgatataattgaaagccaagcatgccaagacatgcaaaatgaacaaaaagtatatgcaaaaatacaggccacgcacaagcaaagagagctggctaataaatcatgggaagatttcttggctagaacatcaaacgctaaaacgttaaagaaagcaaaaaggcttcaagaaaaagctatagaagcctccagataccataaacgaccacaaaatgcaatatttcaccaaacacatattaaaggccttaacacaatggtgccctctggtggagtagtaacagtggaaagcactcctgcccgattagtaggaggacctctggttgatacggatattgctcttaaaaaactgcccattcgaggaggagccttgcagagggtgaaagcagttaaaattgtggatgcaccaaaaaagagtattcctacgtaatatactatagagactttttgaaataaagtcagcttataattttttagctgaatatatctttatacatatgtaaagccaatattttagaataagtattttagtataaatattttagtaaaatactataaaaataaaaggacatataatttatttttatggaaaacatcaacatgtaatatcagaagagttgtcatcagtttctttggaaaggctaccaattttactaagtgaaattgtaaaacatagtacatcagttaggactctgttggttgcatgtgaactattctaactagtttaagtcagaaaaaaaatttcttacaggctctatacctatcaaatctaggaggaatttagactacaggcattgctgaatctaaggactaaaactatatgagtaggatcttctccttccctagcagctcctggcttacattctcttaggttcatgcctgtgtctctgtggtttctgcagctgcctatgcatctcaggacccctgattgcccacatgcctacggtagtcctgagccattcaccatgactttggccatggctgagtactgcctattcctggagccagaagcagggcaactccatccaaaacatatggatagagtggggaatcagggtactattatcagaagcaagtatatatgaatattgggcagcaagataaacaataactctgcaacaagtatgttggtcaaaataaaattatgttttctctgctataaaagcaaatgttagtcatgagccaaatggtaaaaaagaaaaaaaaatgcagctggttttactcttaatatataaatatacaaagcaaactctaatgctact

SEQ ID NO: 435195 - DNA, 2958 bp, Homo sapiens
caatggtccagtcaatgaccttgcttgaaaatcaacttgttgagaaactttgggtacttaaagttctgcagcatctctcaacttctgaagttaattgtactataatgatgaaagcacaagcagccagtggaatctgtactcacctcaatgacccagatccctctggacagcttttatttcgttcatcagaaatactttggaacttgctggaaaaatcttcaaaagaagaagtcatacaacagcttagtaacttggaatgtttgctggctttgaaggaagtatttaaaaatctgtttatgagaggtttcagtcattatgaccgtcagcttagaaatgacatattagtgatcactacaattatagctcaaaatcctgaagcaccaatgattgaatgtggctttaccaaggatttgatactgtttgccacctttaatgaagttaaaagtcaaaatcttttggtaaaaggacttaagctttctaattcctatgaagattttgagttgaagaaattactattcaacgtaattgtgatcttatgtaaagatttacctactgtacagctattaattgatggcaaagttattttggctttgtttacctatgttaagaagcctgagaagcaaaaaataattgactggtctgcagcacagcatgaagaattacaactgcatgcaattgccactttgtcatcagtggctcctttattaatagaagaatacatgtcatgccagggaaatgctcgagtccttgcatttctagaatggtgtgagagtgaagatccgtttttcagtcatggtaacagttttcatggtacaggtggccgaggcaacaagtttgcccagatgcgttacagtttaagactcctgagagccatggtctaccttgaagatgagactgtaaacaaagatctttgtgaaaagggaacaattcagcaaatgataggaatctttaaaaatataataagcaagcctaatgaaaaggaagaagccattgttttggaaatccagtctgatatattacttatcctatctggcctttgtgagaatcacattcaaaggaaggaaattttcggaactgaaggagtagatatcgttcttcatgtgatgaaaacagaccccaggaagttacagagtggcttaggctataatgtacttctttttagtacattggacagcatttggtgctgtattttgggatgttatccctcagaggattattttcttgaaaaggaaggcatttttctccttttggatttgttagcattgaaccaaaaaaaattctgtaatctaatacttggaataatggttgaattttgtgataatcccaaaactgcagctcatgtcaatgcttggcaagggaagaaggatcagacagctgctagtcttttaattaaattgtggagaaaggaggaaaaagaactaggagtaaaacgtgataaaaatgggaagatcattgatacaaaaaaacctctatttactagctttcaagaagagcaaaaaatcatcccactgcctgctaactgcccatctattgcggttatggatgtttctgagaatattagagcaaaaatttatgctatattgggcaaactagattttgaaaatttacctggcctatctgctgaagattttgtcaccctttgtatcatacatagatatcttgattttaaaattggagaaatatggaatgaaatatatgaagaaataaaattagaaaaattaagaccagtcactacagataaaaaagctttggaagctattacaacagcatcagaaaatattggaaagatggttgcttctctgcaaagtgatataattgaaagccaagcatgccaagacatgcaaaatgaacaaaaagtatatgcaaaaatacaggccacgcacaagcaaagagagctggctaataaatcatgggaagatttcttggctagaacatcaaacgctaaaacgttaaaggtgccctctggtggagtagtaacagtggaaagcactcctgcccgattagtaggaggacctctggttgatacggatattgctcttaaaaaactgcccattcgaggaggagccttgcagagggtgaaagcagttaaaattgtggatgcaccaaaaaagagtattcctacgtaatatactatagagactttttgaaataaagtcagcttataattttttagctgaatatatctttatacatatgtaaagccaatattttagaataagtattttagtataaatattttagtaaaatactataaaaataaaaggacatataatttatttttatggaaaacatcaacatgtaatatcagaagagttgtcatcagtttctttggaaaggctaccaattttactaagtgaaattgtaaaacatagtacatcagttaggactctgttggttgcatgtgaactattctaactagtttaagtcagaaaaaaaatttcttacaggctctatacctatcaaatctaggaggaatttagactacaggcattgctgaatctaaggactaaaactatatgagtaggatcttctccttccctagcagctcctggcttacattctcttaggttcatgcctgtgtctctgtggtttctgcagctgcctatgcatctcaggacccctgattgcccacatgcctacggtagtcctgagccattcaccatgactttggccatggctgagtactgcctattcctggagccagaagcagggcaactccatccaaaacatatggatagagtggggaatcagggtactattatcagaagcaagtatatatgaatattgggcagcaagataaacaataactctgcaacaagtatgttggtcaaaataaaattatgttttctctgctataaaagcaaatgttagtcatgagccaaatggtaaaaaagaaaaaaaaatgcagctggttttactcttaatatataaatatacaaagcaaactctaatgctact

SEQ ID NO: 435196 - DNA, 1190 bp, Homo sapiens
atagaaatagaattcaaacctacttttcctggctccgatgcccttatctttctattataccataactgcctcctagttattcattacatttgtgtcttttcaaaagtaagctgaaggatgaatgagtttttctcttgttgaaaattgtgtaaatggacttttagatatttaccttttgcctttttaggtgccctctggtggagtagtaacagtggaaagcactcctgcccgattagtaggaggacctctggttgatacggatattgctcttaaaaaactgcccattcgaggaggagccttgcagagggtgaaagcagttaaaattgtggatgcaccaaaaaagagtattcctacgtaatatactatagagactttttgaaataaagtcagcttataattttttagctgaatatatctttatacatatgtaaagccaatattttagaataagtattttagtataaatattttagtaaaatactataaaaataaaaggacatataatttatttttatggaaaacatcaacatgtaatatcagaagagttgtcatcagtttctttggaaaggctaccaattttactaagtgaaattgtaaaacatagtacatcagttaggactctgttggttgcatgtgaactattctaactagtttaagtcagaaaaaaaatttcttacaggctctatacctatcaaatctaggaggaatttagactacaggcattgctgaatctaaggactaaaactatatgagtaggatcttctccttccctagcagctcctggcttacattctcttaggttcatgcctgtgtctctgtggtttctgcagctgcctatgcatctcaggacccctgattgcccacatgcctacggtagtcctgagccattcaccatgactttggccatggctgagtactgcctattcctggagccagaagcagggcaactccatccaaaacatatggatagagtggggaatcagggtactattatcagaagcaagtatatatgaatattgggcagcaagataaacaataactctgcaacaagtatgttggtcaaaataaaattatgttttctctgctataaaagcaaatgttagtcatgagccaaatggtaaaaaagaaaaaaaaatgcagctggttttactcttaatatataaatatacaaagcaaactctaatgctact

SEQ ID NO: 435197 - DNA, 1435 bp, Homo sapiens
caatggtccagtcaatgaccttgcttgaaaatcaacttgttgagaaactttgggtacttaaagttctgcagcatctctcaacttctgaagttaattgtactataatgatgaaagcacaagcagccagtggaatctgtactcacctcaatgacccagatccctctggacagcttttatttcgttcatcagaaatactttggaacttgctggaaaaatcttcaaaagaagaagtcatacaacagcttagtaacttggaatgtttgctggctttgaaggaagtatttaaaaatctgtttatgagaggtttcagtcattatgaccgtcagcttagaaatgacatattagtgatcactacaattatagctcaaaatcctgaagcaccaatgattgaatgtggctttaccaaggatttgatactgtttgccacctttaatgaagttaaaagtcaaaatcttttggtaaaaggacttaagctttctaattcctatgaagattttgagttgaagaaattactattcaacgtaattgtgatcttatgtaaagatttacctactgtacagctattaattgatggcaaagttattttggctttgtttacctatgttaagaagcctgagaagcaaaaaataattgactggtctgcagcacagcatgaagaattacaactgcatgcaattgccactttgtcatcagtggctcctttattaatagaagaatacatgtcatgccagggaaatgctcgagtccttgcatttctagaatggtgtgagagtgaagatccgtttttcagtcatggtaacagttttcatggtacaggtggccgaggcaacaagtttgcccagatgcgttacagtttaagactcctgagagccatggtctaccttgaagatgagactgtaaacaaagatctttgtgaaaagggaacaattcagcaaatgataggaatctttaaaaatataataagcaagcctaatgaaaaggaagaagccattgttttggaaatccagtctgatatattacttatcctatctggcctttgtgagaatcacattcaaaggaaggtatgtatgcctgtgaaagttttgttcaggtctcccagtcacctaacactataaactatttttggaagtctctataattgtatttaattttgtgaaaatttaatatttttgttaataattagagcataattatataaagtaaaaggtacagaatatacaacagtatacacccatttaactcatacccccaacatggtgaaacctcatatctactaaaaatacaaaaattagccaggcgttgtggtgtgcgcctgtaatctcagttactcgggaggctgaggcacgagaattgcttgaacctaggaggtaggttacagtgagcccagatctcaccactgcactccagcctaggtgacgcagtgagactccatctg

SEQ ID NO: 435198 - DNA, 420 bp, Homo sapiens
aactactgttctgttttctattcctataggttggttttccctattctttaagtttatatcaatggaatcgcacaatatttactcttttatgtctggattctgtcacccagcatcatattttagaaatatatccatgttggccgggcatggtggctcaggcctgtaatctcagcactttgggaggctgaggcaggtggattgcctgaggtcaggagtttgagaccagcctggccaacatggtgaaacctcatatctactaaaaatacaaaaattagccaggcgttgtggtgtgcgcctgtaatctcagttactcgggaggctgaggcacgagaattgcttgaacctaggaggtaggttacagtgagcccagatctcaccactgcactccagcctaggtgacgcagtgagactccatctgaa

SEQ ID NO: 435199 - DNA, 2143 bp, Homo sapiens
caatggtccagtcaatgaccttgcttgaaaatcaacttgttgagaaactttgggtacttaaagttctgcagcatctctcaacttctgaagttaattgtactataatgatgaaagcacaagcagccagtggaatctgtactcacctcaatgacccagatccctctggacagcttttatttcgttcatcagaaatactttggaacttgctggaaaaatcttcaaaagaagaagtcatacaacagcttagtaacttggaatgtttgctggctttgaaggaagtatttaaaaatctgtttatgagaggtttcagtcattatgaccgtcagcttagaaatgacatattagtgatcactacaattatagctcaaaatcctgaagcaccaatgattgaatgtggctttaccaaggatttgatactgtttgccacctttaatgaagttaaaagtcaaaatcttttggtaaaaggacttaagctttctaattcctatgaagattttgagttgaagaaattactattcaacgtaattgtgatcttatgtaaagatttacctactgtacagctattaattgatggcaaagttattttggctttgtttacctatgttaagaagcctgagaagcaaaaaataattgactggtctgcagcacagcatgaagaattacaactgcatgcaattgccactttgtcatcagtggctcctttattaatagaagaatacatgtcatgccagggaaatgctcgagtccttgcatttctagaatggtgtgagagtgaagatccgtttttcagtcatggtaacagttttcatggtacaggtggccgaggcaacaagtttgcccagatgcgttacagtttaagactcctgagagccatggtctaccttgaagatgagactgtaaacaaagatctttgtgaaaagggaacaattcagcaaatgataggaatctttaaaaatataataagcaagcctaatgaaaaggaagaagccattgttttggaaatccagtctgatatattacttatcctatctggcctttgtgagaatcacattcaaaggaaggaaattttcggaactgaaggagtagatatcgttcttcatgtgatgaaaacagaccccaggaagttacagagtggcttaggctataatgtacttctttttagtacattggacagcatttggtgctgtattttgggatgttatccctcagaggattattttcttgaaaaggaaggcatttttctccttttggatttgttagcattgaaccaaaaaaaattctgtaatctaatacttggaataatggttgaattttgtgataatcccaaaactgcagctcatgtcaatgcttggcaagggaagaaggatcagacagctgctagtcttttaattaaattgtggagaaaggaggaaaaagaactaggagtaaaacgtgataaaaatgggaagatcattgattttgaaaatttacctggcctatctgctgaagattttgtcaccctttgtatcatacatagatatcttgattttaaaattggagaaatatggaatgaaatatatgaagaaataaaattagaaaaattaagaccagtcactacagataaaaaagctttggaagctattacaacagcatcagaaaatattggaaagatggttgcttctctgcaaagtgatataattgaaagccaagcatgccaagacatgcaaaatgaacaaaaagtatatgcaaaaatacaggccacgcacaagcaaagagagctggctaataaatcatgggaagatttcttggctagaacatcaaacgctaaaacgttaaagaaagcaaaaaggcttcaagaaaaagctatagaagcctccagataccataaacgaccacaaaatgcaatatttcaccaaacacatattaaaggccttaacacaatggtgccctctggtggagtagtaacagtggaaagcactcctgcccgattagtaggaggacctctggttgatacggatattgctcttaaaaaactgcccattcgaggaggagccttgcagagggtgaaagcagttaaaattgtggatgcaccaaaaaagagtattcctacgtaatatactatagagactttttgaaataaagtcagcttataattttttagctg

SEQ ID NO: 435200 - DNA, 2865 bp, Homo sapiens
caatggtccagtcaatgaccttgcttgaaaatcaacttgttgagaaactttgggtacttaaagttctgcagcatctctcaacttctgaagttaattgtactataatgatgaaagcacaagcagccagtggaatctgtactcacctcaatgacccagatccctctggacagcttttatttcgttcatcagaaatactttggaacttgctggaaaaatcttcaaaagaagaagtcatacaacagcttagtaacttggaatgtttgctggctttgaaggaagtatttaaaaatctgtttatgagaggtttcagtcattatgaccgtcagcttagaaatgacatattagtgatcactacaattatagctcaaaatcctgaagcaccaatgattgaatgtggctttaccaaggatttgatactgtttgccacctttaatgaagttaaaagtcaaaatcttttggtaaaaggacttaagctttctaattcctatgaagattttgagttgaagaaattactattcaacgtaattgtgatcttatgtaaagatttacctactgtacagctattaattgatggcaaagttattttggctttgtttacctatgttaagaagcctgagaagcaaaaaataattgactggtctgcagcacagcatgaagaattacaactgcatgcaattgccactttgtcatcagtggctcctttattaatagaagaatacatgtcatgccagggaaatgctcgagtccttgcatttctagaatggtgtgagagtgaagatccgtttttcagtcatggtaacagttttcatggtacaggtggccgaggcaacaagtttgcccagatgcgttacagtttaagactcctgagagccatggtctaccttgaagatgagactgtaaacaaagatctttgtgaaaagggaacaattcagcaaatgataggaatctttaaaaatataataagcaagcctaatgaaaaggaagaagccattgttttggaaatccagtctgatatattacttatcctatctggcctttgtgagaatcacattcaaaggaaggaaattttcggaactgaaggagtagatatcgttcttcatgtgatgaaaacagaccccaggaagttacagagtggcttaggctataatgtacttctttttagtacattggacagcatttggtgctgtattttgggatgttatccctcagaggattattttcttgaaaaggaaggcatttttctccttttggatttgttagcattgaaccaaaaaaaattctgtaatctaatacttggaataatggttgaattttgtgataatcccaaaactgcagctcatgtcaatgcttggcaagggaagaaggatcagacagctgctagtcttttaattaaattgtggagaaaggaggaaaaagaactaggagtaaaacgtgataaaaatgggaagatcattgatacaaaaaaacctctatttactagctttcaagaagagcaaaaaatcatcccactgcctgctaactgcccatctattgcggttatggatgtttctgagaatattagagcaaaaatttatgctatattgggcaaactagattttgaaaatttacctggcctatctgctgaagattttgtcaccctttgtatcatacatagatatcttgattttaaaatacaggccacgcacaagcaaagagagctggctaataaatcatgggaagatttcttggctagaacatcaaacgctaaaacgttaaagaaagcaaaaaggcttcaagaaaaagctatagaagcctccagataccataaacgaccacaaaatgcaatatttcaccaaacacatattaaaggccttaacacaatggtgccctctggtggagtagtaacagtggaaagcactcctgcccgattagtaggaggacctctggttgatacggatattgctcttaaaaaactgcccattcgaggaggagccttgcagagggtgaaagcagttaaaattgtggatgcaccaaaaaagagtattcctacgtaatatactatagagactttttgaaataaagtcagcttataattttttagctgaatatatctttatacatatgtaaagccaatattttagaataagtattttagtataaatattttagtaaaatactataaaaataaaaggacatataatttatttttatggaaaacatcaacatgtaatatcagaagagttgtcatcagtttctttggaaaggctaccaattttactaagtgaaattgtaaaacatagtacatcagttaggactctgttggttgcatgtgaactattctaactagtttaagtcagaaaaaaaatttcttacaggctctatacctatcaaatctaggaggaatttagactacaggcattgctgaatctaaggactaaaactatatgagtaggatcttctccttccctagcagctcctggcttacattctcttaggttcatgcctgtgtctctgtggtttctgcagctgcctatgcatctcaggacccctgattgcccacatgcctacggtagtcctgagccattcaccatgactttggccatggctgagtactgcctattcctggagccagaagcagggcaactccatccaaaacatatggatagagtggggaatcagggtactattatcagaagcaagtatatatgaatattgggcagcaagataaacaataactctgcaacaagtatgttggtcaaaataaaattatgttttctctgctataaaagcaaatgttagtcatgagccaaatggtaaaaaagaaaaaaaaatgcagctggttttactcttaatatataaatatacaaagcaaactctaatgctact

SEQ ID NO: 435201 - DNA, 377 bp, Homo sapiens
  misc_feature (6)..(6): n is a, c, g, or t
  misc_feature (39)..(40): n is a, c, g, or t
cccccnccccctttttaaaacaggtttctttttctccannaaaaagcggaattccctttgtcgctgggtccctcaaagttttcaagtaccagccccccaaatcatactgtgattttatttttaatatggatatgctatcaaactgtgatacacttataattcactggtcctgcatcaggagatggagtggggaaaactgtatttaatacagtttgtatctgaataatctgtatggtttatacagtttgtgttgttcagagatgtttaaagtttgatctttgtttttctaaagattaaaaaagcacttgccccactgtaaatatacagcatgtaaaatttctatagtatataaatggcagcaaatcccaaaaaaaaaa

SEQ ID NO: 435202 - DNA, 554 bp, Homo sapiens
aaagattttatgctcacagggcacaccatgcagggccatgtggtgaggaagcagaagacaggagcaaggggaaggcattattggccagagccttcgttgaggtttccgtgggaaaagcagggtagggcagggggaagaatttgggattggctggtttgaataatttttgtgggctctgagccacaggtgtggtccagagttgcctggcacctggccctgagatgattagggcagaggagttttgcctcctggggtgcacaggcaggtggatggagaaggaagggctctggattggttagtgtgtatagcaaaggcttgcacgaacgctgagccctttgctacctctaagaattggctagcctgaggggcagcctctccccagccagaaagatctttaggatgtcaaaacatcataataattcttacaattccagcagtttgggaggcagaggagggtggatcacttgagcccaggagtccgagaccagcctggccaacatggtgaaaccctgtctctactgaaatacaaacattagccgggtatggtggtgcat

SEQ ID NO: 435203 - DNA, 3967 bp, Homo sapiens
cgtcattgtcccccgccgggcggctgggctgtgtgcggcggcggcggcggcggccgagggggatggagcgagcgccgagccgggtcagagttgaacaatgaccatagttgacaaagcttctgaatcttcagacccatcagcctatcagaatcagcctggcagctccgaggcagtctcacctggagacatggatgcaggttctgccagctggggtgctgtgtcttcattgaatgatgtgtcaaatcacacactttctttaggaccagtacctggtgctgtagtttattcgagttcatctgtacctgataaatcaaaaccatcaccacaaaaggatcaagccctaggtgatggcatcgctcctccacagaaagttcttttcccatctgagaagatttgtcttaagtggcaacaaactcatagagttggagctgggctccagaatttgggcaatacctgttttgccaatgcagcactgcagtgtttaacctacacaccacctcttgccaattacatgctatcacatgaacactccaaaacatgtcatgcagaaggcttttgtatgatgtgtacaatgcaagcacatattacccaggcactcagtaatcctggggacgttattaaaccaatgtttgtcatcaatgagatgcggcgtatagctaggcacttccgttttggaaaccaagaagatgcccatgaattccttcaatacactgttgatgctatgcagaaagcatgcttgaatggcagcaataaattagacagacacacccaggccaccactcttgtttgtcagatatttggaggatacctaagatctagagtcaaatgtttaaattgcaagggcgtttcagatacttttgatccatatcttgatataacattggagataaaggctgctcagagtgtcaacaaggcattggagcagtttgtgaagccggaacagcttgatggagaaaactcgtacaagtgcagcaagtgtaaaaagatggttccagcttcaaagaggttcactatccatagatcctctaatgttcttacactttctctgaaacgttttgcaaattttaccggtggaaaaattgctaaggatgtgaaataccctgagtatcttgatattcggccatatatgtctcaacccaacggagagccaattgtctacgtcttgtatgcagtgctggtccacactggttttaattgccatgctggccattacttctgctacataaaagctagcaatggcctctggtatcaaatgaatgactccattgtatctaccagtgatattagatcggtactcagccaacaagcctatgtgctcttttatatcaggtcccatgatgtgaaaaatggaggtgaacttactcatcccacccatagccccggccagtcctctccccgccccgtcatcagtcagcgggttgtcaccaacaaacaggctgcgccaggctttatcggaccacagcttccctctcacatgataaagaatccacctcacttaaatgggactggaccattgaaagacacgccaagcagttccatgtcgagtcctaacgggaattccagtgtcaacagggctagtcctgttaatgcttcagcttctgtccaaaactggtcagttaataggtcctcagtgatcccagaacatcctaagaaacaaaaaattacaatcagtattcacaacaagttgcctgttcgccagtgtcagtctcaacctaaccttcatagtaattctttggagaaccctaccaagcccgttccctcttctaccattaccaattctgcagtacagtctacctcgaacgcatctacgatgtcagtttctagtaaagtaacaaaaccgatcccccgcagtgaatcctgctcccagcccgtgatgaatggcaaatccaagctgaactccagcgtgctggtgccctatggcgccgagtcctctgaggactctgacgaggagtcaaaggggctgggcaaggagaatgggattggtacgattgtgagctcccactctcccggccaagatgccgaagatgaggaggccactccgcacgagcttcaagaacccatgaccctaaacggtgctaatagtgcagacagcgacagtgacccgaaagaaaacggcctagcgcctgatggtgccagctgccaaggccagcctgccctgcactcagaaaatccctttgctaaggcaaacggtcttcctggaaagttgatgcctgctcctttgctgtctctcccagaagacaaaatcttagagaccttcaggcttagcaacaaactgaaaggctcgacggatgaaatgagtgcacctggagcagagaggggccctcccgaggaccgcgacgccgagcctcagcctggcagccccgccgccgaatccctggaggagccagatgcggccgccggcctcagcagcaccaagaaggctccgccgccccgcgatcccggcacccccgctaccaaagaaggcgcctgggaggccatggccgtcgcccccgaggagcctccgcccagcgccggcgaggacatcgtgggggacacagcaccccctgacctgtgtgatcccgggagcttaacaggcgatgcgagcccgttgtcccaggacgcaaaggggatgatcgcggagggcccgcgggactcggcgttggcggaagccccggaagggttgagtccggctccgcctgcgcggtcggaggagccctgcgagcagccactccttgttcaccccagcggggaccacgcccgggacgctcaggacccatcccagagcttgggcgcacccgaggccgcagagcggccgccagctcctgtgctggacatggccccggccggtcacccggaaggggacgctgagcctagccccggcgagagggtcgaggacgccgcggcgccgaaagccccaggcccttccccagcgaaggagaaaatcggcagcctcagaaaggtggaccgaggccactaccgcagccggagagagcgctcgtccagcggggagcccgccagagagagcaggagcaagactgagggccaccgtcaccggcggcgccgcacctgcccccgggagcgcgaccgccaggaccgccacgccccggagcaccaccccggccacggcgacaggctcagccctggcgagcgccgctctctgggcaggtgcagtcaccaccactcccgacaccggagcggggtggagctggactgggtcagacaccactacaccgagggcgagcgtggctggggccgggagaagttctaccccgacaggccgcgctgggacaggtgccggtactaccatgacaggtacgccctgtacgctgcccgggactggaagcccttccacggcggccgcgagcacgagcgggccgggctgcacgagcggccgcacaaggaccacaaccggggccgtaggggctgcgagccggcccgggagagggagcggcaccgccccagcagcccccgcgcaggcgcgccccacgccctcgccccgcaccccgaccgcttctcccacgacagaactgcacttgtagccggagacaactgtaacctctctgatcggtttcacgaacacgaaaatggaaagtcccggaaacggagacacgacagtgtggagaacagtgacagtcatgttgaaaagaaagcccggaggagcgaacagaaggatcctctagaagagcctaaagcaaagaagcacaaaaaatcaaagaagaaaaagaaatccaaagacaaacaccgagaccgcgactccaggcatcagcaggactcagacctctcagcagcgtgctctgacgctgacctccaccctcgtgccgaattcgcggtagtgttacccttctgatgttggaacaagggtgggaccagacactattgctaggtttcttggtgccatctgatctgtgtctgaattttctgccactgtgttcagatgagctgaaaggaacttaagtgtttcagagtgatgttcaggcaaatcgtgaat

SEQ ID NO: 435204 - DNA, 4531 bp, Homo sapiens
agatggagtagaagcccacattccccactcagcctccgttggcaccccaggtcatgcagaaggcttttgtatgatgtgtacaatgcaagcacatattacccaggcactcagtaatcctggggacgttattaaaccaatgtttgtcatcaatgagatgcggcgtatagctaggcacttccgttttggaaaccaagaagatgcccatgaattccttcaatacactgttgatgctatgcagaaagcatgcttgaatggcagcaataaattagacagacacacccaggccaccactcttgtttgtcagatatttggaggatacctaagatctagagtcaaatgtttaaattgcaagggcgtttcagatacttttgatccatatcttgatataacattggagataaaggtgtaaaaagatggttccagcttcaaagaggttcactatccatagatcctctaatgttcttacactttctctgaaacgttttgcaaattttaccggtggaaaaattgctaaggatgtgaaataccctgagtatcttgatattcggccatatatgtctcaacccaacggagagccaattgtctacgtcttgtatgcagtgctggtccacactggttttaattgccatgctggccattacttctgctacataaaagctagcaatggcctctggtatcaaatgaatgactccattgtatctaccagtgatattagatcggtactcagccaacaagcctatgtgctcttttatatcaggtcccatgatgtgaaaaatggaggtgaacttactcatcccacccatagccccggccagtcctctccccgccccgtcatcagtcagcgggttgtcaccaacaaacaggctgcgccaggctttatcggaccacagcttccctctcacatgataaagaatccacctcacttaaatgggactggaccattgaaagacacgccaagcagttccatgtcgagtcctaacgggaattccagtgtcaacagggctagtcctgttaatgcttcagcttctgtccaaaactggtcagttaataggtcctcagtgatcccagaacatcctaagaaacaaaaaattacaatcagtattcacaacaagttgcctgttcgccagtgtcagtctcaacctaaccttcatagtaattctttggagaaccctaccaagcccgttccctcttctaccattaccaattctgcagtacagtctacctcgaacgcatctacgatgtcagtttctagtaaagtaacaaaaccgatcccccgcagtgaatcctgctcccagcccgtgatgaatggcaaatccaagctgaactccagcgtgctggtgccctatggcgccgagtcctctgaggactctgacgaggagtcaaaggggctgggcaaggagaatgggattggtacgattgtgagctcccactctcccggccaagatgccgaagatgaggaggccactccgcacgagcttcaagaacccatgaccctaaacggtgctaatagtgcagacagcgacagtgacccgaaagaaaacggcctagcgcctgatggtgccagctgccaaggccagcctgccctgcactcagaaaatccctttgctaaggcaaacggtcttcctggaaagttgatgcctgctcctttgctgtctctcccagaagacaaaatcttagagaccttcaggcttagcaacaaactgaaaggctcgacggatgaaatgagtgcacctggagcagagaggggccctcccgaggaccgcgacgccgagcctcagcctggcagccccgccgccgaatccctggaggagccagatgcggccgccggcctcagcagcaccaagaaggctccgccgccccgcgatcccggcacccccgctaccaaagaaggcgcctgggaggccatggccgtcgcccccgaggagcctccgcccagcgccggcgaggacatcgtgggggacacagcaccccctgacctgtgtgatcccgggagcttaacaggcgatgcgagcccgttgtcccaggacgcaaaggggatgatcgcggagggcccgcgggactcggcgttggcggaagccccggaagggttgagtccggctccgcctgcgcggtcggaggagccctgcgagcagccactccttgttcaccccagcggggaccacgcccgggacgctcaggacccatcccagagcttgggcgcacccgaggccgcagagcggccgccagctcctgtgctggacatggccccggccggtcacccggaaggggacgctgagcctagccccggcgagagggtcgaggacgccgcggcgccgaaagccccaggcccttccccagcgaaggagaaaatcggcagcctcagaaaggtggaccgaggccactaccgcagccggagagagcgctcgtccagcggggagcccgccagagagagcaggagcaagactgagggccaccgtcaccggcggcgccgcacctgcccccgggagcgcgaccgccaggaccgccacgccccggagcaccaccccggccacggcgacaggctcagccctggcgagcgccgctctctgggcaggtgcagtcaccaccactcccgacaccggagcggggtggagctggactgggtcagacaccactacaccgagggcgagcgtggctggggccgggagaagttctaccccgacaggccgcgctgggacaggtgccggtactaccatgacaggtacgccctgtacgctgcccgggactggaagcccttccacggcggccgcgagcacgagcgggccgggctgcacgagcggccgcacaaggaccacaaccggggccgtaggggctgcgagccggcccgggagagggagcggcaccgccccagcagcccccgcgcaggcgcgccccacgccctcgccccgcaccccgaccgcttctcccacgacagaactgcacttgtagccggagacaactgtaacctctctgatcggtttcacgaacacgaaaatggaaagtcccggaaacggagacacgacagtgtggagaacagtgacagtcatgttgaaaagaaagcccggaggagcgaacagaaggatcctctagaagagcctaaagcaaagaagcacaaaaaatcaaagaagaaaaagaaatccaaagacaaacaccgagaccgcgactccaggcatcagcaggactcagacctctcagcagcgtgctctgacgctgacctccacagacacaaaaaaaagaagaagaaaaagaagagacattcaagaaaatcagaggactttgttaaagattcagaactgcacttacccagggtcaccagcttggagactgtcgcccagttccggagagcccagggtggctttcctctctctggtggcccgcctctggaaggcgtcggacctttccgtgagaaaacgaaacacttacggatggaaagcagggatgacaggtgtcgtctctttgagtatggccagggtgattgaaaactcagcctcaaaacaaaaaattcactagttatgattcaacgcgttcaacagaagccatccccagcccagcttaaattataaagatagacaataactctgttccaatctgcgtggtgcttctttagtaaatactgtacagattttaccatggagaactttttttttagtttttaccttttcttaattacccttattccgaatggacgaacactttctaccactgctgaccattgtaaaataccgtgtatataaatcccattgaaataatgccctggaatagaacatctcaaatgctgcttaattacagactcaggtcgattacttgtatttcatgtaatgttcctccaagttagacatctggtgcaagaccaaccgggagaccatggaattgtcaaaagtacaaactgacagtgtgtatatttaatttaaagacttatttaaaaactcacaagctctcacctagactttggagagcagtctgttttctgtaatgtctgatactagaaactaatttgcttattttagttgtattcaagatttgaagatgtattttatagacaagttctgtttttgaactttgtggaactgttccaatcaatcaatttcccagttatgatgagtatttacattatgaatgtataacccagacatgatttgtaaagccgacagtatgtttctattacacaacactttttgatacagcgtctcttgtcttcactgatactggagtctccgttgtctgcttggtcccttcgagtttctagttacagacacaatcatactgtgattttatttttaatatggatatgctatcaaactgtgatacacttataattcactggtcctgcatcaggagatggagtggggaaaactgtatttaatacagtttgtatctgaataatctgtatggtttatacagtttgtgttgttcagagatgtttaaagtttgatctttgtttttctaaagattaaaaaagcacttgccccactgtaaatatacagcatgtaaaatttctatagtatataaatggcagcaaatcccaaaaaaaaaa

SEQ ID NO: 435205 - DNA, 1863 bp, Homo sapiens
tgcattactggctggggaagacccgcatccttcacgcaggcagagtcgccctgttcccttgtgcctcacttgggaaaagccaacccggctcacagcggcagagcccacgggcctttgataaacatctgggaagggagaggcccggtccccagcacaggcacctcactcaggagagcggagccttgctccctcgtccgtcccgtcccctgtgctgctgtctgcgccccgaggtggcactgagctggagccagcacccccccagcagccaccgtacaaaaccataggaaggtggcccagggccgggcagcagatcaggacctcggagctgtggggctttgttggatcacttcacacagcggtcctgggagagtcactggttttatacctgacccttgtggagctagaggggacagtgaaccatttttcccttgaaaggaaactttgtccaaatgtgtctgtcacatgtagtcagcaagaggaatttaaaatgaattgccaagtgaagagtctgtggattaattggccgttaattaacaggctttatcaatgtgtcctcaagggagaggcccaaccctaattaaggagctaaacttcctgagtgaggggctgtgaggatggaggtggaggaggcatctggggcgggtggtggccgggcccagcagatggcgcctccctggctgagctgcccgcaccgccagttccctcatttccactcaggaaggcagagtgatctcaaggaagagcttccccagccttcgggagcagctggcagggcgtccgggaataagccctacacgccgccgcctgcctccaactcactaaccctgcgcctcttgtctttcagattcaacgcgttcaacagaagccatccccagcccagcttaaattataaagatagacaataactctgttccaatctgcgtggtgcttctttagtaaatactgtacagattttaccatggagaactttttttttagtttttaccttttcttaattacccttattccgaatggacgaacactttctaccactgctgaccattgtaaaataccgtgtatataaatcccattgaaataatgccctggaatagaacatctcaaatgctgcttaattacagactcaggtcgattacttgtatttcatgtaatgttcctccaagttagacatctggtgcaagaccaaccgggagaccatggaattgtcaaaagtacaaactgacagtgtgtatatttaatttaaagacttatttaaaaactcacaagctctcacctagactttggagagcagtctgttttctgtaatgtctgatactagaaactaatttgcttattttagttgtattcaagatttgaagatgtattttatagacaagttctgtttttgaactttgtggaactgttccaatcaatcaatttcccagttatgatgagtatttacattatgaatgtataacccagacatgatttgtaaagccgacagtatgtttctattacacaacactttttgatacagcgtctcttgtcttcactgatactggagtctccgttgtctgcttggtcccttcgagtttctagttacagacacaatcatactgtgattttatttttaatatggatatgctatcaaactgtgatacacttataattcactggtcctgcatcaggagatggagtggggaaaactgtatttaatacagtttgtatctgaataatctgtatggtttatacagtttgtgttgttcagagatgtttaaagtttgatctttgtttttctaaagattaaaaaagcacttgccccactgtaaatatacagcatgtaaaatttctatagtatataaatggcagcaaatcccaaaaaaaaaa

SEQ ID NO: 435206 - DNA, 805 bp, Homo sapiens
cgtcattgtcccccgccgggcggctgggctgtgtgcggcggcggcggcggcggccgagggggatggagcgagcgccgagccgggtcagagttgaacaatgaccatagttgacaaagcttctgaatcttcagacccatcagcctatcagaatcagcctggcagctccgaggcagtctcacctggagacatggatgcaggttctgccagctggggtgctgtgtcttcattgaatgatgtgtcaaatcacacactttctttaggaccagtacctggtgctgtagtttattcgagttcatctgtacctgataaatcaaaaccatcaccacaaaaggatcaagccctaggtgatggcatcgctcctccacagaaagttcttttcccatctgagaagatttgtcttaagtggcaacaaactcatagagttggagctgggctccagaatttgggcaatacctgttttgccaatgcagcactgcagtgtttaacctacacaccacctcttgccaattacatgctatcacatgaacactccaaaacatgtcatgcagaaggcttttgtatgatgtgtacaatgcaagcacatattacccaggcactcagtaatcctggggacgttattaaaccaatgtttgtcatcaatgagatgcggcgtatagctaggcacttccgttttggaaaccaagaagatgcccatgaattccttcaatacactgttgatgctatgcagaaagcatgcttgaatggcagcaataaattagactagacacacccaaacctgtatgacccgaatggatcctcgggtcag

SEQ ID NO: 435207 - DNA, 385 bp, Homo sapiens
tctgcagtccagcctgggcgacgcagcaagaccctgtctcaaaaaaaggaaaatataaataaacagaaaagaaatacctttcagatgaaacagcatcttcagaaaacacagtttaaagaacgtcatttacccagttatccttgttgtctcctgatctgagtgcctgacattagcctgaaggaggggatgtgtatagctccatactgtgtagcataaacatgctatttttttcatcaggtttccgcctgaggggttaaatgctgttgactttgtaaatgaatctctcctaaggaggtgtcctgtgtcaccctaagtatcgctctccttgtttccaggtcccatgatgtgaaaaatggaggtgaacttactcatcccacccatagcc

SEQ ID NO: 435208 - DNA, 383 bp, Homo sapiens
ttgtttactggagaaaccagatcattgaaaatttctcatgttctggtttctgtcttttaaaatgtccctcttccccctgtatttcaggtaggctggtcatgagatttcggatcttgtaaagattgaggtttgaccaggtgttactatttatttagcttcagtatgcaaagcttggtttctgactctttcttgtttatttttctagccctaggtgatggcatcgctcctccacagaaagttcttttcccatctgagaagatttgtcttaagtggcaacaaactcatagagttggagctgggctccagaatttgggcaatacctgttttgccaatgcagcactgcagtgtttaacctacacaccacctcttgccaattacatgct

SEQ ID NO: 435209 - DNA, 290 bp, Homo sapiens
ggtgttctgtgggtctcccctcctaggaagctctaagtaccctctacctgaatatgtggaatgatctgtgccctcggaaatgtttctcctgtttccatttccttctaggatgtgaaataccctgagtatcttgatattcggccatatatgtctcaacccaacggagagccaattgtctacgtcttgtatgcagtgctggtccacactggttttaattgccatgctggccattacttctgctacataaaagtaagctgtgcagatttgctattaactattgttacatacat

SEQ ID NO: 435210 - DNA, 5103 bp, Homo sapiens
cgtcattgtcccccgccgggcggctgggctgtgtgcggcggcggcggcggcggccgagggggatggagcgagcgccgagccgggtcagagttgaacaatgaccatagttgacaaagcttctgaatcttcagacccatcagcctatcagaatcagcctggcagctccgaggcagtctcacctggagacatggatgcaggttctgccagctggggtgctgtgtcttcattgaatgatgtgtcaaatcacacactttctttaggaccagtacctggtgctgtagtttattcgagttcatctgtacctgataaatcaaaaccatcaccacaaaaggatcaagccctaggtgatggcatcgctcctccacagaaagttcttttcccatctgagaagatttgtcttaagtggcaacaaactcatagagttggagctgggctccagaatttgggcaatacctgttttgccaatgcagcactgcagtgtttaacctacacaccacctcttgccaattacatgctatcacatgaacactccaaaacatgtcatgcagaaggcttttgtatgatgtgtacaatgcaagcacatattacccaggcactcagtaatcctggggacgttattaaaccaatgtttgtcatcaatgagatgcggcgtatagctaggcacttccgttttggaaaccaagaagatgcccatgaattccttcaatacactgttgatgctatgcagaaagcatgcttgaatggcagcaataaattagacagacacacccaggccaccactcttgtttgtcagatatttggaggatacctaagatctagagtcaaatgtttaaattgcaagggcgtttcagatacttttgatccatatcttgatataacattggagataaaggctgctcagagtgtcaacaaggcattggagcagtttgtgaagccggaacagcttgatggagaaaactcgtacaagtgcagcaagtgtaaaaagatggttccagcttcaaagaggttcactatccatagatcctctaatgttcttacactttctctgaaacgttttgcaaattttaccggtggaaaaattgctaaggatgtgaaataccctgagtatcttgatattcggccatatatgtctcaacccaacggagagccaattgtctacgtcttgtatgcagtgctggtccacactggttttaattgccatgctggccattacttctgctacataaaagctagcaatggcctctggtatcaaatgaatgactccattgtatctaccagtgatattagatcggtactcagccaacaagcctatgtgctcttttatatcaggtcccatgatgtgaaaaatggaggtgaacttactcatcccacccatagccccggccagtcctctccccgccccgtcatcagtcagcgggttgtcaccaacaaacaggctgcgccaggctttatcggaccacagcttccctctcacatgataaagaatccacctcacttaaatgggactggaccattgaaagacacgccaagcagttccatgtcgagtcctaacgggaattccagtgtcaacagggctagtcctgttaatgcttcagcttctgtccaaaactggtcagttaataggtcctcagtgatcccagaacatcctaagaaacaaaaaattacaatcagtattcacaacaagttgcctgttcgccagtgtcagtctcaacctaaccttcatagtaattctttggagaaccctaccaagcccgttccctcttctaccattaccaattctgcagtacagtctacctcgaacgcatctacgatgtcagtttctagtaaagtaacaaaaccgatcccccgcagtgaatcctgctcccagcccgtgatgaatggcaaatccaagctgaactccagcgtgctggtgccctatggcgccgagtcctctgaggactctgacgaggagtcaaaggggctgggcaaggagaatgggattggtacgattgtgagctcccactctcccggccaagatgccgaagatgaggaggccactccgcacgagcttcaagaacccatgaccctaaacggtgctaatagtgcagacagcgacagtgacccgaaagaaaacggcctagcgcctgatggtgccagctgccaaggccagcctgccctgcactcagaaaatccctttgctaaggcaaacggtcttcctggaaagttgatgcctgctcctttgctgtctctcccagaagacaaaatcttagagaccttcaggcttagcaacaaactgaaaggctcgacggatgaaatgagtgcacctggagcagagaggggccctcccgaggaccgcgacgccgagcctcagcctggcagccccgccgccgaatccctggaggagccagatgcggccgccggcctcagcagcaccaagaaggctccgccgccccgcgatcccggcacccccgctaccaaagaaggcgcctgggaggccatggccgtcgcccccgaggagcctccgcccagcgccggcgaggacatcgtgggggacacagcaccccctgacctgtgtgatcccgggagcttaacaggcgatgcgagcccgttgtcccaggacgcaaaggggatgatcgcggagggcccgcgggactcggcgttggcggaagccccggaagggttgagtccggctccgcctgcgcggtcggaggagccctgcgagcagccactccttgttcaccccagcggggaccacgcccgggacgctcaggacccatcccagagcttgggcgcacccgaggccgcagagcggccgccagctcctgtgctggacatggccccggccggtcacccggaaggggacgctgagcctagccccggcgagagggtcgaggacgccgcggcgccgaaagccccaggcccttccccagcgaaggagaaaatcggcagcctcagaaaggtggaccgaggccactaccgcagccggagagagcgctcgtccagcggggagcccgccagagagagcaggagcaagactgagggccaccgtcaccggcggcgccgcacctgcccccgggagcgcgaccgccaggaccgccacgccccggagcaccaccccggccacggcgacaggctcagccctggcgagcgccgctctctgggcaggtgcagtcaccaccactcccgacaccggagcggggtggagctggactgggtcagacaccactacaccgagggcgagcgtggctggggccgggagaagttctaccccgacaggccgcgctgggacaggtgccggtactaccatgacaggtacgccctgtacgctgcccgggactggaagcccttccacggcggccgcgagcacgagcgggccgggctgcacgagcggccgcacaaggaccacaaccggggccgtaggggctgcgagccggcccgggagagggagcggcaccgccccagcagcccccgcgcaggcgcgccccacgccctcgccccgcaccccgaccgcttctcccacgacagaactgcacttgtagccggagacaactgtaacctctctgatcggtttcacgaacacgaaaatggaaagtcccggaaacggagacacgacagtgtggagaacagtgacagtcatgttgaaaagaaagcccggaggagcgaacagaaggatcctctagaagagcctaaagcaaagaagcacaaaaaatcaaagaagaaaaagaaatccaaagacaaacaccgagaccgcgactccaggcatcagcaggactcagacctctcagcagcgtgctctgacgctgacctccacagacacaaaaaaaagaagaagaaaaagaagagacattcaagaaaatcagaggactttgttaaagattcagaactgcacttacccagggtcaccagcttggagactgtcgcccagttccggagagcccagggtggctttcctctctctggtggcccgcctctggaaggcgtcggacctttccgtgagaaaacgaaacacttacggatggaaagcagggatgacaggtgtcgtctctttgagtatggccagggtgattgaaaactcagcctcaaaacaaaaaattcactagttatgattcaacgcgttcaacagaagccatccccagcccagcttaaattataaagatagacaataactctgttccaatctgcgtggtgcttctttagtaaatactgtacagattttaccatggagaactttttttttagtttttaccttttcttaattacccttattccgaatggacgaacactttctaccactgctgaccattgtaaaataccgtgtatataaatcccattgaaataatgccctggaatagaacatctcaaatgctgcttaattacagactcaggtcgattacttgtatttcatgtaatgttcctccaagttagacatctggtgcaagaccaaccgggagaccatggaattgtcaaaagtacaaactgacagtgtgtatatttaatttaaagacttatttaaaaactcacaagctctcacctagactttggagagcagtctgttttctgtaatgtctgatactagaaactaatttgcttattttagttgtattcaagatttgaagatgtattttatagacaagttctgtttttgaactttgtggaactgttccaatcaatcaatttcccagttatgatgagtatttacattatgaatgtataacccagacatgatttgtaaagccgacagtatgtttctattacacaacactttttgatacagcgtctcttgtcttcactgatactggagtctccgttgtctgcttggtcccttcgagtttctagttacagacacaatcatactgtgattttatttttaatatggatatgctatcaaactgtgatacacttataattcactggtcctgcatcaggagatggagtggggaaaactgtatttaatacagtttgtatctgaataatctgtatggtttatacagtttgtgttgttcagagatgtttaaagtttgatctttgtttttctaaagattaaaaaagcacttgccccactgtaaatatacagcatgtaaaatttctatagtatataaatggcagcaaatcccaaaaaaaaaa

SEQ ID NO: 435211 - DNA, 4685 bp, Homo sapiens
aaagattttatgctcacagggcacaccatgcagggccatgtggtgaggaagcagaagacaggagcaaggggaaggcattattggccagagccttcgttgaggtttccgtgggaaaagcagggtcatgcagaaggcttttgtatgatgtgtacaatgcaagcacatattacccaggcactcagtaatcctggggacgttattaaaccaatgtttgtcatcaatgagatgcggcgtatagctaggcacttccgttttggaaaccaagaagatgcccatgaattccttcaatacactgttgatgctatgcagaaagcatgcttgaatggcagcaataaattagacagacacacccaggccaccactcttgtttgtcagatatttggaggatacctaagatctagagtcaaatgtttaaattgcaagggcgtttcagatacttttgatccatatcttgatataacattggagataaaggctgctcagagtgtcaacaaggcattggagcagtttgtgaagccggaacagcttgatggagaaaactcgtacaagtgcagcaagtgtaaaaagatggttccagcttcaaagaggttcactatccatagatcctctaatgttcttacactttctctgaaacgttttgcaaattttaccggtggaaaaattgctaaggatgtgaaataccctgagtatcttgatattcggccatatatgtctcaacccaacggagagccaattgtctacgtcttgtatgcagtgctggtccacactggttttaattgccatgctggccattacttctgctacataaaagctagcaatggcctctggtatcaaatgaatgactccattgtatctaccagtgatattagatcggtactcagccaacaagcctatgtgctcttttatatcaggtcccatgatgtgaaaaatggaggtgaacttactcatcccacccatagccccggccagtcctctccccgccccgtcatcagtcagcgggttgtcaccaacaaacaggctgcgccaggctttatcggaccacagcttccctctcacatgataaagaatccacctcacttaaatgggactggaccattgaaagacacgccaagcagttccatgtcgagtcctaacgggaattccagtgtcaacagggctagtcctgttaatgcttcagcttctgtccaaaactggtcagttaataggtcctcagtgatcccagaacatcctaagaaacaaaaaattacaatcagtattcacaacaagttgcctgttcgccagtgtcagtctcaacctaaccttcatagtaattctttggagaaccctaccaagcccgttccctcttctaccattaccaattctgcagtacagtctacctcgaacgcatctacgatgtcagtttctagtaaagtaacaaaaccgatcccccgcagtgaatcctgctcccagcccgtgatgaatggcaaatccaagctgaactccagcgtgctggtgccctatggcgccgagtcctctgaggactctgacgaggagtcaaaggggctgggcaaggagaatgggattggtacgattgtgagctcccactctcccggccaagatgccgaagatgaggaggccactccgcacgagcttcaagaacccatgaccctaaacggtgctaatagtgcagacagcgacagtgacccgaaagaaaacggcctagcgcctgatggtgccagctgccaaggccagcctgccctgcactcagaaaatccctttgctaaggcaaacggtcttcctggaaagttgatgcctgctcctttgctgtctctcccagaagacaaaatcttagagaccttcaggcttagcaacaaactgaaaggctcgacggatgaaatgagtgcacctggagcagagaggggccctcccgaggaccgcgacgccgagcctcagcctggcagccccgccgccgaatccctggaggagccagatgcggccgccggcctcagcagcaccaagaaggctccgccgccccgcgatcccggcacccccgctaccaaagaaggcgcctgggaggccatggccgtcgcccccgaggagcctccgcccagcgccggcgaggacatcgtgggggacacagcaccccctgacctgtgtgatcccgggagcttaacaggcgatgcgagcccgttgtcccaggacgcaaaggggatgatcgcggagggcccgcgggactcggcgttggcggaagccccggaagggttgagtccggctccgcctgcgcggtcggaggagccctgcgagcagccactccttgttcaccccagcggggaccacgcccgggacgctcaggacccatcccagagcttgggcgcacccgaggccgcagagcggccgccagctcctgtgctggacatggccccggccggtcacccggaaggggacgctgagcctagccccggcgagagggtcgaggacgccgcggcgccgaaagccccaggcccttccccagcgaaggagaaaatcggcagcctcagaaaggtggaccgaggccactaccgcagccggagagagcgctcgtccagcggggagcccgccagagagagcaggagcaagactgagggccaccgtcaccggcggcgccgcacctgcccccgggagcgcgaccgccaggaccgccacgccccggagcaccaccccggccacggcgacaggctcagccctggcgagcgccgctctctgggcaggtgcagtcaccaccactcccgacaccggagcggggtggagctggactgggtcagacaccactacaccgagggcgagcgtggctggggccgggagaagttctaccccgacaggccgcgctgggacaggtgccggtactaccatgacaggtacgccctgtacgctgcccgggactggaagcccttccacggcggccgcgagcacgagcgggccgggctgcacgagcggccgcacaaggaccacaaccggggccgtaggggctgcgagccggcccgggagagggagcggcaccgccccagcagcccccgcgcaggcgcgccccacgccctcgccccgcaccccgaccgcttctcccacgacagaactgcacttgtagccggagacaactgtaacctctctgatcggtttcacgaacacgaaaatggaaagtcccggaaacggagacacgacagtgtggagaacagtgacagtcatgttgaaaagaaagcccggaggagcgaacagaaggatcctctagaagagcctaaagcaaagaagcacaaaaaatcaaagaagaaaaagaaatccaaagacaaacaccgagaccgcgactccaggcatcagcaggactcagacctctcagcagcgtgctctgacgctgacctccacagacacaaaaaaaagaagaagaaaaagaagagacattcaagaaaatcagaggactttgttaaagattcagaactgcacttacccagggtcaccagcttggagactgtcgcccagttccggagagcccagggtggctttcctctctctggtggcccgcctctggaaggcgtcggacctttccgtgagaaaacgaaacacttacggatggaaagcagggatgacaggtgtcgtctctttgagtatggccagggtgattgaaaactcagcctcaaaacaaaaaattcactagttatgattcaacgcgttcaacagaagccatccccagcccagcttaaattataaagatagacaataactctgttccaatctgcgtggtgcttctttagtaaatactgtacagattttaccatggagaactttttttttagtttttaccttttcttaattacccttattccgaatggacgaacactttctaccactgctgaccattgtaaaataccgtgtatataaatcccattgaaataatgccctggaatagaacatctcaaatgctgcttaattacagactcaggtcgattacttgtatttcatgtaatgttcctccaagttagacatctggtgcaagaccaaccgggagaccatggaattgtcaaaagtacaaactgacagtgtgtatatttaatttaaagacttatttaaaaactcacaagctctcacctagactttggagagcagtctgttttctgtaatgtctgatactagaaactaatttgcttattttagttgtattcaagatttgaagatgtattttatagacaagttctgtttttgaactttgtggaactgttccaatcaatcaatttcccagttatgatgagtatttacattatgaatgtataacccagacatgatttgtaaagccgacagtatgtttctattacacaacactttttgatacagcgtctcttgtcttcactgatactggagtctccgttgtctgcttggtcccttcgagtttctagttacagacacaatcatactgtgattttatttttaatatggatatgctatcaaactgtgatacacttataattcactggtcctgcatcaggagatggagtggggaaaactgtatttaatacagtttgtatctgaataatctgtatggtttatacagtttgtgttgttcagagatgtttaaagtttgatctttgtttttctaaagattaaaaaagcacttgccccactgtaaatatacagcatgtaaaatttctatagtatataaatggcagcaaatcccaaaaaaaaaa

SEQ ID NO: 435212 - DNA, 3076 bp, Homo sapiens
cgtcattgtcccccgccgggcggctgggctgtgtgcggcggcggcggcggcggccgagggggatggagcgagcgccgagccgggtcagagttgaacaatgaccatagttgacaaagcttctgaatcttcagacccatcagcctatcagaatcagcctggcagctccgaggcagtctcacctggagacatggatgcaggttctgccagctggggtgctgtgtcttcattgaatgatgtgtcaaatcacacactttctttaggaccagtacctggtgctgtagtttattcgagttcatctgtacctgataaatcaaaaccatcaccacaaaaggatcaagccctaggtgatggcatcgctcctccacagaaagttcttttcccatctgagaagatttgtcttaagtggcaacaaactcatagagttggagctgggctccagaatttgggcaatacctgttttgccaatgcagcactgcagtgtttaacctacacaccacctcttgccaattacatgctatcacatgaacactccaaaacatgtcatgcagaaggcttttgtatgatgtgtacaatgcaagcacatattacccaggcactcagtaatcctggggacgttattaaaccaatgtttgtcatcaatgagatgcggcgtatagctaggcacttccgttttggaaaccaagaagatgcccatgaattccttcaatacactgttgatgctatgcagaaagcatgcttgaatggcagcaataaattagacagacacacccaggccaccactcttgtttgtcagatatttggaggatacctaagatctagagtcaaatgtttaaattgcaagggcgtttcagatacttttgatccatatcttgatataacattggagataaaggctgctcagagtgtcaacaaggcattggagcagtttgtgaagccggaacagcttgatggagaaaactcgtacaagtgcagcaagtgtaaaaagatggttccagcttcaaagaggttcactatccatagatcctctaatgttcttacactttctctgaaacgttttgcaaattttaccggtggaaaaattgctaaggatgtgaaataccctgagtatcttgatattcggccatatatgtctcaacccaacggagagccaattgtctacgtcttgtatgcagtgctggtccacactggttttaattgccatgctggccattacttctgctacataaaagctagcaatggcctctggtatcaaatgaatgactccattgtatctaccagtgatattagatcggtactcagccaacaagcctatgtgctcttttatatcaggtcccatgatgtgaaaaatggaggtgaacttactcatcccacccatagccccggccagtcctctccccgccccgtcatcagtcagcgggttgtcaccaacaaacaggctgcgccaggctttatcggaccacagcttccctctcacatgataaagaatccacctcacttaaatgggactggaccattgaaagacacgccaagcagttccatgtcgagtcctaacgggaattccagtgtcaacagggctagtcctgttaatgcttcagcttctgtccaaaactggtcagttaataggtcctcagtgatcccagaacatcctaagaaacaaaaaatcaaagaagaaaaagaaatccaaagacaaacaccgagaccgcgactccaggcatcagcaggactcagacctctcagcagcgtgctctgacgctgacctccacagacacaaaaaaaagaagaagaaaaagaagagacattcaagaaaatcagaggactttgttaaagattcagaactgcacttacccagggtcaccagcttggagactgtcgcccagttccggagagcccagggtggctttcctctctctggtggcccgcctctggaaggcgtcggacctttccgtgagaaaacgaaacacttacggatggaaagcagggatgacaggtgtcgtctctttgagtatggccagggtgattgaaaactcagcctcaaaacaaaaaattcactagttatgattcaacgcgttcaacagaagccatccccagcccagcttaaattataaagatagacaataactctgttccaatctgcgtggtgcttctttagtaaatactgtacagattttaccatggagaactttttttttagtttttaccttttcttaattacccttattccgaatggacgaacactttctaccactgctgaccattgtaaaataccgtgtatataaatcccattgaaataatgccctggaatagaacatctcaaatgctgcttaattacagactcaggtcgattacttgtatttcatgtaatgttcctccaagttagacatctggtgcaagaccaaccgggagaccatggaattgtcaaaagtacaaactgacagtgtgtatatttaatttaaagacttatttaaaaactcacaagctctcacctagactttggagagcagtctgttttctgtaatgtctgatactagaaactaatttgcttattttagttgtattcaagatttgaagatgtattttatagacaagttctgtttttgaactttgtggaactgttccaatcaatcaatttcccagttatgatgagtatttacattatgaatgtataacccagacatgatttgtaaagccgacagtatgtttctattacacaacactttttgatacagcgtctcttgtcttcactgatactggagtctccgttgtctgcttggtcccttcgagtttctagttacagacacaatcatactgtgattttatttttaatatggatatgctatcaaactgtgatacacttataattcactggtcctgcatcaggagatggagtggggaaaactgtatttaatacagtttgtatctgaataatctgtatggtttatacagtttgtgttgttcagagatgtttaaagtttgatctttgtttttctaaagattaaaaaagcacttgccccactgtaaatatacagcatgtaaaatttctatagtatataaatggcagcaaatcccaaaaaaaaaa

SEQ ID NO: 435213 - DNA, 832 bp, Homo sapiens
ctgcccggtgagagctgccgtggattggtgggggcactgactcactggccctgccatgcccacgccactgctcccgctgctgcttcgattgctgctgtcctgcctgctgctgcctgctgcccgcctggcccgccaatacctcctgcccctgctgcgccgattggcccgccgcctgggctcccaggacatgcgagaggctttgctgggctgtctgctgttcattctcagccagcgacactcgccagacgctggggaggcctcaagagtggaccgcctggagaggagggagaggttaggcccccaaaagtgaggccacaagtcctggcagcagctgtatccacaaaatgctttcttttggagtaggataagactggcaccagcactgaccgaagcctgcccagtggacagaagatatagtgagggttgtgcatgagagggatctgccacagacatgcctctccactcccaacagaaatgtctttctggaagaatgccttgcatctagcacaaaactgattattgcccctctgtcctccagcagttcctcccaaagaccactcctaatcacctctggcctcaggcgggaggggaactaacacccacccacccctgccctccctgcaaatgggaacatcaaggttcccagtgcttaactgagggacaagtgacaatttagcagagaggcaagatttgaatccagactgtcttccagactcaggacctaccttaaaataatatctgagttgcttatggaggcagacctgcctgcaaagcccagcactcagcaagtgctcaataaatatttgatttgaattctttcaaaaaaatgaaa

SEQ ID NO: 435214 - DNA, 7658 bp, Homo sapiens
agcagtgctaaaggagcccggcggaggcagcggtgggtttgggactgaggcgctggatctgtggtcgcggctggggacgtgcgcccgcgccaccatcttcggctgaagaggcaattgcttttggatcgttccatttacaatggcgcagagaactggactcgaggatccagagaggtatctctttgtggacagggctgtcatctacaaccctgccactcaagctgattggacagctaaaaagctagtgtggattccatcagaacgccatggttttgaggcagctagtatcaaagaagaacggggagatgaagttatggtggagttggcagagaatggaaagaaagcaatggtcaacaaagatgatattcagaagatgaacccacctaagttttccaaggtggaggatatggcagaattgacatgcttgaatgaagcttccgttttacataatctgaaggatcgctactattcaggactaatctatacttattctggactcttctgtgtagttataaacccttacaagaatcttccaatttactctgagaatattattgaaatgtacagagggaagaagcgtcatgagatgcctccacacatctatgctatatctgaatctgcttacagatgcatgcttcaagatcgtgaggaccagtcaattctttgcacgggtgagtcaggtgctgggaagacagaaaatacaaagaaagttattcagtaccttgcccatgttgcttcttcacataaaggaagaaaggaccataatattcctggggaacttgaacggcagcttttgcaagcaaatccaattctggaatcatttggaaatgcgaagactgtgaaaaatgataactcatctcgttttggcaaatttattcggatcaactttgatgtaactggctatatcgttggggccaacattgaaacataccttctggaaaagtctcgtgctgttcgtcaagcaaaagatgaacgtacttttcatatcttttaccagttgttatctggagcaggagaacacctaaagtctgatttgcttcttgaaggatttaataactacaggtttctctccaatggctatattcctattccgggacagcaagacaaagataatttccaggagaccatggaagcaatgcacataatgggcttctcccatgaagagattctgtcaatgcttaaagtagtatcttcagtgctacagtttggaaatatttctttcaaaaaggagagaaatactgatcaagcttccatgccagaaaatacagttgcgcagaagctctgccatcttcttgggatgaatgtgatggagtttactcgggccatcctgactccccggatcaaggtcggccgagactatgtgcaaaaagcccagaccaaagaacaggcagattttgcagtagaagcattggcaaaagctacctatgagcggctctttcgctggctcgttcatcgcatcaataaagctctggataggaccaaacgtcagggagcatctttcattggaatcctggatattgctggatttgaaatttttgagctgaactcctttgaacaactttgcatcaactacaccaatgagaagctgcagcagctgttcaaccacaccatgtttatcctagaacaagaggaataccagcgcgaaggcatcgagtggaacttcatcgatttcgggctggatctgcagccatgcatcgacctaatagagagacctgcgaaccctcctggtgtactggcccttttggatgaagaatgctggttccctaaagccacagataaaacctttgttgaaaaactggttcaagagcaaggttcccactccaagtttcagaaacctcgacaattaaaagacaaagctgatttttgcattatacattatgcagggaaggtggactataaggcagatgagtggctgatgaagaatatggaccccctgaatgacaacgtggccacccttttgcaccagtcatcagacagatttgtggcagagctttggaaagatgtggaccgtatcgtgggtctggatcaagtcactggtatgactgagacagcttttggctccgcatataaaaccaagaagggcatgtttcgtaccgttgggcaactctacaaagaatctctcaccaagctgatggcaactctccgaaacaccaaccctaactttgttcgttgtatcattccaaatcacgagaagagggctggaaaattggatccacacctagtcctagatcagcttcgctgtaatggtgtcctggaagggatccgaatctgtcgccagggcttccctaaccgaatagttttccaggaattcagacagagatatgagatcctaactccaaatgctattcctaaaggttttatggatggtaaacaggcctgtgaacgaatgatccgggctttagaattggacccaaacttgtacagaattggacagagcaagatatttttcagagctggagttctggcacacttagaggaagaaagagatttaaaaatcaccgatatcattatcttcttccaggccgtttgcagaggttacctggccagaaaggcctttgccaagaagcagcagcaactaagtgccttaaaggtcttgcagcggaactgtgccgcgtacctgaaattacggcactggcagtggtggcgagtcttcacaaaggtgaagccgcttctacaagtgactcgccaggaggaagaacttcaggccaaagatgaagagctgttgaaggtgaaggagaagcagacgaaggtggaaggagagctggaggagatggagcggaagcaccagcagcttttagaagagaagaatatccttgcagaacaactacaagcagagactgagctctttgctgaagcagaagagatgagggcaagacttgctgctaaaaagcaggaattagaagagattctacatgacttggagtctagggttgaagaagaagaagaaagaaaccaaatcctccaaaatgaaaagaaaaaaatgcaagcacatattcaggacctggaagaacagctagacgaggaggaaggggctcggcaaaagctgcagctggaaaaggtgacagcagaggccaagatcaagaagatggaagaggagattctgcttctcgaggaccaaaattccaagttcatcaaagaaaagaaactcatggaagatcgcattgctgagtgttcctctcagctggctgaagaggaagaaaaggcgaaaaacttggccaaaatcaggaataagcaagaagtgatgatctcagatttagaagaacgcttaaagaaggaagaaaagactcgtcaggaactggaaaaggccaaaagaaaactcgacggggagacgaccgacctgcaggaccagatcgcagagctgcaggcgcagattgatgagctcaagctgcagctggccaagaaggaggaggagctgcagggcgcactggccagaggtgatgatgaaacactccataagaacaatgcccttaaagttgtgcgagagctacaagcccaaattgctgaacttcaggaagactttgaatccgagaaggcttcacggaacaaggccgaaaagcagaaaagggacttgagtgaggaactggaagctctgaaaacagagctggaggacacgctggacaccacggcagcccagcaggaactacgtacaaaacgtgaacaagaagtggcagagctgaagaaagctcttgaggaggaaactaagaaccatgaagctcaaatccaggacatgagacaaagacacgcaacagccctggaggagctctcagagcagctggaacaggccaagcggttcaaagcaaatctagagaagaacaagcagggcctggagacagataacaaggagctggcgtgtgaggtgaaggtcctgcagcaggtcaaggctgagtctgagcacaagaggaagaagctcgacgcgcaggtccaggagctccatgccaaggtctctgaaggcgacaggctcagggtggagctggcggagaaagcaagtaagctgcagaatgagctagataatgtctccacccttctggaagaagcagagaagaagggtattaaatttgctaaggatgcagctagtcttgagtctcaactacaggatacacaggagcttcttcaggaggagacacgccagaaactaaacctgagcagtcggatccggcagctggaagaggagaagaacagtcttcaggagcagcaggaggaggaggaggaggccaggaagaacctggagaagcaagtgctggccctgcagtcccagttggctgataccaagaagaaagtagatgacgacctgggaacaattgaaagtctggaagaagccaagaagaagcttctgaaggacgcggaggccctgagccagcgcctggaggagaaggcactggcgtatgacaaactggagaagaccaagaaccgcctgcagcaggagctggacgacctcacggtggacctggaccaccagcgccaggtcgcctccaacttggagaagaagcagaagaagtttgaccagctgttagcagaagagaagagcatctctgctcgctatgccgaagagcgggaccgggccgaagccgaggccagagagaaagaaaccaaagccctgtcactggcccgggccctcgaggaagccctggaggccaaggaggagtttgagaggcagaacaagcagctccgagcagacatggaagacctcatgagctccaaagatgatgtgggaaaaaacgttcacgaacttgaaaaatccaaacgggccctagagcagcaggtggaggaaatgaggacccagctggaggagctggaagacgaactccaggccacggaagatgccaagcttcgtctggaggtcaacatgcaggccatgaaggcgcagttcgagagagacctgcaaaccagggatgagcagaatgaagagaagaagcggctgctgatcaaacaggtgcgggagctcgaggcggagctggaggatgagaggaaacagcgggcgcttgctgtagcttcaaagaaaaagatggagatagacctgaaggacctcgaagcccaaatcgaggctgcgaacaaagctcgggatgaggtgattaagcagctccgcaagctccaggctcagatgaaggattaccaacgtgaattagaagaagctcgtgcatccagagatgagatttttgctcaatccaaagagagtgaaaagaaattgaagagtctggaagcagaaatccttcaattgcaggaggaacttgcctcatctgagcgagcccgccgacacgccgagcaggagagagatgagctggcggacgagatcaccaacagcgcctctggcaagtccgcgctgctggatgagaagcggcgtctggaagctcggatcgcacagctggaggaggagctggaagaggagcagagcaacatggagctgctcaacgaccgcttccgcaagaccactctacaggtggacacactgaacgccgagctagcagccgagcgcagcgccgcccagaagagtgacaatgcacgccagcaactggagcggcagaacaaggagctgaaggccaagctgcaggaactcgagggtgctgtcaagtctaagttcaaggccaccatctcagccctggaggccaagattgggcagctggaggagcagcttgagcaggaagccaaggaacgagcagccgccaacaaattagtccgtcgcactgagaagaagctgaaagaaatcttcatgcaggttgaggatgagcgtcgacacgcggaccagtataaagagcagatggagaaggccaacgctcggatgaagcagcttaaacgccagctggaggaagcagaagaagaagcgacgcgtgccaacgcatctcggcgtaaactccagcgggaactggatgatgccaccgaggccaacgagggcctgagccgcgaggtcagcaccctgaagaaccggctgaggcggggtggccccatcagcttctcttccagccgatctggccggcgccagctgcaccttgaaggagcttccctggagctctccgacgatgacacagaaagtaagaccagtgatgtcaacgagacgcagccaccccagtcagagtaaagttgcaggaagccagaggaggcaatacagtgggacagttaggaatgcacccggggcctcctgcagatttcggaaattggcaagctacgggattccttcctgaaagatcaactgtgtcttaaggctctccagcctatgcatactgtatcctgcttcagacttaggtacaattgctcccctttttatatacagacacacacaggacacatatattaaacagattgtttcatcattgcatctattttccatatagtcatcaagagaccattttataaaacatggtaagaccctttttaaaacaaactccaggcccttggttgcgggtcgctgggttattggggcagcgccgtggtcgtcactcagtcgctctgcatgctctctgtcatacagacaggtaacctagttctgtgttcacgtggcccccgacgactcagccacatcaagtctcctagaccactgtggactctaaactgcacttgtctctctcatttccttcaaataatgatcaatgctatttcagtgagcaaactgtgaaaggggctttggaaagagtaggaggggtgggctggatcggaagcaacacccatttggggttaccatgtccatcccccaaggggggccctgcccctcgagtcgatggtgtcccgcatctactcatgtgaactggccttggcgagggctggtctgtgcatagaagggatagtggccacactgcagctgaggccccaggtggcagccatggatcatgtagacttccagatggtctcccgaaccgcctggctctgccggcgccctcctcacgtcaggagcaagcagccgtggacccctaagccgagctggtggaaggcccctccccgtcgccagccgggccctcatgctgaccttgcaaattcagccgctgctttgagcccaaaatgggaatattggttttgtgtccgaggcttgttccaagtttgtcaatgaggtttatggagcctccagaacagatgccatcttcctgaatgttgacatgccagtgggtgtgactccttcatttttccttctcccttccctttggacagtgttacagtgaacacttagcatcctgtttttggttggtagttaagcaaactgacattacggaaagtgccttagacactacagtactaagacaatgttgaatatatcattcgcctctataacaatttaatgtattcagttttgactgtgcttcatatcatgtacctctctagtcaaagtggtattacagacattcagtgacaatgaatcagtgttaattctaaatccttgatcctctgcaatgtgcttgaaaacacaaaccttttgggttaaaagctttaacatctattaggaagaatttgtcctgtgggtttggaatcttggattttccccctttatgaactgtactggctgttgaccaccagacacctgaccgcaaatatcttttcttgtattcccatatttctagacaatgatttttgtaagacaataaatttattcattatagatatttgcgcctgctctgtttacttgaagaaaaaagcacccgtggagaataaagagacctcaataaacaagaataatcatg

SEQ ID NO: 435215 - DNA, 1279 bp, Homo sapiens
  misc_feature (13)..(13): n is a, c, g, or t
  misc_feature (46)..(46): n is a, c, g, or t
ggccccaaagganttttaggaatgggccccccaggtccatgttagnctggagaagtggcagaagcccaagttgtgaatcccgcacctggctctggagccctgttctcagccaccgtgctgggcagcccacacctggcatcctctctgttaggagcaggggcctgcccccacgccctctctgacattgctattcttgctaaaatgaagagacagagctgaggggagagctaaaaattatgaactgtactggctgttgaccaccagacacctgaccgcaaatatcttttcttgtattcccatatttctagacaatgatttttgtaagacaataaatttattcattatagatatttgcgcctgctctgtttacttgaagaaaaaagcacccgtggagaataaagagacctcaataaacaagaataatcatgtgaacgtggaatctgttttctcaccttctgttctcgatttcccatctgtgatctgactggagggtgggtgctacacaccaacttcaaatgatggcgccaggccctttttgctgagggcgctgtctcccaggtcagacgacagaataattctcaggccagtcctggctccaactcttgttcctgccagtgcctcacaggatgcacacgcactaggaagggaaagaccacccaaaggcaggagctggcccacctgtcaagggagtgatttaggagggctctggtcaccagccaatgaagctcactgctgggttaggacattttcaggggtccagtacatttcaggctgcattttcaggcagacacgcattgaagatgcttttggaggattcagtgatgaggccaagggcagcctctctagtgcgggccaactaggatgagagaaatactagggcagcacagaatcaaacagagaatgccgatttcttgttccataatattctccggttagactggttctgggggtaaggggtctatgactaggcttcttggcagcagtggaaacgtgtgaaatgggccgaagtgccctcttcctcctgtgccactaccataggagaggaaaggtgagtcacaggtatggtgcttcagcagggctcccacccccacatccagtatcttatccaagagtgtacagaattcagaggcttgtttttctcaaaaagtaagaactctgggctgggcatggtgctcacgcctgtaatcccggcactttgggaggccaaagcaggtggatcatttgaggtcagaagttcgaatccagcctggccaacatggtgaaacaccgtctctactaa

SEQ ID NO: 435216 - DNA, 931 bp, Homo sapiens
ccataccgctacgtacgagacccccgctttaacttcgcgcacgagggtggaccgtatcgtgggtctggatcaagtcactggtatgactgagacagcttttggctccgcatataaaaccaagaagggcatgtttcgtaccgttgggcaactctacaaagaatctctcaccaagctgatggcaactctccgaaacaccaaccctaactttgttcgttgtatcattccaaatcacgagaagagggctggaaaattggatccacacctagtcctagatcagcttcgctgtaatggtgtcctggaagggatccgaatctgtcgccagggcttccctaaccgaatagttttccaggaattcagacagagatatgagatcctaactccaaatgctattcctaaaggttttatggatggtaaacaggcctgtgaacgaatgatccgggctttagaattggacccaaacttgtacagaattggacagagcaagatatttttcagagctggagttctggcacacttagaggaagaaagagatttaaaaatcaccgatatcattatcttcttccaggccgtttgcagaggttacctggccagaaaggcctttgccaagaagcagcagcaactaagtgccttaaaggtcttgcagcggaactgtgccgcgtacctgaaattacggcactggcagtggtggcgagtcttcacaaaggtgaagccgcttctacaagtgactcgccagtgaaggttatcggatcatcccgggcggcacctacaaccagggccagaacggttttgatctggtgttccaggggccgagcaatgcggtgtatctgctggaggtcaagcacgtctcaacagccagcggtggccgtttttccaatgtgaacatggcgcgggtgatcccgcgaagaagaaaatgatccgggtcgagctcata

SEQ ID NO: 435217 - DNA, 490 bp, Homo sapiens
gttgccctttacgacaaaaaaaacacaggagcttcttcaggaggagacacgccagaaactaaacctgagcagtcggatccggcagctggaagaggagaagaacagtcttcaggagcagcaggaggaggaggaggaggccaggaagaacctggagaagcaagtgctggccctgcagtcccagttggctgataccaagaagaaagtagatgacgacctgggaacaattgaaagtctggaagaagccaagaagaagcttctgaaggacgcggaggccctgagccagcgcctggaggagaaggcactggcgtatgacaaactggagaagaccaagaaccgcctgcagcaggagctggacgacctcacggtggacctggaccaccagcgccaggtcgcctccaacttggagaagaagcagaagaagtttgaccaggtgggtcggccacgtgtcgtttcctcctggcagagctcttgcttttgttcgtttggttta

SEQ ID NO: 435218 - DNA, 7577 bp, Homo sapiens
agcagtgctaaaggagcccggcggaggcagcggtgggtttgggactgaggcgctggatctgtggtcgcggctggggacgtgcgcccgcgccaccatcttcggctgaagaggcaattgcttttggatcgttccatttacaatggcgcagagaactggactcgaggatccagagaggtatctctttgtggacagggctgtcatctacaaccctgccactcaagctgattggacagctaaaaagctagtgtggattccatcagaacgccatggttttgaggcagctagtatcaaagaagaacggggagatgaagttatggtggagttggcagagaatggaaagaaagcaatggtcaacaaagatgatattcagaagatgaacccacctaagttttccaaggtggaggatatggcagaattgacatgcttgaatgaagcttccgttttacataatctgaaggatcgctactattcaggactaatctatacttattctggactcttctgtgtagttataaacccttacaagaatcttccaatttactctgagaatattattgaaatgtacagagggaagaagcgtcatgagatgcctccacacatctatgctatatctgaatctgcttacagatgcatgcttcaagatcgtgaggaccagtcaattctttgcacgggtgagtcaggtgctgggaagacagaaaatacaaagaaagttattcagtaccttgcccatgttgcttcttcacataaaggaagaaaggaccataatattcctggggaacttgaacggcagcttttgcaagcaaatccaattctggaatcatttggaaatgcgaagactgtgaaaaatgataactcatctcgttttggcaaatttattcggatcaactttgatgtaactggctatatcgttggggccaacattgaaacataccttctggaaaagtctcgtgctgttcgtcaagcaaaagatgaacgtacttttcatatcttttaccagttgttatctggagcaggagaacacctaaagtctgatttgcttcttgaaggatttaataactacaggtttctctccaatggctatattcctattccgggacagcaagacaaagataatttccaggagaccatggaagcaatgcacataatgggcttctcccatgaagagattctgtcaatgcttaaagtagtatcttcagtgctacagtttggaaatatttctttcaaaaaggagagaaatactgatcaagcttccatgccagaaaatacagttgcgcagaagctctgccatcttcttgggatgaatgtgatggagtttactcgggccatcctgactccccggatcaaggtcggccgagactatgtgcaaaaagcccagaccaaagaacaggcagattttgcagtagaagcattggcaaaagctacctatgagcggctctttcgctggctcgttcatcgcatcaataaagctctggataggaccaaacgtcagggagcatctttcattggaatcctggatattgctggatttgaaatttttgagctgaactcctttgaacaactttgcatcaactacaccaatgagaagctgcagcagctgttcaaccacaccatgtttatcctagaacaagaggaataccagcgcgaaggcatcgagtggaacttcatcgatttcgggctggatctgcagccatgcatcgacctaatagagagacctgcgaaccctcctggtgtactggcccttttggatgaagaatgctggttccctaaagccacagataaaacctttgttgaaaaactggttcaagagcaaggttcccactccaagtttcagaaacctcgacaattaaaagacaaagctgatttttgcattatacattatgcagggaaggtggactataaggcagatgagtggctgatgaagaatatggaccccctgaatgacaacgtggccacccttttgcaccagtcatcagacagatttgtggcagagctttggaaagatgtggaccgtatcgtgggtctggatcaagtcactggtatgactgagacagcttttggctccgcatataaaaccaagaagggcatgtttcgtaccgttgggcaactctacaaagaatctctcaccaagctgatggcaactctccgaaacaccaaccctaactttgttcgttgtatcattccaaatcacgagaagagggctggaaaattggatccacacctagtcctagatcagcttcgctgtaatggtgtcctggaagggatccgaatctgtcgccagggcttccctaaccgaatagttttccaggaattcagacagagatatgagatcctaactccaaatgctattcctaaaggttttatggatggtaaacaggcctgtgaacgaatgatccgggctttagaattggacccaaacttgtacagaattggacagagcaagatatttttcagagctggagttctggcacacttagaggaagaaagagatttaaaaatcaccgatatcattatcttcttccaggccgtttgcagaggttacctggccagaaaggcctttgccaagaagcagcagcaactaagtgccttaaaggtcttgcagcggaactgtgccgcgtacctgaaattacggcactggcagtggtggcgagtcttcacaaaggtgaagccgcttctacaagtgactcgccaggaggaagaacttcaggccaaagatgaagagctgttgaaggtgaaggagaagcagacgaaggtggaaggagagctggaggagatggagcggaagcaccagcagcttttagaagagaagaatatccttgcagaacaactacaagcagagactgagctctttgctgaagcagaagagatgagggcaagacttgctgctaaaaagcaggaattagaagagattctacatgacttggagtctagggttgaagaagaagaagaaagaaaccaaatcctccaaaatgaaaagaaaaaaatgcaagcacatattcaggacctggaagaacagctagacgaggaggaaggggctcggcaaaagctgcagctggaaaaggtgacagcagaggccaagatcaagaagatggaagaggagattctgcttctcgaggaccaaaattccaagttcatcaaagaaaagaaactcatggaagatcgcattgctgagtgttcctctcagctggctgaagaggaagaaaaggcgaaaaacttggccaaaatcaggaataagcaagaagtgatgatctcagatttagaagaacgcttaaagaaggaagaaaagactcgtcaggaactggaaaaggccaaaagaaaactcgacggggagacgaccgacctgcaggaccagatcgcagagctgcaggcgcagattgatgagctcaagctgcagctggccaagaaggaggaggagctgcagggcgcactggccagaggtgatgatgaaacactccataagaacaatgcccttaaagttgtgcgagagctacaagcccaaattgctgaacttcaggaagactttgaatccgagaaggcttcacggaacaaggccgaaaagcagaaaagggacttgagtgaggaactggaagctctgaaaacagagctggaggacacgctggacaccacggcagcccagcaggaactacgtacaaaacgtgaacaagaagtggcagagctgaagaaagctcttgaggaggaaactaagaaccatgaagctcaaatccaggacatgagacaaagacacgcaacagccctggaggagctctcagagcagctggaacaggccaagcggttcaaagcaaatctagagaagaacaagcagggcctggagacagataacaaggagctggcgtgtgaggtgaaggtcctgcagcaggtcaaggctgagtctgagcacaagaggaagaagctcgacgcgcaggtccaggagctccatgccaaggtctctgaaggcgacaggctcagggtggagctggcggagaaagcaagtaagctgcagaatgagctagataatgtctccacccttctggaagaagcagagaagaagggtattaaatttgctaaggatgcagctagtcttgagtctcaactacaggatacacaggagcttcttcaggaggagacacgccagaaactaaacctgagcagtcggatccggcagctggaagaggagaagaacagtcttcaggagcagcaggaggaggaggaggaggccaggaagaacctggagaagcaagtgctggccctgcagtcccagttggctgataccaagaagaaagtagatgacgacctgggaacaattgaaagtctggaagaagccaagaagaagcttctgaaggacgcggaggccctgagccagcgcctggaggagaaggcactggcgtatgacaaactggagaagaccaagaaccgcctgcagcaggagctggacgacctcacggtggacctggaccaccagcgccaggtcgcctccaacttggagaagaagcagaagaagtttgaccagctgttagcagaagagaagagcatctctgctcgctatgccgaagagcgggaccgggccgaagccgaggccagagagaaagaaaccaaagccctgtcactggcccgggccctcgaggaagccctggaggccaaggaggagtttgagaggcagaacaagcagctccgagcagacatggaagacctcatgagctccaaagatgatgtgggaaaaaacgttcacgaacttgaaaaatccaaacgggccctagagcagcaggtggaggaaatgaggacccagctggaggagctggaagacgaactccaggccacggaagatgccaagcttcgtctggaggtcaacatgcaggccatgaaggcgcagttcgagagagacctgcaaaccagggatgagcagaatgaagagaagaagcggctgctgatcaaacaggtgcgggagctcgaggcggagctggaggatgagaggaaacagcgggcgcttgctgtagcttcaaagaaaaagatggagatagacctgaaggacctcgaagcccaaatcgaggctgcgaacaaagctcgggatgaggtgattaagcagctccgcaagctccaggctcagatgaaggattaccaacgtgaattagaagaagctcgtgcatccagagatgagatttttgctcaatccaaagagagtgaaaagaaattgaagagtctggaagcagaaatccttcaattgcaggaggaacttgcctcatctgagcgagcccgccgacacgccgagcaggagagagatgagctggcggacgagatcaccaacagcgcctctggcaagtccgcgctgctggatgagaagcggcgtctggaagctcggatcgcacagctggaggaggagctggaagaggagcagagcaacatggagctgctcaacgaccgcttccgcaagaccactctacaggtggacacactgaacgccgagctagcagccgagcgcagcgccgcccagaagagtgacaatgcacgccagcaactggagcggcagaacaaggagctgaaggccaagctgcaggaactcgagggtgctgtcaagtctaagttcaaggccaccatctcagccctggaggccaagattgggcagctggaggagcagcttgagcaggaagccaaggaacgagcagccgccaacaaattagtccgtcgcactgagaagaagctgaaagaaatcttcatgcaggttgaggatgagcgtcgacacgcggaccagtataaagagcagatggagaaggccaacgctcggatgaagcagcttaaacgccagctggaggaagcagaagaagaagcgacgcgtgccaacgcatctcggcgtaaactccagcgggaactggatgatgccaccgaggccaacgagggcctgagccgcgaggtcagcaccctgaagaaccggctgaggcggggtggccccatcagcttctcttccagccgatctggccggcgccagctgcaccttgaaggagcttccctggagctctccgacgatgacacagaaagtaagaccagtgatgtcaacgagacgcagccaccccagtcagagtaaagttgcaggaagccagaggaggcaatacagtgggacagttaggaatgcacccggggcctcctgcagatttcggaaattggcaagctacgggattccttcctgaaagatcaactgtgtcttaaggctctccagcctatgcatactgtatcctgcttcagacttaggtacaattgctcccctttttatatacagacacacacaggacacatatattaaacagattgtttcatcattgcatctattttccatatagtcatcaagagaccattttataaaacatggtaagaccctttttaaaacaaactccaggcccttggttgcgggtcgctgggttattggggcagcgccgtggtcgtcactcagtcgctctgcatgctctctgtcatacagacaggtaacctagttctgtgttcacgtggcccccgacgactcagccacatcaagtctcctagaccactgtggactctaaactgcacttgtctctctcatttccttcaaataatgatcaatgctatttcagtgagcaaactgtgaaaggggctttggaaagagtaggaggggtgggctggatcggaagcaacacccatttggggttaccatgtccatcccccaaggggggccctgcccctcgagtcgatggtgtcccgcatctactcatgtgaactggccttggcgagggctggtctgtgcatagaagggatagtggccacactgcagctgaggccccaggtggcagccatggatcatgtagacttccagatggtctcccgaaccgcctggctctgccggcgccctcctcacgtcaggagcaagcagccgtggacccctaagccgagctggtggaaggcccctccccgtcgccagccgggccctcatgctgaccttgcaaattcagccgctgctttgagcccaaaatgggaatattggttttgtgtccgaggcttgttccaagtttgtcaatgaggtttatggagcctccagaacagatgccatcttcctgaatgttgacatgccagtgggtgtgactccttcatttttccttctcccttccctttggacagtgttacagtgaacacttagcatcctgtttttggttggtagttaagcaaactgacattacggaaagtgccttagacactacagtactaagacaatgttgaatatatcattcgcctctataacaatttaatgtattcagttttgactgtgcttcatatcatgtacctctctagtcaaagtggtattacagacattcagtgacaatgaatcagtgttaattctaaatccttgatcctctgcaatgtgcttgaaaacacaaaccttttgggttaaaagctttaacatctattaggaagaatttgtcctgtgggtttggaatcttggattttccccctttatgaactgtactggctgttgaccaccagacacctgaccgcaaatatcttttcttgtattcccatatttctagacaatgatttttgtaagacaataaatttattcattatag

SEQ ID NO: 435219 - DNA, 7606 bp, Homo sapiens
agcagtgctaaaggagcccggcggaggcagcggtgggtttgggactgaggcgctggatctgtggtcgcggctggggacgtgcgcccgcgccaccatcttcggctgaagaggcaattgcttttggatcgttccatttacaatggcgcagagaactggactcgaggatccagagaggtatctctttgtggacagggctgtcatctacaaccctgccactcaagctgattggacagctaaaaagctagtgtggattccatcagaacgccatggttttgaggcagctagtatcaaagaagaacggggagatgaagttatggtggagttggcagagaatggaaagaaagcaatggtcaacaaagatgatattcagaagatgaacccacctaagttttccaaggtggaggatatggcagaattgacatgcttgaatgaagcttccgttttacataatctgaaggatcgctactattcaggactaatctatacttattctggactcttctgtgtagttataaacccttacaagaatcttccaatttactctgagaatattattgaaatgtacagagggaagaagcgtcatgagatgcctccacacatctatgctatatctgaatctgcttacagatgcatgcttcaagatcgtgaggaccagtcaattctttgcacgggtgagtcaggtgctgggaagacagaaaatacaaagaaagttattcagtaccttgcccatgttgcttcttcacataaaggaagaaaggaccataatattcctcaggaatcgcctaaaccagtgaacaccagggggaacttgaacggcagcttttgcaagcaaatccaattctggaatcatttggaaatgcgaagactgtgaaaaatgataactcatctcgttttggcaaatttattcggatcaactttgatgtaactggctatatcgttggggccaacattgaaacataccttctggaaaagtctcgtgctgttcgtcaagcaaaagatgaacgtacttttcatatcttttaccagttgttatctggagcaggagaacacctaaagtctgatttgcttcttgaaggatttaataactacaggtttctctccaatggctatattcctattccgggacagcaagacaaagataatttccaggagaccatggaagcaatgcacataatgggcttctcccatgaagagattctgtcaatgcttaaagtagtatcttcagtgctacagtttggaaatatttctttcaaaaaggagagaaatactgatcaagcttccatgccagaaaatacagttgcgcagaagctctgccatcttcttgggatgaatgtgatggagtttactcgggccatcctgactccccggatcaaggtcggccgagactatgtgcaaaaagcccagaccaaagaacaggcagattttgcagtagaagcattggcaaaagctacctatgagcggctctttcgctggctcgttcatcgcatcaataaagctctggataggaccaaacgtcagggagcatctttcattggaatcctggatattgctggatttgaaatttttgagctgaactcctttgaacaactttgcatcaactacaccaatgagaagctgcagcagctgttcaaccacaccatgtttatcctagaacaagaggaataccagcgcgaaggcatcgagtggaacttcatcgatttcgggctggatctgcagccatgcatcgacctaatagagagacctgcgaaccctcctggtgtactggcccttttggatgaagaatgctggttccctaaagccacagataaaacctttgttgaaaaactggttcaagagcaaggttcccactccaagtttcagaaacctcgacaattaaaagacaaagctgatttttgcattatacattatgcagggaaggtggactataaggcagatgagtggctgatgaagaatatggaccccctgaatgacaacgtggccacccttttgcaccagtcatcagacagatttgtggcagagctttggaaagatgtggaccgtatcgtgggtctggatcaagtcactggtatgactgagacagcttttggctccgcatataaaaccaagaagggcatgtttcgtaccgttgggcaactctacaaagaatctctcaccaagctgatggcaactctccgaaacaccaaccctaactttgttcgttgtatcattccaaatcacgagaagagggctggaaaattggatccacacctagtcctagatcagcttcgctgtaatggtgtcctggaagggatccgaatctgtcgccagggcttccctaaccgaatagttttccaggaattcagacagagatatgagatcctaactccaaatgctattcctaaaggttttatggatggtaaacaggcctgtgaacgaatgatccgggctttagaattggacccaaacttgtacagaattggacagagcaagatatttttcagagctggagttctggcacacttagaggaagaaagagatttaaaaatcaccgatatcattatcttcttccaggccgtttgcagaggttacctggccagaaaggcctttgccaagaagcagcagcaactaagtgccttaaaggtcttgcagcggaactgtgccgcgtacctgaaattacggcactggcagtggtggcgagtcttcacaaaggtgaagccgcttctacaagtgactcgccaggaggaagaacttcaggccaaagatgaagagctgttgaaggtgaaggagaagcagacgaaggtggaaggagagctggaggagatggagcggaagcaccagcagcttttagaagagaagaatatccttgcagaacaactacaagcagagactgagctctttgctgaagcagaagagatgagggcaagacttgctgctaaaaagcaggaattagaagagattctacatgacttggagtctagggttgaagaagaagaagaaagaaaccaaatcctccaaaatgaaaagaaaaaaatgcaagcacatattcaggacctggaagaacagctagacgaggaggaaggggctcggcaaaagctgcagctggaaaaggtgacagcagaggccaagatcaagaagatggaagaggagattctgcttctcgaggaccaaaattccaagttcatcaaagaaaagaaactcatggaagatcgcattgctgagtgttcctctcagctggctgaagaggaagaaaaggcgaaaaacttggccaaaatcaggaataagcaagaagtgatgatctcagatttagaagaacgcttaaagaaggaagaaaagactcgtcaggaactggaaaaggccaaaagaaaactcgacggggagacgaccgacctgcaggaccagatcgcagagctgcaggcgcagattgatgagctcaagctgcagctggccaagaaggaggaggagctgcagggcgcactggccagaggtgatgatgaaacactccataagaacaatgcccttaaagttgtgcgagagctacaagcccaaattgctgaacttcaggaagactttgaatccgagaaggcttcacggaacaaggccgaaaagcagaaaagggacttgagtgaggaactggaagctctgaaaacagagctggaggacacgctggacaccacggcagcccagcaggaactacgtacaaaacgtgaacaagaagtggcagagctgaagaaagctcttgaggaggaaactaagaaccatgaagctcaaatccaggacatgagacaaagacacgcaacagccctggaggagctctcagagcagctggaacaggccaagcggttcaaagcaaatctagagaagaacaagcagggcctggagacagataacaaggagctggcgtgtgaggtgaaggtcctgcagcaggtcaaggctgagtctgagcacaagaggaagaagctcgacgcgcaggtccaggagctccatgccaaggtctctgaaggcgacaggctcagggtggagctggcggagaaagcaagtaagctgcagaatgagctagataatgtctccacccttctggaagaagcagagaagaagggtattaaatttgctaaggatgcagctagtcttgagtctcaactacaggatacacaggagcttcttcaggaggagacacgccagaaactaaacctgagcagtcggatccggcagctggaagaggagaagaacagtcttcaggagcagcaggaggaggaggaggaggccaggaagaacctggagaagcaagtgctggccctgcagtcccagttggctgataccaagaagaaagtagatgacgacctgggaacaattgaaagtctggaagaagccaagaagaagcttctgaaggacgcggaggccctgagccagcgcctggaggagaaggcactggcgtatgacaaactggagaagaccaagaaccgcctgcagcaggagctggacgacctcacggtggacctggaccaccagcgccaggtcgcctccaacttggagaagaagcagaagaagtttgaccagctgttagcagaagagaagagcatctctgctcgctatgccgaagagcgggaccgggccgaagccgaggccagagagaaagaaaccaaagccctgtcactggcccgggccctcgaggaagccctggaggccaaggaggagtttgagaggcagaacaagcagctccgagcagacatggaagacctcatgagctccaaagatgatgtgggaaaaaacgttcacgaacttgaaaaatccaaacgggccctagagcagcaggtggaggaaatgaggacccagctggaggagctggaagacgaactccaggccacggaagatgccaagcttcgtctggaggtcaacatgcaggccatgaaggcgcagttcgagagagacctgcaaaccagggatgagcagaatgaagagaagaagcggctgctgatcaaacaggtgcgggagctcgaggcggagctggaggatgagaggaaacagcgggcgcttgctgtagcttcaaagaaaaagatggagatagacctgaaggacctcgaagcccaaatcgaggctgcgaacaaagctcgggatgaggtgattaagcagctccgcaagctccaggctcagatgaaggattaccaacgtgaattagaagaagctcgtgcatccagagatgagatttttgctcaatccaaagagagtgaaaagaaattgaagagtctggaagcagaaatccttcaattgcaggaggaacttgcctcatctgagcgagcccgccgacacgccgagcaggagagagatgagctggcggacgagatcaccaacagcgcctctggcaagtccgcgctgctggatgagaagcggcgtctggaagctcggatcgcacagctggaggaggagctggaagaggagcagagcaacatggagctgctcaacgaccgcttccgcaagaccactctacaggtggacacactgaacgccgagctagcagccgagcgcagcgccgcccagaagagtgacaatgcacgccagcaactggagcggcagaacaaggagctgaaggccaagctgcaggaactcgagggtgctgtcaagtctaagttcaaggccaccatctcagccctggaggccaagattgggcagctggaggagcagcttgagcaggaagccaaggaacgagcagccgccaacaaattagtccgtcgcactgagaagaagctgaaagaaatcttcatgcaggttgaggatgagcgtcgacacgcggaccagtataaagagcagatggagaaggccaacgctcggatgaagcagcttaaacgccagctggaggaagcagaagaagaagcgacgcgtgccaacgcatctcggcgtaaactccagcgggaactggatgatgccaccgaggccaacgagggcctgagccgcgaggtcagcaccctgaagaaccggctgaggcggggtggccccatcagcttctcttccagccgatctggccggcgccagctgcaccttgaaggagcttccctggagctctccgacgatgacacagaaagtaagaccagtgatgtcaacgagacgcagccaccccagtcagagtaaagttgcaggaagccagaggaggcaatacagtgggacagttaggaatgcacccggggcctcctgcagatttcggaaattggcaagctacgggattccttcctgaaagatcaactgtgtcttaaggctctccagcctatgcatactgtatcctgcttcagacttaggtacaattgctcccctttttatatacagacacacacaggacacatatattaaacagattgtttcatcattgcatctattttccatatagtcatcaagagaccattttataaaacatggtaagaccctttttaaaacaaactccaggcccttggttgcgggtcgctgggttattggggcagcgccgtggtcgtcactcagtcgctctgcatgctctctgtcatacagacaggtaacctagttctgtgttcacgtggcccccgacgactcagccacatcaagtctcctagaccactgtggactctaaactgcacttgtctctctcatttccttcaaataatgatcaatgctatttcagtgagcaaactgtgaaaggggctttggaaagagtaggaggggtgggctggatcggaagcaacacccatttggggttaccatgtccatcccccaaggggggccctgcccctcgagtcgatggtgtcccgcatctactcatgtgaactggccttggcgagggctggtctgtgcatagaagggatagtggccacactgcagctgaggccccaggtggcagccatggatcatgtagacttccagatggtctcccgaaccgcctggctctgccggcgccctcctcacgtcaggagcaagcagccgtggacccctaagccgagctggtggaaggcccctccccgtcgccagccgggccctcatgctgaccttgcaaattcagccgctgctttgagcccaaaatgggaatattggttttgtgtccgaggcttgttccaagtttgtcaatgaggtttatggagcctccagaacagatgccatcttcctgaatgttgacatgccagtgggtgtgactccttcatttttccttctcccttccctttggacagtgttacagtgaacacttagcatcctgtttttggttggtagttaagcaaactgacattacggaaagtgccttagacactacagtactaagacaatgttgaatatatcattcgcctctataacaatttaatgtattcagttttgactgtgcttcatatcatgtacctctctagtcaaagtggtattacagacattcagtgacaatgaatcagtgttaattctaaatccttgatcctctgcaatgtgcttgaaaacacaaaccttttgggttaaaagctttaacatctattaggaagaatttgtcctgtgggtttggaatcttggattttccccctttatgaactgtactggctgttgaccaccagacacctgaccgcaaatatcttttcttgtattcccatatttctagacaatgatttttgtaagacaataaatttattcattatag

SEQ ID NO: 435220 - DNA, 7540 bp, Homo sapiens
ctgagggcaaacccatcagacaaccagagccataatttgtggtcaccgctgaaatttaccttggaaactcgaggcaattgcttttggatcgttccatttacaatggcgcagagaactggactcgaggatccagagaggtatctctttgtggacagggctgtcatctacaaccctgccactcaagctgattggacagctaaaaagctagtgtggattccatcagaacgccatggttttgaggcagctagtatcaaagaagaacggggagatgaagttatggtggagttggcagagaatggaaagaaagcaatggtcaacaaagatgatattcagaagatgaacccacctaagttttccaaggtggaggatatggcagaattgacatgcttgaatgaagcttccgttttacataatctgaaggatcgctactattcaggactaatctatacttattctggactcttctgtgtagttataaacccttacaagaatcttccaatttactctgagaatattattgaaatgtacagagggaagaagcgtcatgagatgcctccacacatctatgctatatctgaatctgcttacagatgcatgcttcaagatcgtgaggaccagtcaattctttgcacgggtgagtcaggtgctgggaagacagaaaatacaaagaaagttattcagtaccttgcccatgttgcttcttcacataaaggaagaaaggaccataatattcctggggaacttgaacggcagcttttgcaagcaaatccaattctggaatcatttggaaatgcgaagactgtgaaaaatgataactcatctcgttttggcaaatttattcggatcaactttgatgtaactggctatatcgttggggccaacattgaaacataccttctggaaaagtctcgtgctgttcgtcaagcaaaagatgaacgtacttttcatatcttttaccagttgttatctggagcaggagaacacctaaagtctgatttgcttcttgaaggatttaataactacaggtttctctccaatggctatattcctattccgggacagcaagacaaagataatttccaggagaccatggaagcaatgcacataatgggcttctcccatgaagagattctgtcaatgcttaaagtagtatcttcagtgctacagtttggaaatatttctttcaaaaaggagagaaatactgatcaagcttccatgccagaaaatacagttgcgcagaagctctgccatcttcttgggatgaatgtgatggagtttactcgggccatcctgactccccggatcaaggtcggccgagactatgtgcaaaaagcccagaccaaagaacaggcagattttgcagtagaagcattggcaaaagctacctatgagcggctctttcgctggctcgttcatcgcatcaataaagctctggataggaccaaacgtcagggagcatctttcattggaatcctggatattgctggatttgaaatttttgagctgaactcctttgaacaactttgcatcaactacaccaatgagaagctgcagcagctgttcaaccacaccatgtttatcctagaacaagaggaataccagcgcgaaggcatcgagtggaacttcatcgatttcgggctggatctgcagccatgcatcgacctaatagagagacctgcgaaccctcctggtgtactggcccttttggatgaagaatgctggttccctaaagccacagataaaacctttgttgaaaaactggttcaagagcaaggttcccactccaagtttcagaaacctcgacaattaaaagacaaagctgatttttgcattatacattatgcagggaaggtggactataaggcagatgagtggctgatgaagaatatggaccccctgaatgacaacgtggccacccttttgcaccagtcatcagacagatttgtggcagagctttggaaagatgtggaccgtatcgtgggtctggatcaagtcactggtatgactgagacagcttttggctccgcatataaaaccaagaagggcatgtttcgtaccgttgggcaactctacaaagaatctctcaccaagctgatggcaactctccgaaacaccaaccctaactttgttcgttgtatcattccaaatcacgagaagagggctggaaaattggatccacacctagtcctagatcagcttcgctgtaatggtgtcctggaagggatccgaatctgtcgccagggcttccctaaccgaatagttttccaggaattcagacagagatatgagatcctaactccaaatgctattcctaaaggttttatggatggtaaacaggcctgtgaacgaatgatccgggctttagaattggacccaaacttgtacagaattggacagagcaagatatttttcagagctggagttctggcacacttagaggaagaaagagatttaaaaatcaccgatatcattatcttcttccaggccgtttgcagaggttacctggccagaaaggcctttgccaagaagcagcagcaactaagtgccttaaaggtcttgcagcggaactgtgccgcgtacctgaaattacggcactggcagtggtggcgagtcttcacaaaggtgaagccgcttctacaagtgactcgccaggaggaagaacttcaggccaaagatgaagagctgttgaaggtgaaggagaagcagacgaaggtggaaggagagctggaggagatggagcggaagcaccagcagcttttagaagagaagaatatccttgcagaacaactacaagcagagactgagctctttgctgaagcagaagagatgagggcaagacttgctgctaaaaagcaggaattagaagagattctacatgacttggagtctagggttgaagaagaagaagaaagaaaccaaatcctccaaaatgaaaagaaaaaaatgcaagcacatattcaggacctggaagaacagctagacgaggaggaaggggctcggcaaaagctgcagctggaaaaggtgacagcagaggccaagatcaagaagatggaagaggagattctgcttctcgaggaccaaaattccaagttcatcaaagaaaagaaactcatggaagatcgcattgctgagtgttcctctcagctggctgaagaggaagaaaaggcgaaaaacttggccaaaatcaggaataagcaagaagtgatgatctcagatttagaagaacgcttaaagaaggaagaaaagactcgtcaggaactggaaaaggccaaaagaaaactcgacggggagacgaccgacctgcaggaccagatcgcagagctgcaggcgcagattgatgagctcaagctgcagctggccaagaaggaggaggagctgcagggcgcactggccagaggtgatgatgaaacactccataagaacaatgcccttaaagttgtgcgagagctacaagcccaaattgctgaacttcaggaagactttgaatccgagaaggcttcacggaacaaggccgaaaagcagaaaagggacttgagtgaggaactggaagctctgaaaacagagctggaggacacgctggacaccacggcagcccagcaggaactacgtacaaaacgtgaacaagaagtggcagagctgaagaaagctcttgaggaggaaactaagaaccatgaagctcaaatccaggacatgagacaaagacacgcaacagccctggaggagctctcagagcagctggaacaggccaagcggttcaaagcaaatctagagaagaacaagcagggcctggagacagataacaaggagctggcgtgtgaggtgaaggtcctgcagcaggtcaaggctgagtctgagcacaagaggaagaagctcgacgcgcaggtccaggagctccatgccaaggtctctgaaggcgacaggctcagggtggagctggcggagaaagcaagtaagctgcagaatgagctagataatgtctccacccttctggaagaagcagagaagaagggtattaaatttgctaaggatgcagctagtcttgagtctcaactacaggatacacaggagcttcttcaggaggagacacgccagaaactaaacctgagcagtcggatccggcagctggaagaggagaagaacagtcttcaggagcagcaggaggaggaggaggaggccaggaagaacctggagaagcaagtgctggccctgcagtcccagttggctgataccaagaagaaagtagatgacgacctgggaacaattgaaagtctggaagaagccaagaagaagcttctgaaggacgcggaggccctgagccagcgcctggaggagaaggcactggcgtatgacaaactggagaagaccaagaaccgcctgcagcaggagctggacgacctcacggtggacctggaccaccagcgccaggtcgcctccaacttggagaagaagcagaagaagtttgaccagctgttagcagaagagaagagcatctctgctcgctatgccgaagagcgggaccgggccgaagccgaggccagagagaaagaaaccaaagccctgtcactggcccgggccctcgaggaagccctggaggccaaggaggagtttgagaggcagaacaagcagctccgagcagacatggaagacctcatgagctccaaagatgatgtgggaaaaaacgttcacgaacttgaaaaatccaaacgggccctagagcagcaggtggaggaaatgaggacccagctggaggagctggaagacgaactccaggccacggaagatgccaagcttcgtctggaggtcaacatgcaggccatgaaggcgcagttcgagagagacctgcaaaccagggatgagcagaatgaagagaagaagcggctgctgatcaaacaggtgcgggagctcgaggcggagctggaggatgagaggaaacagcgggcgcttgctgtagcttcaaagaaaaagatggagatagacctgaaggacctcgaagcccaaatcgaggctgcgaacaaagctcgggatgaggtgattaagcagctccgcaagctccaggctcagatgaaggattaccaacgtgaattagaagaagctcgtgcatccagagatgagatttttgctcaatccaaagagagtgaaaagaaattgaagagtctggaagcagaaatccttcaattgcaggaggaacttgcctcatctgagcgagcccgccgacacgccgagcaggagagagatgagctggcggacgagatcaccaacagcgcctctggcaagtccgcgctgctggatgagaagcggcgtctggaagctcggatcgcacagctggaggaggagctggaagaggagcagagcaacatggagctgctcaacgaccgcttccgcaagaccactctacaggtggacacactgaacgccgagctagcagccgagcgcagcgccgcccagaagagtgacaatgcacgccagcaactggagcggcagaacaaggagctgaaggccaagctgcaggaactcgagggtgctgtcaagtctaagttcaaggccaccatctcagccctggaggccaagattgggcagctggaggagcagcttgagcaggaagccaaggaacgagcagccgccaacaaattagtccgtcgcactgagaagaagctgaaagaaatcttcatgcaggttgaggatgagcgtcgacacgcggaccagtataaagagcagatggagaaggccaacgctcggatgaagcagcttaaacgccagctggaggaagcagaagaagaagcgacgcgtgccaacgcatctcggcgtaaactccagcgggaactggatgatgccaccgaggccaacgagggcctgagccgcgaggtcagcaccctgaagaaccggctgaggcggggtggccccatcagcttctcttccagccgatctggccggcgccagctgcaccttgaaggagcttccctggagctctccgacgatgacacagaaagtaagaccagtgatgtcaacgagacgcagccaccccagtcagagtaaagttgcaggaagccagaggaggcaatacagtgggacagttaggaatgcacccggggcctcctgcagatttcggaaattggcaagctacgggattccttcctgaaagatcaactgtgtcttaaggctctccagcctatgcatactgtatcctgcttcagacttaggtacaattgctcccctttttatatacagacacacacaggacacatatattaaacagattgtttcatcattgcatctattttccatatagtcatcaagagaccattttataaaacatggtaagaccctttttaaaacaaactccaggcccttggttgcgggtcgctgggttattggggcagcgccgtggtcgtcactcagtcgctctgcatgctctctgtcatacagacaggtaacctagttctgtgttcacgtggcccccgacgactcagccacatcaagtctcctagaccactgtggactctaaactgcacttgtctctctcatttccttcaaataatgatcaatgctatttcagtgagcaaactgtgaaaggggctttggaaagagtaggaggggtgggctggatcggaagcaacacccatttggggttaccatgtccatcccccaaggggggccctgcccctcgagtcgatggtgtcccgcatctactcatgtgaactggccttggcgagggctggtctgtgcatagaagggatagtggccacactgcagctgaggccccaggtggcagccatggatcatgtagacttccagatggtctcccgaaccgcctggctctgccggcgccctcctcacgtcaggagcaagcagccgtggacccctaagccgagctggtggaaggcccctccccgtcgccagccgggccctcatgctgaccttgcaaattcagccgctgctttgagcccaaaatgggaatattggttttgtgtccgaggcttgttccaagtttgtcaatgaggtttatggagcctccagaacagatgccatcttcctgaatgttgacatgccagtgggtgtgactccttcatttttccttctcccttccctttggacagtgttacagtgaacacttagcatcctgtttttggttggtagttaagcaaactgacattacggaaagtgccttagacactacagtactaagacaatgttgaatatatcattcgcctctataacaatttaatgtattcagttttgactgtgcttcatatcatgtacctctctagtcaaagtggtattacagacattcagtgacaatgaatcagtgttaattctaaatccttgatcctctgcaatgtgcttgaaaacacaaaccttttgggttaaaagctttaacatctattaggaagaatttgtcctgtgggtttggaatcttggattttccccctttatgaactgtactggctgttgaccaccagacacctgaccgcaaatatcttttcttgtattcccatatttctagacaatgatttttgtaagacaataaatttattcattatag

SEQ ID NO: 435221 - DNA, 6853 bp, Homo sapiens
caggaatcgcctaaaccagtgaaacaccagagtggatccctgttgtatggggaacttgaacggcagcttttgcaagcaaatccaattctggaatcatttggaaatgcgaagactgtgaaaaatgataactcatctcgttttggcaaatttattcggatcaactttgatgtaactggctatatcgttggggccaacattgaaacataccttctggaaaagtctcgtgctgttcgtcaagcaaaagatgaacgtacttttcatatcttttaccagttgttatctggagcaggagaacacctaaagtctgatttgcttcttgaaggatttaataactacaggtttctctccaatggctatattcctattccgggacagcaagacaaagataatttccaggagaccatggaagcaatgcacataatgggcttctcccatgaagagattctgtcaatgcttaaagtagtatcttcagtgctacagtttggaaatatttctttcaaaaaggagagaaatactgatcaagcttccatgccagaaaatacagttgcgcagaagctctgccatcttcttgggatgaatgtgatggagtttactcgggccatcctgactccccggatcaaggtcggccgagactatgtgcaaaaagcccagaccaaagaacaggcagattttgcagtagaagcattggcaaaagctacctatgagcggctctttcgctggctcgttcatcgcatcaataaagctctggataggaccaaacgtcagggagcatctttcattggaatcctggatattgctggatttgaaatttttgagctgaactcctttgaacaactttgcatcaactacaccaatgagaagctgcagcagctgttcaaccacaccatgtttatcctagaacaagaggaataccagcgcgaaggcatcgagtggaacttcatcgatttcgggctggatctgcagccatgcatcgacctaatagagagacctgcgaaccctcctggtgtactggcccttttggatgaagaatgctggttccctaaagccacagataaaacctttgttgaaaaactggttcaagagcaaggttcccactccaagtttcagaaacctcgacaattaaaagacaaagctgatttttgcattatacattatgcagggaaggtggactataaggcagatgagtggctgatgaagaatatggaccccctgaatgacaacgtggccacccttttgcaccagtcatcagacagatttgtggcagagctttggaaagatgtggaccgtatcgtgggtctggatcaagtcactggtatgactgagacagcttttggctccgcatataaaaccaagaagggcatgtttcgtaccgttgggcaactctacaaagaatctctcaccaagctgatggcaactctccgaaacaccaaccctaactttgttcgttgtatcattccaaatcacgagaagagggctggaaaattggatccacacctagtcctagatcagcttcgctgtaatggtgtcctggaagggatccgaatctgtcgccagggcttccctaaccgaatagttttccaggaattcagacagagatatgagatcctaactccaaatgctattcctaaaggttttatggatggtaaacaggcctgtgaacgaatgatccgggctttagaattggacccaaacttgtacagaattggacagagcaagatatttttcagagctggagttctggcacacttagaggaagaaagagatttaaaaatcaccgatatcattatcttcttccaggccgtttgcagaggttacctggccagaaaggcctttgccaagaagcagcagcaactaagtgccttaaaggtcttgcagcggaactgtgccgcgtacctgaaattacggcactggcagtggtggcgagtcttcacaaaggtgaagccgcttctacaagtgactcgccaggaggaagaacttcaggccaaagatgaagagctgttgaaggtgaaggagaagcagacgaaggtggaaggagagctggaggagatggagcggaagcaccagcagcttttagaagagaagaatatccttgcagaacaactacaagcagagactgagctctttgctgaagcagaagagatgagggcaagacttgctgctaaaaagcaggaattagaagagattctacatgacttggagtctagggttgaagaagaagaagaaagaaaccaaatcctccaaaatgaaaagaaaaaaatgcaagcacatattcaggacctggaagaacagctagacgaggaggaaggggctcggcaaaagctgcagctggaaaaggtgacagcagaggccaagatcaagaagatggaagaggagattctgcttctcgaggaccaaaattccaagttcatcaaagaaaagaaactcatggaagatcgcattgctgagtgttcctctcagctggctgaagaggaagaaaaggcgaaaaacttggccaaaatcaggaataagcaagaagtgatgatctcagatttagaagaacgcttaaagaaggaagaaaagactcgtcaggaactggaaaaggccaaaagaaaactcgacggggagacgaccgacctgcaggaccagatcgcagagctgcaggcgcagattgatgagctcaagctgcagctggccaagaaggaggaggagctgcagggcgcactggccagaggtgatgatgaaacactccataagaacaatgcccttaaagttgtgcgagagctacaagcccaaattgctgaacttcaggaagactttgaatccgagaaggcttcacggaacaaggccgaaaagcagaaaagggacttgagtgaggaactggaagctctgaaaacagagctggaggacacgctggacaccacggcagcccagcaggaactacgtacaaaacgtgaacaagaagtggcagagctgaagaaagctcttgaggaggaaactaagaaccatgaagctcaaatccaggacatgagacaaagacacgcaacagccctggaggagctctcagagcagctggaacaggccaagcggttcaaagcaaatctagagaagaacaagcagggcctggagacagataacaaggagctggcgtgtgaggtgaaggtcctgcagcaggtcaaggctgagtctgagcacaagaggaagaagctcgacgcgcaggtccaggagctccatgccaaggtctctgaaggcgacaggctcagggtggagctggcggagaaagcaagtaagctgcagaatgagctagataatgtctccacccttctggaagaagcagagaagaagggtattaaatttgctaaggatgcagctagtcttgagtctcaactacaggatacacaggagcttcttcaggaggagacacgccagaaactaaacctgagcagtcggatccggcagctggaagaggagaagaacagtcttcaggagcagcaggaggaggaggaggaggccaggaagaacctggagaagcaagtgctggccctgcagtcccagttggctgataccaagaagaaagtagatgacgacctgggaacaattgaaagtctggaagaagccaagaagaagcttctgaaggacgcggaggccctgagccagcgcctggaggagaaggcactggcgtatgacaaactggagaagaccaagaaccgcctgcagcaggagctggacgacctcacggtggacctggaccaccagcgccaggtcgcctccaacttggagaagaagcagaagaagtttgaccagctgttagcagaagagaagagcatctctgctcgctatgccgaagagcgggaccgggccgaagccgaggccagagagaaagaaaccaaagccctgtcactggcccgggccctcgaggaagccctggaggccaaggaggagtttgagaggcagaacaagcagctccgagcagacatggaagacctcatgagctccaaagatgatgtgggaaaaaacgttcacgaacttgaaaaatccaaacgggccctagagcagcaggtggaggaaatgaggacccagctggaggagctggaagacgaactccaggccacggaagatgccaagcttcgtctggaggtcaacatgcaggccatgaaggcgcagttcgagagagacctgcaaaccagggatgagcagaatgaagagaagaagcggctgctgatcaaacaggtgcgggagctcgaggcggagctggaggatgagaggaaacagcgggcgcttgctgtagcttcaaagaaaaagatggagatagacctgaaggacctcgaagcccaaatcgaggctgcgaacaaagctcgggatgaggtgattaagcagctccgcaagctccaggctcagatgaaggattaccaacgtgaattagaagaagctcgtgcatccagagatgagatttttgctcaatccaaagagagtgaaaagaaattgaagagtctggaagcagaaatccttcaattgcaggaggaacttgcctcatctgagcgagcccgccgacacgccgagcaggagagagatgagctggcggacgagatcaccaacagcgcctctggcaagtccgcgctgctggatgagaagcggcgtctggaagctcggatcgcacagctggaggaggagctggaagaggagcagagcaacatggagctgctcaacgaccgcttccgcaagaccactctacaggtggacacactgaacgccgagctagcagccgagcgcagcgccgcccagaagagtgacaatgcacgccagcaactggagcggcagaacaaggagctgaaggccaagctgcaggaactcgagggtgctgtcaagtctaagttcaaggccaccatctcagccctggaggccaagattgggcagctggaggagcagcttgagcaggaagccaaggaacgagcagccgccaacaaattagtccgtcgcactgagaagaagctgaaagaaatcttcatgcaggttgaggatgagcgtcgacacgcggaccagtataaagagcagatggagaaggccaacgctcggatgaagcagcttaaacgccagctggaggaagcagaagaagaagcgacgcgtgccaacgcatctcggcgtaaactccagcgggaactggatgatgccaccgaggccaacgagggcctgagccgcgaggtcagcaccctgaagaaccggctgaggcggggtggccccatcagcttctcttccagccgatctggccggcgccagctgcaccttgaaggagcttccctggagctctccgacgatgacacagaaagtaagaccagtgatgtcaacgagacgcagccaccccagtcagagtaaagttgcaggaagccagaggaggcaatacagtgggacagttaggaatgcacccggggcctcctgcagatttcggaaattggcaagctacgggattccttcctgaaagatcaactgtgtcttaaggctctccagcctatgcatactgtatcctgcttcagacttaggtacaattgctcccctttttatatacagacacacacaggacacatatattaaacagattgtttcatcattgcatctattttccatatagtcatcaagagaccattttataaaacatggtaagaccctttttaaaacaaactccaggcccttggttgcgggtcgctgggttattggggcagcgccgtggtcgtcactcagtcgctctgcatgctctctgtcatacagacaggtaacctagttctgtgttcacgtggcccccgacgactcagccacatcaagtctcctagaccactgtggactctaaactgcacttgtctctctcatttccttcaaataatgatcaatgctatttcagtgagcaaactgtgaaaggggctttggaaagagtaggaggggtgggctggatcggaagcaacacccatttggggttaccatgtccatcccccaaggggggccctgcccctcgagtcgatggtgtcccgcatctactcatgtgaactggccttggcgagggctggtctgtgcatagaagggatagtggccacactgcagctgaggccccaggtggcagccatggatcatgtagacttccagatggtctcccgaaccgcctggctctgccggcgccctcctcacgtcaggagcaagcagccgtggacccctaagccgagctggtggaaggcccctccccgtcgccagccgggccctcatgctgaccttgcaaattcagccgctgctttgagcccaaaatgggaatattggttttgtgtccgaggcttgttccaagtttgtcaatgaggtttatggagcctccagaacagatgccatcttcctgaatgttgacatgccagtgggtgtgactccttcatttttccttctcccttccctttggacagtgttacagtgaacacttagcatcctgtttttggttggtagttaagcaaactgacattacggaaagtgccttagacactacagtactaagacaatgttgaatatatcattcgcctctataacaatttaatgtattcagttttgactgtgcttcatatcatgtacctctctagtcaaagtggtattacagacattcagtgacaatgaatcagtgttaattctaaatccttgatcctctgcaatgtgcttgaaaacacaaaccttttgggttaaaagctttaacatctattaggaagaatttgtcctgtgggtttggaatcttggattttccccctttatgaactgtactggctgttgaccaccagacacctgaccgcaaatatcttttcttgtattcccatatttctagacaatgatttttgtaagacaataaatttattcattatag

SEQ ID NO: 435222 - DNA, 6983 bp, Homo sapiens
aaacttctgaatgactgggatctcactactttcttttattaataatttctaattttattatgttatagtccaggaaaatagcctattctgttgctacttttttgaaatgtatcacagcctgttttcttcttttttctttttgtttgaggcaatatataagatccattattgtaactaattcatggatacttgttgtcttcttagtttattagtgttcatatccagtatgtacttacttattttcaattttctctttttaatttattttcagggcaaatttattcggatcaactttgatgtaactggctatatcgttggggccaacattgaaacataccttctggaaaagtctcgtgctgttcgtcaagcaaaagatgaacgtacttttcatatcttttaccagttgttatctggagcaggagaacacctaaagtctgatttgcttcttgaaggatttaataactacaggtttctctccaatggctatattcctattccgggacagcaagacaaagataatttccaggagaccatggaagcaatgcacataatgggcttctcccatgaagagattctgtcaatgcttaaagtagtatcttcagtgctacagtttggaaatatttctttcaaaaaggagagaaatactgatcaagcttccatgccagaaaatacagttgcgcagaagctctgccatcttcttgggatgaatgtgatggagtttactcgggccatcctgactccccggatcaaggtcggccgagactatgtgcaaaaagcccagaccaaagaacaggcagattttgcagtagaagcattggcaaaagctacctatgagcggctctttcgctggctcgttcatcgcatcaataaagctctggataggaccaaacgtcagggagcatctttcattggaatcctggatattgctggatttgaaatttttgagctgaactcctttgaacaactttgcatcaactacaccaatgagaagctgcagcagctgttcaaccacaccatgtttatcctagaacaagaggaataccagcgcgaaggcatcgagtggaacttcatcgatttcgggctggatctgcagccatgcatcgacctaatagagagacctgcgaaccctcctggtgtactggcccttttggatgaagaatgctggttccctaaagccacagataaaacctttgttgaaaaactggttcaagagcaaggttcccactccaagtttcagaaacctcgacaattaaaagacaaagctgatttttgcattatacattatgcagggaaggtggactataaggcagatgagtggctgatgaagaatatggaccccctgaatgacaacgtggccacccttttgcaccagtcatcagacagatttgtggcagagctttggaaagatgtggaccgtatcgtgggtctggatcaagtcactggtatgactgagacagcttttggctccgcatataaaaccaagaagggcatgtttcgtaccgttgggcaactctacaaagaatctctcaccaagctgatggcaactctccgaaacaccaaccctaactttgttcgttgtatcattccaaatcacgagaagagggctggaaaattggatccacacctagtcctagatcagcttcgctgtaatggtgtcctggaagggatccgaatctgtcgccagggcttccctaaccgaatagttttccaggaattcagacagagatatgagatcctaactccaaatgctattcctaaaggttttatggatggtaaacaggcctgtgaacgaatgatccgggctttagaattggacccaaacttgtacagaattggacagagcaagatatttttcagagctggagttctggcacacttagaggaagaaagagatttaaaaatcaccgatatcattatcttcttccaggccgtttgcagaggttacctggccagaaaggcctttgccaagaagcagcagcaactaagtgccttaaaggtcttgcagcggaactgtgccgcgtacctgaaattacggcactggcagtggtggcgagtcttcacaaaggtgaagccgcttctacaagtgactcgccaggaggaagaacttcaggccaaagatgaagagctgttgaaggtgaaggagaagcagacgaaggtggaaggagagctggaggagatggagcggaagcaccagcagcttttagaagagaagaatatccttgcagaacaactacaagcagagactgagctctttgctgaagcagaagagatgagggcaagacttgctgctaaaaagcaggaattagaagagattctacatgacttggagtctagggttgaagaagaagaagaaagaaaccaaatcctccaaaatgaaaagaaaaaaatgcaagcacatattcaggacctggaagaacagctagacgaggaggaaggggctcggcaaaagctgcagctggaaaaggtgacagcagaggccaagatcaagaagatggaagaggagattctgcttctcgaggaccaaaattccaagttcatcaaagaaaagaaactcatggaagatcgcattgctgagtgttcctctcagctggctgaagaggaagaaaaggcgaaaaacttggccaaaatcaggaataagcaagaagtgatgatctcagatttagaagaacgcttaaagaaggaagaaaagactcgtcaggaactggaaaaggccaaaagaaaactcgacggggagacgaccgacctgcaggaccagatcgcagagctgcaggcgcagattgatgagctcaagctgcagctggccaagaaggaggaggagctgcagggcgcactggccagaggtgatgatgaaacactccataagaacaatgcccttaaagttgtgcgagagctacaagcccaaattgctgaacttcaggaagactttgaatccgagaaggcttcacggaacaaggccgaaaagcagaaaagggacttgagtgaggaactggaagctctgaaaacagagctggaggacacgctggacaccacggcagcccagcaggaactacgtacaaaacgtgaacaagaagtggcagagctgaagaaagctcttgaggaggaaactaagaaccatgaagctcaaatccaggacatgagacaaagacacgcaacagccctggaggagctctcagagcagctggaacaggccaagcggttcaaagcaaatctagagaagaacaagcagggcctggagacagataacaaggagctggcgtgtgaggtgaaggtcctgcagcaggtcaaggctgagtctgagcacaagaggaagaagctcgacgcgcaggtccaggagctccatgccaaggtctctgaaggcgacaggctcagggtggagctggcggagaaagcaagtaagctgcagaatgagctagataatgtctccacccttctggaagaagcagagaagaagggtattaaatttgctaaggatgcagctagtcttgagtctcaactacaggatacacaggagcttcttcaggaggagacacgccagaaactaaacctgagcagtcggatccggcagctggaagaggagaagaacagtcttcaggagcagcaggaggaggaggaggaggccaggaagaacctggagaagcaagtgctggccctgcagtcccagttggctgataccaagaagaaagtagatgacgacctgggaacaattgaaagtctggaagaagccaagaagaagcttctgaaggacgcggaggccctgagccagcgcctggaggagaaggcactggcgtatgacaaactggagaagaccaagaaccgcctgcagcaggagctggacgacctcacggtggacctggaccaccagcgccaggtcgcctccaacttggagaagaagcagaagaagtttgaccagctgttagcagaagagaagagcatctctgctcgctatgccgaagagcgggaccgggccgaagccgaggccagagagaaagaaaccaaagccctgtcactggcccgggccctcgaggaagccctggaggccaaggaggagtttgagaggcagaacaagcagctccgagcagacatggaagacctcatgagctccaaagatgatgtgggaaaaaacgttcacgaacttgaaaaatccaaacgggccctagagcagcaggtggaggaaatgaggacccagctggaggagctggaagacgaactccaggccacggaagatgccaagcttcgtctggaggtcaacatgcaggccatgaaggcgcagttcgagagagacctgcaaaccagggatgagcagaatgaagagaagaagcggctgctgatcaaacaggtgcgggagctcgaggcggagctggaggatgagaggaaacagcgggcgcttgctgtagcttcaaagaaaaagatggagatagacctgaaggacctcgaagcccaaatcgaggctgcgaacaaagctcgggatgaggtgattaagcagctccgcaagctccaggctcagatgaaggattaccaacgtgaattagaagaagctcgtgcatccagagatgagatttttgctcaatccaaagagagtgaaaagaaattgaagagtctggaagcagaaatccttcaattgcaggaggaacttgcctcatctgagcgagcccgccgacacgccgagcaggagagagatgagctggcggacgagatcaccaacagcgcctctggcaagtccgcgctgctggatgagaagcggcgtctggaagctcggatcgcacagctggaggaggagctggaagaggagcagagcaacatggagctgctcaacgaccgcttccgcaagaccactctacaggtggacacactgaacgccgagctagcagccgagcgcagcgccgcccagaagagtgacaatgcacgccagcaactggagcggcagaacaaggagctgaaggccaagctgcaggaactcgagggtgctgtcaagtctaagttcaaggccaccatctcagccctggaggccaagattgggcagctggaggagcagcttgagcaggaagccaaggaacgagcagccgccaacaaattagtccgtcgcactgagaagaagctgaaagaaatcttcatgcaggttgaggatgagcgtcgacacgcggaccagtataaagagcagatggagaaggccaacgctcggatgaagcagcttaaacgccagctggaggaagcagaagaagaagcgacgcgtgccaacgcatctcggcgtaaactccagcgggaactggatgatgccaccgaggccaacgagggcctgagccgcgaggtcagcaccctgaagaaccggctgaggcggggtggccccatcagcttctcttccagccgatctggccggcgccagctgcaccttgaaggagcttccctggagctctccgacgatgacacagaaagtaagaccagtgatgtcaacgagacgcagccaccccagtcagagtaaagttgcaggaagccagaggaggcaatacagtgggacagttaggaatgcacccggggcctcctgcagatttcggaaattggcaagctacgggattccttcctgaaagatcaactgtgtcttaaggctctccagcctatgcatactgtatcctgcttcagacttaggtacaattgctcccctttttatatacagacacacacaggacacatatattaaacagattgtttcatcattgcatctattttccatatagtcatcaagagaccattttataaaacatggtaagaccctttttaaaacaaactccaggcccttggttgcgggtcgctgggttattggggcagcgccgtggtcgtcactcagtcgctctgcatgctctctgtcatacagacaggtaacctagttctgtgttcacgtggcccccgacgactcagccacatcaagtctcctagaccactgtggactctaaactgcacttgtctctctcatttccttcaaataatgatcaatgctatttcagtgagcaaactgtgaaaggggctttggaaagagtaggaggggtgggctggatcggaagcaacacccatttggggttaccatgtccatcccccaaggggggccctgcccctcgagtcgatggtgtcccgcatctactcatgtgaactggccttggcgagggctggtctgtgcatagaagggatagtggccacactgcagctgaggccccaggtggcagccatggatcatgtagacttccagatggtctcccgaaccgcctggctctgccggcgccctcctcacgtcaggagcaagcagccgtggacccctaagccgagctggtggaaggcccctccccgtcgccagccgggccctcatgctgaccttgcaaattcagccgctgctttgagcccaaaatgggaatattggttttgtgtccgaggcttgttccaagtttgtcaatgaggtttatggagcctccagaacagatgccatcttcctgaatgttgacatgccagtgggtgtgactccttcatttttccttctcccttccctttggacagtgttacagtgaacacttagcatcctgtttttggttggtagttaagcaaactgacattacggaaagtgccttagacactacagtactaagacaatgttgaatatatcattcgcctctataacaatttaatgtattcagttttgactgtgcttcatatcatgtacctctctagtcaaagtggtattacagacattcagtgacaatgaatcagtgttaattctaaatccttgatcctctgcaatgtgcttgaaaacacaaaccttttgggttaaaagctttaacatctattaggaagaatttgtcctgtgggtttggaatcttggattttccccctttatgaactgtactggctgttgaccaccagacacctgaccgcaaatatcttttcttgtattcccatatttctagacaatgatttttgtaagacaataaatttattcattatag

SEQ ID NO: 435223 - DNA, 5305 bp, Homo sapiens
aggccggcgcttaatcggccgagggtttccacggaatcatgacagagatatgagatcctaactccaaatgctattcctaaaggttttatggatggtaaacaggcctgtgaacgaatgatccgggctttagaattggacccaaacttgtacagaattggacagagcaagatatttttcagagctggagttctggcacacttagaggaagaaagagatttaaaaatcaccgatatcattatcttcttccaggccgtttgcagaggttacctggccagaaaggcctttgccaagaagcagcagcaactaagtgccttaaaggtcttgcagcggaactgtgccgcgtacctgaaattacggcactggcagtggtggcgagtcttcacaaaggtgaagccgcttctacaagtgactcgccaggaggaagaacttcaggccaaagatgaagagctgttgaaggtgaaggagaagcagacgaaggtggaaggagagctggaggagatggagcggaagcaccagcagcttttagaagagaagaatatccttgcagaacaactacaagcagagactgagctctttgctgaagcagaagagatgagggcaagacttgctgctaaaaagcaggaattagaagagattctacatgacttggagtctagggttgaagaagaagaagaaagaaaccaaatcctccaaaatgaaaagaaaaaaatgcaagcacatattcaggacctggaagaacagctagacgaggaggaaggggctcggcaaaagctgcagctggaaaaggtgacagcagaggccaagatcaagaagatggaagaggagattctgcttctcgaggaccaaaattccaagttcatcaaagaaaagaaactcatggaagatcgcattgctgagtgttcctctcagctggctgaagaggaagaaaaggcgaaaaacttggccaaaatcaggaataagcaagaagtgatgatctcagatttagaagaacgcttaaagaaggaagaaaagactcgtcaggaactggaaaaggccaaaagaaaactcgacggggagacgaccgacctgcaggaccagatcgcagagctgcaggcgcagattgatgagctcaagctgcagctggccaagaaggaggaggagctgcagggcgcactggccagaggtgatgatgaaacactccataagaacaatgcccttaaagttgtgcgagagctacaagcccaaattgctgaacttcaggaagactttgaatccgagaaggcttcacggaacaaggccgaaaagcagaaaagggacttgagtgaggaactggaagctctgaaaacagagctggaggacacgctggacaccacggcagcccagcaggaactacgtacaaaacgtgaacaagaagtggcagagctgaagaaagctcttgaggaggaaactaagaaccatgaagctcaaatccaggacatgagacaaagacacgcaacagccctggaggagctctcagagcagctggaacaggccaagcggttcaaagcaaatctagagaagaacaagcagggcctggagacagataacaaggagctggcgtgtgaggtgaaggtcctgcagcaggtcaaggctgagtctgagcacaagaggaagaagctcgacgcgcaggtccaggagctccatgccaaggtctctgaaggcgacaggctcagggtggagctggcggagaaagcaagtaagctgcagaatgagctagataatgtctccacccttctggaagaagcagagaagaagggtattaaatttgctaaggatgcagctagtcttgagtctcaactacaggatacacaggagcttcttcaggaggagacacgccagaaactaaacctgagcagtcggatccggcagctggaagaggagaagaacagtcttcaggagcagcaggaggaggaggaggaggccaggaagaacctggagaagcaagtgctggccctgcagtcccagttggctgataccaagaagaaagtagatgacgacctgggaacaattgaaagtctggaagaagccaagaagaagcttctgaaggacgcggaggccctgagccagcgcctggaggagaaggcactggcgtatgacaaactggagaagaccaagaaccgcctgcagcaggagctggacgacctcacggtggacctggaccaccagcgccaggtcgcctccaacttggagaagaagcagaagaagtttgaccagctgttagcagaagagaagagcatctctgctcgctatgccgaagagcgggaccgggccgaagccgaggccagagagaaagaaaccaaagccctgtcactggcccgggccctcgaggaagccctggaggccaaggaggagtttgagaggcagaacaagcagctccgagcagacatggaagacctcatgagctccaaagatgatgtgggaaaaaacgttcacgaacttgaaaaatccaaacgggccctagagcagcaggtggaggaaatgaggacccagctggaggagctggaagacgaactccaggccacggaagatgccaagcttcgtctggaggtcaacatgcaggccatgaaggcgcagttcgagagagacctgcaaaccagggatgagcagaatgaagagaagaagcggctgctgatcaaacaggtgcgggagctcgaggcggagctggaggatgagaggaaacagcgggcgcttgctgtagcttcaaagaaaaagatggagatagacctgaaggacctcgaagcccaaatcgaggctgcgaacaaagctcgggatgaggtgattaagcagctccgcaagctccaggctcagatgaaggattaccaacgtgaattagaagaagctcgtgcatccagagatgagatttttgctcaatccaaagagagtgaaaagaaattgaagagtctggaagcagaaatccttcaattgcaggaggaacttgcctcatctgagcgagcccgccgacacgccgagcaggagagagatgagctggcggacgagatcaccaacagcgcctctggcaagtccgcgctgctggatgagaagcggcgtctggaagctcggatcgcacagctggaggaggagctggaagaggagcagagcaacatggagctgctcaacgaccgcttccgcaagaccactctacaggtggacacactgaacgccgagctagcagccgagcgcagcgccgcccagaagagtgacaatgcacgccagcaactggagcggcagaacaaggagctgaaggccaagctgcaggaactcgagggtgctgtcaagtctaagttcaaggccaccatctcagccctggaggccaagattgggcagctggaggagcagcttgagcaggaagccaaggaacgagcagccgccaacaaattagtccgtcgcactgagaagaagctgaaagaaatcttcatgcaggttgaggatgagcgtcgacacgcggaccagtataaagagcagatggagaaggccaacgctcggatgaagcagcttaaacgccagctggaggaagcagaagaagaagcgacgcgtgccaacgcatctcggcgtaaactccagcgggaactggatgatgccaccgaggccaacgagggcctgagccgcgaggtcagcaccctgaagaaccggctgaggcggggtggccccatcagcttctcttccagccgatctggccggcgccagctgcaccttgaaggagcttccctggagctctccgacgatgacacagaaagtaagaccagtgatgtcaacgagacgcagccaccccagtcagagtaaagttgcaggaagccagaggaggcaatacagtgggacagttaggaatgcacccggggcctcctgcagatttcggaaattggcaagctacgggattccttcctgaaagatcaactgtgtcttaaggctctccagcctatgcatactgtatcctgcttcagacttaggtacaattgctcccctttttatatacagacacacacaggacacatatattaaacagattgtttcatcattgcatctattttccatatagtcatcaagagaccattttataaaacatggtaagaccctttttaaaacaaactccaggcccttggttgcgggtcgctgggttattggggcagcgccgtggtcgtcactcagtcgctctgcatgctctctgtcatacagacaggtaacctagttctgtgttcacgtggcccccgacgactcagccacatcaagtctcctagaccactgtggactctaaactgcacttgtctctctcatttccttcaaataatgatcaatgctatttcagtgagcaaactgtgaaaggggctttggaaagagtaggaggggtgggctggatcggaagcaacacccatttggggttaccatgtccatcccccaaggggggccctgcccctcgagtcgatggtgtcccgcatctactcatgtgaactggccttggcgagggctggtctgtgcatagaagggatagtggccacactgcagctgaggccccaggtggcagccatggatcatgtagacttccagatggtctcccgaaccgcctggctctgccggcgccctcctcacgtcaggagcaagcagccgtggacccctaagccgagctggtggaaggcccctccccgtcgccagccgggccctcatgctgaccttgcaaattcagccgctgctttgagcccaaaatgggaatattggttttgtgtccgaggcttgttccaagtttgtcaatgaggtttatggagcctccagaacagatgccatcttcctgaatgttgacatgccagtgggtgtgactccttcatttttccttctcccttccctttggacagtgttacagtgaacacttagcatcctgtttttggttggtagttaagcaaactgacattacggaaagtgccttagacactacagtactaagacaatgttgaatatatcattcgcctctataacaatttaatgtattcagttttgactgtgcttcatatcatgtacctctctagtcaaagtggtattacagacattcagtgacaatgaatcagtgttaattctaaatccttgatcctctgcaatgtgcttgaaaacacaaaccttttgggttaaaagctttaacatctattaggaagaatttgtcctgtgggtttggaatcttggattttccccctttatgaactgtactggctgttgaccaccagacacctgaccgcaaatatcttttcttgtattcccatatttctagacaatgatttttgtaagacaataaatttattcattatag

SEQ ID NO: 435224 - DNA, 6719 bp, Homo sapiens
agcagtgctaaaggagcccggcggaggcagcggtgggtttgggactgaggcgctggatctgtggtcgcggctggggacgtgcgcccgcgccaccatcttcggctgaagaggcaattgcttttggatcgttccatttacaatggcgcagagaactggactcgaggatccagagaggtatctctttgtggacagggctgtcatctacaaccctgccactcaagctgattggacagctaaaaagctagtgtggattccatcagaacgccatggttttgaggcagctagtatcaaagaagaacggggagatgaagttatggtggagttggcagagaatggaaagaaagcaatggtcaacaaagatgatattcagaagatgaacccacctaagttttccaaggtggaggatatggcagaattgacatgcttgaatgaagcttccgttttacataatctgaaggatcgctactattcaggactaatctatacttattctggactcttctgtgtagttataaacccttacaagaatcttccaatttactctgagaatattattgaaatgtacagagggaagaagcgtcatgagatgcctccacacatctatgctatatctgaatctgcttacagatgcatgcttcaagatcgtgaggaccagtcaattctttgcacgggtgagtcaggtgctgggaagacagaaaatacaaagaaagttattcagtaccttgcccatgttgcttcttcacataaaggaagaaaggaccataatattcctggggaacttgaacggcagcttttgcaagcaaatccaattctggaatcatttggaaatgcgaagactgtgaaaaatgataactcatctcgttttggcaaatttattcggatcaactttgatgtaactggctatatcgttggggccaacattgaaacataccttctggaaaagtctcgtgctgttcgtcaagcaaaagatgaacgtacttttcatatcttttaccagttgttatctggagcaggagaacacctaaagtctgatttgcttcttgaaggatttaataactacaggtttctctccaatggctatattcctattccgggacagcaagacaaagataatttccaggagaccatggaagcaatgcacataatgggcttctcccatgaagagattctgtcaatgcttaaagtagtatcttcagtgctacagtttggaaatatttctttcaaaaaggagagaaatactgatcaagcttccatgccagaaaatacagttgcgcagaagctctgccatcttcttgggatgaatgtgatggagtttactcgggccatcctgactccccggatcaaggtcggccgagactatgtgcaaaaagcccagaccaaagaacaggcagattttgcagtagaagcattggcaaaagctacctatgagcggctctttcgctggctcgttcatcgcatcaataaagctctggataggaccaaacgtcagggagcatctttcattggaatcctggatattgctggatttgaaatttttgagctgaactcctttgaacaactttgcatcaactacaccaatgagaagctgcagcagctgttcaaccacaccatgtttatcctagaacaagaggaataccagcgcgaaggcatcgagtggaacttcatcgatttcgggctggatctgcagccatgcatcgacctaatagagagacctgcgaaccctcctggtgtactggcccttttggatgaagaatgctggttccctaaagccacagataaaacctttgttgaaaaactggttcaagagcaaggttcccactccaagtttcagaaacctcgacaattaaaagacaaagctgatttttgcattatacattatgcagggaaggtggactataaggcagatgagtggctgatgaagaatatggacccccttttagaagagaagaatatccttgcagaacaactacaagcagagactgagctctttgctgaagcagaagagatgagggcaagacttgctgctaaaaagcaggaattagaagagattctacatgacttggagtctagggttgaagaagaagaagaaagaaaccaaatcctccaaaatgaaaagaaaaaaatgcaagcacatattcaggacctggaagaacagctagacgaggaggaaggggctcggcaaaagctgcagctggaaaaggtgacagcagaggccaagatcaagaagatggaagaggagattctgcttctcgaggaccaaaattccaagttcatcaaagaaaagaaactcatggaagatcgcattgctgagtgttcctctcagctggctgaagaggaagaaaaggcgaaaaacttggccaaaatcaggaataagcaagaagtgatgatctcagatttagaagaacgcttaaagaaggaagaaaagactcgtcaggaactggaaaaggccaaaagaaaactcgacggggagacgaccgacctgcaggaccagatcgcagagctgcaggcgcagattgatgagctcaagctgcagctggccaagaaggaggaggagctgcagggcgcactggccagaggtgatgatgaaacactccataagaacaatgcccttaaagttgtgcgagagctacaagcccaaattgctgaacttcaggaagactttgaatccgagaaggcttcacggaacaaggccgaaaagcagaaaagggacttgagtgaggaactggaagctctgaaaacagagctggaggacacgctggacaccacggcagcccagcaggaactacgtacaaaacgtgaacaagaagtggcagagctgaagaaagctcttgaggaggaaactaagaaccatgaagctcaaatccaggacatgagacaaagacacgcaacagccctggaggagctctcagagcagctggaacaggccaagcggttcaaagcaaatctagagaagaacaagcagggcctggagacagataacaaggagctggcgtgtgaggtgaaggtcctgcagcaggtcaaggctgagtctgagcacaagaggaagaagctcgacgcgcaggtccaggagctccatgccaaggtctctgaaggcgacaggctcagggtggagctggcggagaaagcaagtaagctgcagaatgagctagataatgtctccacccttctggaagaagcagagaagaagggtattaaatttgctaaggatgcagctagtcttgagtctcaactacaggatacacaggagcttcttcaggaggagacacgccagaaactaaacctgagcagtcggatccggcagctggaagaggagaagaacagtcttcaggagcagcaggaggaggaggaggaggccaggaagaacctggagaagcaagtgctggccctgcagtcccagttggctgataccaagaagaaagtagatgacgacctgggaacaattgaaagtctggaagaagccaagaagaagcttctgaaggacgcggaggccctgagccagcgcctggaggagaaggcactggcgtatgacaaactggagaagaccaagaaccgcctgcagcaggagctggacgacctcacggtggacctggaccaccagcgccaggtcgcctccaacttggagaagaagcagaagaagtttgaccagctgttagcagaagagaagagcatctctgctcgctatgccgaagagcgggaccgggccgaagccgaggccagagagaaagaaaccaaagccctgtcactggcccgggccctcgaggaagccctggaggccaaggaggagtttgagaggcagaacaagcagctccgagcagacatggaagacctcatgagctccaaagatgatgtgggaaaaaacgttcacgaacttgaaaaatccaaacgggccctagagcagcaggtggaggaaatgaggacccagctggaggagctggaagacgaactccaggccacggaagatgccaagcttcgtctggaggtcaacatgcaggccatgaaggcgcagttcgagagagacctgcaaaccagggatgagcagaatgaagagaagaagcggctgctgatcaaacaggtgcgggagctcgaggcggagctggaggatgagaggaaacagcgggcgcttgctgtagcttcaaagaaaaagatggagatagacctgaaggacctcgaagcccaaatcgaggctgcgaacaaagctcgggatgaggtgattaagcagctccgcaagctccaggctcagatgaaggattaccaacgtgaattagaagaagctcgtgcatccagagatgagatttttgctcaatccaaagagagtgaaaagaaattgaagagtctggaagcagaaatccttcaattgcaggaggaacttgcctcatctgagcgagcccgccgacacgccgagcaggagagagatgagctggcggacgagatcaccaacagcgcctctggcaagtccgcgctgctggatgagaagcggcgtctggaagctcggatcgcacagctggaggaggagctggaagaggagcagagcaacatggagctgctcaacgaccgcttccgcaagaccactctacaggtggacacactgaacgccgagctagcagccgagcgcagcgccgcccagaagagtgacaatgcacgccagcaactggagcggcagaacaaggagctgaaggccaagctgcaggaactcgagggtgctgtcaagtctaagttcaaggccaccatctcagccctggaggccaagattgggcagctggaggagcagcttgagcaggaagccaaggaacgagcagccgccaacaaattagtccgtcgcactgagaagaagctgaaagaaatcttcatgcaggttgaggatgagcgtcgacacgcggaccagtataaagagcagatggagaaggccaacgctcggatgaagcagcttaaacgccagctggaggaagcagaagaagaagcgacgcgtgccaacgcatctcggcgtaaactccagcgggaactggatgatgccaccgaggccaacgagggcctgagccgcgaggtcagcaccctgaagaaccggctgaggcggggtggccccatcagcttctcttccagccgatctggccggcgccagctgcaccttgaaggagcttccctggagctctccgacgatgacacagaaagtaagaccagtgatgtcaacgagacgcagccaccccagtcagagtaaagttgcaggaagccagaggaggcaatacagtgggacagttaggaatgcacccggggcctcctgcagatttcggaaattggcaagctacgggattccttcctgaaagatcaactgtgtcttaaggctctccagcctatgcatactgtatcctgcttcagacttaggtacaattgctcccctttttatatacagacacacacaggacacatatattaaacagattgtttcatcattgcatctattttccatatagtcatcaagagaccattttataaaacatggtaagaccctttttaaaacaaactccaggcccttggttgcgggtcgctgggttattggggcagcgccgtggtcgtcactcagtcgctctgcatgctctctgtcatacagacaggtaacctagttctgtgttcacgtggcccccgacgactcagccacatcaagtctcctagaccactgtggactctaaactgcacttgtctctctcatttccttcaaataatgatcaatgctatttcagtgagcaaactgtgaaaggggctttggaaagagtaggaggggtgggctggatcggaagcaacacccatttggggttaccatgtccatcccccaaggggggccctgcccctcgagtcgatggtgtcccgcatctactcatgtgaactggccttggcgagggctggtctgtgcatagaagggatagtggccacactgcagctgaggccccaggtggcagccatggatcatgtagacttccagatggtctcccgaaccgcctggctctgccggcgccctcctcacgtcaggagcaagcagccgtggacccctaagccgagctggtggaaggcccctccccgtcgccagccgggccctcatgctgaccttgcaaattcagccgctgctttgagcccaaaatgggaatattggttttgtgtccgaggcttgttccaagtttgtcaatgaggtttatggagcctccagaacagatgccatcttcctgaatgttgacatgccagtgggtgtgactccttcatttttccttctcccttccctttggacagtgttacagtgaacacttagcatcctgtttttggttggtagttaagcaaactgacattacggaaagtgccttagacactacagtactaagacaatgttgaatatatcattcgcctctataacaatttaatgtattcagttttgactgtgcttcatatcatgtacctctctagtcaaagtggtattacagacattcagtgacaatgaatcagtgttaattctaaatccttgatcctctgcaatgtgcttgaaaacacaaaccttttgggttaaaagctttaacatctattaggaagaatttgtcctgtgggtttggaatcttggattttccccctttatgaactgtactggctgttgaccaccagacacctgaccgcaaatatcttttcttgtattcccatatttctagacaatgatttttgtaagacaataaatttattcattatag

SEQ ID NO: 435225 - DNA, 8509 bp, Homo sapiens
agcagtgctaaaggagcccggcggaggcagcggtgggtttgggactgaggcgctggatctgtggtcgcggctggggacgtgcgcccgcgccaccatcttcggctgaagaggcaattgcttttggatcgttccatttacaatggcgcagagaactggactcgaggatccagagaggtatctctttgtggacagggctgtcatctacaaccctgccactcaagctgattggacagctaaaaagctagtgtggattccatcagaacgccatggttttgaggcagctagtatcaaagaagaacggggagatgaagttatggtggagttggcagagaatggaaagaaagcaatggtcaacaaagatgatattcagaagatgaacccacctaagttttccaaggtggaggatatggcagaattgacatgcttgaatgaagcttccgttttacataatctgaaggatcgctactattcaggactaatctatacttattctggactcttctgtgtagttataaacccttacaagaatcttccaatttactctgagaatattattgaaatgtacagagggaagaagcgtcatgagatgcctccacacatctatgctatatctgaatctgcttacagatgcatgcttcaagatcgtgaggaccagtcaattctttgcacgggtgagtcaggtgctgggaagacagaaaatacaaagaaagttattcagtaccttgcccatgttgcttcttcacataaaggaagaaaggaccataatattcctggggaacttgaacggcagcttttgcaagcaaatccaattctggaatcatttggaaatgcgaagactgtgaaaaatgataactcatctcgttttggcaaatttattcggatcaactttgatgtaactggctatatcgttggggccaacattgaaacataccttctggaaaagtctcgtgctgttcgtcaagcaaaagatgaacgtacttttcatatcttttaccagttgttatctggagcaggagaacacctaaagtctgatttgcttcttgaaggatttaataactacaggtttctctccaatggctatattcctattccgggacagcaagacaaagataatttccaggagaccatggaagcaatgcacataatgggcttctcccatgaagagattctgtcaatgcttaaagtagtatcttcagtgctacagtttggaaatatttctttcaaaaaggagagaaatactgatcaagcttccatgccagaaaatacagttgcgcagaagctctgccatcttcttgggatgaatgtgatggagtttactcgggccatcctgactccccggatcaaggtcggccgagactatgtgcaaaaagcccagaccaaagaacaggcagattttgcagtagaagcattggcaaaagctacctatgagcggctctttcgctggctcgttcatcgcatcaataaagctctggataggaccaaacgtcagggagcatctttcattggaatcctggatattgctggatttgaaatttttgagctgaactcctttgaacaactttgcatcaactacaccaatgagaagctgcagcagctgttcaaccacaccatgtttatcctagaacaagaggaataccagcgcgaaggcatcgagtggaacttcatcgatttcgggctggatctgcagccatgcatcgacctaatagagagacctgcgaaccctcctggtgtactggcccttttggatgaagaatgctggttccctaaagccacagataaaacctttgttgaaaaactggttcaagagcaaggttcccactccaagtttcagaaacctcgacaattaaaagacaaagctgatttttgcattatacattatgcagggaaggtggactataaggcagatgagtggctgatgaagaatatggaccccctgaatgacaacgtggccacccttttgcaccagtcatcagacagatttgtggcagagctttggaaagatgtggaccgtatcgtgggtctggatcaagtcactggtatgactgagacagcttttggctccgcatataaaaccaagaagggcatgtttcgtaccgttgggcaactctacaaagaatctctcaccaagctgatggcaactctccgaaacaccaaccctaactttgttcgttgtatcattccaaatcacgagaagagggctggaaaattggatccacacctagtcctagatcagcttcgctgtaatggtgtcctggaagggatccgaatctgtcgccagggcttccctaaccgaatagttttccaggaattcagacagagatatgagatcctaactccaaatgctattcctaaaggttttatggatggtaaacaggcctgtgaacgaatgatccgggctttagaattggacccaaacttgtacagaattggacagagcaagatatttttcagagctggagttctggcacacttagaggaagaaagagatttaaaaatcaccgatatcattatcttcttccaggccgtttgcagaggttacctggccagaaaggcctttgccaagaagcagcagcaactaagtgccttaaaggtcttgcagcggaactgtgccgcgtacctgaaattacggcactggcagtggtggcgagtcttcacaaaggtgaagccgcttctacaagtgactcgccaggaggaagaacttcaggccaaagatgaagagctgttgaaggtgaaggagaagcagacgaaggtggaaggagagctggaggagatggagcggaagcaccagcagcttttagaagagaagaatatccttgcagaacaactacaagcagagactgagctctttgctgaagcagaagagatgagggcaagacttgctgctaaaaagcaggaattagaagagattctacatgacttggagtctagggttgaagaagaagaagaaagaaaccaaatcctccaaaatgaaaagaaaaaaatgcaagcacatattcaggacctggaagaacagctagacgaggaggaaggggctcggcaaaagctgcagctggaaaaggtgacagcagaggccaagatcaagaagatggaagaggagattctgcttctcgaggaccaaaattccaagttcatcaaagaaaagaaactcatggaagatcgcattgctgagtgttcctctcagctggctgaagaggaagaaaaggcgaaaaacttggccaaaatcaggaataagcaagaagtgatgatctcagatttagaagaacgcttaaagaaggaagaaaagactcgtcaggaactggaaaaggccaaaagaaaactcgacggggagacgaccgacctgcaggaccagatcgcagagctgcaggcgcagattgatgagctcaagctgcagctggccaagaaggaggaggagctgcagggcgcactggccagaggtgatgatgaaacactccataagaacaatgcccttaaagttgtgcgagagctacaagcccaaattgctgaacttcaggaagactttgaatccgagaaggcttcacggaacaaggccgaaaagcagaaaagggacttgagtgaggaactggaagctctgaaaacagagctggaggacacgctggacaccacggcagcccagcaggaactacgtacaaaacgtgaacaagaagtggcagagctgaagaaagctcttgaggaggaaactaagaaccatgaagctcaaatccaggacatgagacaaagacacgcaacagccctggaggagctctcagagcagctggaacaggccaagcggttcaaagcaaatctagagaagaacaagcagggcctggagacagataacaaggagctggcgtgtgaggtgaaggtcctgcagcaggtcaaggctgagtctgagcacaagaggaagaagctcgacgcgcaggtccaggagctccatgccaaggtctctgaaggcgacaggctcagggtggagctggcggagaaagcaagtaagctgcagaatgagctagataatgtctccacccttctggaagaagcagagaagaagggtattaaatttgctaaggatgcagctagtcttgagtctcaactacaggatacacaggagcttcttcaggaggagacacgccagaaactaaacctgagcagtcggatccggcagctggaagaggagaagaacagtcttcaggagcagcaggaggaggaggaggaggccaggaagaacctggagaagcaagtgctggccctgcagtcccagttggctgataccaagaagaaagtagatgacgacctgggaacaattgaaagtctggaagaagccaagaagaagcttctgaaggacgcggaggccctgagccagcgcctggaggagaaggcactggcgtatgacaaactggagaagaccaagaaccgcctgcagcaggagctggacgacctcacggtggacctggaccaccagcgccaggtcgcctccaacttggagaagaagcagaagaagtttgaccagctgttagcagaagagaagagcatctctgctcgctatgccgaagagcgggaccgggccgaagccgaggccagagagaaagaaaccaaagccctgtcactggcccgggccctcgaggaagccctggaggccaaggaggagtttgagaggcagaacaagcagctccgagcagacatggaagacctcatgagctccaaagatgatgtgggaaaaaacgttcacgaacttgaaaaatccaaacgggccctagagcagcaggtggaggaaatgaggacccagctggaggagctggaagacgaactccaggccacggaagatgccaagcttcgtctggaggtcaacatgcaggccatgaaggcgcagttcgagagagacctgcaaaccagggatgagcagaatgaagagaagaagcggctgctgatcaaacaggtgcgggagctcgaggcggagctggaggatgagaggaaacagcgggcgcttgctgtagcttcaaagaaaaagatggagatagacctgaaggacctcgaagcccaaatcgaggctgcgaacaaagctcgggatgaggtgattaagcagctccgcaagctccaggctcagatgaaggattaccaacgtgaattagaagaagctcgtgcatccagagatgagatttttgctcaatccaaagagagtgaaaagaaattgaagagtctggaagcagaaatccttcaattgcaggaggaacttgcctcatctgagcgagcccgccgacacgccgagcaggagagagatgagctggcggacgagatcaccaacagcgcctctggcaagtccgcgctgctggatgagaagcggcgtctggaagctcggatcgcacagctggaggaggagctggaagaggagcagagcaacatggagctgctcaacgaccgcttccgcaagaccactctacaggtggacacactgaacgccgagctagcagccgagcgcagcgccgcccagaagagtgacaatgcacgccagcaactggagcggcagaacaaggagctgaaggccaagctgcaggaactcgagggtgctgtcaagtctaagttcaaggccaccatctcagccctggaggccaagattgggcagctggaggagcagcttgagcaggaagccaaggaacgagcagccgccaacaaattagtccgtcgcactgagaagaagctgaaagaaatcttcatgcaggttgaggatgagcgtcgacacgcggaccagtataaagagcagatggagaaggccaacgctcggatgaagcagcttaaacgccagctggaggaagcagaagaagaagcgacgcgtgccaacgcatctcggcgtaaactccagcgggaactggatgatgccaccgaggccaacgagggcctgagccgcgaggtcagcaccctgaagaaccggctgaggcggggtggccccatcagcttctcttccagccgatctggccggcgccagctgcaccttgaaggagcttccctggagctctccgacgatgacacagaaagtaagaccagtgatgtcaacgagacgcagccaccccagtcagagtaaagttgcaggaagccagaggaggcaatacagtgggacagttaggaatgcacccggggcctcctgcagatttcggaaattggcaagctacgggattccttcctgaaagatcaactgtgtcttaaggctctccagcctatgcatactgtatcctgcttcagacttaggtacaattgctcccctttttatatacagacacacacaggacacatatattaaacagattgtttcatcattgcatctattttccatatagtcatcaagagaccattttataaaacatggtaagaccctttttaaaacaaactccaggcccttggttgcgggtcgctgggttattggggcagcgccgtggtcgtcactcagtcgctctgcatgctctctgtcatacagacaggtaacctagttctgtgttcacgtggcccccgacgactcagccacatcaagtctcctagaccactgtggactctaaactgcacttgtctctctcatttccttcaaataatgatcaatgctatttcagtgagcaaactgtgaaaggggctttggaaagagtaggaggggtgggctggatcggaagcaacacccatttggggttaccatgtccatcccccaaggggggccctgcccctcgagtcgatggtgtcccgcatctactcatgtgaactggccttggcgagggctggtctgtgcatagaagggatagtggccacactgcagctgaggccccaggtggcagccatggatcatgtagacttccagatggtctcccgaaccgcctggctctgccggcgccctcctcacgtcaggagcaagcagccgtggacccctaagccgagctggtggaaggcccctccccgtcgccagccgggccctcatgctgaccttgcaaattcagccgctgctttgagcccaaaatgggaatattggttttgtgtccgaggcttgttccaagtttgtcaatgaggtttatggagcctccagaacagatgccatcttcctgaatgttgacatgccagtgggtgtgactccttcatttttccttctcccttccctttggacagtgttacagtgaacacttagcatcctgtttttggttggtagttaagcaaactgacattacggaaagtgccttagacactacagtactaagacaatgttgaatatatcattcgcctctataacaatttaatgtattcagttttgactgtgcttcatatcatgtacctctctagtcaaagtggtattacagacattcagtgacaatgaatcagtgttaattctaaatccttgatcctctgcaatgtgcttgaaaacacaaaccttttgggttaaaagctttaacatctattaggaagaatttgtcctgtgggtttggaatcttggattttccccctttatgaactgtactggctgttgaccaccagacacctgaccgcaaatatcttttcttgtattcccatatttctagacaatgatttttgtaagacaataaatttattcattatagatatttgcgcctgctctgtttacttgaagaaaaaagcacccgtggagaataaagagacctcaataaacaagaataatcatgtgaacgtggaatctgttttctcaccttctgttctcgatttcccatctgtgatctgactggagggtgggtgctacacaccaacttcaaatgatggcgccaggccctttttgctgagggcgctgtctcccaggtcagacgacagaataattctcaggccagtcctggctccaactcttgttcctgccagtgcctcacaggatgcacacgcactaggaagggaaagaccacccaaaggcaggagctggcccacctgtcaagggagtgatttaggagggctctggtcaccagccaatgaagctcactgctgggttaggacattttcaggggtccagtacatttcaggctgcattttcaggcagacacgcattgaagatgcttttggaggattcagtgatgaggccaagggcagcctctctagtgcgggccaactaggatgagagaaatactagggcagcacagaatcaaacagagaatgccgatttcttgttccataatattctccggttagactggttctgggggtaaggggtctatgactaggcttcttggcagcagtggaaacgtgtgaaatgggccgaagtgccctcttcctcctgtgccactaccataggagaggaaaggtgagtcacaggtatggtgcttcagcagggctcccacccccacatccagtatcttatccaagagtgtacagaattcagaggcttgtttttctcaaaaagtaagaactctgggctgggcatggtgctcacgcctgtaatcccggcactttgggaggccaaagcaggtggatcatttgaggtcagaagttcgaatccagcctggccaacatggtgaaacaccgtctctactaa

SEQ ID NO: 435226 - DNA, 7278 bp, Homo sapiens
agcagtgctaaaggagcccggcggaggcagcggtgggtttgggactgaggcgctggatctgtggtcgcggctggggacgtgcgcccgcgccaccatcttcggctgaagaggcaattgcttttggatcgttccatttacaatggcgcagagaactggactcgaggatccagagaggtatctctttgtggacagggctgtcatctacaaccctgccactcaagctgattggacagctaaaaagctagtgtggattccatcagaacgccatggttttgaggcagctagtatcaaagaagaacggggagatgaagttatggtggagttggcagagaatggaaagaaagcaatggtcaacaaagatgatattcagaagatgaacccacctaagttttccaaggtggaggatatggcagaattgacatgcttgaatgaagcttccgttttacataatctgaaggatcgctactattcaggactaatctatacttattctggactcttctgtgtagttataaacccttacaagaatcttccaatttactctgagaatattattgaaatgtacagagggaagaagcgtcatgagatgcctccacacatctatgctatatctgaatctgcttacagatgcatgcttcaagatcgtgaggaccagtcaattctttgcacgggtgagtcaggtgctgggaagacagaaaatacaaagaaagttattcagtaccttgcccatgttgcttcttcacataaaggaagaaaggaccataatattcctggggaacttgaacggcagcttttgcaagcaaatccaattctggaatcatttggaaatgcgaagactgtgaaaaatgataactcatctcgttttggcaaatttattcggatcaactttgatgtaactggctatatcgttggggccaacattgaaacataccttctggaaaagtctcgtgctgttcgtcaagcaaaagatgaacgtacttttcatatcttttaccagttgttatctggagcaggagaacacctaaagtctgatttgcttcttgaaggatttaataactacaggtttctctccaatggctatattcctattccgggacagcaagacaaagataatttccaggagaccatggaagcaatgcacataatgggcttctcccatgaagagattctgtcaatgcttaaagtagtatcttcagtgctacagtttggaaatatttctttcaaaaaggagagaaatactgatcaagcttccatgccagaaaatacagttgcgcagaagctctgccatcttcttgggatgaatgtgatggagtttactcgggccatcctgactccccggatcaaggtcggccgagactatgtgcaaaaagcccagaccaaagaacaggcagattttgcagtagaagcattggcaaaagctacctatgagcggctctttcgctggctcgttcatcgcatcaataaagctctggataggaccaaacgtcagggagcatctttcattggaatcctggatattgctggatttgaaatttttgagctgaactcctttgaacaactttgcatcaactacaccaatgagaagctgcagcagctgttcaaccacaccatgtttatcctagaacaagaggaataccagcgcgaaggcatcgagtggaacttcatcgatttcgggctggatctgcagccatgcatcgacctaatagagagacctgcgaaccctcctggtgtactggcccttttggatgaagaatgctggttccctaaagccacagataaaacctttgttgaaaaactggttcaagagcaaggttcccactccaagtttcagaaacctcgacaattaaaagacaaagctgatttttgcattatacattatgcagggaaggtggactataaggcagatgagtggctgatgaagaatatggaccccctgaatgacaacgtggccacccttttgcaccagtcatcagacagatttgtggcagagctttggaaagatgtggaccgtatcgtgggtctggatcaagtcactggtatgactgagacagcttttggctccgcatataaaaccaagaagggcatgtttcgtaccgttgggcaactctacaaagaatctctcaccaagctgatggcaactctccgaaacaccaaccctaactttgttcgttgtatcattccaaatcacgagaagagggctggaaaattggatccacacctagtcctagatcagcttcgctgtaatggtgtcctggaagggatccgaatctgtcgccagggcttccctaaccgaatagttttccaggaattcagacagagatatgagatcctaactccaaatgctattcctaaaggttttatggatggtaaacaggcctgtgaacgaatgatccgggctttagaattggacccaaacttgtacagaattggacagagcaagatatttttcagagctggagttctggcacacttagaggaagaaagagatttaaaaatcaccgatatcattatcttcttccaggccgtttgcagaggttacctggccagaaaggcctttgccaagaagcagcagcaactaagtgccttaaaggtcttgcagcggaactgtgccgcgtacctgaaattacggcactggcagtggtggcgagtcttcacaaaggtgaagccgcttctacaagtgactcgccaggaggaagaacttcaggccaaagatgaagagctgttgaaggtgaaggagaagcagacgaaggtggaaggagagctggaggagatggagcggaagcaccagcagcttttagaagagaagaatatccttgcagaacaactacaagcagagactgagctctttgctgaagcagaagagatgagggcaagacttgctgctaaaaagcaggaattagaagagattctacatgacttggagtctagggttgaagaagaagaagaaagaaaccaaatcctccaaaatgaaaagaaaaaaatgcaagcacatattcaggacctggaagaacagctagacgaggaggaaggggctcggcaaaagctgcagctggaaaaggtgacagcagaggccaagatcaagaagatggaagaggagattctgcttctcgaggaccaaaattccaagttcatcaaagaaaagaaactcatggaagatcgcattgctgagtgttcctctcagctggctgaagaggaagaaaaggcgaaaaacttggccaaaatcaggaataagcaagaagtgatgatctcagatttagaagaacgcttaaagaaggaagaaaagactcgtcaggaactggaaaaggccaaaagaaaactcgacggggagacgaccgacctgcaggaccagatcgcagagctgcaggcgcagattgatgagctcaagctgcagctggccaagaaggaggaggagctgcagggcgcactggccagaggtgatgatgaaacactccataagaacaatgcccttaaagttgtgcgagagctacaagcccaaattgctgaacttcaggaagactttgaatccgagaaggcttcacggaacaaggccgaaaagcagaaaagggacttgagtgaggaactggaagctctgaaaacagagctggaggacacgctggacaccacggcagcccagcaggaactacgtacaaaacgtgaacaagaagtggcagagctgaagaaagctcttgaggaggaaactaagaaccatgaagctcaaatccaggacatgagacaaagacacgcaacagccctggaggagctctcagagcagctggaacaggccaagcggttcaaagcaaatctagagaagaacaagcagggcctggagacagataacaaggagctggcgtgtgaggtgaaggtcctgcagcaggtcaaggctgagtctgagcacaagaggaagaagctcgacgcgcaggtccaggagctccatgccaaggtctctgaaggcgacaggctcagggtggagctggcggagaaagcaagtaagctgcagaatgagctagataatgtctccacccttctggaagaagcagagaagaagggtattaaatttgctaaggatgcagctagtcttgagtctcaactacaggatacacaggagcttcttcaggaggagacacgccagaaactaaacctgagcagtcggatccggcagctggaagaggagaagaacagtcttcaggagcagcaggaggaggaggaggaggccaggaagaacctggagaagcaagtgctggccctgcagtcccagttggctgataccaagaagaaagtagatgacgacctgggaacaattgaaagtctggaagaagccaagaagaagcttctgaaggacgcggaggccctgagccagcgcctggaggagaaggcactggcgtatgacaaactggagaagaccaagaaccgcctgcagcaggagctggacgacctcacggtggacctggaccaccagcgccaggtcgcctccaacttggagaagaagcagaagaagtttgaccagctgttagcagaagagaagagcatctctgctcgctatgccgaagagcgggaccgggccgaagccgaggccagagagaaagaaaccaaagccctgtcactggcccgggccctcgaggaagccctggaggccaaggaggagtttgagaggcagaacaagcagctccgagcagacatggaagacctcatgagctccaaagatgatgtgggaaaaaacgttcacgaacttgaaaaatccaaacgggccctagagcagcaggtggaggaaatgaggacccagctggaggagctggaagacgaactccaggccacggaagatgccaagcttcgtctggaggtcaacatgcaggccatgaaggcgcagttcgagagagacctgcaaaccagggatgagcagaatgaagagaagaagcggctgctgatcaaacaggtccgcgctgctggatgagaagcggcgtctggaagctcggatcgcacagctggaggaggagctggaagaggagcagagcaacatggagctgctcaacgaccgcttccgcaagaccactctacaggtggacacactgaacgccgagctagcagccgagcgcagcgccgcccagaagagtgacaatgcacgccagcaactggagcggcagaacaaggagctgaaggccaagctgcaggaactcgagggtgctgtcaagtctaagttcaaggccaccatctcagccctggaggccaagattgggcagctggaggagcagcttgagcaggaagccaaggaacgagcagccgccaacaaattagtccgtcgcactgagaagaagctgaaagaaatcttcatgcaggttgaggatgagcgtcgacacgcggaccagtataaagagcagatggagaaggccaacgctcggatgaagcagcttaaacgccagctggaggaagcagaagaagaagcgacgcgtgccaacgcatctcggcgtaaactccagcgggaactggatgatgccaccgaggccaacgagggcctgagccgcgaggtcagcaccctgaagaaccggctgaggcggggtggccccatcagcttctcttccagccgatctggccggcgccagctgcaccttgaaggagcttccctggagctctccgacgatgacacagaaagtaagaccagtgatgtcaacgagacgcagccaccccagtcagagtaaagttgcaggaagccagaggaggcaatacagtgggacagttaggaatgcacccggggcctcctgcagatttcggaaattggcaagctacgggattccttcctgaaagatcaactgtgtcttaaggctctccagcctatgcatactgtatcctgcttcagacttaggtacaattgctcccctttttatatacagacacacacaggacacatatattaaacagattgtttcatcattgcatctattttccatatagtcatcaagagaccattttataaaacatggtaagaccctttttaaaacaaactccaggcccttggttgcgggtcgctgggttattggggcagcgccgtggtcgtcactcagtcgctctgcatgctctctgtcatacagacaggtaacctagttctgtgttcacgtggcccccgacgactcagccacatcaagtctcctagaccactgtggactctaaactgcacttgtctctctcatttccttcaaataatgatcaatgctatttcagtgagcaaactgtgaaaggggctttggaaagagtaggaggggtgggctggatcggaagcaacacccatttggggttaccatgtccatcccccaaggggggccctgcccctcgagtcgatggtgtcccgcatctactcatgtgaactggccttggcgagggctggtctgtgcatagaagggatagtggccacactgcagctgaggccccaggtggcagccatggatcatgtagacttccagatggtctcccgaaccgcctggctctgccggcgccctcctcacgtcaggagcaagcagccgtggacccctaagccgagctggtggaaggcccctccccgtcgccagccgggccctcatgctgaccttgcaaattcagccgctgctttgagcccaaaatgggaatattggttttgtgtccgaggcttgttccaagtttgtcaatgaggtttatggagcctccagaacagatgccatcttcctgaatgttgacatgccagtgggtgtgactccttcatttttccttctcccttccctttggacagtgttacagtgaacacttagcatcctgtttttggttggtagttaagcaaactgacattacggaaagtgccttagacactacagtactaagacaatgttgaatatatcattcgcctctataacaatttaatgtattcagttttgactgtgcttcatatcatgtacctctctagtcaaagtggtattacagacattcagtgacaatgaatcagtgttaattctaaatccttgatcctctgcaatgtgcttgaaaacacaaaccttttgggttaaaagctttaacatctattaggaagaatttgtcctgtgggtttggaatcttggattttccccctttatgaactgtactggctgttgaccaccagacacctgaccgcaaatatcttttcttgtattcccatatttctagacaatgatttttgtaagacaataaatttattcattatagatatttgcgcctgctctgtttacttgaagaaaaaagcacccgtggagaataaagagacctcaataaacaagaataatcatg

SEQ ID NO: 435227 - DNA, 4970 bp, Homo sapiens
atcattttcttcttaccggagaggtgttgcctttgatacaccccgatgaacgtatgatctgtgcaagccctgaaagtggattgttgaagaacttcaggccaaagatgaagagctgttgaaggtgaaggagaagcagacgaaggtggaaggagagctggaggagatggagcggaagcaccagcagcttttagaagagaagaatatccttgcagaacaactacaagcagagactgagctctttgctgaagcagaagagatgagggcaagacttgctgctaaaaagcaggaattagaagagattctacatgacttggagtctagggttgaagaagaagaagaaagaaaccaaatcctccaaaatgaaaagaaaaaaatgcaagcacatattcaggacctggaagaacagctagacgaggaggaaggggctcggcaaaagctgcagctggaaaaggtgacagcagaggccaagatcaagaagatggaagaggagattctgcttctcgaggaccaaaattccaagttcatcaaagaaaagaaactcatggaagatcgcattgctgagtgttcctctcagctggctgaagaggaagaaaaggcgaaaaacttggccaaaatcaggaataagcaagaagtgatgatctcagatttagaagaacgcttaaagaaggaagaaaagactcgtcaggaactggaaaaggccaaaagaaaactcgacggggagacgaccgacctgcaggaccagatcgcagagctgcaggcgcagattgatgagctcaagctgcagctggccaagaaggaggaggagctgcagggcgcactggccagaggtgatgatgaaacactccataagaacaatgcccttaaagttgtgcgagagctacaagcccaaattgctgaacttcaggaagactttgaatccgagaaggcttcacggaacaaggccgaaaagcagaaaagggacttgagtgaggaactggaagctctgaaaacagagctggaggacacgctggacaccacggcagcccagcaggaactacgtacaaaacgtgaacaagaagtggcagagctgaagaaagctcttgaggaggaaactaagaaccatgaagctcaaatccaggacatgagacaaagacacgcaacagccctggaggagctctcagagcagctggaacaggccaagcggttcaaagcaaatctagagaagaacaagcagggcctggagacagataacaaggagctggcgtgtgaggtgaaggtcctgcagcaggtcaaggctgagtctgagcacaagaggaagaagctcgacgcgcaggtccaggagctccatgccaaggtctctgaaggcgacaggctcagggtggagctggcggagaaagcaagtaagctgcagaatgagctagataatgtctccacccttctggaagaagcagagaagaagggtattaaatttgctaaggatgcagctagtcttgagtctcaactacaggatacacaggagcttcttcaggaggagacacgccagaaactaaacctgagcagtcggatccggcagctggaagaggagaagaacagtcttcaggagcagcaggaggaggaggaggaggccaggaagaacctggagaagcaagtgctggccctgcagtcccagttggctgataccaagaagaaagtagatgacgacctgggaacaattgaaagtctggaagaagccaagaagaagcttctgaaggacgcggaggccctgagccagcgcctggaggagaaggcactggcgtatgacaaactggagaagaccaagaaccgcctgcagcaggagctggacgacctcacggtggacctggaccaccagcgccaggtcgcctccaacttggagaagaagcagaagaagtttgaccagctgttagcagaagagaagagcatctctgctcgctatgccgaagagcgggaccgggccgaagccgaggccagagagaaagaaaccaaagccctgtcactggcccgggccctcgaggaagccctggaggccaaggaggagtttgagaggcagaacaagcagctccgagcagacatggaagacctcatgagctccaaagatgatgtgggaaaaaacgttcacgaacttgaaaaatccaaacgggccctagagcagcaggtggaggaaatgaggacccagctggaggagctggaagacgaactccaggccacggaagatgccaagcttcgtctggaggtcaacatgcaggccatgaaggcgcagttcgagagagacctgcaaaccagggatgagcagaatgaagagaagaagcggctgctgatcaaacaggtgcgggagctcgaggcggagctggaggatgagaggaaacagcgggcgcttgctgtagcttcaaagaaaaagatggagatagacctgaaggacctcgaagcccaaatcgaggctgcgaacaaagctcgggatgaggtgattaagcagctccgcaagctccaggctcagatgaaggattaccaacgtgaattagaagaagctcgtgcatccagagatgagatttttgctcaatccaaagagagtgaaaagaaattgaagagtctggaagcagaaatccttcaattgcaggaggaacttgcctcatctgagcgagcccgccgacacgccgagcaggagagagatgagctggcggacgagatcaccaacagcgcctctggcaagtccgcgctgctggatgagaagcggcgtctggaagctcggatcgcacagctggaggaggagctggaagaggagcagagcaacatggagctgctcaacgaccgcttccgcaagaccactctacaggtggacacactgaacgccgagctagcagccgagcgcagcgccgcccagaagagtgacaatgcacgccagcaactggagcggcagaacaaggagctgaaggccaagctgcaggaactcgagggtgctgtcaagtctaagttcaaggccaccatctcagccctggaggccaagattgggcagctggaggagcagcttgagcaggaagccaaggaacgagcagccgccaacaaattagtccgtcgcactgagaagaagctgaaagaaatcttcatgcaggttgaggatgagcgtcgacacgcggaccagtataaagagcagatggagaaggccaacgctcggatgaagcagcttaaacgccagctggaggaagcagaagaagaagcgacgcgtgccaacgcatctcggcgtaaactccagcgggaactggatgatgccaccgaggccaacgagggcctgagccgcgaggtcagcaccctgaagaaccggctgaggcggggtggccccatcagcttctcttccagccgatctggccggcgccagctgcaccttgaaggagcttccctggagctctccgacgatgacacagaaagtaagaccagtgatgtcaacgagacgcagccaccccagtcagagtaaagttgcaggaagccagaggaggcaatacagtgggacagttaggaatgcacccggggcctcctgcagatttcggaaattggcaagctacgggattccttcctgaaagatcaactgtgtcttaaggctctccagcctatgcatactgtatcctgcttcagacttaggtacaattgctcccctttttatatacagacacacacaggacacatatattaaacagattgtttcatcattgcatctattttccatatagtcatcaagagaccattttataaaacatggtaagaccctttttaaaacaaactccaggcccttggttgcgggtcgctgggttattggggcagcgccgtggtcgtcactcagtcgctctgcatgctctctgtcatacagacaggtaacctagttctgtgttcacgtggcccccgacgactcagccacatcaagtctcctagaccactgtggactctaaactgcacttgtctctctcatttccttcaaataatgatcaatgctatttcagtgagcaaactgtgaaaggggctttggaaagagtaggaggggtgggctggatcggaagcaacacccatttggggttaccatgtccatcccccaaggggggccctgcccctcgagtcgatggtgtcccgcatctactcatgtgaactggccttggcgagggctggtctgtgcatagaagggatagtggccacactgcagctgaggccccaggtggcagccatggatcatgtagacttccagatggtctcccgaaccgcctggctctgccggcgccctcctcacgtcaggagcaagcagccgtggacccctaagccgagctggtggaaggcccctccccgtcgccagccgggccctcatgctgaccttgcaaattcagccgctgctttgagcccaaaatgggaatattggttttgtgtccgaggcttgttccaagtttgtcaatgaggtttatggagcctccagaacagatgccatcttcctgaatgttgacatgccagtgggtgtgactccttcatttttccttctcccttccctttggacagtgttacagtgaacacttagcatcctgtttttggttggtagttaagcaaactgacattacggaaagtgccttagacactacagtactaagacaatgttgaatatatcattcgcctctataacaatttaatgtattcagttttgactgtgcttcatatcatgtacctctctagtcaaagtggtattacagacattcagtgacaatgaatcagtgttaattctaaatccttgatcctctgcaatgtgcttgaaaacacaaaccttttgggttaaaagctttaacatctattaggaagaatttgtcctgtgggtttggaatcttggattttccccctttatgaactgtactggctgttgaccaccagacacctgaccgcaaatatcttttcttgtattcccatatttctagacaatgatttttgtaagacaataaatttattcattatag

SEQ ID NO: 435228 - DNA, 4407 bp, Homo sapiens
  misc_feature (27)..(27): n is a, c, g, or t
  misc_feature (39)..(39): n is a, c, g, or t
  misc_feature (46)..(46): n is a, c, g, or t
  misc_feature (53)..(53): n is a, c, g, or t
  misc_feature (55)..(55): n is a, c, g, or t
  misc_feature (74)..(74): n is a, c, g, or t
  misc_feature (81)..(81): n is a, c, g, or t
  misc_feature (101)..(101): n is a, c, g, or t
  misc_feature (105)..(105): n is a, c, g, or t
  misc_feature (117)..(117): n is a, c, g, or t
agaggcggaagatgtctccggcaaaanaaaacaaaacanaaacctngctaagnangcggaggtcagaaagatangaagaangacagagacagacatacatngatngagtgatagatngaaagacagggagaaagagaaacagaaaactcgacggggagacgaccgacctgcaggaccagatcgcagagctgcaggcgcagattgatgagctcaagctgcagctggccaagaaggaggaggagctgcagggcgcactggccagaggtgatgatgaaacactccataagaacaatgcccttaaagttgtgcgagagctacaagcccaaattgctgaacttcaggaagactttgaatccgagaaggcttcacggaacaaggccgaaaagcagaaaagggacttgagtgaggaactggaagctctgaaaacagagctggaggacacgctggacaccacggcagcccagcaggaactacgtacaaaacgtgaacaagaagtggcagagctgaagaaagctcttgaggaggaaactaagaaccatgaagctcaaatccaggacatgagacaaagacacgcaacagccctggaggagctctcagagcagctggaacaggccaagcggttcaaagcaaatctagagaagaacaagcagggcctggagacagataacaaggagctggcgtgtgaggtgaaggtcctgcagcaggtcaaggctgagtctgagcacaagaggaagaagctcgacgcgcaggtccaggagctccatgccaaggtctctgaaggcgacaggctcagggtggagctggcggagaaagcaagtaagctgcagaatgagctagataatgtctccacccttctggaagaagcagagaagaagggtattaaatttgctaaggatgcagctagtcttgagtctcaactacaggatacacaggagcttcttcaggaggagacacgccagaaactaaacctgagcagtcggatccggcagctggaagaggagaagaacagtcttcaggagcagcaggaggaggaggaggaggccaggaagaacctggagaagcaagtgctggccctgcagtcccagttggctgataccaagaagaaagtagatgacgacctgggaacaattgaaagtctggaagaagccaagaagaagcttctgaaggacgcggaggccctgagccagcgcctggaggagaaggcactggcgtatgacaaactggagaagaccaagaaccgcctgcagcaggagctggacgacctcacggtggacctggaccaccagcgccaggtcgcctccaacttggagaagaagcagaagaagtttgaccagctgttagcagaagagaagagcatctctgctcgctatgccgaagagcgggaccgggccgaagccgaggccagagagaaagaaaccaaagccctgtcactggcccgggccctcgaggaagccctggaggccaaggaggagtttgagaggcagaacaagcagctccgagcagacatggaagacctcatgagctccaaagatgatgtgggaaaaaacgttcacgaacttgaaaaatccaaacgggccctagagcagcaggtggaggaaatgaggacccagctggaggagctggaagacgaactccaggccacggaagatgccaagcttcgtctggaggtcaacatgcaggccatgaaggcgcagttcgagagagacctgcaaaccagggatgagcagaatgaagagaagaagcggctgctgatcaaacaggtgcgggagctcgaggcggagctggaggatgagaggaaacagcgggcgcttgctgtagcttcaaagaaaaagatggagatagacctgaaggacctcgaagcccaaatcgaggctgcgaacaaagctcgggatgaggtgattaagcagctccgcaagctccaggctcagatgaaggattaccaacgtgaattagaagaagctcgtgcatccagagatgagatttttgctcaatccaaagagagtgaaaagaaattgaagagtctggaagcagaaatccttcaattgcaggaggaacttgcctcatctgagcgagcccgccgacacgccgagcaggagagagatgagctggcggacgagatcaccaacagcgcctctggcaagtccgcgctgctggatgagaagcggcgtctggaagctcggatcgcacagctggaggaggagctggaagaggagcagagcaacatggagctgctcaacgaccgcttccgcaagaccactctacaggtggacacactgaacgccgagctagcagccgagcgcagcgccgcccagaagagtgacaatgcacgccagcaactggagcggcagaacaaggagctgaaggccaagctgcaggaactcgagggtgctgtcaagtctaagttcaaggccaccatctcagccctggaggccaagattgggcagctggaggagcagcttgagcaggaagccaaggaacgagcagccgccaacaaattagtccgtcgcactgagaagaagctgaaagaaatcttcatgcaggttgaggatgagcgtcgacacgcggaccagtataaagagcagatggagaaggccaacgctcggatgaagcagcttaaacgccagctggaggaagcagaagaagaagcgacgcgtgccaacgcatctcggcgtaaactccagcgggaactggatgatgccaccgaggccaacgagggcctgagccgcgaggtcagcaccctgaagaaccggctgaggcggggtggccccatcagcttctcttccagccgatctggccggcgccagctgcaccttgaaggagcttccctggagctctccgacgatgacacagaaagtaagaccagtgatgtcaacgagacgcagccaccccagtcagagtaaagttgcaggaagccagaggaggcaatacagtgggacagttaggaatgcacccggggcctcctgcagatttcggaaattggcaagctacgggattccttcctgaaagatcaactgtgtcttaaggctctccagcctatgcatactgtatcctgcttcagacttaggtacaattgctcccctttttatatacagacacacacaggacacatatattaaacagattgtttcatcattgcatctattttccatatagtcatcaagagaccattttataaaacatggtaagaccctttttaaaacaaactccaggcccttggttgcgggtcgctgggttattggggcagcgccgtggtcgtcactcagtcgctctgcatgctctctgtcatacagacaggtaacctagttctgtgttcacgtggcccccgacgactcagccacatcaagtctcctagaccactgtggactctaaactgcacttgtctctctcatttccttcaaataatgatcaatgctatttcagtgagcaaactgtgaaaggggctttggaaagagtaggaggggtgggctggatcggaagcaacacccatttggggttaccatgtccatcccccaaggggggccctgcccctcgagtcgatggtgtcccgcatctactcatgtgaactggccttggcgagggctggtctgtgcatagaagggatagtggccacactgcagctgaggccccaggtggcagccatggatcatgtagacttccagatggtctcccgaaccgcctggctctgccggcgccctcctcacgtcaggagcaagcagccgtggacccctaagccgagctggtggaaggcccctccccgtcgccagccgggccctcatgctgaccttgcaaattcagccgctgctttgagcccaaaatgggaatattggttttgtgtccgaggcttgttccaagtttgtcaatgaggtttatggagcctccagaacagatgccatcttcctgaatgttgacatgccagtgggtgtgactccttcatttttccttctcccttccctttggacagtgttacagtgaacacttagcatcctgtttttggttggtagttaagcaaactgacattacggaaagtgccttagacactacagtactaagacaatgttgaatatatcattcgcctctataacaatttaatgtattcagttttgactgtgcttcatatcatgtacctctctagtcaaagtggtattacagacattcagtgacaatgaatcagtgttaattctaaatccttgatcctctgcaatgtgcttgaaaacacaaaccttttgggttaaaagctttaacatctattaggaagaatttgtcctgtgggtttggaatcttggattttccccctttatgaactgtactggctgttgaccaccagacacctgaccgcaaatatcttttcttgtattcccatatttctagacaatgatttttgtaagacaataaatttattcattatag

SEQ ID NO: 435229 - DNA, 3984 bp, Homo sapiens
tcggcctggcggtccctcggctacttgtctctcggctctaccttgtccctcggctctaccttgtctctcggctctaccttgtctctcggctctaccttgatctccaggccaagcggttcaaagcaaatctagagaagaacaagcagggcctggagacagataacaaggagctggcgtgtgaggtgaaggtcctgcagcaggtcaaggctgagtctgagcacaagaggaagaagctcgacgcgcaggtccaggagctccatgccaaggtctctgaaggcgacaggctcagggtggagctggcggagaaagcaagtaagctgcagaatgagctagataatgtctccacccttctggaagaagcagagaagaagggtattaaatttgctaaggatgcagctagtcttgagtctcaactacaggatacacaggagcttcttcaggaggagacacgccagaaactaaacctgagcagtcggatccggcagctggaagaggagaagaacagtcttcaggagcagcaggaggaggaggaggaggccaggaagaacctggagaagcaagtgctggccctgcagtcccagttggctgataccaagaagaaagtagatgacgacctgggaacaattgaaagtctggaagaagccaagaagaagcttctgaaggacgcggaggccctgagccagcgcctggaggagaaggcactggcgtatgacaaactggagaagaccaagaaccgcctgcagcaggagctggacgacctcacggtggacctggaccaccagcgccaggtcgcctccaacttggagaagaagcagaagaagtttgaccagctgttagcagaagagaagagcatctctgctcgctatgccgaagagcgggaccgggccgaagccgaggccagagagaaagaaaccaaagccctgtcactggcccgggccctcgaggaagccctggaggccaaggaggagtttgagaggcagaacaagcagctccgagcagacatggaagacctcatgagctccaaagatgatgtgggaaaaaacgttcacgaacttgaaaaatccaaacgggccctagagcagcaggtggaggaaatgaggacccagctggaggagctggaagacgaactccaggccacggaagatgccaagcttcgtctggaggtcaacatgcaggccatgaaggcgcagttcgagagagacctgcaaaccagggatgagcagaatgaagagaagaagcggctgctgatcaaacaggtgcgggagctcgaggcggagctggaggatgagaggaaacagcgggcgcttgctgtagcttcaaagaaaaagatggagatagacctgaaggacctcgaagcccaaatcgaggctgcgaacaaagctcgggatgaggtgattaagcagctccgcaagctccaggctcagatgaaggattaccaacgtgaattagaagaagctcgtgcatccagagatgagatttttgctcaatccaaagagagtgaaaagaaattgaagagtctggaagcagaaatccttcaattgcaggaggaacttgcctcatctgagcgagcccgccgacacgccgagcaggagagagatgagctggcggacgagatcaccaacagcgcctctggcaagtccgcgctgctggatgagaagcggcgtctggaagctcggatcgcacagctggaggaggagctggaagaggagcagagcaacatggagctgctcaacgaccgcttccgcaagaccactctacaggtggacacactgaacgccgagctagcagccgagcgcagcgccgcccagaagagtgacaatgcacgccagcaactggagcggcagaacaaggagctgaaggccaagctgcaggaactcgagggtgctgtcaagtctaagttcaaggccaccatctcagccctggaggccaagattgggcagctggaggagcagcttgagcaggaagccaaggaacgagcagccgccaacaaattagtccgtcgcactgagaagaagctgaaagaaatcttcatgcaggttgaggatgagcgtcgacacgcggaccagtataaagagcagatggagaaggccaacgctcggatgaagcagcttaaacgccagctggaggaagcagaagaagaagcgacgcgtgccaacgcatctcggcgtaaactccagcgggaactggatgatgccaccgaggccaacgagggcctgagccgcgaggtcagcaccctgaagaaccggctgaggcggggtggccccatcagcttctcttccagccgatctggccggcgccagctgcaccttgaaggagcttccctggagctctccgacgatgacacagaaagtaagaccagtgatgtcaacgagacgcagccaccccagtcagagtaaagttgcaggaagccagaggaggcaatacagtgggacagttaggaatgcacccggggcctcctgcagatttcggaaattggcaagctacgggattccttcctgaaagatcaactgtgtcttaaggctctccagcctatgcatactgtatcctgcttcagacttaggtacaattgctcccctttttatatacagacacacacaggacacatatattaaacagattgtttcatcattgcatctattttccatatagtcatcaagagaccattttataaaacatggtaagaccctttttaaaacaaactccaggcccttggttgcgggtcgctgggttattggggcagcgccgtggtcgtcactcagtcgctctgcatgctctctgtcatacagacaggtaacctagttctgtgttcacgtggcccccgacgactcagccacatcaagtctcctagaccactgtggactctaaactgcacttgtctctctcatttccttcaaataatgatcaatgctatttcagtgagcaaactgtgaaaggggctttggaaagagtaggaggggtgggctggatcggaagcaacacccatttggggttaccatgtccatcccccaaggggggccctgcccctcgagtcgatggtgtcccgcatctactcatgtgaactggccttggcgagggctggtctgtgcatagaagggatagtggccacactgcagctgaggccccaggtggcagccatggatcatgtagacttccagatggtctcccgaaccgcctggctctgccggcgccctcctcacgtcaggagcaagcagccgtggacccctaagccgagctggtggaaggcccctccccgtcgccagccgggccctcatgctgaccttgcaaattcagccgctgctttgagcccaaaatgggaatattggttttgtgtccgaggcttgttccaagtttgtcaatgaggtttatggagcctccagaacagatgccatcttcctgaatgttgacatgccagtgggtgtgactccttcatttttccttctcccttccctttggacagtgttacagtgaacacttagcatcctgtttttggttggtagttaagcaaactgacattacggaaagtgccttagacactacagtactaagacaatgttgaatatatcattcgcctctataacaatttaatgtattcagttttgactgtgcttcatatcatgtacctctctagtcaaagtggtattacagacattcagtgacaatgaatcagtgttaattctaaatccttgatcctctgcaatgtgcttgaaaacacaaaccttttgggttaaaagctttaacatctattaggaagaatttgtcctgtgggtttggaatcttggattttccccctttatgaactgtactggctgttgaccaccagacacctgaccgcaaatatcttttcttgtattcccatatttctagacaatgatttttgtaagacaataaatttattcattatagatatttgcgcctgctctgtttacttgaagaaaaaagcacccgtggagaataaagagacctcaataaacaagaataatcatg

SEQ ID NO: 435230 - DNA, 3584 bp, Homo sapiens
gttgccctttacgacaaaaaaaacacaggagcttcttcaggaggagacacgccagaaactaaacctgagcagtcggatccggcagctggaagaggagaagaacagtcttcaggagcagcaggaggaggaggaggaggccaggaagaacctggagaagcaagtgctggccctgcagtcccagttggctgataccaagaagaaagtagatgacgacctgggaacaattgaaagtctggaagaagccaagaagaagcttctgaaggacgcggaggccctgagccagcgcctggaggagaaggcactggcgtatgacaaactggagaagaccaagaaccgcctgcagcaggagctggacgacctcacggtggacctggaccaccagcgccaggtcgcctccaacttggagaagaagcagaagaagtttgaccagctgttagcagaagagaagagcatctctgctcgctatgccgaagagcgggaccgggccgaagccgaggccagagagaaagaaaccaaagccctgtcactggcccgggccctcgaggaagccctggaggccaaggaggagtttgagaggcagaacaagcagctccgagcagacatggaagacctcatgagctccaaagatgatgtgggaaaaaacgttcacgaacttgaaaaatccaaacgggccctagagcagcaggtggaggaaatgaggacccagctggaggagctggaagacgaactccaggccacggaagatgccaagcttcgtctggaggtcaacatgcaggccatgaaggcgcagttcgagagagacctgcaaaccagggatgagcagaatgaagagaagaagcggctgctgatcaaacaggtgcgggagctcgaggcggagctggaggatgagaggaaacagcgggcgcttgctgtagcttcaaagaaaaagatggagatagacctgaaggacctcgaagcccaaatcgaggctgcgaacaaagctcgggatgaggtgattaagcagctccgcaagctccaggctcagatgaaggattaccaacgtgaattagaagaagctcgtgcatccagagatgagatttttgctcaatccaaagagagtgaaaagaaattgaagagtctggaagcagaaatccttcaattgcaggaggaacttgcctcatctgagcgagcccgccgacacgccgagcaggagagagatgagctggcggacgagatcaccaacagcgcctctggcaagtccgcgctgctggatgagaagcggcgtctggaagctcggatcgcacagctggaggaggagctggaagaggagcagagcaacatggagctgctcaacgaccgcttccgcaagaccactctacaggtggacacactgaacgccgagctagcagccgagcgcagcgccgcccagaagagtgacaatgcacgccagcaactggagcggcagaacaaggagctgaaggccaagctgcaggaactcgagggtgctgtcaagtctaagttcaaggccaccatctcagccctggaggccaagattgggcagctggaggagcagcttgagcaggaagccaaggaacgagcagccgccaacaaattagtccgtcgcactgagaagaagctgaaagaaatcttcatgcaggttgaggatgagcgtcgacacgcggaccagtataaagagcagatggagaaggccaacgctcggatgaagcagcttaaacgccagctggaggaagcagaagaagaagcgacgcgtgccaacgcatctcggcgtaaactccagcgggaactggatgatgccaccgaggccaacgagggcctgagccgcgaggtcagcaccctgaagaaccggctgaggcggggtggccccatcagcttctcttccagccgatctggccggcgccagctgcaccttgaaggagcttccctggagctctccgacgatgacacagaaagtaagaccagtgatgtcaacgagacgcagccaccccagtcagagtaaagttgcaggaagccagaggaggcaatacagtgggacagttaggaatgcacccggggcctcctgcagatttcggaaattggcaagctacgggattccttcctgaaagatcaactgtgtcttaaggctctccagcctatgcatactgtatcctgcttcagacttaggtacaattgctcccctttttatatacagacacacacaggacacatatattaaacagattgtttcatcattgcatctattttccatatagtcatcaagagaccattttataaaacatggtaagaccctttttaaaacaaactccaggcccttggttgcgggtcgctgggttattggggcagcgccgtggtcgtcactcagtcgctctgcatgctctctgtcatacagacaggtaacctagttctgtgttcacgtggcccccgacgactcagccacatcaagtctcctagaccactgtggactctaaactgcacttgtctctctcatttccttcaaataatgatcaatgctatttcagtgagcaaactgtgaaaggggctttggaaagagtaggaggggtgggctggatcggaagcaacacccatttggggttaccatgtccatcccccaaggggggccctgcccctcgagtcgatggtgtcccgcatctactcatgtgaactggccttggcgagggctggtctgtgcatagaagggatagtggccacactgcagctgaggccccaggtggcagccatggatcatgtagacttccagatggtctcccgaaccgcctggctctgccggcgccctcctcacgtcaggagcaagcagccgtggacccctaagccgagctggtggaaggcccctccccgtcgccagccgggccctcatgctgaccttgcaaattcagccgctgctttgagcccaaaatgggaatattggttttgtgtccgaggcttgttccaagtttgtcaatgaggtttatggagcctccagaacagatgccatcttcctgaatgttgacatgccagtgggtgtgactccttcatttttccttctcccttccctttggacagtgttacagtgaacacttagcatcctgtttttggttggtagttaagcaaactgacattacggaaagtgccttagacactacagtactaagacaatgttgaatatatcattcgcctctataacaatttaatgtattcagttttgactgtgcttcatatcatgtacctctctagtcaaagtggtattacagacattcagtgacaatgaatcagtgttaattctaaatccttgatcctctgcaatgtgcttgaaaacacaaaccttttgggttaaaagctttaacatctattaggaagaatttgtcctgtgggtttggaatcttggattttccccctttatgaactgtactggctgttgaccaccagacacctgaccgcaaatatcttttcttgtattcccatatttctagacaatgatttttgtaagacaataaatttattcattatagatatttgcgcctgctctgtttacttgaagaaaaaagcacccgtggagaataaagagacctcaataaacaagaataatcatg

SEQ ID NO: 435231 - DNA, 7524 bp, Homo sapiens
agcagtgctaaaggagcccggcggaggcagcggtgggtttgggactgaggcgctggatctgtggtcgcggctggggacgtgcgcccgcgccaccatcttcggctgaagaggcaattgcttttggatcgttccatttacaatggcgcagagaactggactcgaggatccagagaggtatctctttgtggacagggctgtcatctacaaccctgccactcaagctgattggacagctaaaaagctagtgtggattccatcagaacgccatggttttgaggcagctagtatcaaagaagaacggggagatgaagttatggtggagttggcagagaatggaaagaaagcaatggtcaacaaagatgatattcagaagatgaacccacctaagttttccaaggtggaggatatggcagaattgacatgcttgaatgaagcttccgttttacataatctgaaggatcgctactattcaggactaatctatacttattctggactcttctgtgtagttataaacccttacaagaatcttccaatttactctgagaatattattgaaatgtacagagggaagaagcgtcatgagatgcctccacacatctatgctatatctgaatctgcttacagatgcatgcttcaagatcgtgaggaccagtcaattctttgcacgggtgagtcaggtgctgggaagacagaaaatacaaagaaagttattcagtaccttgcccatgttgcttcttcacataaaggaagaaaggaccataatattcctggggaacttgaacggcagcttttgcaagcaaatccaattctggaatcatttggaaatgcgaagactgtgaaaaatgataactcatctcgttttggcaaatttattcggatcaactttgatgtaactggctatatcgttggggccaacattgaaacataccttctggaaaagtctcgtgctgttcgtcaagcaaaagatgaacgtacttttcatatcttttaccagttgttatctggagcaggagaacacctaaagtctgatttgcttcttgaaggatttaataactacaggtttctctccaatggctatattcctattccgggacagcaagacaaagataatttccaggagaccatggaagcaatgcacataatgggcttctcccatgaagagattctgtcaatgcttaaagtagtatcttcagtgctacagtttggaaatatttctttcaaaaaggagagaaatactgatcaagcttccatgccagaaaatacagttgcgcagaagctctgccatcttcttgggatgaatgtgatggagtttactcgggccatcctgactccccggatcaaggtcggccgagactatgtgcaaaaagcccagaccaaagaacaggcagattttgcagtagaagcattggcaaaagctacctatgagcggctctttcgctggctcgttcatcgcatcaataaagctctggataggaccaaacgtcagggagcatctttcattggaatcctggatattgctggatttgaaatttttgagctgaactcctttgaacaactttgcatcaactacaccaatgagaagctgcagcagctgttcaaccacaccatgtttatcctagaacaagaggaataccagcgcgaaggcatcgagtggaacttcatcgatttcgggctggatctgcagccatgcatcgacctaatagagagacctgcgaaccctcctggtgtactggcccttttggatgaagaatgctggttccctaaagccacagataaaacctttgttgaaaaactggttcaagagcaaggttcccactccaagtttcagaaacctcgacaattaaaagacaaagctgatttttgcattatacattatgcagggaaggtggactataaggcagatgagtggctgatgaagaatatggaccccctgaatgacaacgtggccacccttttgcaccagtcatcagacagatttgtggcagagctttggaaagatgtggaccgtatcgtgggtctggatcaagtcactggtatgactgagacagcttttggctccgcatataaaaccaagaagggcatgtttcgtaccgttgggcaactctacaaagaatctctcaccaagctgatggcaactctccgaaacaccaaccctaactttgttcgttgtatcattccaaatcacgagaagagggctggaaaattggatccacacctagtcctagatcagcttcgctgtaatggtgtcctggaagggatccgaatctgtcgccagggcttccctaaccgaatagttttccaggaattcagacagagatatgagatcctaactccaaatgctattcctaaaggttttatggatggtaaacaggcctgtgaacgaatgatccgggctttagaattggacccaaacttgtacagaattggacagagcaagatatttttcagagctggagttctggcacacttagaggaagaaagagatttaaaaatcaccgatatcattatcttcttccaggccgtttgcagaggttacctggccagaaaggcctttgccaagaagcagcagcaactaagtgccttaaaggtcttgcagcggaactgtgccgcgtacctgaaattacggcactggcagtggtggcgagtcttcacaaaggtgaagccgcttctacaagtgactcgccaggaggaagaacttcaggccaaagatgaagagctgttgaaggtgaaggagaagcagacgaaggtggaaggagagctggaggagatggagcggaagcaccagcagcttttagaagagaagaatatccttgcagaacaactacaagcagagactgagctctttgctgaagcagaagagatgagggcaagacttgctgctaaaaagcaggaattagaagagattctacatgacttggagtctagggttgaagaagaagaagaaagaaaccaaatcctccaaaatgaaaagaaaaaaatgcaagcacatattcaggacctggaagaacagctagacgaggaggaaggggctcggcaaaagctgcagctggaaaaggtgacagcagaggccaagatcaagaagatggaagaggagattctgcttctcgaggaccaaaattccaagttcatcaaagaaaagaaactcatggaagatcgcattgctgagtgttcctctcagctggctgaagaggaagaaaaggcgaaaaacttggccaaaatcaggaataagcaagaagtgatgatctcagatttagaagaacgcttaaagaaggaagaaaagactcgtcaggaactggaaaaggccaaaagaaaactcgacggggagacgaccgacctgcaggaccagatcgcagagctgcaggcgcagattgatgagctcaagctgcagctggccaagaaggaggaggagctgcagggcgcactggccagaggtgatgatgaaacactccataagaacaatgcccttaaagttgtgcgagagctacaagcccaaattgctgaacttcaggaagactttgaatccgagaaggcttcacggaacaaggccgaaaagcagaaaagggacttgagtgaggaactggaagctctgaaaacagagctggaggacacgctggacaccacggcagcccagcaggaactacgtacaaaacgtgaacaagaagtggcagagctgaagaaagctcttgaggaggaaactaagaaccatgaagctcaaatccaggacatgagacaaagacacgcaacagccctggaggagctctcagagcagctggaacaggccaagcggttcaaagcaaatctagagaagaacaagcagggcctggagacagataacaaggagctggcgtgtgaggtgaaggtcctgcagcaggtcaaggctgagtctgagcacaagaggaagaagctcgacgcgcaggtccaggagctccatgccaaggtctctgaaggcgacaggctcagggtggagctggcggagaaagcaagtaagctgcagaatgagctagataatgtctccacccttctggaagaagcagagaagaagggtattaaatttgctaaggatgcagctagtcttgagtctcaactacaggatacacaggagcttcttcaggaggagacacgccagaaactaaacctgagcagtcggatccggcagctggaagaggagaagaacagtcttcaggagcagcaggaggaggaggaggaggccaggaagaacctggagaagcaagtgctggccctgcagtcccagttggctgataccaagaagaaagtagatgacgacctgggaacaattgaaagtctggaagaagccaagaagaagcttctgaaggacgcggaggccctgagccagcgcctggaggagaaggcactggcgtatgacaaactggagaagaccaagaaccgcctgcagcaggagctggacgacctcacggtggacctggaccaccagcgccaggtcgcctccaacttggagaagaagcagaagaagtttgaccagctgttagcagaagagaagagcatctctgctcgctatgccgaagagcgggaccgggccgaagccgaggccagagagaaagaaaccaaagccctgtcactggcccgggccctcgaggaagccctggaggccaaggaggagtttgagaggcagaacaagcagctccgagcagacatggaagacctcatgagctccaaagatgatgtgggaaaaaacgttcacgaacttgaaaaatccaaacgggccctagagcagcaggtggaggaaatgaggacccagctggaggagctggaagacgaactccaggccacggaagatgccaagcttcgtctggaggtcaacatgcaggccatgaaggcgcagttcgagagagacctgcaaaccagggatgagcagaatgaagagaagaagcggctgctgatcaaacaggtgcgggagctcgaggcggagctggaggatgagaggaaacagcgggcgcttgctgtagcttcaaagaaaaagatggagatagacctgaaggacctcgaagcccaaatcgaggctgcgaacaaagctcgggatgaggtgattaagcagctccgcaagctccaggctcagatgaaggattaccaacgtgaattagaagaagctcgtgcatccagagatgagatttttgctcaatccaaagagagtgaaaagaaattgaagagtctggaagcagaaatccttcaattgcaggaggaacttgcctcatctgagcgagcccgccgacacgccgagcaggagagagatgagctggcggacgagatcaccaacagcgcctctggcaagtccgcgctgctggatgagaagcggcgtctggaagctcggatcgcacagctggaggaggagctggaagaggagcagagcaacatggagctgctcaacgaccgcttccgcaagaccactctacaggtggacacactgaacgccgagctagcagccgagcgcagcgccgcccagaagagtgacaatgcacgccagcaactggagcggcagaacaaggagctgaaggccaagctgcaggaactcgagggtgctgtcaagtctaagttcaaggccaccatctcagccctggaggccaagattgggcagctggaggagcagcttgagcaggaagccaaggaacgagcagccgccaacaaattagtccgtcgcactgagaagaagctgaaagaaatcttcatgcaggttgaggatgagcgtcgacacgcggaccagtataaagagcagatggagaaggccaacgctcggatgaagcagcttaaacgccagctggaggaagcagaagaagaagcgacgcgtgccaacgcatctcggcgtaaactccagcgggaactggatgatgccaccgaggccaacgagggcctgagccgcgaggtcagcaccctgaagaaccggctgaggcggggtggccccatcagcttctcttccagccgatctggccggcgccagctgcaccttgaaggagcttccctggagctctccgacgatgacacagaaagtaagaccagtgatgtcaacgagacgcagccaccccagtcagagtaaagttgcaggaagccagaggaggcaatacagtgggacagttaggaatgcacccggggcctcctgcagatttcggaaattggcaagctacgggattccttcctgaaagatcaactgtgtcttaaggctctccagcctatgcatactgtatcctgcttcagacttaggtacaattgctcccctttttatatacagacacacacaggacacatatattaaacagattgtttcatcattgcatctattttccatatagtcatcaagagaccattttataaaacatggtaagaccctttttaaaacaaactccaggcccttggttgcgggtcgctgggttattggggcagcgccgtggtcgtcactcagtcgctctgcatgctctctgtcatacagacaggtaacctagttctgtgttcacgtggcccccgacgactcagccacatcaagtctcctagaccactgtggactctaaactgcacttgtctctctcatttccttcaaataatgatcaatgctatttcagtgagcaaactgtgaaaggggctttggaaagagtaggaggggtgggctggatcggaagcaacacccatttggggttaccatgtccatcccccaaggggggccctgcccctcgagtcgatggtgtcccgcatctactcatgtgaactggccttggcgagggctggtctgtgcatagaagggatagtggccacactgcagctgaggccccaggtggcagccatggatcatgtagacttccagatggtctcccgaaccgcctggctctgccggcgccctcctcacgtcaggagcaagcagccgtggacccctaagccgagctggtggaaggcccctccccgtcgccagccgggccctcatgtgtgtccgaggcttgttccaagtttgtcaatgaggtttatggagcctccagaacagatgccatcttcctgaatgttgacatgccagtgggtgtgactccttcatttttccttctcccttccctttggacagtgttacagtgaacacttagcatcctgtttttggttggtagttaagcaaactgacattacggaaagtgccttagacactacagtactaagacaatgttgaatatatcattcgcctctataacaatttaatgtattcagttttgactgtgcttcatatcatgtacctctctagtcaaagtggtattacagacattcagtgacaatgaatcagtgttaattctaaatccttgatcctctgcaatgtgcttgaaaacacaaaccttttgggttaaaagctttaacatctattaggaagaatttgtcctgtgggtttggaatcttggattttccccctttatgaactgtactggctgttgaccaccagacacctgaccgcaaatatcttttcttgtattcccatatttctagacaatgatttttgtaagacaataaatttattcattatag

SEQ ID NO: 435232 - DNA, 8387 bp, Homo sapiens
agcagtgctaaaggagcccggcggaggcagcggtgggtttgggactgaggcgctggatctgtggtcgcggctggggacgtgcgcccgcgccaccatcttcggctgaagaggcaattgcttttggatcgttccatttacaatggcgcagagaactggactcgaggatccagagaggtatctctttgtggacagggctgtcatctacaaccctgccactcaagctgattggacagctaaaaagctagtgtggattccatcagaacgccatggttttgaggcagctagtatcaaagaagaacggggagatgaagttatggtggagttggcagagaatggaaagaaagcaatggtcaacaaagatgatattcagaagatgaacccacctaagttttccaaggtggaggatatggcagaattgacatgcttgaatgaagcttccgttttacataatctgaaggatcgctactattcaggactaatctatacttattctggactcttctgtgtagttataaacccttacaagaatcttccaatttactctgagaatattattgaaatgtacagagggaagaagcgtcatgagatgcctccacacatctatgctatatctgaatctgcttacagatgcatgcttcaagatcgtgaggaccagtcaattctttgcacgggtgagtcaggtgctgggaagacagaaaatacaaagaaagttattcagtaccttgcccatgttgcttcttcacataaaggaagaaaggaccataatattcctggggaacttgaacggcagcttttgcaagcaaatccaattctggaatcatttggaaatgcgaagactgtgaaaaatgataactcatctcgttttggcaaatttattcggatcaactttgatgtaactggctatatcgttggggccaacattgaaacataccttctggaaaagtctcgtgctgttcgtcaagcaaaagatgaacgtacttttcatatcttttaccagttgttatctggagcaggagaacacctaaagtctgatttgcttcttgaaggatttaataactacaggtttctctccaatggctatattcctattccgggacagcaagacaaagataatttccaggagaccatggaagcaatgcacataatgggcttctcccatgaagagattctgtcaatgcttaaagtagtatcttcagtgctacagtttggaaatatttctttcaaaaaggagagaaatactgatcaagcttccatgccagaaaatacagttgcgcagaagctctgccatcttcttgggatgaatgtgatggagtttactcgggccatcctgactccccggatcaaggtcggccgagactatgtgcaaaaagcccagaccaaagaacaggcagattttgcagtagaagcattggcaaaagctacctatgagcggctctttcgctggctcgttcatcgcatcaataaagctctggataggaccaaacgtcagggagcatctttcattggaatcctggatattgctggatttgaaatttttgagctgaactcctttgaacaactttgcatcaactacaccaatgagaagctgcagcagctgttcaaccacaccatgtttatcctagaacaagaggaataccagcgcgaaggcatcgagtggaacttcatcgatttcgggctggatctgcagccatgcatcgacctaatagagagacctgcgaaccctcctggtgtactggcccttttggatgaagaatgctggttccctaaagccacagataaaacctttgttgaaaaactggttcaagagcaaggttcccactccaagtttcagaaacctcgacaattaaaagacaaagctgatttttgcattatacattatgcagggaaggtggactataaggcagatgagtggctgatgaagaatatggaccccctgaatgacaacgtggccacccttttgcaccagtcatcagacagatttgtggcagagctttggaaagatgtggaccgtatcgtgggtctggatcaagtcactggtatgactgagacagcttttggctccgcatataaaaccaagaagggcatgtttcgtaccgttgggcaactctacaaagaatctctcaccaagctgatggcaactctccgaaacaccaaccctaactttgttcgttgtatcattccaaatcacgagaagagggctggaaaattggatccacacctagtcctagatcagcttcgctgtaatggtgtcctggaagggatccgaatctgtcgccagggcttccctaaccgaatagttttccaggaattcagacagagatatgagatcctaactccaaatgctattcctaaaggttttatggatggtaaacaggcctgtgaacgaatgatccgggctttagaattggacccaaacttgtacagaattggacagagcaagatatttttcagagctggagttctggcacacttagaggaagaaagagatttaaaaatcaccgatatcattatcttcttccaggccgtttgcagaggttacctggccagaaaggcctttgccaagaagcagcagcaactaagtgccttaaaggtcttgcagcggaactgtgccgcgtacctgaaattacggcactggcagtggtggcgagtcttcacaaaggtgaagccgcttctacaagtgactcgccaggaggaagaacttcaggccaaagatgaagagctgttgaaggtgaaggagaagcagacgaaggtggaaggagagctggaggagatggagcggaagcaccagcagcttttagaagagaagaatatccttgcagaacaactacaagcagagactgagctctttgctgaagcagaagagatgagggcaagacttgctgctaaaaagcaggaattagaagagattctacatgacttggagtctagggttgaagaagaagaagaaagaaaccaaatcctccaaaatgaaaagaaaaaaatgcaagcacatattcaggacctggaagaacagctagacgaggaggaaggggctcggcaaaagctgcagctggaaaaggtgacagcagaggccaagatcaagaagatggaagaggagattctgcttctcgaggaccaaaattccaagttcatcaaagaaaagaaactcatggaagatcgcattgctgagtgttcctctcagctggctgaagaggaagaaaaggcgaaaaacttggccaaaatcaggaataagcaagaagtgatgatctcagatttagaagaacgcttaaagaaggaagaaaagactcgtcaggaactggaaaaggccaaaagaaaactcgacggggagacgaccgacctgcaggaccagatcgcagagctgcaggcgcagattgatgagctcaagctgcagctggccaagaaggaggaggagctgcagggcgcactggccagaggtgatgatgaaacactccataagaacaatgcccttaaagttgtgcgagagctacaagcccaaattgctgaacttcaggaagactttgaatccgagaaggcttcacggaacaaggccgaaaagcagaaaagggacttgagtgaggaactggaagctctgaaaacagagctggaggacacgctggacaccacggcagcccagcaggaactacgtacaaaacgtgaacaagaagtggcagagctgaagaaagctcttgaggaggaaactaagaaccatgaagctcaaatccaggacatgagacaaagacacgcaacagccctggaggagctctcagagcagctggaacaggccaagcggttcaaagcaaatctagagaagaacaagcagggcctggagacagataacaaggagctggcgtgtgaggtgaaggtcctgcagcaggtcaaggctgagtctgagcacaagaggaagaagctcgacgcgcaggtccaggagctccatgccaaggtctctgaaggcgacaggctcagggtggagctggcggagaaagcaagtaagctgcagaatgagctagataatgtctccacccttctggaagaagcagagaagaagggtattaaatttgctaaggatgcagctagtcttgagtctcaactacaggatacacaggagcttcttcaggaggagacacgccagaaactaaacctgagcagtcggatccggcagctggaagaggagaagaacagtcttcaggagcagcaggaggaggaggaggaggccaggaagaacctggagaagcaagtgctggccctgcagtcccagttggctgataccaagaagaaagtagatgacgacctgggaacaattgaaagtctggaagaagccaagaagaagcttctgaaggacgcggaggccctgagccagcgcctggaggagaaggcactggcgtatgacaaactggagaagaccaagaaccgcctgcagcaggagctggacgacctcacggtggacctggaccaccagcgccaggtcgcctccaacttggagaagaagcagaagaagtttgaccagctgttagcagaagagaagagcatctctgctcgctatgccgaagagcgggaccgggccgaagccgaggccagagagaaagaaaccaaagccctgtcactggcccgggccctcgaggaagccctggaggccaaggaggagtttgagaggcagaacaagcagctccgagcagacatggaagacctcatgagctccaaagatgatgtgggaaaaaacgttcacgaacttgaaaaatccaaacgggccctagagcagcaggtggaggaaatgaggacccagctggaggagctggaagacgaactccaggccacggaagatgccaagcttcgtctggaggtcaacatgcaggccatgaaggcgcagttcgagagagacctgcaaaccagggatgagcagaatgaagagaagaagcggctgctgatcaaacaggtgcgggagctcgaggcggagctggaggatgagaggaaacagcgggcgcttgctgtagcttcaaagaaaaagatggagatagacctgaaggacctcgaagcccaaatcgaggctgcgaacaaagctcgggatgaggtgattaagcagctccgcaagctccaggctcagatgaaggattaccaacgtgaattagaagaagctcgtgcatccagagatgagatttttgctcaatccaaagagagtgaaaagaaattgaagagtctggaagcagaaatccttcaattgcaggaggaacttgcctcatctgagcgagcccgccgacacgccgagcaggagagagatgagctggcggacgagatcaccaacagcgcctctggcaagtccgcgctgctggatgagaagcggcgtctggaagctcggatcgcacagctggaggaggagctggaagaggagcagagcaacatggagctgctcaacgaccgcttccgcaagaccactctacaggtggacacactgaacgccgagctagcagccgagcgcagcgccgcccagaagagtgacaatgcacgccagcaactggagcggcagaacaaggagctgaaggccaagctgcaggaactcgagggtgctgtcaagtctaagttcaaggccaccatctcagccctggaggccaagattgggcagctggaggagcagcttgagcaggaagccaaggaacgagcagccgccaacaaattagtccgtcgcactgagaagaagctgaaagaaatcttcatgcaggttgaggatgagcgtcgacacgcggaccagtataaagagcagatggagaaggccaacgctcggatgaagcagcttaaacgccagctggaggaagcagaagaagaagcgacgcgtgccaacgcatctcggcgtaaactccagcgggaactggatgatgccaccgaggccaacgagggcctgagccgcgaggtcagcaccctgaagaaccggctgaggcggggtggccccatcagcttctcttccagccgatctggccggcgccagctgcaccttgaaggagcttccctggagctctccgacgatgacacagaaagtaagaccagtgatgtcaacgagacgcagccaccccagtcagagtaaagttgcaggaagccagaggaggcaatacagtgggacagttaggaatgcacccggggcctcctgcagatttcggaaattggcaagctacgggattccttcctgaaagatcaactgtgtcttaaggctctccagcctatgcatactgtatcctgcttcagacttaggtacaattgctcccctttttatatacagacacacacaggacacatatattaaacagattgtttcatcattgcatctattttccatatagtcatcaagagaccattttataaaacatggtaagaccctttttaaaacaaactccaggcccttggttgcgggtcgctgggttattggggcagcgccgtggtcgtcactcagtcgctctgcatgctctctgtcatacagacaggtaacctagttctgtgttcacgtggcccccgacgactcagccacatcaagtctcctagaccactgtggactctaaactgcacttgtctctctcatttccttcaaataatgatcaatgctatttcagtgagcaaactgtgaaaggggctttggaaagagtaggaggggtgggctggatcggaagcaacacccatttggggttaccatgtccatcccccaaggggggccctgcccctcgagtcgatggtgtcccgcatctactcatgtgaactggccttggcgagggctggtctgtgcatagaagggatagtggccacactgcagctgaggccccaggtggcagccatggatcatgtagacttccagatggtctcccgaaccgcctggctctgccggcgccctcctcacgtcaggagcaagcagccgtggacccctaagccgagctggtggaaggcccctccccgtcgccagccgggccctcatgctgaccttgcaaattcagccgctgctttgagcccaaaatgggaatattggttttgtgtccgaggcttgttccaagtttgtcaatgaggtttatggagcctccagaacagatgccatcttcctgaatgttgacatgccagtgggtgtgactccttcatttttccttctcccttccctttggacagtgttacagtgaacacttagcatcctgtttttggttggtagttaagcaaactgacattacggaaagtgccttagacactacagtactaagacaatgttgaatatatcattcgcctctataacaatttaatgtattcagttttgactgtgcttcatatcatgtacctctctagtcaaagtggtattacagacattcagtgacaatgaatcagtttatgaactgtactggctgttgaccaccagacacctgaccgcaaatatcttttcttgtattcccatatttctagacaatgatttttgtaagacaataaatttattcattatagatatttgcgcctgctctgtttacttgaagaaaaaagcacccgtggagaataaagagacctcaataaacaagaataatcatgtgaacgtggaatctgttttctcaccttctgttctcgatttcccatctgtgatctgactggagggtgggtgctacacaccaacttcaaatgatggcgccaggccctttttgctgagggcgctgtctcccaggtcagacgacagaataattctcaggccagtcctggctccaactcttgttcctgccagtgcctcacaggatgcacacgcactaggaagggaaagaccacccaaaggcaggagctggcccacctgtcaagggagtgatttaggagggctctggtcaccagccaatgaagctcactgctgggttaggacattttcaggggtccagtacatttcaggctgcattttcaggcagacacgcattgaagatgcttttggaggattcagtgatgaggccaagggcagcctctctagtgcgggccaactaggatgagagaaatactagggcagcacagaatcaaacagagaatgccgatttcttgttccataatattctccggttagactggttctgggggtaaggggtctatgactaggcttcttggcagcagtggaaacgtgtgaaatgggccgaagtgccctcttcctcctgtgccactaccataggagaggaaaggtgagtcacaggtatggtgcttcagcagggctcccacccccacatccagtatcttatccaagagtgtacagaattcagaggcttgtttttctcaaaaagtaagaactctgggctgggcatggtgctcacgcctgtaatcccggcactttgggaggccaaagcaggtggatcatttgaggtcagaagttcgaatccagcctggccaacatggtgaaacaccgtctctactaa

SEQ ID NO: 435233 - DNA, 7524 bp, Homo sapiens
agcagtgctaaaggagcccggcggaggcagcggtgggtttgggactgaggcgctggatctgtggtcgcggctggggacgtgcgcccgcgccaccatcttcggctgaagaggcaattgcttttggatcgttccatttacaatggcgcagagaactggactcgaggatccagagaggtatctctttgtggacagggctgtcatctacaaccctgccactcaagctgattggacagctaaaaagctagtgtggattccatcagaacgccatggttttgaggcagctagtatcaaagaagaacggggagatgaagttatggtggagttggcagagaatggaaagaaagcaatggtcaacaaagatgatattcagaagatgaacccacctaagttttccaaggtggaggatatggcagaattgacatgcttgaatgaagcttccgttttacataatctgaaggatcgctactattcaggactaatctatacttattctggactcttctgtgtagttataaacccttacaagaatcttccaatttactctgagaatattattgaaatgtacagagggaagaagcgtcatgagatgcctccacacatctatgctatatctgaatctgcttacagatgcatgcttcaagatcgtgaggaccagtcaattctttgcacgggtgagtcaggtgctgggaagacagaaaatacaaagaaagttattcagtaccttgcccatgttgcttcttcacataaaggaagaaaggaccataatattcctggggaacttgaacggcagcttttgcaagcaaatccaattctggaatcatttggaaatgcgaagactgtgaaaaatgataactcatctcgttttggcaaatttattcggatcaactttgatgtaactggctatatcgttggggccaacattgaaacataccttctggaaaagtctcgtgctgttcgtcaagcaaaagatgaacgtacttttcatatcttttaccagttgttatctggagcaggagaacacctaaagtctgatttgcttcttgaaggatttaataactacaggtttctctccaatggctatattcctattccgggacagcaagacaaagataatttccaggagaccatggaagcaatgcacataatgggcttctcccatgaagagattctgtcaatgcttaaagtagtatcttcagtgctacagtttggaaatatttctttcaaaaaggagagaaatactgatcaagcttccatgccagaaaatacagttgcgcagaagctctgccatcttcttgggatgaatgtgatggagtttactcgggccatcctgactccccggatcaaggtcggccgagactatgtgcaaaaagcccagaccaaagaacaggcagattttgcagtagaagcattggcaaaagctacctatgagcggctctttcgctggctcgttcatcgcatcaataaagctctggataggaccaaacgtcagggagcatctttcattggaatcctggatattgctggatttgaaatttttgagctgaactcctttgaacaactttgcatcaactacaccaatgagaagctgcagcagctgttcaaccacaccatgtttatcctagaacaagaggaataccagcgcgaaggcatcgagtggaacttcatcgatttcgggctggatctgcagccatgcatcgacctaatagagagacctgcgaaccctcctggtgtactggcccttttggatgaagaatgctggttccctaaagccacagataaaacctttgttgaaaaactggttcaagagcaaggttcccactccaagtttcagaaacctcgacaattaaaagacaaagctgatttttgcattatacattatgcagggaaggtggactataaggcagatgagtggctgatgaagaatatggaccccctgaatgacaacgtggccacccttttgcaccagtcatcagacagatttgtggcagagctttggaaagatgtggaccgtatcgtgggtctggatcaagtcactggtatgactgagacagcttttggctccgcatataaaaccaagaagggcatgtttcgtaccgttgggcaactctacaaagaatctctcaccaagctgatggcaactctccgaaacaccaaccctaactttgttcgttgtatcattccaaatcacgagaagagggctggaaaattggatccacacctagtcctagatcagcttcgctgtaatggtgtcctggaagggatccgaatctgtcgccagggcttccctaaccgaatagttttccaggaattcagacagagatatgagatcctaactccaaatgctattcctaaaggttttatggatggtaaacaggcctgtgaacgaatgatccgggctttagaattggacccaaacttgtacagaattggacagagcaagatatttttcagagctggagttctggcacacttagaggaagaaagagatttaaaaatcaccgatatcattatcttcttccaggccgtttgcagaggttacctggccagaaaggcctttgccaagaagcagcagcaactaagtgccttaaaggtcttgcagcggaactgtgccgcgtacctgaaattacggcactggcagtggtggcgagtcttcacaaaggtgaagccgcttctacaagtgactcgccaggaggaagaacttcaggccaaagatgaagagctgttgaaggtgaaggagaagcagacgaaggtggaaggagagctggaggagatggagcggaagcaccagcagcttttagaagagaagaatatccttgcagaacaactacaagcagagactgagctctttgctgaagcagaagagatgagggcaagacttgctgctaaaaagcaggaattagaagagattctacatgacttggagtctagggttgaagaagaagaagaaagaaaccaaatcctccaaaatgaaaagaaaaaaatgcaagcacatattcaggacctggaagaacagctagacgaggaggaaggggctcggcaaaagctgcagctggaaaaggtgacagcagaggccaagatcaagaagatggaagaggagattctgcttctcgaggaccaaaattccaagttcatcaaagaaaagaaactcatggaagatcgcattgctgagtgttcctctcagctggctgaagaggaagaaaaggcgaaaaacttggccaaaatcaggaataagcaagaagtgatgatctcagatttagaagaacgcttaaagaaggaagaaaagactcgtcaggaactggaaaaggccaaaagaaaactcgacggggagacgaccgacctgcaggaccagatcgcagagctgcaggcgcagattgatgagctcaagctgcagctggccaagaaggaggaggagctgcagggcgcactggccagaggtgatgatgaaacactccataagaacaatgcccttaaagttgtgcgagagctacaagcccaaattgctgaacttcaggaagactttgaatccgagaaggcttcacggaacaaggccgaaaagcagaaaagggacttgagtgaggaactggaagctctgaaaacagagctggaggacacgctggacaccacggcagcccagcaggaactacgtacaaaacgtgaacaagaagtggcagagctgaagaaagctcttgaggaggaaactaagaaccatgaagctcaaatccaggacatgagacaaagacacgcaacagccctggaggagctctcagagcagctggaacaggccaagcggttcaaagcaaatctagagaagaacaagcagggcctggagacagataacaaggagctggcgtgtgaggtgaaggtcctgcagcaggtcaaggctgagtctgagcacaagaggaagaagctcgacgcgcaggtccaggagctccatgccaaggtctctgaaggcgacaggctcagggtggagctggcggagaaagcaagtaagctgcagaatgagctagataatgtctccacccttctggaagaagcagagaagaagggtattaaatttgctaaggatgcagctagtcttgagtctcaactacaggatacacaggagcttcttcaggaggagacacgccagaaactaaacctgagcagtcggatccggcagctggaagaggagaagaacagtcttcaggagcagcaggaggaggaggaggaggccaggaagaacctggagaagcaagtgctggccctgcagtcccagttggctgataccaagaagaaagtagatgacgacctgggaacaattgaaagtctggaagaagccaagaagaagcttctgaaggacgcggaggccctgagccagcgcctggaggagaaggcactggcgtatgacaaactggagaagaccaagaaccgcctgcagcaggagctggacgacctcacggtggacctggaccaccagcgccaggtcgcctccaacttggagaagaagcagaagaagtttgaccagctgttagcagaagagaagagcatctctgctcgctatgccgaagagcgggaccgggccgaagccgaggccagagagaaagaaaccaaagccctgtcactggcccgggccctcgaggaagccctggaggccaaggaggagtttgagaggcagaacaagcagctccgagcagacatggaagacctcatgagctccaaagatgatgtgggaaaaaacgttcacgaacttgaaaaatccaaacgggccctagagcagcaggtggaggaaatgaggacccagctggaggagctggaagacgaactccaggccacggaagatgccaagcttcgtctggaggtcaacatgcaggccatgaaggcgcagttcgagagagacctgcaaaccagggatgagcagaatgaagagaagaagcggctgctgatcaaacaggtgcgggagctcgaggcggagctggaggatgagaggaaacagcgggcgcttgctgtagcttcaaagaaaaagatggagatagacctgaaggacctcgaagcccaaatcgaggctgcgaacaaagctcgggatgaggtgattaagcagctccgcaagctccaggctcagatgaaggattaccaacgtgaattagaagaagctcgtgcatccagagatgagatttttgctcaatccaaagagagtgaaaagaaattgaagagtctggaagcagaaatccttcaattgcaggaggaacttgcctcatctgagcgagcccgccgacacgccgagcaggagagagatgagctggcggacgagatcaccaacagcgcctctggcaagtccgcgctgctggatgagaagcggcgtctggaagctcggatcgcacagctggaggaggagctggaagaggagcagagcaacatggagctgctcaacgaccgcttccgcaagaccactctacaggtggacacactgaacgccgagctagcagccgagcgcagcgccgcccagaagagtgacaatgcacgccagcaactggagcggcagaacaaggagctgaaggccaagctgcaggaactcgagggtgctgtcaagtctaagttcaaggccaccatctcagccctggaggccaagattgggcagctggaggagcagcttgagcaggaagccaaggaacgagcagccgccaacaaattagtccgtcgcactgagaagaagctgaaagaaatcttcatgcaggttgaggatgagcgtcgacacgcggaccagtataaagagcagatggagaaggccaacgctcggatgaagcagcttaaacgccagctggaggaagcagaagaagaagcgacgcgtgccaacgcatctcggcgtaaactccagcgggaactggatgatgccaccgaggccaacgagggcctgagccgcgaggtcagcaccctgaagaaccggctgaggcggggtggccccatcagcttctcttccagccgatctggccggcgccagctgcaccttgaaggagcttccctggagctctccgacgatgacacagaaagtaagaccagtgatgtcaacgagacgcagccaccccagtcagagtaaagttgcaggaagccagaggaggcaatacagtgggacagttaggaatgcacccggggcctcctgcagatttcggaaattggcaagctacgggattccttcctgaaagatcaactgtgtcttaaggctctccagcctatgcatactgtatcctgcttcagacttaggtacaattgctcccctttttatatacagacacacacaggacacatatattaaacagattgtttcatcattgcatctattttccatatagtcatcaagagaccattttataaaacatggtaagaccctttttaaaacaaactccaggcccttggttgcgggtcgctgggttattggggcagcgccgtggtcgtcactcagtcgctctgcatgctctctgtcatacagacaggtaacctagttctgtgttcacgtggcccccgacgactcagccacatcaagtctcctagaccactgtggactctaaactgcacttgtctctctcatttccttcaaataatgatcaatgctatttcagtgagcaaactgtgaaaggggctttggaaagagtaggaggggtgggctggatcggaagcaacacccatttggggttaccatgtccatcccccaaggggggccctgcccctcgagtcgatggtgtcccgcatctactcatgtgaactggccttggcgagggctggtctgtgcatagaagggatagtggccacactgcagctgaggccccaggtggcagccatggatcatgtagacttccagatggtctcccgaaccgcctggctctgccggcgccctcctcacgtcaggagcaagcagccgtggacccctaagccgagctggtggaaggcccctccccgtcgccagccgggccctcatgctgaccttgcaaattcagccgctgctttgagcccaaaatgggaatattggttttgtgtccgaggcttgttccaagtttgtcaatgaggtttatggagcctccagaacagatgccatcttcctgaatgttgacatgccagtgggtgtgactccttcatttttccttctcccttccctttggacagtgttacagtgaacacttagcatcctgtttttggttggtagttaagcaaactgacattacggaaagtgccttagacactacagtactaagactgtgcttcatatcatgtacctctctagtcaaagtggtattacagacattcagtgacaatgaatcagtgttaattctaaatccttgatcctctgcaatgtgcttgaaaacacaaaccttttgggttaaaagctttaacatctattaggaagaatttgtcctgtgggtttggaatcttggattttccccctttatgaactgtactggctgttgaccaccagacacctgaccgcaaatatcttttcttgtattcccatatttctagacaatgatttttgtaagacaataaatttattcattatag

SEQ ID NO: 435234 - DNA, 7580 bp, Homo sapiens
agcagtgctaaaggagcccggcggaggcagcggtgggtttgggactgaggcgctggatctgtggtcgcggctggggacgtgcgcccgcgccaccatcttcggctgaagaggcaattgcttttggatcgttccatttacaatggcgcagagaactggactcgaggatccagagaggtatctctttgtggacagggctgtcatctacaaccctgccactcaagctgattggacagctaaaaagctagtgtggattccatcagaacgccatggttttgaggcagctagtatcaaagaagaacggggagatgaagttatggtggagttggcagagaatggaaagaaagcaatggtcaacaaagatgatattcagaagatgaacccacctaagttttccaaggtggaggatatggcagaattgacatgcttgaatgaagcttccgttttacataatctgaaggatcgctactattcaggactaatctatacttattctggactcttctgtgtagttataaacccttacaagaatcttccaatttactctgagaatattattgaaatgtacagagggaagaagcgtcatgagatgcctccacacatctatgctatatctgaatctgcttacagatgcatgcttcaagatcgtgaggaccagtcaattctttgcacgggtgagtcaggtgctgggaagacagaaaatacaaagaaagttattcagtaccttgcccatgttgcttcttcacataaaggaagaaaggaccataatattcctggggaacttgaacggcagcttttgcaagcaaatccaattctggaatcatttggaaatgcgaagactgtgaaaaatgataactcatctcgttttggcaaatttattcggatcaactttgatgtaactggctatatcgttggggccaacattgaaacataccttctggaaaagtctcgtgctgttcgtcaagcaaaagatgaacgtacttttcatatcttttaccagttgttatctggagcaggagaacacctaaagtctgatttgcttcttgaaggatttaataactacaggtttctctccaatggctatattcctattccgggacagcaagacaaagataatttccaggagaccatggaagcaatgcacataatgggcttctcccatgaagagattctgtcaatgcttaaagtagtatcttcagtgctacagtttggaaatatttctttcaaaaaggagagaaatactgatcaagcttccatgccagaaaatacagttgcgcagaagctctgccatcttcttgggatgaatgtgatggagtttactcgggccatcctgactccccggatcaaggtcggccgagactatgtgcaaaaagcccagaccaaagaacaggcagattttgcagtagaagcattggcaaaagctacctatgagcggctctttcgctggctcgttcatcgcatcaataaagctctggataggaccaaacgtcagggagcatctttcattggaatcctggatattgctggatttgaaatttttgagctgaactcctttgaacaactttgcatcaactacaccaatgagaagctgcagcagctgttcaaccacaccatgtttatcctagaacaagaggaataccagcgcgaaggcatcgagtggaacttcatcgatttcgggctggatctgcagccatgcatcgacctaatagagagacctgcgaaccctcctggtgtactggcccttttggatgaagaatgctggttccctaaagccacagataaaacctttgttgaaaaactggttcaagagcaaggttcccactccaagtttcagaaacctcgacaattaaaagacaaagctgatttttgcattatacattatgcagggaaggtggactataaggcagatgagtggctgatgaagaatatggaccccctgaatgacaacgtggccacccttttgcaccagtcatcagacagatttgtggcagagctttggaaagatgtggaccgtatcgtgggtctggatcaagtcactggtatgactgagacagcttttggctccgcatataaaaccaagaagggcatgtttcgtaccgttgggcaactctacaaagaatctctcaccaagctgatggcaactctccgaaacaccaaccctaactttgttcgttgtatcattccaaatcacgagaagagggctggaaaattggatccacacctagtcctagatcagcttcgctgtaatggtgtcctggaagggatccgaatctgtcgccagggcttccctaaccgaatagttttccaggaattcagacagagatatgagatcctaactccaaatgctattcctaaaggttttatggatggtaaacaggcctgtgaacgaatgatccgggctttagaattggacccaaacttgtacagaattggacagagcaagatatttttcagagctggagttctggcacacttagaggaagaaagagatttaaaaatcaccgatatcattatcttcttccaggccgtttgcagaggttacctggccagaaaggcctttgccaagaagcagcagcaactaagtgccttaaaggtcttgcagcggaactgtgccgcgtacctgaaattacggcactggcagtggtggcgagtcttcacaaaggtgaagccgcttctacaagtgactcgccaggaggaagaacttcaggccaaagatgaagagctgttgaaggtgaaggagaagcagacgaaggtggaaggagagctggaggagatggagcggaagcaccagcagcttttagaagagaagaatatccttgcagaacaactacaagcagagactgagctctttgctgaagcagaagagatgagggcaagacttgctgctaaaaagcaggaattagaagagattctacatgacttggagtctagggttgaagaagaagaagaaagaaaccaaatcctccaaaatgaaaagaaaaaaatgcaagcacatattcaggacctggaagaacagctagacgaggaggaaggggctcggcaaaagctgcagctggaaaaggtgacagcagaggccaagatcaagaagatggaagaggagattctgcttctcgaggaccaaaattccaagttcatcaaagaaaagaaactcatggaagatcgcattgctgagtgttcctctcagctggctgaagaggaagaaaaggcgaaaaacttggccaaaatcaggaataagcaagaagtgatgatctcagatttagaagaacgcttaaagaaggaagaaaagactcgtcaggaactggaaaaggccaaaagaaaactcgacggggagacgaccgacctgcaggaccagatcgcagagctgcaggcgcagattgatgagctcaagctgcagctggccaagaaggaggaggagctgcagggcgcactggccagaggtgatgatgaaacactccataagaacaatgcccttaaagttgtgcgagagctacaagcccaaattgctgaacttcaggaagactttgaatccgagaaggcttcacggaacaaggccgaaaagcagaaaagggacttgagtgaggaactggaagctctgaaaacagagctggaggacacgctggacaccacggcagcccagcaggaactacgtacaaaacgtgaacaagaagtggcagagctgaagaaagctcttgaggaggaaactaagaaccatgaagctcaaatccaggacatgagacaaagacacgcaacagccctggaggagctctcagagcagctggaacaggccaagcggttcaaagcaaatctagagaagaacaagcagggcctggagacagataacaaggagctggcgtgtgaggtgaaggtcctgcagcaggtcaaggctgagtctgagcacaagaggaagaagctcgacgcgcaggtccaggagctccatgccaaggtctctgaaggcgacaggctcagggtggagctggcggagaaagcaagtaagctgcagaatgagctagataatgtctccacccttctggaagaagcagagaagaagggtattaaatttgctaaggatgcagctagtcttgagtctcaactacaggatacacaggagcttcttcaggaggagacacgccagaaactaaacctgagcagtcggatccggcagctggaagaggagaagaacagtcttcaggagcagcaggaggaggaggaggaggccaggaagaacctggagaagcaagtgctggccctgcagtcccagttggctgataccaagaagaaagtagatgacgacctgggaacaattgaaagtctggaagaagccaagaagaagcttctgaaggacgcggaggccctgagccagcgcctggaggagaaggcactggcgtatgacaaactggagaagaccaagaaccgcctgcagcaggagctggacgacctcacggtggacctggaccaccagcgccaggtcgcctccaacttggagaagaagcagaagaagtttgaccagctgttagcagaagagaagagcatctctgctcgctatgccgaagagcgggaccgggccgaagccgaggccagagagaaagaaaccaaagccctgtcactggcccgggccctcgaggaagccctggaggccaaggaggagtttgagaggcagaacaagcagctccgagcagacatggaagacctcatgagctccaaagatgatgtgggaaaaaacgttcacgaacttgaaaaatccaaacgggccctagagcagcaggtggaggaaatgaggacccagctggaggagctggaagacgaactccaggccacggaagatgccaagcttcgtctggaggtcaacatgcaggccatgaaggcgcagttcgagagagacctgcaaaccagggatgagcagaatgaagagaagaagcggctgctgatcaaacaggtgcgggagctcgaggcggagctggaggatgagaggaaacagcgggcgcttgctgtagcttcaaagaaaaagatggagatagacctgaaggacctcgaagcccaaatcgaggctgcgaacaaagctcgggatgaggtgattaagcagctccgcaagctccaggctcagatgaaggattaccaacgtgaattagaagaagctcgtgcatccagagatgagatttttgctcaatccaaagagagtgaaaagaaattgaagagtctggaagcagaaatccttcaattgcaggaggaacttgcctcatctgagcgagcccgccgacacgccgagcaggagagagatgagctggcggacgagatcaccaacagcgcctctggcaagtccgcgctgctggatgagaagcggcgtctggaagctcggatcgcacagctggaggaggagctggaagaggagcagagcaacatggagctgctcaacgaccgcttccgcaagaccactctacaggtggacacactgaacgccgagctagcagccgagcgcagcgccgcccagaagagtgacaatgcacgccagcaactggagcggcagaacaaggagctgaaggccaagctgcaggaactcgagggtgctgtcaagtctaagttcaaggccaccatctcagccctggaggccaagattgggcagctggaggagcagcttgagcaggaagccaaggaacgagcagccgccaacaaattagtccgtcgcactgagaagaagctgaaagaaatcttcatgcaggttgaggatgagcgtcgacacgcggaccagtataaagagcagatggagaaggccaacgctcggatgaagcagcttaaacgccagctggaggaagcagaagaagaagcgacgcgtgccaacgcatctcggcgtaaactccagcgggaactggatgatgccaccgaggccaacgagggcctgagccgcgaggtcagcaccctgaagaaccggctgaggcggggtggccccatcagcttctcttccagccgatctggccggcgccagctgcaccttgaaggagcttccctggagctctccgacgatgacacagaaagtaagaccagtgatgtcaacgagacgcagccaccccagtcagagtaaagttgcaggaagccagaggaggcaatacagtgggacagttaggaatgcacccggggcctcctgcagatttcggaaattggcaagctacgggattccttcctgaaagatcaactgtgtcttaaggctctccagcctatgcatactgtatcctgcttcagacttaggtacaattgctcccctttttatatacagacacacacaggacacatatattaaacagattgtttcatcattgcatctattttccatatagtcatcaagagaccattttataaaacatggtaagaccctttttaaaacaaactccaggcccttggttgcgggtcgctgggttattggggcagcgccgtggtcgtcactcagtcgctctgcatgctctctgtcatacagacaggtaacctagttctgtgttcacgtggcccccgacgactcagccacatcaagtctcctagaccactgtggactctaaactgcacttgtctctctcatttccttcaaataatgatcaatgctatttcagtgagcaaactgtgaaaggggctttggaaagagtaggaggggtgggctggatcggaagcaacacccatttggggttaccatgtccatcccccaaggggggccctgcccctcgagtcgatggtgtcccgcatctactcatgtgaactggccttggcgagggctggtctgtgcatagaagggatagtggccacactgcagctgaggccccaggtggcagccatggatcatgtagacttccagatggtctcccgaaccgcctggctctgccggcgccctcctcacgtcaggagcaagcagccgtggacccctaagccgagctggtggaaggcccctccccgtcgccagccgggccctcatgctgaccttgcaaattcagccgctgctttgagcccaaaatgggaatattggttttgtgtccgaggcttgttccaagtttgtcaatgaggtttatggagcctccagaacagatgccatcttcctgaatgttgacatgccagtgggtgtgactccttcatttttccttctcccttccctttggacagtgttacagtgaacacttagcatcctgtttttggttggtagttaagcaaactgacattacggaaagtgccttagacactacagtactaagacaatgttgaatatatcattcgccagctatgctaatgacagaaaacataagagcctgtagctcatatcacgctccacaggagtccaagtggtatggcagtcagtcagaggctacgcctcacggttagtagtcaatcctctgatcctatgcgatggactttcaaactcaaacggtctgggtaatgagcaataccttaaataaggtggaatatgtcctgaagattagtaatagtgtatgctcccccggtataagctgttcagtcagtagtccagcccacccctagccccaagtatcttgtggtgaatacccatatttttatacaacaaattaaggaatacaaataatctcttcaaaagacaa

SEQ ID NO: 435235 - DNA, 2492 bp, Homo sapiens
gagagtctggaagcagaaatccgttcaagttgacagagtaggtaacgttggcgctcgagtctggaggctgagtcgccgcgcgagcacggccgagcaggagagagatgagctggcggacgagatcaccaacagcgcctctggcaagtccgcgctgctggatgagaagcggcgtctggaagctcggatcgcacagctggaggaggagctggaagaggagcagagcaacatggagctgctcaacgaccgcttccgcaagaccactctacaggtggacacactgaacgccgagctagcagccgagcgcagcgccgcccagaagagtgacaatgcacgccagcaactggagcggcagaacaaggagctgaaggccaagctgcaggaactcgagggtgctgtcaagtctaagttcaaggccaccatctcagccctggaggccaagattgggcagctggaggagcagcttgagcaggaagccaaggaacgagcagccgccaacaaattagtccgtcgcactgagaagaagctgaaagaaatcttcatgcaggttgaggatgagcgtcgacacgcggaccagtataaagagcagatggagaaggccaacgctcggatgaagcagcttaaacgccagctggaggaagcagaagaagaagcgacgcgtgccaacgcatctcggcgtaaactccagcgggaactggatgatgccaccgaggccaacgagggcctgagccgcgaggtcagcaccctgaagaaccggctgaggcggggtggccccatcagcttctcttccagccgatctggccggcgccagctgcaccttgaaggagcttccctggagctctccgacgatgacacagaaagtaagaccagtgatgtcaacgagacgcagccaccccagtcagagtaaagttgcaggaagccagaggaggcaatacagtgggacagttaggaatgcacccggggcctcctgcagatttcggaaattggcaagctacgggattccttcctgaaagatcaactgtgtcttaaggctctccagcctatgcatactgtatcctgcttcagacttaggtacaattgctcccctttttatatacagacacacacaggacacatatattaaacagattgtttcatcattgcatctattttccatatagtcatcaagagaccattttataaaacatggtaagaccctttttaaaacaaactccaggcccttggttgcgggtcgctgggttattggggcagcgccgtggtcgtcactcagtcgctctgcatgctctctgtcatacagacaggtaacctagttctgtgttcacgtggcccccgacgactcagccacatcaagtctcctagaccactgtggactctaaactgcacttgtctctctcatttccttcaaataatgatcaatgctatttcagtgagcaaactgtgaaaggggctttggaaagagtaggaggggtgggctggatcggaagcaacacccatttggggttaccatgtccatcccccaaggggggccctgcccctcgagtcgatggtgtcccgcatctactcatgtgaactggccttggcgagggctggtctgtgcatagaagggatagtggccacactgcagctgaggccccaggtggcagccatggatcatgtagacttccagatggtctcccgaaccgcctggctctgccggcgccctcctcacgtcaggagcaagcagccgtggacccctaagccgagctggtggaaggcccctccccgtcgccagccgggccctcatgctgaccttgcaaattcagccgctgctttgagcccaaaatgggaatattggttttgtgtccgaggcttgttccaagtttgtcaatgaggtttatggagcctccagaacagatgccatcttcctgaatgttgacatgccagtgggtgtgactccttcatttttccttctcccttccctttggacagtgttacagtgaacacttagcatcctgtttttggttggtagttaagcaaactgacattacggaaagtgccttagacactacagtactaagacaatgttgaatatatcattcgcctctataacaatttaatgtattcagttttgactgtgcttcatatcatgtacctctctagtcaaagtggtattacagacattcagtgacaatgaatcagtgttaattctaaatccttgatcctctgcaatgtgcttgaaaacacaaaccttttgggttaaaagctttaacatctattaggaagaatttgtcctgtgggtttggaatcttggattttccccctttatgaactgtactggctgttgaccaccagacacctgaccgcaaatatcttttcttgtattcccatatttctagacaatgatttttgtaagacaataaatttattcattatagatatttgcgcctgctctgtttacttgaagaaaaaagcacccgtggagaataaagagacctcaataaacaagaataatcatg

SEQ ID NO: 435236 - DNA, 7227 bp, Homo sapiens
agcagtgctaaaggagcccggcggaggcagcggtgggtttgggactgaggcgctggatctgtggtcgcggctggggacgtgcgcccgcgccaccatcttcggctgaagaggcaattgcttttggatcgttccatttacaatggcgcagagaactggactcgaggatccagagaggtatctctttgtggacagggctgtcatctacaaccctgccactcaagctgattggacagctaaaaagctagtgtggattccatcagaacgccatggttttgaggcagctagtatcaaagaagaacggggagatgaagttatggtggagttggcagagaatggaaagaaagcaatggtcaacaaagatgatattcagaagatgaacccacctaagttttccaaggtggaggatatggcagaattgacatgcttgaatgaagcttccgttttacataatctgaaggatcgctactattcaggactaatctatacttattctggactcttctgtgtagttataaacccttacaagaatcttccaatttactctgagaatattattgaaatgtacagagggaagaagcgtcatgagatgcctccacacatctatgctatatctgaatctgcttacagatgcatgcttcaagatcgtgaggaccagtcaattctttgcacgggtgagtcaggtgctgggaagacagaaaatacaaagaaagttattcagtaccttgcccatgttgcttcttcacataaaggaagaaaggaccataatattcctggggaacttgaacggcagcttttgcaagcaaatccaattctggaatcatttggaaatgcgaagactgtgaaaaatgataactcatctcgttttggcaaatttattcggatcaactttgatgtaactggctatatcgttggggccaacattgaaacataccttctggaaaagtctcgtgctgttcgtcaagcaaaagatgaacgtacttttcatatcttttaccagttgttatctggagcaggagaacacctaaagtctgatttgcttcttgaaggatttaataactacaggtttctctccaatggctatattcctattccgggacagcaagacaaagataatttccaggagaccatggaagcaatgcacataatgggcttctcccatgaagagattctgtcaatgcttaaagtagtatcttcagtgctacagtttggaaatatttctttcaaaaaggagagaaatactgatcaagcttccatgccagaaaatacagttgcgcagaagctctgccatcttcttgggatgaatgtgatggagtttactcgggccatcctgactccccggatcaaggtcggccgagactatgtgcaaaaagcccagaccaaagaacaggcagattttgcagtagaagcattggcaaaagctacctatgagcggctctttcgctggctcgttcatcgcatcaataaagctctggataggaccaaacgtcagggagcatctttcattggaatcctggatattgctggatttgaaatttttgagctgaactcctttgaacaactttgcatcaactacaccaatgagaagctgcagcagctgttcaaccacaccatgtttatcctagaacaagaggaataccagcgcgaaggcatcgagtggaacttcatcgatttcgggctggatctgcagccatgcatcgacctaatagagagacctgcgaaccctcctggtgtactggcccttttggatgaagaatgctggttccctaaagccacagataaaacctttgttgaaaaactggttcaagagcaaggttcccactccaagtttcagaaacctcgacaattaaaagacaaagctgatttttgcattatacattatgcagggaaggtggactataaggcagatgagtggctgatgaagaatatggaccccctgaatgacaacgtggccacccttttgcaccagtcatcagacagatttgtggcagagctttggaaagatgtggaccgtatcgtgggtctggatcaagtcactggtatgactgagacagcttttggctccgcatataaaaccaagaagggcatgtttcgtaccgttgggcaactctacaaagaatctctcaccaagctgatggcaactctccgaaacaccaaccctaactttgttcgttgtatcattccaaatcacgagaagagggctggaaaattggatccacacctagtcctagatcagcttcgctgtaatggtgtcctggaagggatccgaatctgtcgccagggcttccctaaccgaatagttttccaggaattcagacagagatatgagatcctaactccaaatgctattcctaaaggttttatggatggtaaacaggcctgtgaacgaatgatccgggctttagaattggacccaaacttgtacagaattggacagagcaagatatttttcagagctggagttctggcacacttagaggaagaaagagatttaaaaatcaccgatatcattatcttcttccaggccgtttgcagaggttacctggccagaaaggcctttgccaagaagcagcagcaactaagtgccttaaaggtcttgcagcggaactgtgccgcgtacctgaaattacggcactggcagtggtggcgagtcttcacaaaggtgaagccgcttctacaagtgactcgccaggaggaagaacttcaggccaaagatgaagagctgttgaaggtgaaggagaagcagacgaaggtggaaggagagctggaggagatggagcggaagcaccagcagcttttagaagagaagaatatccttgcagaacaactacaagcagagactgagctctttgctgaagcagaagagatgagggcaagacttgctgctaaaaagcaggaattagaagagattctacatgacttggagtctagggttgaagaagaagaagaaagaaaccaaatcctccaaaatgaaaagaaaaaaatgcaagcacatattcaggacctggaagaacagctagacgaggaggaaggggctcggcaaaagctgcagctggaaaaggtgacagcagaggccaagatcaagaagatggaagaggagattctgcttctcgaggaccaaaattccaagttcatcaaagaaaagaaactcatggaagatcgcattgctgagtgttcctctcagctggctgaagaggaagaaaaggcgaaaaacttggccaaaatcaggaataagcaagaagtgatgatctcagatttagaagaacgcttaaagaaggaagaaaagactcgtcaggaactggaaaaggccaaaagaaaactcgacggggagacgaccgacctgcaggaccagatcgcagagctgcaggcgcagattgatgagctcaagctgcagctggccaagaaggaggaggagctgcagggcgcactggccagaggtgatgatgaaacactccataagaacaatgcccttaaagttgtgcgagagctacaagcccaaattgctgaacttcaggaagactttgaatccgagaaggcttcacggaacaaggccgaaaagcagaaaagggacttgagtgaggaactggaagctctgaaaacagagctggaggacacgctggacaccacggcagcccagcaggaactacgtacaaaacgtgaacaagaagtggcagagctgaagaaagctcttgaggaggaaactaagaaccatgaagctcaaatccaggacatgagacaaagacacgcaacagccctggaggagctctcagagcagctggaacaggccaagcggttcaaagcaaatctagagaagaacaagcagggcctggagacagataacaaggagctggcgtgtgaggtgaaggtcctgcagcaggtcaaggctgagtctgagcacaagaggaagaagctcgacgcgcaggtccaggagctccatgccaaggtctctgaaggcgacaggctcagggtggagctggcggagaaagcaagtaagctgcagaatgagctagataatgtctccacccttctggaagaagcagagaagaagggtattaaatttgctaaggatgcagctagtcttgagtctcaactacaggatacacaggagcttcttcaggaggagacacgccagaaactaaacctgagcagtcggatccggcagctggaagaggagaagaacagtcttcaggagcagcaggaggaggaggaggaggccaggaagaacctggagaagcaagtgctggccctgcagtcccagttggctgataccaagaagaaagtagatgacgacctgggaacaattgaaagtctggaagaagccaagaagaagcttctgaaggacgcggaggccctgagccagcgcctggaggagaaggcactggcgtatgacaaactggagaagaccaagaaccgcctgcagcaggagctggacgacctcacggtggacctggaccaccagcgccaggtcgcctccaacttggagaagaagcagaagaagtttgaccagctgttagcagaagagaagagcatctctgctcgctatgccgaagagcgggaccgggccgaagccgaggccagagagaaagaaaccaaagccctgtcactggcccgggccctcgaggaagccctggaggccaaggaggagtttgagaggcagaacaagcagctccgagcagacatggaagacctcatgagctccaaagatgatgtgggaaaaaacgttcacgaacttgaaaaatccaaacgggccctagagcagcaggtggaggaaatgaggacccagctggaggagctggaagacgaactccaggccacggaagatgccaagcttcgtctggaggtcaacatgcaggccatgaaggcgcagttcgagagagacctgcaaaccagggatgagcagaatgaagagaagaagcggctgctgatcaaacaggtgcgggagctcgaggcggagctggaggatgagaggaaacagcgggcgcttgctgtagcttcaaagaaaaagatggagatagacctgaaggacctcgaagcccaaatcgaggctgcgaacaaagctcgggatgaggtgattaagcagctccgcaagctccaggctcagatgaaggattaccaacgtgaattagaagaagctcgtgcatccagagatgagatttttgctcaatccaaagagagtgaaaagaaattgaagagtctggaagcagaaatccttcaattgcaggaggaacttgcctcatctgagcgagcccgccgacacgccgagcaggagagagatgagctggcggacgagatcaccaacagcgcctctggcaagtccgcgctgctggatgagaagcggcgtctggaagctcggatcgcacagctggaggaggagctggaagaggagcagagcaacatggagctgctcaacgaccgcttccgcaagaccactctacaggtggacacactgaacgccgagctagcagccgagcgcagcgccgcccagaagagtgacaatgcacgccagcaactggagcggcagaacaaggagctgaaggccaagctgcaggaactcgagggtgctgtcaagtctaagttcaaggccaccatctcagccctggaggccaagattgggcagctggaggagcagcttgagcaggaagccaaggaacgagcagccgccaacaaattagtccgtcgcactgagaagaagctgaaagaaatcttcatgcaggttgaggatgagcgtcgacacgcggaccagtataaagagcagatggagaaggccaacgctcggatgaagcagcttaaacgccagctggaggaagcagaagaagaagcgacgcgtgccaacgcatctcggcgtaaactccagcgggaactggatgatgccaccgaggccaacgagggcctgagccgcgaggtcagcaccctgaagaaccggctgaggcggggtggccccatcagcttctcttccagccgatctggccggcgccagctgcaccttgaaggagcttccctggagctctccgacgatgacacagaaagtaagaccagtgatgtcaacgagacgcagccaccccagtcagagtaaagttgcaggaagccagaggaggcaatacagtgggacagttaggaatgcacccggggcctcctgcagatttcggaaattggcaagctacgggattccttcctgaaagatcaactgtgtcttaaggctctccagcctatgcatactgtatcctgcttcagacttaggtacaattgctcccctttttatatacagacacacacaggacacatatattaaacagattgtttcatcattgcatctattttccatatagtcatcaagagaccattttataaaacatggtaagaccctttttaaaacaaactccaggcccttggttgcgggtcgctgggttattggggcagcgccgtggtcgtcactcagtcgctctgcatgctctctgtcatacagacaggtaacctagttctgtgttcacgtggcccccgacgactcagccacatcaagtctcctagaccactgtggactctaaactgcacttgtctctctcatttccttcaaataatgatcaatgctatttcagtgagcaaactgtgaaaggggctttggaaagagtaggaggggtgggctggatcggaagcaacacccatttggggttaccatgtccatcccccaaggggggccctgcccctcgagtcgatggtgtcccgcatctactcatgtgaactggccttggcgagggctggtctgtgcatagaagggatagtggccacactgcagctgaggccccaggtggcagccatggatcatgtagacttccagatggtctcccgaaccgcctggctctgccggcgccctcctcacgtcaggagcaagcagccgtggacccctaagccgagctggtggaaggcccctccccgtcgccagccgggccctcatgctgaccttgcaaattcagccgctgctttgagcccaaaatgggaatattggttttgtgtccgaggcttgttccaagtttgtcaatgaggtttatggagcctccagaacagatgccatcttcctgaatgttgacattcctgtgggtttggaatcttggattttccccctttatgaactgtactggctgttgaccaccagacacctgaccgcaaatatcttttcttgtattcccatatttctagacaatgatttttgtaagacaataaatttattcattatag

SEQ ID NO: 435237 - DNA, 6776 bp, Homo sapiens
agcagtgctaaaggagcccggcggaggcagcggtgggtttgggactgaggcgctggatctgtggtcgcggctggggacgtgcgcccgcgccaccatcttcggctgaagaggcaattgcttttggatcgttccatttacaatggcgcagagaactggactcgaggatccagagaggtatctctttgtggacagggctgtcatctacaaccctgccactcaagctgattggacagctaaaaagctagtgtggattccatcagaacgccatggttttgaggcagctagtatcaaagaagaacggggagatgaagttatggtggagttggcagagaatggaaagaaagcaatggtcaacaaagatgatattcagaagatgaacccacctaagttttccaaggtggaggatatggcagaattgacatgcttgaatgaagcttccgttttacataatctgaaggatcgctactattcaggactaatctatacttattctggactcttctgtgtagttataaacccttacaagaatcttccaatttactctgagaatattattgaaatgtacagagggaagaagcgtcatgagatgcctccacacatctatgctatatctgaatctgcttacagatgcatgcttcaagatcgtgaggaccagtcaattctttgcacgggtgagtcaggtgctgggaagacagaaaatacaaagaaagttattcagtaccttgcccatgttgcttcttcacataaaggaagaaaggaccataatattcctggggaacttgaacggcagcttttgcaagcaaatccaattctggaatcatttggaaatgcgaagactgtgaaaaatgataactcatctcgttttggcaaatttattcggatcaactttgatgtaactggctatatcgttggggccaacattgaaacataccttctggaaaagtctcgtgctgttcgtcaagcaaaagatgaacgtacttttcatatcttttaccagttgttatctggagcaggagaacacctaaagtctgatttgcttcttgaaggatttaataactacaggtttctctccaatggctatattcctattccgggacagcaagacaaagataatttccaggagaccatggaagcaatgcacataatgggcttctcccatgaagagattctgtcaatgcttaaagtagtatcttcagtgctacagtttggaaatatttctttcaaaaaggagagaaatactgatcaagcttccatgccagaaaatacagttgcgcagaagctctgccatcttcttgggatgaatgtgatggagtttactcgggccatcctgactccccggatcaaggtcggccgagactatgtgcaaaaagcccagaccaaagaacaggcagattttgcagtagaagcattggcaaaagctacctatgagcggctctttcgctggctcgttcatcgcatcaataaagctctggataggaccaaacgtcagggagcatctttcattggaatcctggatattgctggatttgaaatttttgagctgaactcctttgaacaactttgcatcaactacaccaatgagaagctgcagcagctgttcaaccacaccatgtttatcctagaacaagaggaataccagcgcgaaggcatcgagtggaacttcatcgatttcgggctggatctgcagccatgcatcgacctaatagagagacctgcgaaccctcctggtgtactggcccttttggatgaagaatgctggttccctaaagccacagataaaacctttgttgaaaaactggttcaagagcaaggttcccactccaagtttcagaaacctcgacaattaaaagacaaagctgatttttgcattatacattatgcagggaaggtggactataaggcagatgagtggctgatgaagaatatggaccccctgaatgacaacgtggccacccttttgcaccagtcatcagacagatttgtggcagagctttggaaagatgtggaccgtatcgtgggtctggatcaagtcactggtatgactgagacagcttttggctccgcatataaaaccaagaagggcatgtttcgtaccgttgggcaactctacaaagaatctctcaccaagctgatggcaactctccgaaacaccaaccctaactttgttcgttgtatcattccaaatcacgagaagagggctggaaaattggatccacacctagtcctagatcagcttcgctgtaatggtgtcctggaagggatccgaatctgtcgccagggcttccctaaccgaatagttttccaggaattcagacagagatatgagatcctaactccaaatgctattcctaaaggttttatggatggtaaacaggcctgtgaacgaatgatccgggctttagaattggacccaaacttgtacagaattggacagagcaagatatttttcagagctggagttctggcacacttagaggaagaaagagatttaaaaatcaccgatatcattatcttcttccaggccgtttgcagaggttacctggccagaaaggcctttgccaagaagcagcagcaactaagtgccttaaaggtcttgcagcggaactgtgccgcgtacctgaaattacggcactggcagtggtggcgagtcttcacaaaggtgaagccgcttctacaagtgactcgccaggaggaagaacttcaggccaaagatgaagagctgttgaaggtgaaggagaagcagacgaaggtggaaggagagctggaggagatggagcggaagcaccagcagcttttagaagagaagaatatccttgcagaacaactacaagcagagactgagctctttgctgaagcagaagagatgagggcaagacttgctgctaaaaagcaggaattagaagagattctacatgacttggagtctagggttgaagaagaagaagaaagaaaccaaatcctccaaaatgaaaagaaaaaaatgcaagcacatattcaggacctggaagaacagctagacgaggaggaaggggctcggcaaaagctgcagctggaaaaggtgacagcagaggccaagatcaagaagatggaagaggagattctgcttctcgaggaccaaaattccaagttcatcaaagaaaagaaactcatggaagatcgcattgctgagtgttcctctcagctggctgaagaggaagaaaaggcgaaaaacttggccaaaatcaggaataagcaagaagtgatgatctcagatttagaagaacgcttaaagaaggaagaaaagactcgtcaggaactggaaaaggccaaaagaaaactcgacggggagacgaccgacctgcaggaccagatcgcagagctgcaggcgcagattgatgagctcaagctgcagctggccaagaaggaggaggagctgcagggcgcactggccagaggtgatgatgaaacactccataagaacaatgcccttaaagttgtgcgagagctacaagcccaaattgctgaacttcaggaagactttgaatccgagaaggcttcacggaacaaggccgaaaagcagaaaagggacttgagtgaggaactggaagctctgaaaacagagctggaggacacgctggacaccacggcagcccagcaggaactacgtacaaaacgtgaacaagaagtggcagagctgaagaaagctcttgaggaggaaactaagaaccatgaagctcaaatccaggacatgagacaaagacacgcaacagccctggaggagctctcagagcagctggaacaggccaagcggttcaaagcaaatctagagaagaacaagcagggcctggagacagataacaaggagctggcgtgtgaggtgaaggtcctgcagcaggtcaaggctgagtctgagcacaagaggaagaagctcgacgcgcaggtccaggagctccatgccaaggtctctgaaggcgacaggctcagggtggagctggcggagaaagcaagtaagctgcagaatgagctagataatgtctccacccttctggaagaagcagagaagaagggtattaaatttgctaaggatgcagctagtcttgagtctcaactacaggatacacaggagcttcttcaggaggagacacgccagaaactaaacctgagcagtcggatccggcagctggaagaggagaagaacagtcttcaggagcagcaggaggaggaggaggaggccaggaagaacctggagaagcaagtgctggccctgcagtcccagttggctgataccaagaagaaagtagatgacgacctgggaacaattgaaagtctggaagaagccaagaagaagcttctgaaggacgcggaggccctgagccagcgcctggaggagaaggcactggcgtatgacaaactggagaagaccaagaaccgcctgcagcaggagctggacgacctcacggtggacctggaccaccagcgccaggtcgcctccaacttggagaagaagcagaagaagtttgaccagctgttagcagaagagaagagcatctctgctcgctatgccgaagagcgggaccgggccgaagccgaggccagagagaaagaaaccaaagccctgtcactggcccgggccctcgaggaagccctggaggccaaggaggagtttgagaggcagaacaagcagctccgagcagacatggaagacctcatgagctccaaagatgatgtgggaaaaaacgttcacgaacttgaaaaatccaaacgggccctagagcagcaggtggaggaaatgaggacccagctggaggagctggaagacgaactccaggccacggaagatgccaagcttcgtctggaggtcaacatgcaggccatgaaggcgcagttcgagagagacctgcaaaccagggatgagcagaatgaagagaagaagcggctgctgatcaaacaggtgcgggagctcgaggcggagctggaggatgagaggaaacagcgggcgcttgctgtagcttcaaagaaaaagatggagatagacctgaaggacctcgaagcccaaatcgaggctgcgaacaaagctcgggatgaggtgattaagcagctccgcaagctccaggctcagatgaaggattaccaacgtgaattagaagaagctcgtgcatccagagatgagatttttgctcaatccaaagagagtgaaaagaaattgaagagtctggaagcagaaatccttcaattgcaggaggaacttgcctcatctgagcgagcccgccgacacgccgagcaggagagagatgagctggcggacgagatcaccaacagcgcctctggcaagtccgcgctgctggatgagaagcggcgtctggaagctcggatcgcacagctggaggaggagctggaagaggagcagagcaacatggagctgctcaacgaccgcttccgcaagaccactctacaggtggacacactgaacgccgagctagcagccgagcgcagcgccgcccagaagagtgacaatgcacgccagcaactggagcggcagaacaaggagctgaaggccaagctgcaggaactcgagggtgctgtcaagtctaagttcaaggccaccatctcagccctggaggccaagattgggcagctggaggagcagcttgagcaggaagccaaggaacgagcagccgccaacaaattagtccgtcgcactgagaagaagctgaaagaaatcttcatgcaggttgaggatgagcgtcgacacgcggaccagtataaagagcagatggagaaggccaacgctcggatgaagcagcttaaacgccagctggaggaagcagaagaagaagcgacgcgtgccaacgcatctcggcgtaaactccagcgggaactggatgatgccaccgaggccaacgagggcctgagccgcgaggtcagcaccctgaagaaccggctgagcatggatcatgtagacttccagatggtctcccgaaccgcctggctctgccggcgccctcctcacgtcaggagcaagcagccgtggacccctaagccgagctggtggaaggcccctccccgtcgccagccgggccctcatgctgaccttgcaaattcagccgctgctttgagcccaaaatgggaatattggttttgtgtccgaggcttgttccaagtttgtcaatgaggtttatggagcctccagaacagatgccatcttcctgaatgttgacatgccagtgggtgtgactccttcatttttccttctcccttccctttggacagtgttacagtgaacacttagcatcctgtttttggttggtagttaagcaaactgacattacggaaagtgccttagacactacagtactaagacaatgttgaatatatcattcgcctctataacaatttaatgtattcagttttgactgtgcttcatatcatgtacctctctagtcaaagtggtattacagacattcagtgacaatgaatcagtgttaattctaaatccttgatcctctgcaatgtgcttgaaaacacaaaccttttgggttaaaagctttaacatctattaggaagaatttgtcctgtgggtttggaatcttggattttccccctttatgaactgtactggctgttgaccaccagacacctgaccgcaaatatcttttcttgtattcccatatttctagacaatgatttttgtaagacaataaatttattcattatagatatttgcgcctgctctgtttacttgaagaaaaaagcacccgtggagaataaagagacctcaataaacaagaataatcatg

SEQ ID NO: 435238 - DNA, 6647 bp, Homo sapiens
agcagtgctaaaggagcccggcggaggcagcggtgggtttgggactgaggcgctggatctgtggtcgcggctggggacgtgcgcccgcgccaccatcttcggctgaagaggcaattgcttttggatcgttccatttacaatggcgcagagaactggactcgaggatccagagaggtatctctttgtggacagggctgtcatctacaaccctgccactcaagctgattggacagctaaaaagctagtgtggattccatcagaacgccatggttttgaggcagctagtatcaaagaagaacggggagatgaagttatggtggagttggcagagaatggaaagaaagcaatggtcaacaaagatgatattcagaagatgaacccacctaagttttccaaggtggaggatatggcagaattgacatgcttgaatgaagcttccgttttacataatctgaaggatcgctactattcaggactaatctatacttattctggactcttctgtgtagttataaacccttacaagaatcttccaatttactctgagaatattattgaaatgtacagagggaagaagcgtcatgagatgcctccacacatctatgctatatctgaatctgcttacagatgcatgcttcaagatcgtgaggaccagtcaattctttgcacgggtgagtcaggtgctgggaagacagaaaatacaaagaaagttattcagtaccttgcccatgttgcttcttcacataaaggaagaaaggaccataatattcctggggaacttgaacggcagcttttgcaagcaaatccaattctggaatcatttggaaatgcgaagactgtgaaaaatgataactcatctcgttttggcaaatttattcggatcaactttgatgtaactggctatatcgttggggccaacattgaaacataccttctggaaaagtctcgtgctgttcgtcaagcaaaagatgaacgtacttttcatatcttttaccagttgttatctggagcaggagaacacctaaagtctgatttgcttcttgaaggatttaataactacaggtttctctccaatggctatattcctattccgggacagcaagacaaagataatttccaggagaccatggaagcaatgcacataatgggcttctcccatgaagagattctgtcaatgcttaaagtagtatcttcagtgctacagtttggaaatatttctttcaaaaaggagagaaatactgatcaagcttccatgccagaaaatacagttgcgcagaagctctgccatcttcttgggatgaatgtgatggagtttactcgggccatcctgactccccggatcaaggtcggccgagactatgtgcaaaaagcccagaccaaagaacaggcagattttgcagtagaagcattggcaaaagctacctatgagcggctctttcgctggctcgttcatcgcatcaataaagctctggataggaccaaacgtcagggagcatctttcattggaatcctggatattgctggatttgaaatttttgagctgaactcctttgaacaactttgcatcaactacaccaatgagaagctgcagcagctgttcaaccacaccatgtttatcctagaacaagaggaataccagcgcgaaggcatcgagtggaacttcatcgatttcgggctggatctgcagccatgcatcgacctaatagagagacctgcgaaccctcctggtgtactggcccttttggatgaagaatgctggttccctaaagccacagataaaacctttgttgaaaaactggttcaagagcaaggttcccactccaagtttcagaaacctcgacaattaaaagacaaagctgatttttgcattatacattatgcagggaaggtggactataaggcagatgagtggctgatgaagaatatggaccccctgaatgacaacgtggccacccttttgcaccagtcatcagacagatttgtggcagagctttggaaagatgtggaccgtatcgtgggtctggatcaagtcactggtatgactgagacagcttttggctccgcatataaaaccaagaagggcatgtttcgtaccgttgggcaactctacaaagaatctctcaccaagctgatggcaactctccgaaacaccaaccctaactttgttcgttgtatcattccaaatcacgagaagagggctggaaaattggatccacacctagtcctagatcagcttcgctgtaatggtgtcctggaagggatccgaatctgtcgccagggcttccctaaccgaatagttttccaggaattcagacagagatatgagatcctaactccaaatgctattcctaaaggttttatggatggtaaacaggcctgtgaacgaatgatccgggctttagaattggacccaaacttgtacagaattggacagagcaagatatttttcagagctggagttctggcacacttagaggaagaaagagatttaaaaatcaccgatatcattatcttcttccaggccgtttgcagaggttacctggccagaaaggcctttgccaagaagcagcagcaactaagtgccttaaaggtcttgcagcggaactgtgccgcgtacctgaaattacggcactggcagtggtggcgagtcttcacaaaggtgaagccgcttctacaagtgactcgccaggaggaagaacttcaggccaaagatgaagagctgttgaaggtgaaggagaagcagacgaaggtggaaggagagctggaggagatggagcggaagcaccagcagcttttagaagagaagaatatccttgcagaacaactacaagcagagactgagctctttgctgaagcagaagagatgagggcaagacttgctgctaaaaagcaggaattagaagagattctacatgacttggagtctagggttgaagaagaagaagaaagaaaccaaatcctccaaaatgaaaagaaaaaaatgcaagcacatattcaggacctggaagaacagctagacgaggaggaaggggctcggcaaaagctgcagctggaaaaggtgacagcagaggccaagatcaagaagatggaagaggagattctgcttctcgaggaccaaaattccaagttcatcaaagaaaagaaactcatggaagatcgcattgctgagtgttcctctcagctggctgaagaggaagaaaaggcgaaaaacttggccaaaatcaggaataagcaagaagtgatgatctcagatttagaagaacgcttaaagaaggaagaaaagactcgtcaggaactggaaaaggccaaaagaaaactcgacggggagacgaccgacctgcaggaccagatcgcagagctgcaggcgcagattgatgagctcaagctgcagctggccaagaaggaggaggagctgcagggcgcactggccagaggtgatgatgaaacactccataagaacaatgcccttaaagttgtgcgagagctacaagcccaaattgctgaacttcaggaagactttgaatccgagaaggcttcacggaacaaggccgaaaagcagaaaagggacttgagtgaggaactggaagctctgaaaacagagctggaggacacgctggacaccacggcagcccagcaggaactacgtacaaaacgtgaacaagaagtggcagagctgaagaaagctcttgaggaggaaactaagaaccatgaagctcaaatccaggacatgagacaaagacacgcaacagccctggaggagctctcagagcagctggaacaggccaagcggttcaaagcaaatctagagaagaacaagcagggcctggagacagataacaaggagctggcgtgtgaggtgaaggtcctgcagcaggtcaaggctgagtctgagcacaagaggaagaagctcgacgcgcaggtccaggagctccatgccaaggtctctgaaggcgacaggctcagggtggagctggcggagaaagcaagtaagctgcagaatgagctagataatgtctccacccttctggaagaagcagagaagaagggtattaaatttgctaaggatgcagctagtcttgagtctcaactacaggatacacaggagcttcttcaggaggagacacgccagaaactaaacctgagcagtcggatccggcagctggaagaggagaagaacagtcttcaggagcagcaggaggaggaggaggaggccaggaagaacctggagaagcaagtgctggccctgcagtcccagttggctgataccaagaagaaagtagatgacgacctgggaacaattgaaagtctggaagaagccaagaagaagcttctgaaggacgcggaggccctgagccagcgcctggaggagaaggcactggcgtatgacaaactggagaagaccaagaaccgcctgcagcaggagctggacgacctcacggtggacctggaccaccagcgccaggtcgcctccaacttggagaagaagcagaagaagtttgaccagctgttagcagaagagaagagcatctctgctcgctatgccgaagagcgggaccgggccgaagccgaggccagagagaaagaaaccaaagccctgtcactggcccgggccctcgaggaagccctggaggccaaggaggagtttgagaggcagaacaagcagctccgagcagacatggaagacctcatgagctccaaagatgatgtgggaaaaaacgttcacgaacttgaaaaatccaaacgggccctagagcagcaggtggaggaaatgaggacccagctggaggagctggaagacgaactccaggccacggaagatgccaagcttcgtctggaggtcaacatgcaggccatgaaggcgcagttcgagagagacctgcaaaccagggatgagcagaatgaagagaagaagcggctgctgatcaaacaggtgcgggagctcgaggcggagctggaggatgagaggaaacagcgggcgcttgctgtagcttcaaagaaaaagatggagatagacctgaaggacctcgaagcccaaatcgaggctgcgaacaaagctcgggatgaggtgattaagcagctccgcaagctccaggctcagatgaaggattaccaacgtgaattagaagaagctcgtgcatccagagatgagatttttgctcaatccaaagagagtgaaaagaaattgaagagtctggaagcagaaatccttcaattgcaggaggaacttgcctcatctgagcgagcccgccgacacgccgagcaggagagagatgagctggcggacgagatcaccaacagcgcctctggcaagtccgcgctgctggatgagaagcggcgtctggaagctcggatcgcacagctggaggaggagctggaagaggagcagagcaacatggagctgctcaacgaccgcttccgcaagaccactctacaggtggacacactgaacgccgagctagcagccgagcgcagcgccgcccagaagagtgacaatgcacgccagcaactggagcggcagaacaaggagctgaaggccaagctgcaggaactcgagggtgctgtcaagtctaagttcaaggccaccatctcagccctggaggccaagattgggcagctggaggagcagcttgagcaggaagccaaggaacgagcagccgccaacaaattagtccgtcgcactgagaagaagctgaaagaaatcttcatgcaggttgaggatgagcgtcgacacgcggaccagtataaagagcagatggagaaggccaacgctcggatgaagcagcttaaacgccagctggaggaagcagaagaagaagcgacgcgtgccaacgcatctcggcgtaaactccagcgggaactggatgatgccaccgaggccaacgagggcctgagccgcgaggtcagcaccctgaagaaccggctgaggcggggtggccccatcagcttctcttccagccgatctggccggcgccagctgcaccttgaaggagcttccctggagctctccgacgatgacacagaaagtaagaccagtgatgtcaacgagacgcagccaccccagtcagagtaaagttgcaggaagccagaggaggcaatacagtgggacagttaggaatgcacccggggcctcctgcagatttcggaaattggcaagctacgggattccttcctgaaagatcaactgtgtcttaaggctctccagcctatgcatactgtatcctgcttcagacttaggtacaattgctcccctttttatatacagacacacacaggacacatatattaaacagattgtttcaacaagaacaaaacaaaaaaaaaaaaacaaaagaacaaaaaaaacaagaacaaaaaaaggggggggggcccacaaaaagctccccccgggggggccccaagtatgcggcgccccccactatgttgtggacaacagcaggggcacccccaataaggagagagggtgcgaatataatacacgcgaaccggacgcgcggcccgcgcgcgagctaaaccaacagagacttgccacgacgtgcgcaacaaccaagcgcgccataccgaggggacacccccacgtggagaaagagaaccacccataatccacggcgggggggcggccccacactggggggcgacgcagatcgagt

SEQ ID NO: 435239 - DNA, 6199 bp, Homo sapiens
agcagtgctaaaggagcccggcggaggcagcggtgggtttgggactgaggcgctggatctgtggtcgcggctggggacgtgcgcccgcgccaccatcttcggctgaagaggcaattgcttttggatcgttccatttacaatggcgcagagaactggactcgaggatccagagaggtatctctttgtggacagggctgtcatctacaaccctgccactcaagctgattggacagctaaaaagctagtgtggattccatcagaacgccatggttttgaggcagctagtatcaaagaagaacggggagatgaagttatggtggagttggcagagaatggaaagaaagcaatggtcaacaaagatgatattcagaagatgaacccacctaagttttccaaggtggaggatatggcagaattgacatgcttgaatgaagcttccgttttacataatctgaaggatcgctactattcaggactaatctatacttattctggactcttctgtgtagttataaacccttacaagaatcttccaatttactctgagaatattattgaaatgtacagagggaagaagcgtcatgagatgcctccacacatctatgctatatctgaatctgcttacagatgcatgcttcaagatcgtgaggaccagtcaattctttgcacgggtgagtcaggtgctgggaagacagaaaatacaaagaaagttattcagtaccttgcccatgttgcttcttcacataaaggaagaaaggaccataatattcctggggaacttgaacggcagcttttgcaagcaaatccaattctggaatcatttggaaatgcgaagactgtgaaaaatgataactcatctcgttttggcaaatttattcggatcaactttgatgtaactggctatatcgttggggccaacattgaaacataccttctggaaaagtctcgtgctgttcgtcaagcaaaagatgaacgtacttttcatatcttttaccagttgttatctggagcaggagaacacctaaagtctgatttgcttcttgaaggatttaataactacaggtttctctccaatggctatattcctattccgggacagcaagacaaagataatttccaggagaccatggaagcaatgcacataatgggcttctcccatgaagagattctgtcaatgcttaaagtagtatcttcagtgctacagtttggaaatatttctttcaaaaaggagagaaatactgatcaagcttccatgccagaaaatacagttgcgcagaagctctgccatcttcttgggatgaatgtgatggagtttactcgggccatcctgactccccggatcaaggtcggccgagactatgtgcaaaaagcccagaccaaagaacaggcagattttgcagtagaagcattggcaaaagctacctatgagcggctctttcgctggctcgttcatcgcatcaataaagctctggataggaccaaacgtcagggagcatctttcattggaatcctggatattgctggatttgaaatttttgagctgaactcctttgaacaactttgcatcaactacaccaatgagaagctgcagcagctgttcaaccacaccatgtttatcctagaacaagaggaataccagcgcgaaggcatcgagtggaacttcatcgatttcgggctggatctgcagccatgcatcgacctaatagagagacctgcgaaccctcctggtgtactggcccttttggatgaagaatgctggttccctaaagccacagataaaacctttgttgaaaaactggttcaagagcaaggttcccactccaagtttcagaaacctcgacaattaaaagacaaagctgatttttgcattatacattatgcagggaaggtggactataaggcagatgagtggctgatgaagaatatggaccccctgaatgacaacgtggccacccttttgcaccagtcatcagacagatttgtggcagagctttggaaagatgtggaccgtatcgtgggtctggatcaagtcactggtatgactgagacagcttttggctccgcatataaaaccaagaagggcatgtttcgtaccgttgggcaactctacaaagaatctctcaccaagctgatggcaactctccgaaacaccaaccctaactttgttcgttgtatcattccaaatcacgagaagagggctggaaaattggatccacacctagtcctagatcagcttcgctgtaatggtgtcctggaagggatccgaatctgtcgccagggcttccctaaccgaatagttttccaggaattcagacagagatatgagatcctaactccaaatgctattcctaaaggttttatggatggtaaacaggcctgtgaacgaatgatccgggctttagaattggacccaaacttgtacagaattggacagagcaagatatttttcagagctggagttctggcacacttagaggaagaaagagatttaaaaatcaccgatatcattatcttcttccaggccgtttgcagaggttacctggccagaaaggcctttgccaagaagcagcagcaactaagtgccttaaaggtcttgcagcggaactgtgccgcgtacctgaaattacggcactggcagtggtggcgagtcttcacaaaggtgaagccgcttctacaagtgactcgccaggaggaagaacttcaggccaaagatgaagagctgttgaaggtgaaggagaagcagacgaaggtggaaggagagctggaggagatggagcggaagcaccagcagcttttagaagagaagaatatccttgcagaacaactacaagcagagactgagctctttgctgaagcagaagagatgagggcaagacttgctgctaaaaagcaggaattagaagagattctacatgacttggagtctagggttgaagaagaagaagaaagaaaccaaatcctccaaaatgaaaagaaaaaaatgcaagcacatattcaggacctggaagaacagctagacgaggaggaaggggctcggcaaaagctgcagctggaaaaggtgacagcagaggccaagatcaagaagatggaagaggagattctgcttctcgaggaccaaaattccaagttcatcaaagaaaagaaactcatggaagatcgcattgctgagtgttcctctcagctggctgaagaggaagaaaaggcgaaaaacttggccaaaatcaggaataagcaagaagtgatgatctcagatttagaagaacgcttaaagaaggaagaaaagactcgtcaggaactggaaaaggccaaaagaaaactcgacggggagacgaccgacctgcaggaccagatcgcagagctgcaggcgcagattgatgagctcaagctgcagctggccaagaaggaggaggagctgcagggcgcactggccagaggtgatgatgaaacactccataagaacaatgcccttaaagttgtgcgagagctacaagcccaaattgctgaacttcaggaagactttgaatccgagaaggcttcacggaacaaggccgaaaagcagaaaagggacttgagtgaggaactggaagctctgaaaacagagctggaggacacgctggacaccacggcagcccagcaggaactacgtacaaaacgtgaacaagaagtggcagagctgaagaaagctcttgaggaggaaactaagaaccatgaagctcaaatccaggacatgagacaaagacacgcaacagccctggaggagctctcagagcagctggaacaggccaagcggttcaaagcaaatctagagaagaacaagcagggcctggagacagataacaaggagctggcgtgtgaggtgaaggtcctgcagcaggtcaaggctgagtctgagcacaagaggaagaagctcgacgcgcaggtccaggagctccatgccaaggtctctgaaggcgacaggctcagggtggagctggcggagaaagcaagtaagctgcagaatgagctagataatgtctccacccttctggaagaagcagagaagaagggtattaaatttgctaaggatgcagctagtcttgagtctcaactacaggatacacaggagcttcttcaggaggagacacgccagaaactaaacctgagcagtcggatccggcagctggaagaggagaagaacagtcttcaggagcagcaggaggaggaggaggaggccaggaagaacctggagaagcaagtgctggccctgcagtcccagttggctgataccaagaagaaagtagatgacgacctgggaacaattgaaagtctggaagaagccaagaagaagcttctgaaggacgcggaggccctgagccagcgcctggaggagaaggcactggcgtatgacaaactggagaagaccaagaaccgcctgcagcaggagctggacgacctcacggtggacctggaccaccagcgccaggtcgcctccaacttggagaagaagcagaagaagtttgaccagctgttagcagaagagaagagcatctctgctcgctatgccgaagagcgggaccgggccgaagccgaggccagagagaaagaaaccaaagccctgtcactggcccgggccctcgaggaagccctggaggccaaggaggagtttgagaggcagaacaagcagctccgagcagacatggaagacctcatgagctccaaagatgatgtgggaaaaaacgttcacgaacttgaaaaatccaaacgggccctagagcagcaggtggaggaaatgaggacccagctggaggagctggaagacgaactccaggccacggaagatgccaagcttcgtctggaggtcaacatgcaggccatgaaggcgcagttcgagagagacctgcaaaccagggatgagcagaatgaagagaagaagcggctgctgatcaaacaggtgcgggagctcgaggcggagctggaggatgagaggaaacagcgggcgcttgctgtagcttcaaagaaaaagatggagatagacctgaaggacctcgaagcccaaatcgaggctgcgaacaaagctcgggatgaggtgattaagcagctccgcaagctccaggctcagatgaaggattaccaacgtgaattagaagaagctcgtgcatccagagatgagatttttgctcaatccaaagagagtgaaaagaaattgaagagtctggaagcagaaatccttcaattgcaggaggaacttgcctcatctgagcgagcccgccgacacgccgagcaggagagagatgagctggcggacgagatcaccaacagcgcctctggcaagtccgcgctgctggatgagaagcggcgtctggaagctcggatcgcacagctggaggaggagctggaagaggagcagagcaacatggagctgctcaacgaccgcttccgcaagaccactctacaggtggacacactgaacgccgagctagcagccgagcgcagcgccgcccagaagagtgacaatgcacgccagcaactggagcggcagaacaaggagctgaaggccaagctgcaggaactcgagggtgctgtcaagtctaagttcaaggccaccatctcagccctggaggccaagattgggcagctggaggagcagcttgagcaggaagccaaggaacgagcagccgccaacaaattagtccgtcgcactgagaagaagctgaaagaaatcttcatgcaggttgaggatgagcgtcgacacgcggaccagtataaagagcagatggagaaggccaacgctcggatgaagcagcttaaacgccagctggaggaagcagaagaagaagcgacgcgtgccaacgcatctcggcgtaaactccagcgggaactggatgatgccaccgaggccaacgagggcctgagccgcgaggtcagcaccctgaagaaccggctgaggctgaggtgagcaggcatgcggccccgagctgacaggcagctgctttgtgggttagcttaggctcggggtgcagctggtcagaggaagtttacttagatccatacccagtgacccattctttctcccgaaccacttcatttaagatttctgacctttatagtcgtccttggggagaataaaagaggaggcggccctattcattgccagtcactagaggaccacactaatccaccacaccaggcgctcctccagctcctcgtcatacttcttctc

SEQ ID NO: 435240 - DNA, 5430 bp, Homo sapiens
agcagtgctaaaggagcccggcggaggcagcggtgggtttgggactgaggcgctggatctgtggtcgcggctggggacgtgcgcccgcgccaccatcttcggctgaagaggcaattgcttttggatcgttccatttacaatggcgcagagaactggactcgaggatccagagaggtatctctttgtggacagggctgtcatctacaaccctgccactcaagctgattggacagctaaaaagctagtgtggattccatcagaacgccatggttttgaggcagctagtatcaaagaagaacggggagatgaagttatggtggagttggcagagaatggaaagaaagcaatggtcaacaaagatgatattcagaagatgaacccacctaagttttccaaggtggaggatatggcagaattgacatgcttgaatgaagcttccgttttacataatctgaaggatcgctactattcaggactaatctatacttattctggactcttctgtgtagttataaacccttacaagaatcttccaatttactctgagaatattattgaaatgtacagagggaagaagcgtcatgagatgcctccacacatctatgctatatctgaatctgcttacagatgcatgcttcaagatcgtgaggaccagtcaattctttgcacgggtgagtcaggtgctgggaagacagaaaatacaaagaaagttattcagtaccttgcccatgttgcttcttcacataaaggaagaaaggaccataatattcctggggaacttgaacggcagcttttgcaagcaaatccaattctggaatcatttggaaatgcgaagactgtgaaaaatgataactcatctcgttttggcaaatttattcggatcaactttgatgtaactggctatatcgttggggccaacattgaaacataccttctggaaaagtctcgtgctgttcgtcaagcaaaagatgaacgtacttttcatatcttttaccagttgttatctggagcaggagaacacctaaagtctgatttgcttcttgaaggatttaataactacaggtttctctccaatggctatattcctattccgggacagcaagacaaagataatttccaggagaccatggaagcaatgcacataatgggcttctcccatgaagagattctgtcaatgcttaaagtagtatcttcagtgctacagtttggaaatatttctttcaaaaaggagagaaatactgatcaagcttccatgccagaaaatacagttgcgcagaagctctgccatcttcttgggatgaatgtgatggagtttactcgggccatcctgactccccggatcaaggtcggccgagactatgtgcaaaaagcccagaccaaagaacaggcagattttgcagtagaagcattggcaaaagctacctatgagcggctctttcgctggctcgttcatcgcatcaataaagctctggataggaccaaacgtcagggagcatctttcattggaatcctggatattgctggatttgaaatttttgagctgaactcctttgaacaactttgcatcaactacaccaatgagaagctgcagcagctgttcaaccacaccatgtttatcctagaacaagaggaataccagcgcgaaggcatcgagtggaacttcatcgatttcgggctggatctgcagccatgcatcgacctaatagagagacctgcgaaccctcctggtgtactggcccttttggatgaagaatgctggttccctaaagccacagataaaacctttgttgaaaaactggttcaagagcaaggttcccactccaagtttcagaaacctcgacaattaaaagacaaagctgatttttgcattatacattatgcagggaaggtggactataaggcagatgagtggctgatgaagaatatggaccccctgaatgacaacgtggccacccttttgcaccagtcatcagacagatttgtggcagagctttggaaagatgtggaccgtatcgtgggtctggatcaagtcactggtatgactgagacagcttttggctccgcatataaaaccaagaagggcatgtttcgtaccgttgggcaactctacaaagaatctctcaccaagctgatggcaactctccgaaacaccaaccctaactttgttcgttgtatcattccaaatcacgagaagagggctggaaaattggatccacacctagtcctagatcagcttcgctgtaatggtgtcctggaagggatccgaatctgtcgccagggcttccctaaccgaatagttttccaggaattcagacagagatatgagatcctaactccaaatgctattcctaaaggttttatggatggtaaacaggcctgtgaacgaatgatccgggctttagaattggacccaaacttgtacagaattggacagagcaagatatttttcagagctggagttctggcacacttagaggaagaaagagatttaaaaatcaccgatatcattatcttcttccaggccgtttgcagaggttacctggccagaaaggcctttgccaagaagcagcagcaactaagtgccttaaaggtcttgcagcggaactgtgccgcgtacctgaaattacggcactggcagtggtggcgagtcttcacaaaggtgaagccgcttctacaagtgactcgccaggaggaagaacttcaggccaaagatgaagagctgttgaaggtgaaggagaagcagacgaaggtggaaggagagctggaggagatggagcggaagcaccagcagcttttagaagagaagaatatccttgcagaacaactacaagcagagactgagctctttgctgaagcagaagagatgagggcaagacttgctgctaaaaagcaggaattagaagagattctacatgacttggagtctagggttgaagaagaagaagaaagaaaccaaatcctccaaaatgaaaagaaaaaaatgcaagcacatattcaggacctggaagaacagctagacgaggaggaaggggctcggcaaaagctgcagctggaaaaggtgacagcagaggccaagatcaagaagatggaagaggagattctgcttctcgaggaccaaaattccaagttcatcaaagaaaagaaactcatggaagatcgcattgctgagtgttcctctcagctggctgaagaggaagaaaaggcgaaaaacttggccaaaatcaggaataagcaagaagtgatgatctcagatttagaagaacgcttaaagaaggaagaaaagactcgtcaggaactggaaaaggccaaaagaaaactcgacggggagacgaccgacctgcaggaccagatcgcagagctgcaggcgcagattgatgagctcaagctgcagctggccaagaaggaggaggagctgcagggcgcactggccagaggtgatgatgaaacactccataagaacaatgcccttaaagttgtgcgagagctacaagcccaaattgctgaacttcaggaagactttgaatccgagaaggcttcacggaacaaggccgaaaagcagaaaagggacttgagtgaggaactggaagctctgaaaacagagctggaggacacgctggacaccacggcagcccagcaggaactacgtacaaaacgtgaacaagaagtggcagagctgaagaaagctcttgaggaggaaactaagaaccatgaagctcaaatccaggacatgagacaaagacacgcaacagccctggaggagctctcagagcagctggaacaggccaagcggttcaaagcaaatctagagaagaacaagcagggcctggagacagataacaaggagctggcgtgtgaggtgaaggtcctgcagcaggtcaaggctgagtctgagcacaagaggaagaagctcgacgcgcaggtccaggagctccatgccaaggtctctgaaggcgacaggctcagggtggagctggcggagaaagcaagtaagctgcagaatgagctagataatgtctccacccttctggaagaagcagagaagaagggtattaaatttgctaaggatgcagctagtcttgagtctcaactacaggatacacaggagcttcttcaggaggagacacgccagaaactaaacctgagcagtcggatccggcagctggaagaggagaagaacagtcttcaggagcagcaggaggaggaggaggaggccaggaagaacctggagaagcaagtgctggccctgcagtcccagttggctgataccaagaagaaagtagatgacgacctgggaacaattgaaagtctggaagaagccaagaagaagcttctgaaggacgcggaggccctgagccagcgcctggaggagaaggcactggcgtatgacaaactggagaagaccaagaaccgcctgcagcaggagctggacgacctcacggtggacctggaccaccagcgccaggtcgcctccaacttggagaagaagcagaagaagtttgaccagctgttagcagaagagaagagcatctctgctcgctatgccgaagagcgggaccgggccgaagccgaggccagagagaaagaaaccaaagccctgtcactggcccgggccctcgaggaagccctggaggccaaggaggagtttgagaggcagaacaagcagctccgagcagacatggaagacctcatgagctccaaagatgatgtgggaaaaaacgttcacgaacttgaaaaatccaaacgggccctagagcagcaggtggaggaaatgaggacccagctggaggagctggaagacgaactccaggccacggaagatgccaagcttcgtctggaggtcaacatgcaggccatgaaggcgcagttcgagagagacctgcaaaccagggatgagcagaatgaagagaagaagcggctgctgatcaaacaggtgcgggagctcgaggcggagctggaggatgagaggaaacagcgggcgcttgctgtagcttcaaagaaaaagatggagatagacctgaaggacctcgaagcccaaatcgaggctgcgaacaaagctcgggatgaggtgattaagcagctccgcaagctccaggctcagatgaaggattaccaacgtgaattagaagaagctcgtgcatccagagatgagatttttgctcaatccaaagagagtctccgtcgaactagttcgacggagactctctgtcagccccagacctttcttattcacttgacatgatcaaaacggaacctctgcttcctgcccacacccctcccactatcgcagatgttaagtgtctccatctcaataaacggcaccaccattcagtagttgctcaggcaatcttcgggtccttacattttattcctctctccccccacatctaatacagtaggctgtcttgttggggagagagtctccgtcgaact

SEQ ID NO: 435241 - DNA, 2887 bp, Homo sapiens
agcagtgctaaaggagcccggcggaggcagcggtgggtttgggactgaggcgctggatctgtggtcgcggctggggacgtgcgcccgcgccaccatcttcggctgaagaggcaattgcttttggatcgttccatttacaatggcgcagagaactggactcgaggatccagagaggtatctctttgtggacagggctgtcatctacaaccctgccactcaagctgattggacagctaaaaagctagtgtggattccatcagaacgccatggttttgaggcagctagtatcaaagaagaacggggagatgaagttatggtggagttggcagagaatggaaagaaagcaatggtcaacaaagatgatattcagaagatgaacccacctaagttttccaaggtggaggatatggcagaattgacatgcttgaatgaagcttccgttttacataatctgaaggatcgctactattcaggactaatctatacttattctggactcttctgtgtagttataaacccttacaagaatcttccaatttactctgagaatattattgaaatgtacagagggaagaagcgtcatgagatgcctccacacatctatgctatatctgaatctgcttacagatgcatgcttcaagatcgtgaggaccagtcaattctttgcacgggtgagtcaggtgctgggaagacagaaaatacaaagaaagttattcagtaccttgcccatgttgcttcttcacataaaggaagaaaggaccataatattcctggggaacttgaacggcagcttttgcaagcaaatccaattctggaatcatttggaaatgcgaagactgtgaaaaatgataactcatctcgttttggcaaatttattcggatcaactttgatgtaactggctatatcgttggggccaacattgaaacataccttctggaaaagtctcgtgctgttcgtcaagcaaaagatgaacgtacttttcatatcttttaccagttgttatctggagcaggagaacacctaaagtctgatttgcttcttgaaggatttaataactacaggtttctctccaatggctatattcctattccgggacagcaagacaaagataatttccaggagaccatggaagcaatgcacataatgggcttctcccatgaagagattctgtcaatgcttaaagtagtatcttcagtgctacagtttggaaatatttctttcaaaaaggagagaaatactgatcaagcttccatgccagaaaatacagttgcgcagaagctctgccatcttcttgggatgaatgtgatggagtttactcgggccatcctgactccccggatcaaggtcggccgagactatgtgcaaaaagcccagaccaaagaacaggcagattttgcagtagaagcattggcaaaagctacctatgagcggctctttcgctggctcgttcatcgcatcaataaagctctggataggaccaaacgtcagggagcatctttcattggaatcctggatattgctggatttgaaatttttgagctgaactcctttgaacaactttgcatcaactacaccaatgagaagctgcagcagctgttcaaccacaccatgtttatcctagaacaagaggaataccagcgcgaaggcatcgagtggaacttcatcgatttcgggctggatctgcagccatgcatcgacctaatagagagacctgcgaaccctcctggtgtactggcccttttggatgaagaatgctggttccctaaagccacagataaaacctttgttgaaaaactggttcaagagcaaggttcccactccaagtttcagaaacctcgacaattaaaagacaaagctgatttttgcattatacattatgcagggaaggtggactataaggcagatgagtggctgatgaagaatatggaccccctgaatgacaacgtggccacccttttgcaccagtcatcagacagatttgtggcagagctttggaaagatgtggaccgtatcgtgggtctggatcaagtcactggtatgactgagacagcttttggctccgcatataaaaccaagaagggcatgtttcgtaccgttgggcaactctacaaagaatctctcaccaagctgatggcaactctccgaaacaccaaccctaactttgttcgttgtatcattccaaatcacgagaagagggctggaaaattggatccacacctagtcctagatcagcttcgctgtaatggtgtcctggaagggatccgaatctgtcgccagggcttccctaaccgaatagttttccaggaattcagacagagatatgagatcctaactccaaatgctattcctaaaggttttatggatggtaaacaggcctgtgaacgaatgatccgggctttagaattggacccaaacttgtacagaattggacagagcaagatatttttcagagctggagttctggcacacttagaggaagaaagagatttaaaaatcaccgatatcattatcttcttccaggccgtttgcagaggttacctggccagaaaggcctttgccaagaagcagcagcaactaagtgccttaaaggtcttgcagcggaactgtgccgcgtacctgaaattacggcactggcagtggtggcgagtcttcacaaaggtgaagccgcttctacaagtgactcgccagtgaaggttatcggatcatcccgggcggcacctacaaccagggccagaacggttttgatctggtgttccaggggccgagcaatgcggtgtatctgctggaggtcaagcacgtctcaacagccagcggtggccgtttttccaatgtgaacatggcgcgggtgatcccgcgaagaagaaaatgatccgggtcgagctcata

SEQ ID NO: 435242 - DNA, 2661 bp, Homo sapiens
agcagtgctaaaggagcccggcggaggcagcggtgggtttgggactgaggcgctggatctgtggtcgcggctggggacgtgcgcccgcgccaccatcttcggctgaagaggcaattgcttttggatcgttccatttacaatggcgcagagaactggactcgaggatccagagaggtatctctttgtggacagggctgtcatctacaaccctgccactcaagctgattggacagctaaaaagctagtgtggattccatcagaacgccatggttttgaggcagctagtatcaaagaagaacggggagatgaagttatggtggagttggcagagaatggaaagaaagcaatggtcaacaaagatgatattcagaagatgaacccacctaagttttccaaggtggaggatatggcagaattgacatgcttgaatgaagcttccgttttacataatctgaaggatcgctactattcaggactaatctatacttattctggactcttctgtgtagttataaacccttacaagaatcttccaatttactctgagaatattattgaaatgtacagagggaagaagcgtcatgagatgcctccacacatctatgctatatctgaatctgcttacagatgcatgcttcaagatcgtgaggaccagtcaattctttgcacgggtgagtcaggtgctgggaagacagaaaatacaaagaaagttattcagtaccttgcccatgttgcttcttcacataaaggaagaaaggaccataatattcctggggaacttgaacggcagcttttgcaagcaaatccaattctggaatcatttggaaatgcgaagactgtgaaaaatgataactcatctcgttttggcaaatttattcggatcaactttgatgtaactggctatatcgttggggccaacattgaaacataccttctggaaaagtctcgtgctgttcgtcaagcaaaagatgaacgtacttttcatatcttttaccagttgttatctggagcaggagaacacctaaagtctgatttgcttcttgaaggatttaataactacaggtttctctccaatggctatattcctattccgggacagcaagacaaagataatttccaggagaccatggaagcaatgcacataatgggcttctcccatgaagagattctgtcaatgcttaaagtagtatcttcagtgctacagtttggaaatatttctttcaaaaaggagagaaatactgatcaagcttccatgccagaaaatacagttgcgcagaagctctgccatcttcttgggatgaatgtgatggagtttactcgggccatcctgactccccggatcaaggtcggccgagactatgtgcaaaaagcccagaccaaagaacaggcagattttgcagtagaagcattggcaaaagctacctatgagcggctctttcgctggctcgttcatcgcatcaataaagctctggataggaccaaacgtcagggagcatctttcattggaatcctggatattgctggatttgaaatttttgagctgaactcctttgaacaactttgcatcaactacaccaatgagaagctgcagcagctgttcaaccacaccatgtttatcctagaacaagaggaataccagcgcgaaggcatcgagtggaacttcatcgatttcgggctggatctgcagccatgcatcgacctaatagagagacctgcgaaccctcctggtgtactggcccttttggatgaagaatgctggttccctaaagccacagataaaacctttgttgaaaaactggttcaagagcaaggttcccactccaagtttcagaaacctcgacaattaaaagacaaagctgatttttgcattatacattatgcagggaaggtggactataaggcagatgagtggctgatgaagaatatggaccccctgaatgacaacgtggccacccttttgcaccagtcatcagacagatttgtggcagagctttggaaagatgtggaccgtatcgtgggtctggatcaagtcactggtatgactgagacagcttttggctccgcatataaaaccaagaagggcatgtttcgtaccgttgggcaactctacaaagaatctctcaccaagctgatggcaactctccgaaacaccaaccctaactttgttcgttgtatcattccaaatcacgagaagagggctggaaaattggatccacacctagtcctagatcagcttcgctgtaatggtgtcctggaagggatccgaatctgtcgccagggcttccctaaccgaatagttttccaggaattcagacagagatatgagatcctaactccaaatgctattcctaaaggttttatggatggtaaacaggcctgtgaacgaatgatccgggctttagaattggacccaaacttgtacagaattggacagagcaagatatttttcagagctggagttctggcacacttagaggaagaaagagatttaaaaatcaccgatatcattatcttcttccaggccgtttgcagaggttacctggccagaaatactacgccaagaagcagcagcacgtgagtgatcaaaagttctaccataaggcctatggcggtgcgctcaactttctgcactggcagtggtggagtgatagctctaaagtc

SEQ ID NO: 435243 - DNA, 2444 bp, Homo sapiens
agcagtgctaaaggagcccggcggaggcagcggtgggtttgggactgaggcgctggatctgtggtcgcggctggggacgtgcgcccgcgccaccatcttcggctgaagaggcaattgcttttggatcgttccatttacaatggcgcagagaactggactcgaggatccagagaggtatctctttgtggacagggctgtcatctacaaccctgccactcaagctgattggacagctaaaaagctagtgtggattccatcagaacgccatggttttgaggcagctagtatcaaagaagaacggggagatgaagttatggtggagttggcagagaatggaaagaaagcaatggtcaacaaagatgatattcagaagatgaacccacctaagttttccaaggtggaggatatggcagaattgacatgcttgaatgaagcttccgttttacataatctgaaggatcgctactattcaggactaatctatacttattctggactcttctgtgtagttataaacccttacaagaatcttccaatttactctgagaatattattgaaatgtacagagggaagaagcgtcatgagatgcctccacacatctatgctatatctgaatctgcttacagatgcatgcttcaagatcgtgaggaccagtcaattctttgcacgggtgagtcaggtgctgggaagacagaaaatacaaagaaagttattcagtaccttgcccatgttgcttcttcacataaaggaagaaaggaccataatattcctggggaacttgaacggcagcttttgcaagcaaatccaattctggaatcatttggaaatgcgaagactgtgaaaaatgataactcatctcgttttggcaaatttattcggatcaactttgatgtaactggctatatcgttggggccaacattgaaacataccttctggaaaagtctcgtgctgttcgtcaagcaaaagatgaacgtacttttcatatcttttaccagttgttatctggagcaggagaacacctaaagtctgatttgcttcttgaaggatttaataactacaggtttctctccaatggctatattcctattccgggacagcaagacaaagataatttccaggagaccatggaagcaatgcacataatgggcttctcccatgaagagattctgtcaatgcttaaagtagtatcttcagtgctacagtttggaaatatttctttcaaaaaggagagaaatactgatcaagcttccatgccagaaaatacagttgcgcagaagctctgccatcttcttgggatgaatgtgatggagtttactcgggccatcctgactccccggatcaaggtcggccgagactatgtgcaaaaagcccagaccaaagaacaggcagattttgcagtagaagcattggcaaaagctacctatgagcggctctttcgctggctcgttcatcgcatcaataaagctctggataggaccaaacgtcagggagcatctttcattggaatcctggatattgctggatttgaaatttttgagctgaactcctttgaacaactttgcatcaactacaccaatgagaagctgcagcagctgttcaaccacaccatgtttatcctagaacaagaggaataccagcgcgaaggcatcgagtggaacttcatcgatttcgggctggatctgcagccatgcatcgacctaatagagagacctgcgaaccctcctggtgtactggcccttttggatgaagaatgctggttccctaaagccacagataaaacctttgttgaaaaactggttcaagagcaaggttcccactccaagtttcagaaacctcgacaattaaaagacaaagctgatttttgcattatacattatgcagggaaggtggactataaggcagatgagtggctgatgaagaatatggaccccctgaatgacaacgtggccacccttttgcaccagtcatcagacagatttgtggcagagctttggaaagatgtggaccgtatcgtgggtctggatcaagtcactggtatgactgagacagcttttggctccgcatataaaaccaagaagggcatgtttcgtaccgttgggcaactctacaaagaatctctcaccaagctgatggcaactctccgaaacaccaaccctaactttgttcgttgtatcattccaaatcacgagaagagggctggaaaattggatccacacctagtcctagatcagcttcgctgtaatggtgtcctggaagggatccgaatctgtcgccagggcttccctaaccgaatagttttccaggaattcagacagagatatgagatctactcaaatgctatcctaaggtttatggatggaacaggcctgtgaccgatgaccgggcttagattggccaacttgtcagattggcagacaggattttcaggctgggtctgcacct

SEQ ID NO: 435244 - DNA, 2190 bp, Homo sapiens
agcagtgctaaaggagcccggcggaggcagcggtgggtttgggactgaggcgctggatctgtggtcgcggctggggacgtgcgcccgcgccaccatcttcggctgaagaggcaattgcttttggatcgttccatttacaatggcgcagagaactggactcgaggatccagagaggtatctctttgtggacagggctgtcatctacaaccctgccactcaagctgattggacagctaaaaagctagtgtggattccatcagaacgccatggttttgaggcagctagtatcaaagaagaacggggagatgaagttatggtggagttggcagagaatggaaagaaagcaatggtcaacaaagatgatattcagaagatgaacccacctaagttttccaaggtggaggatatggcagaattgacatgcttgaatgaagcttccgttttacataatctgaaggatcgctactattcaggactaatctatacttattctggactcttctgtgtagttataaacccttacaagaatcttccaatttactctgagaatattattgaaatgtacagagggaagaagcgtcatgagatgcctccacacatctatgctatatctgaatctgcttacagatgcatgcttcaagatcgtgaggaccagtcaattctttgcacgggtgagtcaggtgctgggaagacagaaaatacaaagaaagttattcagtaccttgcccatgttgcttcttcacataaaggaagaaaggaccataatattcctggggaacttgaacggcagcttttgcaagcaaatccaattctggaatcatttggaaatgcgaagactgtgaaaaatgataactcatctcgttttggcaaatttattcggatcaactttgatgtaactggctatatcgttggggccaacattgaaacataccttctggaaaagtctcgtgctgttcgtcaagcaaaagatgaacgtacttttcatatcttttaccagttgttatctggagcaggagaacacctaaagtctgatttgcttcttgaaggatttaataactacaggtttctctccaatggctatattcctattccgggacagcaagacaaagataatttccaggagaccatggaagcaatgcacataatgggcttctcccatgaagagattctgtcaatgcttaaagtagtatcttcagtgctacagtttggaaatatttctttcaaaaaggagagaaatactgatcaagcttccatgccagaaaatacagttgcgcagaagctctgccatcttcttgggatgaatgtgatggagtttactcgggccatcctgactccccggatcaaggtcggccgagactatgtgcaaaaagcccagaccaaagaacaggcagattttgcagtagaagcattggcaaaagctacctatgagcggctctttcgctggctcgttcatcgcatcaataaagctctggataggaccaaacgtcagggagcatctttcattggaatcctggatattgctggatttgaaatttttgagctgaactcctttgaacaactttgcatcaactacaccaatgagaagctgcagcagctgttcaaccacaccatgtttatcctagaacaagaggaataccagcgcgaaggcatcgagtggaacttcatcgatttcgggctggatctgcagccatgcatcgacctaatagagagacctgcgaaccctcctggtgtactggcccttttggatgaagaatgctggttccctaaagccacagataaaacctttgttgaaaaactggttcaagagcaaggttcccactccaagtttcagaaacctcgacaattaaaagacaaagctgatttttgcattatacattatgcagggaaggtggactataaggcagatgagtggctgatgaagaatatggaccccctgaatgacaacgtggccacccttttgcaccagtcatcagacagatttgtggcagagctttggaaagatgttcacatactatgaaagaagtagactgcaagtatggagtgggaggagagaaaagattatgctagagacagcataagcaggaatgaaaattctacggaactccaaaggaagagatctctaaattcagtcctctttggcgttggggaatgctgacagtgttgaaatggacgggggaagcttggaggtag

SEQ ID NO: 435245 - DNA, 466 bp, Homo sapiens
ccatgccccatgtcctcacagctctaggaaacaggaatgcctgcttagtcctctgtacctcttagcaaccaccccatgcccgctctgtgcctaccccagcctttattacatggttaccgtattgtcttgggtttttccatcttggcttcatctacaccgagctcaggtcactggctgccttctcgcatgccctcgtagcagtcagtgggatggtttgtactaggtggtggtgtttaaagacccctttgaacaaaattcagctactgtggttttctgttgatagtaactgtttggtaacagagacctctacagagtaacagaagtttccactcacccgagtaaccagagccccccacttgagaacagtctgcctgttctgcgagcagatacttggatgtaacccagcataacccgatgttgtccattaggtgcgggagctcgaggcggagctggaggatgagaggaa

SEQ ID NO: 435246 - DNA, 595 bp, Homo sapiens
tattctggactcttctgtgtagttataaacccttacaagaatcttccaatttactctgagaatattattgaaatgtacagagggaagaagcgtcatgagatgcctccacacatctatgctatatctgaatctgcttacagatgcatgcttcaaggtaattggaaatatttgaatactaaatgctcagaatttcttaaatgtaatttactgttttttaatgtctcaatgtattctacaaaagttaaattttatttttttaaaattaataaaaaagtaatgtttattgtagaaaaattgagtttttaagattaaaacagacaacacagccattttctgtaagtatgataagtatgtttgttgctctaaaacaatacctcataaatttgtatgttaaaaagcatctagttttcatatacatttgattcccaccacaaggcggtctaaccaaagctcattatattaggttttaaaaccaataggaagaataataggaaaggtagatgctgcactggggaaagaaaaattgtaaagtattatttgtgatttaaatgcatgtaaaagggtgacaataaaagttaaaaagcatgtgttaagt

SEQ ID NO: 435247 - DNA, 493 bp, Homo sapiens
aaaacatatgctagtatttaaaactgatctaggtcagatgctaaagattaaaccatgaaactattgtttgcttgattaggctggaaaattggatccacacctagtcctagatcagcttcgctgtaatggtgtcctggaagggatccgaatctgtcgccagggcttccctaaccgaatagttttccaggaattcagacagaggtattgctaacttttactttttttgcttatgtatcagagtttatcttgatatgaattaaaacagtgataaaataaggaaatctttttccttgtcccctacatagtttgttttcttatatagcaaacatatagtgaggttctggaaaagggacaatccttactaccttgattattggtaggaagattgagtgcctactttataaaaagggagtgtgctaggaactgctatgggcgctgcaaagaaacatgccatgttttcagggccctgaagttagctttgagataaacatag

SEQ ID NO: 435248 - DNA, 818 bp, Homo sapiens
  misc_feature (644)..(644): n is a, c, g, or t
tatctttaacatgtattacccaacattttattgcctcttagagcaaaacacacagttagtagatacacatcgttcacaaatttctacaaaatacttcttggaatattctcttacagatatgagatcctaactccaaatgctattcctaaaggttttatggatggtaaacaggcctgtgaacgaatggtaaggttttcttgatctttttctggcttgtagatttaatctaatctttcttgtagttaaaaaaagtaaataaactctttctctcttagatccgggctttagaattggacccaaacttgtacagaattggacagagcaagatatttttcagagctggagttctggcacacttagaggaagaaagagatttaaaaatcaccgatatcattatcttcttccaggccgtttgcagaggttacctggccagaaagtgagtgggtattcacgaattaatcgttcactgaggaagtgcttgtgctagataagcattgcattttgacctggggtgcaagagtgtgtgagacatagtctgtccttacagaagttgctttatagtggcagagatagtcaggtaaatacatgaacattctaagtaatgggatgttgcaatacaaaaacacacaaggaggctgggcgtnggtggctcaggcctgtaatcccagcactttgggaggctgaagtgggcagatcacttgagctcaggagttcgagaccagccagggcttcatggcaaaaccccatctctactaaaaatacaaaaattagccaggcttggtagcatgcgcctgtagtcccagctacctgtgggagct

SEQ ID NO: 435249 - DNA, 447 bp, Homo sapiens
tgtacgacatgaattctttaatacaggtgtatttgttttggtgataaatgtaatggaagtgttgccctttacgacaaaaaaaacacaggagcttcttcaggaggagacacgccagaaactaaacctgagcagtcggatccggcagctggaagaggagaagaacagtcttcaggagcagcaggaggaggaggaggaggccaggaagaacctggagaagcaagtgctggccctgcagtcccaggtgtgcgtcctctttaggaggccgcggtggcctcgatgtgtgccttcagcagatcctggccctgctgtgctgggctgtctcagctccatttgggacagttaattaggtcgtactaaattaagcccattaaatggtttttcttgacccagccacatgctggttataatgctggaagcccttaaaataaggacctaggactgtgtcaa

SEQ ID NO: 435250 - DNA, 2913 bp, Homo sapiens
cctcccgagtacctgggactacaggcgcacaccatcacgcctggctaatttttaaatttttggcagacacaggatctcactatgttgcccaggctggtcttgaattcctgggctcaagcgatcctcctgcatcggcctcccaaagtgctgggattagaggcgtgaatcaccacgccctgccatggatccctttgaatggctgccagggcccaagagcctctgagcttccttccttatttgtaaatgacaaagatgagttgattctaagatgaagcctcagagggcaaggcagtaacaatagctaacactcagatgccagacgcagccttaagcgctttacatatgtttaatcttctgcatgacttatgacgcagatgtactgttatcatctttattttacagatgaggaaactgaggcacagtgaagtagcccgctcaagatgaatgattctgagtctgcacttctagggtcctaaaagtgtatgtttctaacattcctctaatgttctgtgcttccaactttgatattccgaaagttacttgatttctaagatcctaggattggaacatttgagaggacaaaacttctgagattggaatgtgtgttgtgcggaatctgccactgacggttctgactttctaagaaaacgagattaaaaaataatcaggccgagcatggtggctcacatctgtaatcctagcattttcggaggctgaggagggagaatcacttgagcccaggggttcaagaccagcctggacaacatagtgagacctttgtctcttaaaaaaaaacacacacacatcagtttggaccgggagtggtggtgtgagcctgtaatcccagcgctttgggaggcctaggaaggaggatcacttgaaaccagatgtttgagaccagcctgggcaacatggggaggctccatttctacaaaaaataaaaataaaaaattagccaggtgcggatgcacccttcttgtggtcgcagctactcgggaggctgaggtaggagaatccctgagctcaggagttggaggctgcagtgagccattacccttccactgcactccagcctgggggcaacaaagtgagaccctatctattaaagaaaaaaatcagtttgagcaaagaccccaggcggccgggaaaggtgttcgcttaagggcgaaagctaagaacctgcaaccttcccgtctctttcctaccacccgccgccgttaggaatcttcagatcccgctgtaaagaatggaggaaggaggagccatttatcctttaccaagatggcagcctcctggcaactccagtcactttataaatatggctgccacaggaagtacgtcacggaagagggtgggaaatctgcgcgcgcacgctgcaaaggggctttttgggacgccagtggctgagttcttcctttgacaagatggcggcaggaggcagtggcgttggtgggaagcgcagctcgaaaagcgatgccgattctggtttcctggggctgcggcccacttcggtggacccagcgctgaggcggcggcggcgaggcccaagaaataagaagcggggctggcggcggcttgctcaggagccgctggggctggaggttgaccagttcctggaagacgtgcggctacaggagcgcacgagcggtggcttgttgtcagaggccccaaatgaaaaactcttcttcgtggacactggctccaaggaaaaagggctgacaaagaagagaaccaaagtccagaagaagtcactgcttctcaagaaaccccttcgggttgacctcatcctcgagaacacatccaaagtccctgcccccaaagacgtcctcgcccaccaggtccccaacgccaagaagctcaggcggaaggagcagctatgggagaagctggccaagcagggcgagctgccccgggaggtgcgcagggcccaggcccggctcctcaacccttctgcaacaagggccaagcccgggccccaggacaccgtagagcggcccttctacgacctctgggcctcagacaaccccctggacaggccgttggttggccaggatgagtttttcctggagcagaccaagaagaaaggagtgaagcggcagcacgcctgcacaccaagccgtcccaggcgcccgccgtggaggtggcgcctgccggagcttcctacaatccatcctttgaagaccaccagaccctgctctcagcggcccacgaggtggagttgcagcggcagaaggaggcggagaagctggagcggcagctggccctgcccgccacggagcaggccgccacccaggagtccacattccaggagctgtgcgaggggctgctggaggagtcggatggtgagggggagccaggccagggcgaggggccggaggctggggatgccgaggtctgtcccacgcccgcccgcctggccaccacagagaagaagacggagcagcagcggcggcgggagaaggctgtgcacaggctgcgggtacagcaggccgcgttgcgggccgcccggctccggcaccaggagctgttccggctgcgcgggatcaaggcccaggtggccctgaggctggcggagctggcgcggcggcggaggcggcggcaggcgcggcgggaggctgaggctgacaagccccgaaggctgggacggctcaagtaccaggcacctgacatcgacgtgcagctgagctcggagctgacagactcgctcaggaccctgaagcccgagggcaacatccttcgagaccggttcaagagcttccagaggaggaatatgatcgagcctcgagagagagccaagttcaaacgcaagtacaaggtgaagctggtggagaagcgggcgttccgtgagatccagttgtagctgccatcagatgccggagactcgcccttcaataaaaaatctcttctagctga

SEQ ID NO: 435251 - DNA, 1508 bp, Homo sapiens
tttacggctatcgtcgcccacgcgtccgggaggcagtggcgttggtgggaagcgcagctcgaaaagcgatgccgattctggtttcctggggctgcggcccacttcggtggacccagcgctgaggcggcggcggcgaggcccaagaaataagaagcggggctggcggcggcttgctcaggagccgctggggctggaggttgaccagttcctggaagacgtgcggctacaggagcgcacgagcggtggcttgttgtcagaggccccaaatgaaaaactcttcttcgtggacactggctccaaggaaaaagggctgacaaagaagagaaccaaagtccagaagaagtcactgcttctcaagaaaccccttcgggttgacctcatcctcgagaacacatccaaagtccctgcccccaaagacgtcctcgcccaccaggtccccaacgccaagaagctcaggcggaaggagcagctatgggagaagctggccaagcagggcgagctgccccgggaggtgcgcagggcccaggcccggctcctcaacccttctgcaacaagggccaagcccgggccccaggacaccgtagagcggcccttctacgacctctgggcctcagacaaccccctggacaggccgttggttggccaggatgagtttttcctggagcagaccaagaagaaaggagtgaagcggcagcacgcctgcacaccaagccgtcccaggcgcccgccgtggaggtggcgcctgccggagcttcctacaatccatcctttgaagaccaccagaccctgctctcagcggcccacgaggtggagttgcagcggcagaaggaggcggagaagctggagcggcagctggccctgcccgccacggagcaggccgccacccaggagtccacattccaggagctgtgcgaggggctgctggaggagtcggatggtgagggggagccaggccagggcgaggggccggaggctggggatgccgaggtctgtcccacgcccgcccgcctggccaccacagagaagaagacggagcagcagcggcggcgggagaaggctgtgcacaggctgcgggtacagcaggccgcgttgcgggccgcccggctccggcaccaggagctgttccggctgcgcgggatcaaggcccaggtggccctgaggctggcggagctggcgcggcggcggaggcggcggcaggcgcggcgggaggctgaggctgacaagccccgaaggctgggacggctcaagtaccaggcacctgacatcgacgtgcagctgagctcggagctgacagactcgctcaggaccctgaagcccgagggcaacatccttcgagaccggttcaagagcttccagaggaggaatatgatcgagcctcgagagagagccaagttcaaacgcaagtacaaggtgaagctggtggagaagcgggcgttccgtgagatccagttgtagctgccatcagatgccggagactcgcccttcaataaaaaatctcttctagctga

SEQ ID NO: 435252 - DNA, 992 bp, Homo sapiens
caaaattacggctaggtacgaggcctgggttggaggcagtggcgttggtgggaagcgcagctcgaaaagcgatgccgattctggtttcctggggctgcggcccacttcggtggacccagcgctgaggcggcggcggcgaggcccaagaaataagaagcggggctggcggcggcttgctcaggagccgctggggctggaggttgaccagttcctggaagacgtgcggctacaggagcgcacgagcggtggcttgttgtcagaggccccaaatgaaaaactcttcttcgtggacactggctccaaggaaaaagggctgacaaagaagagaaccaaagtccagaagaagtcactgcttctcaagaaaccccttcgggttgacctcatcctcgagaacacatccaaagtccctgcccccaaagacgtcctcgcccaccaggtccccaacgccaagaagctcaggcggaaggagcagctatgggagaagctggccaagcagggcgagctgccccgggaggtgcgcagggcccaggcccggctcctcaacccttctgcaacaagggccaagcccgggccccaggacaccgtagagcggcccttctacgacctctgggcctcagacaaccccctggacaggccgttggttggccaggatgagtttttcctggagcagaccaagaagaaaggagtgaagcggcagcacgcctgcacaccaagccgtcccaggcgcccgccgtggaggtggcgcctgccggagcttcctacaatccatcctttgaagaccaccagaccctgctctcagcggcccacgaggtggagttgcagcggcagaaggaggcggagaagctggagcggcagctggccctgcccgccacggagcaggccgccacccagggcaccaggagccattcaggactggcagggtgacgcagaaccgaggagggggacagccggagcggcggagtggaaccaggtggcacaccgcgtgcccgaag

SEQ ID NO: 435253 - DNA, 5614 bp, Homo sapiens
  misc_feature (2752)..(2752): n is a, c, g, or t
  misc_feature (2779)..(2779): n is a, c, g, or t
  misc_feature (3763)..(3763): n is a, c, g, or t
cctcccgagtacctgggactacaggcgcacaccatcacgcctggctaatttttaaatttttggcagacacaggatctcactatgttgcccaggctggtcttgaattcctgggctcaagcgatcctcctgcatcggcctcccaaagtgctgggattagaggcgtgaatcaccacgccctgccatggatccctttgaatggctgccagggcccaagagcctctgagcttccttccttatttgtaaatgacaaagatgagttgattctaagatgaagcctcagagggcaaggcagtaacaatagctaacactcagatgccagacgcagccttaagcgctttacatatgtttaatcttctgcatgacttatgacgcagatgtactgttatcatctttattttacagatgaggaaactgaggcacagtgaagtagcccgctcaagatgaatgattctgagtctgcacttctagggtcctaaaagtgtatgtttctaacattcctctaatgttctgtgcttccaactttgatattccgaaagttacttgatttctaagatcctaggattggaacatttgagaggacaaaacttctgagattggaatgtgtgttgtgcggaatctgccactgacggttctgactttctaagaaaacgagattaaaaaataatcaggccgagcatggtggctcacatctgtaatcctagcattttcggaggctgaggagggagaatcacttgagcccaggggttcaagaccagcctggacaacatagtgagacctttgtctcttaaaaaaaaacacacacacatcagtttggaccgggagtggtggtgtgagcctgtaatcccagcgctttgggaggcctaggaaggaggatcacttgaaaccagatgtttgagaccagcctgggcaacatggggaggctccatttctacaaaaaataaaaataaaaaattagccaggtgcggatgcacccttcttgtggtcgcagctactcgggaggctgaggtaggagaatccctgagctcaggagttggaggctgcagtgagccattacccttccactgcactccagcctgggggcaacaaagtgagaccctatctattaaagaaaaaaatcagtttgagcaaagaccccaggcggccgggaaaggtgttcgcttaagggcgaaagctaagaacctgcaaccttcccgtctctttcctaccacccgccgccgttaggaatcttcagatcccgctgtaaagaatggaggaaggaggagccatttatcctttaccaagatggcagcctcctggcaactccagtcactttataaatatggctgccacaggaagtacgtcacggaagagggtgggaaatctgcgcgcgcacgctgcaaaggggctttttgggacgccagtggctgagttcttcctttgacaagatggcggcaggaggcagtggcgttggtgggaagcgcagctcgaaaagcgatgccgattctggtttcctggggctgcggcccacttcggtggacccagcgctgaggcggcggcggcgaggcccaagaaataagaagcggggctggcggcggcttgctcaggagccgctggggctggaggttgaccagttcctggaagacgtgcggctacaggagcgcacgagcggtggcttgttgtcagaggccccaaatgaaaaactcttcttcgtggacactggctccaaggaaaaagggctgacaaagaagagaaccaaagtccagaagaagtcactgcttctcaagaaaccccttcgggttgacctcatcctcgagaacacatccaaagtccctgcccccaaagacgtcctcgcccaccaggtccccaacgccaagaagctcaggcggaaggagcagctatgggagaagctggccaagcagggcgagctgccccgggaggtgcgcagggcccaggcccggctcctcaacccttctgcaacaagggccaagcccgggccccaggacaccgtagagcggcccttctacgacctctgggcctcagacaaccccctggacaggccgttggttggccaggatgagtttttcctggagcagaccaagaagaaaggagtgaagcggcagcacgcctgcacaccaagccgtcccaggcgcccgccgtggaggtggcgcctgccggagcttcctacaatccatcctttgaagaccaccaggtacactgccccgtccaggcctccctcctcagtgggctctgcctcttggtcaggccttcactagcttcctccctgtgctgggaactccaatgacccagacagccctgggcctgtccgcaacggggctcacggtccagtgcaagagacctgttcccagacagtgatgggcagagtggttggggctgggagcccagacggggcacctggcccagcctggggggtcaggaagggctcccgggaggaggggtcgcctgagccgaggcagaggctgagggaggggtttgcagtgggaggaggggagtgggttttccaggtggtgggaacagcactgcaaaggcacagagttgagagagaccgtggcgccttccaggaagcctgtggggcagagatgaaaaaggctgtggtgacacggtggcacactggcagccaagtgacagttatatatgggcgaggctagctcagcgatgggaaagtctagctggagccactgtgcatttagcgggcatctgttgagcacagatgctgtggacaaaggggacaaaaacccctcccttggccgggtgnggtgcctcacacctgtaatcccagcantttgggaggctgaggcgggcagatcattggaggtcaggagttggagaccagcctgaccaacatggtgaaaccctgtctctactaaatacagaaaattagcagggcatggcagcacgcatctgtggtcccaactgcttgggaggctgaggtgggaggattgcttgagcccaggaggtccaggctgcagtgagctatgatcgcaccacggcactgcagcctgtgtaacagagcgagactcaaaaaacaagcacaaccctccctcaaggaacagcccttctcatggggtcacgtgactggagagatgctgagatgtttgcggtagatgcaggacgcttgtccgaatcgttttcagcattcataagaaggagatagctagccaggaacagaggcagcttcctcatctggtagagaaaagtgtctgcggaaaaaagcaacagtgtgctcatggttgaaagcgtgagggtgccgctcactgccatctgttcctggaccagatgtgggagggggcgtggagatcagacattcgcttttagatttgtacagaactacttcgtagagataaaattcacttaaccatacggtcagcctagttagagtatgtgattcagtggcttttagtgaccattgtgtaaccatccccgcagtcaattttagaacattttcactgtccgtaaaggaaacctcacacatgtcagccatcacccccgcaattccctgtctcgtgtggtcttgggctgccaggcttcctgtctcagggaccagcccaccctgaccaattcacatagatgaaactgtgggccgggcatggtggctcacacctgtaatcccagcactttgggaggccgaggtaggtggaccacctgaggtcaggagttcaagaccagcctgaccaacatggagaaaccccatctctactaaagttacagaattagccgggtatggtggcacatgcctgtaatagtagctactcgggaggctgaggcnggagaatcgcttgaacccaggaggcgggggttgtggtgagctgagatcacaccattgcactccagtctgggcaacaagacagaaactctatctcaaaaaaaaaatgtgaagcgtgcaggtcagactgccttcacagacgtgcagagcaggtgtgagggcgagggtttgaggtgccctctggctctgtgcagggtgggtgtgctggtagacggggtgtggggaggaaagcctgggccggggcgggatccacgggcactggatgagggacagatgggaggtaagagggtctagtctcagtgtcccaggaggggttcagggacccatcctcactcccgcccctcagaccctgctctcagcggcccacgaggtggagttgcagcggcagaaggaggcggagaagctggagcggcagctggccctgcccgccacggagcaggccgccacccagggtgagccccgcacctgcccactccctcccctccccgggcctcctacccacccctgacactgcaccccgcctccccaggagtccacattccaggagctgtgcgaggggctgctggaggagtcggatggtgagggggagccaggccagggcgaggggccggaggctggggatgccgaggtctgtcccacgcccgcccgcctggccaccacagagaagaagacggagcagcagcggcggcgggagaaggctgtgcacaggctgcgggtacagcaggccgcgttgcgggccgcccggctccggcaccaggagctgttccggctgcgcgggatcaaggcccaggtggccctgaggctggcggagctggcgcggcggcggaggcggcggcaggcgcggcgggaggctgaggctgacaagccccgaaggctgggacggctcaagtaccaggcacctgacatcgacgtgcagctgagctcggagctgacagactcgctcaggaccctgaaggtgctcactgtgtcctgccgtggagccccgtgcccagtgatgacaccatccttgctccccgtgccccccaggggctatgggcgacaccatggctgcccctgggctgggccagtggggccaatgcccaggggctgagggcacgggatgctgggatgagatcccagggtgaggggccaggctaaggtttgagtccgggaccctaagaaggcctttccttccagctggtccctgttgcagtcccggtcacctttaggactagagggaccttcctgaagctcagaaccaaccctgtccctcccctgctcggaacctgctgtggctccccagtgcccctgaggaagcccagctcctctgtcagccacacgcctgggccgacccggccgtggggctccagccagttgtgctcatgagcggactgtgccttctccctctgatccagcctttgccctcgctgtccccttttctgtgtcgtcaccagcccacttcccgtgactcctctaagcccagcttagagatggccataggttggtggctgtcatcccaacactgagccccagcagctgagggccaggctgagtccctggtgcccacaggctgccctggggggagactgcatggggctgagccctgccaggaccccgaggagaggtccaggcccttgggcttctgccaggccctgctgaggcctccctctctgtcctgtagcccgagggcaacatccttcgagaccggttcaagagcttccagaggaggaatatgatcgagcctcgagagagagccaagttcaaacgcaagtacaaggtgaagctggtggagaagcgggcgttccgtgagatccagttgtagctgccatcagatgccggagactcgcccttcaataaaaaatctcttctagctga

SEQ ID NO: 435254 - DNA, 290 bp, Homo sapiens
cgcggccgcgcgacacgacagaagggtcagtaccaggcacctgacatcgacgtgcagctgagctcggagctgacagactcgctcaggaccctgaagcccgagggcaacatccttcgagaccggttcaagagcttccagaggaggaatatgatcgagcctcgagagagagccaagttcaaacgcaagtacaaggtgaagctggtggagaagcgggcgttccgtgagatccagttgtagctgccatcagatgccggagactcgcccttcaataaaaaatctcttctagctga

SEQ ID NO: 435255 - DNA, 678 bp, Homo sapiens
  misc_feature (20)..(20): n is a, c, g, or t
gcaggagtccacattccagngtggcggcctgctccgtggcgggcagggcgccacccaggagtccacattccaggagctgtgcgaggggctgctggaggagtcggatggtgagggggagccaggccagggcgaggggccggaggctggggatgccgaggtctgtcccacgcccgcccgcctggccaccacagagaagaagacggagcagcagcggcggcgggagaaggctgtgcacaggctgcgggtacagcaggccgcgttgcgggccgcccggctccggcaccaggagctgttccggctgcgcgggatcaaggcccaggtggccctgaggctggcggagctggcgcggcggcggaggcggcggcaggcgcggcgggaggctgaggctgacaagccccgaaggctgggacggctcaagtaccaggcacctgacatcgacgtgcagctgagctcggagctgacagactcgctcaggaccctgaagcccgagggcaacatccttcgagaccggttcaagagcttccagaggaggaatatgatcgagcctcgagagagagccaagttcaaacgcaagtacaaggtgaagctggtggagaagcgggcgttccgtgagatccagttgtagctgccatcagatgccggagactcgcccttcaataaaaaatctcttctagctga

SEQ ID NO: 435256 - DNA, 687 bp, Homo sapiens
acctcgcttagtgctccagggggttgtctgaggcccagaggtcgtagaagggccgctctacggtgtcctggggcccgggcttggcccttgttgcagaagggttgaggagccggatggtgagggggagccaggccagggcgaggggccggaggctggggatgccgaggtctgtcccacgcccgcccgcctggccaccacagagaagaagacggagcagcagcggcggcgggagaaggctgtgcacaggctgcgggtacagcaggccgcgttgcgggccgcccggctccggcaccaggagctgttccggctgcgcgggatcaaggcccaggtggccctgaggctggcggagctggcgcggcggcggaggcggcggcaggcgcggcgggaggctgaggctgacaagccccgaaggctgggacggctcaagtaccaggcacctgacatcgacgtgcagctgagctcggagctgacagactcgctcaggaccctgaagcccgagggcaacatccttcgagaccggttcaagagcttccagaggaggaatatgatcgagcctcgagagagagccaagttcaaacgcaagtacaaggtgaagctggtggagaagcgggcgttccgtgagatccagttgtagctgccatcagatgccggagactcgcccttcaataaaaaatctcttctagctga

SEQ ID NO: 435257 - DNA, 344 bp, Homo sapiens
ttcggcacgatggcaggccgccacccaggaggccgggaggccggcgggaggctaggtgacaacccgaagctgggacggctcaagtaccaggcacctgacatcgacgtgcagctgagctcggagctgacagactcgctcaggaccctgaagcccgagggcaacatccttcgagaccggttcaagagcttccagaggaggaatatgatcgagcctcgagagagagccaagttcaaacgcaagtacaaggtgaagctggtggagaagcgggcgttccgtgagatccagttgtagctgccatcagatgccggagactcgcccttcaataaaaaatctcttctagctga

SEQ ID NO: 435258 - DNA, 3011 bp, Homo sapiens
cctcccgagtacctgggactacaggcgcacaccatcacgcctggctaatttttaaatttttggcagacacaggatctcactatgttgcccaggctggtcttgaattcctgggctcaagcgatcctcctgcatcggcctcccaaagtgctgggattagaggcgtgaatcaccacgccctgccatggatccctttgaatggctgccagggcccaagagcctctgagcttccttccttatttgtaaatgacaaagatgagttgattctaagatgaagcctcagagggcaaggcagtaacaatagctaacactcagatgccagacgcagccttaagcgctttacatatgtttaatcttctgcatgacttatgacgcagatgtactgttatcatctttattttacagatgaggaaactgaggcacagtgaagtagcccgctcaagatgaatgattctgagtctgcacttctagggtcctaaaagtgtatgtttctaacattcctctaatgttctgtgcttccaactttgatattccgaaagttacttgatttctaagatcctaggattggaacatttgagaggacaaaacttctgagattggaatgtgtgttgtgcggaatctgccactgacggttctgactttctaagaaaacgagattaaaaaataatcaggccgagcatggtggctcacatctgtaatcctagcattttcggaggctgaggagggagaatcacttgagcccaggggttcaagaccagcctggacaacatagtgagacctttgtctcttaaaaaaaaacacacacacatcagtttggaccgggagtggtggtgtgagcctgtaatcccagcgctttgggaggcctaggaaggaggatcacttgaaaccagatgtttgagaccagcctgggcaacatggggaggctccatttctacaaaaaataaaaataaaaaattagccaggtgcggatgcacccttcttgtggtcgcagctactcgggaggctgaggtaggagaatccctgagctcaggagttggaggctgcagtgagccattacccttccactgcactccagcctgggggcaacaaagtgagaccctatctattaaagaaaaaaatcagtttgagcaaagaccccaggcggccgggaaaggtgttcgcttaagggcgaaagctaagaacctgcaaccttcccgtctctttcctaccacccgccgccgttaggaatcttcagatcccgctgtaaagaatggaggaaggaggagccatttatcctttaccaagatggcagcctcctggcaactccagtcactttataaatatggctgccacaggaagtacgtcacggaagagggtgggaaatctgcgcgcgcacgctgcaaaggggctttttgggacgccagtggctgagttcttcctttgacaagatggcggcaggaggcagtggcgttggtgggaagcgcagctcgaaaagcgatgccgattctggtttcctggggctgcggcccacttcggtggacccagcgctgaggcggcggcggcgaggcccaagaaataagaagcggggctggcggcggcttgctcaggagccgctggggctggaggttgaccagttcctggaagacgtgcggctacaggagcgcacgagcggtggcttgttgtcagaggccccaaatgaaaaactcttcttcgtggacactggctccaaggaaaaagggctgacaaagaagagaaccaaagtccagaagaagtcactgcttctcaagaaaccccttcgggttgacctcatcctcgagaacacatccaaagtccctgcccccaaagacgtcctcgcccaccaggtccccaacgccaagaagctcaggcggaaggagcagctatgggagaagctggccaagcagggcgagctgccccgggaggtgcgcagggcccaggcccggctcctcaacccttctgcaacaagggccaagcccgggccccaggacaccgtagagcggcccttctacgacctctgggcctcagacaaccccctggacaggccgttggttggccaggatgagtttttcctggagcagaccaagaagaaaggagtgaagcggcagcacgcctgcacaccaagccgtcccaggcgcccgccgtggaggtggcgcctgccggagcttcctacaatccatcctttgaagaccaccagaccctgctctcagcggcccacgaggtggagttgcagcggcagaaggaggcggagaagctggagcggcagctggccctgcccgccacggagcaggccgccacccaggagtccacattccaggagctgtgcgaggggctgctggaggagtcggatggtgagggggagccaggccagggcgaggggccggaggctggggatgccgaggtctgtcccacgcccgcccgcctggccaccacagagaagaagacggagcagcagcggcggcgggagaaggctgtgcacaggctgcgggtacagcaggccgcgttgcgggccgcccggctccggcaccaggagctgttccggctgcgcgggatcaaggcccaggtggccctgaggctggcggagctggcgcggcggcggaggcggcggcaggcgcggcgggaggctgaggctgacaagccccgaaggctgggacggctcaagtaccaggcacctgacatcgacgtgcagctgagctcggagctgacagactcgctcaggaccctgaagcccgagggcaacatccttcgagaccggttcaagagcttccagaggaggaatatgatcgagcctcgagagagagccaagttcaaacgcaagtacaaggtgaagctggtggagaagcgggcgttccgtgagatccagttgtagctgccatcagatgccggagactcgcccttcaataaaaaatctcttctagctgaaaaaaaaaaaatggggatatatagggggaaacggatgagggacagggaagaggtacggaaggttttgcaggggatgggccccaaggggtatagaacag

SEQ ID NO: 435259 - DNA, 1511 bp, Homo sapiens
caaaattacggctaggtacgaggcctgggttggaggcagtggcgttggtgggaagcgcagctcgaaaagcgatgccgattctggtttcctggggctgcggcccacttcggtggacccagcgctgaggcggcggcggcgaggcccaagaaataagaagcggggctggcggcggcttgctcaggagccgctggggctggaggttgaccagttcctggaagacgtgcggctacaggagcgcacgagcggtggcttgttgtcagaggccccaaatgaaaaactcttcttcgtggacactggctccaaggaaaaagggctgacaaagaagagaaccaaagtccagaagaagtcactgcttctcaagaaaccccttcgggttgacctcatcctcgagaacacatccaaagtccctgcccccaaagacgtcctcgcccaccaggtccccaacgccaagaagctcaggcggaaggagcagctatgggagaagctggccaagcagggcgagctgccccgggaggtgcgcagggcccaggcccggctcctcaacccttctgcaacaagggccaagcccgggccccaggacaccgtagagcggcccttctacgacctctgggcctcagacaaccccctggacaggccgttggttggccaggatgagtttttcctggagcagaccaagaagaaaggagtgaagcggcagcacgcctgcacaccaagccgtcccaggcgcccgccgtggaggtggcgcctgccggagcttcctacaatccatcctttgaagaccaccagaccctgctctcagcggcccacgaggtggagttgcagcggcagaaggaggcggagaagctggagcggcagctggccctgcccgccacggagcaggccgccacccaggagtccacattccaggagctgtgcgaggggctgctggaggagtcggatggtgagggggagccaggccagggcgaggggccggaggctggggatgccgaggtctgtcccacgcccgcccgcctggccaccacagagaagaagacggagcagcagcggcggcgggagaaggctgtgcacaggctgcgggtacagcaggccgcgttgcgggccgcccggctccggcaccaggagctgttccggctgcgcgggatcaaggcccaggtggccctgaggctggcggagctggcgcggcggcggaggcggcggcaggcgcggcgggaggctgaggctgacaagccccgaaggctgggacggctcaagtaccaggcacctgacatcgacgtgcagctgagctcggagctgacagactcgctcaggaccctgaagcccgagggcaacatccttcgagaccggttcaagagcttccagaggaggaatatgatcgagcctcgagagagagccaagttcaaacgcaagtacaaggtgaagctggtggagaagcgggcgttccgtgagatccagttgtagctgccatcagatgccggagactcgcccttcaataaaaaatctcttctagctga

SEQ ID NO: 435260 - DNA, 3474 bp, Homo sapiens
cctcccgagtacctgggactacaggcgcacaccatcacgcctggctaatttttaaatttttggcagacacaggatctcactatgttgcccaggctggtcttgaattcctgggctcaagcgatcctcctgcatcggcctcccaaagtgctgggattagaggcgtgaatcaccacgccctgccatggatccctttgaatggctgccagggcccaagagcctctgagcttccttccttatttgtaaatgacaaagatgagttgattctaagatgaagcctcagagggcaaggcagtaacaatagctaacactcagatgccagacgcagccttaagcgctttacatatgtttaatcttctgcatgacttatgacgcagatgtactgttatcatctttattttacagatgaggaaactgaggcacagtgaagtagcccgctcaagatgaatgattctgagtctgcacttctagggtcctaaaagtgtatgtttctaacattcctctaatgttctgtgcttccaactttgatattccgaaagttacttgatttctaagatcctaggattggaacatttgagaggacaaaacttctgagattggaatgtgtgttgtgcggaatctgccactgacggttctgactttctaagaaaacgagattaaaaaataatcaggccgagcatggtggctcacatctgtaatcctagcattttcggaggctgaggagggagaatcacttgagcccaggggttcaagaccagcctggacaacatagtgagacctttgtctcttaaaaaaaaacacacacacatcagtttggaccgggagtggtggtgtgagcctgtaatcccagcgctttgggaggcctaggaaggaggatcacttgaaaccagatgtttgagaccagcctgggcaacatggggaggctccatttctacaaaaaataaaaataaaaaattagccaggtgcggatgcacccttcttgtggtcgcagctactcgggaggctgaggtaggagaatccctgagctcaggagttggaggctgcagtgagccattacccttccactgcactccagcctgggggcaacaaagtgagaccctatctattaaagaaaaaaatcagtttgagcaaagaccccaggcggccgggaaaggtgttcgcttaagggcgaaagctaagaacctgcaaccttcccgtctctttcctaccacccgccgccgttaggaatcttcagatcccgctgtaaagaatggaggaaggaggagccatttatcctttaccaagatggcagcctcctggcaactccagtcactttataaatatggctgccacaggaagtacgtcacggaagagggtgggaaatctgcgcgcgcacgctgcaaaggggctttttgggacgccagtggctgagttcttcctttgacaagatggcggcaggaggcagtggcgttggtgggaagcgcagctcgaaaagcgatgccgattctggtttcctggggctgcggcccacttcggtggacccagcgctgaggcggcggcggcgaggcccaagaaataagaagcggggctggcggcggcttgctcaggagccgctggggctggaggttgaccagttcctggaagacgtgcggctacaggagcgcacgagcggtggcttgttgtcagaggccccaaatgaaaaactcttcttcgtggacactggctccaaggaaaaagggctgacaaagaagagaaccaaagtccagaagaagtcactgcttctcaagaaaccccttcgggttgacctcatcctcgagaacacatccaaagtccctgcccccaaagacgtcctcgcccaccaggtccccaacgccaagaagctcaggcggaaggagcagctatgggagaagctggccaagcagggcgagctgccccgggaggtgcgcagggcccaggcccggctcctcaacccttctgcaacaagggccaagcccgggccccaggacaccgtagagcggcccttctacgacctctgggcctcagacaaccccctggacaggccgttggttggccaggatgagtttttcctggagcagaccaagaagaaaggagtgaagcggcagcacgcctgcacaccaagccgtcccaggcgcccgccgtggaggtggcgcctgccggagcttcctacaatccatcctttgaagaccaccagaccctgctctcagcggcccacgaggtggagttgcagcggcagaaggaggcggagaagctggagcggcagctggccctgcccgccacggagcaggccgccacccaggagtccacattccaggagctgtgcgaggggctgctggaggagtcggatggtgagggggagccaggccagggcgaggggccggaggctggggatgccgaggtctgtcccacgcccgcccgcctggccaccacagagaagaagacggagcagcagcggcggcgggagaaggctgtgcacaggctgcgggtacagcaggccgcgttgcgggccgcccggctccggcaccaggagctgttccggctgcgcgggatcaaggcccaggtggccctgaggctggcggagctggcgcggcggcggaggcggcggcaggcgcggcgggaggctgaggctgacaagccccgaaggctgggacggctcaagtaccaggcacctgacatcgacgtgcagctgagctcggagctgacagactcgctcaggaccctgaagcccgagggcaacatccttcgagaccggttcaagagcttccagaggaggaatatgatcgagcctcgagagagagccaagttcaaacgcaagtacaaggtgaagctggtggagaagcgggcgttccgtgagatccagttgtagctgccatcagatgccggagactcgcccttcaataaaaaatctcttctagctgaaaaaaatacaaaaaaaaagaagaataaataaaaaaaggggggcggcggcggcaaagaagctattctccgcccgcagggggcgcccagagtagtatccgcgcgtataccccgtgtttgtcgtcggtacccaaagaggtgggccccacatagaggaggaggcgcgtgatataagaggcaacggccaaggggccggcaggtatacaacagcgtcgagaacgtggggaagaacacgcgggcacaccgtgggagccacctgggggcgaagcggaaccccataaacatcggggggggggggcgaacaataacgtggggcaccaaaacttaccactaaaagagaacgaacttttacaaagcgggcctactagagggggaaacatctatataacacatgtcttctagaagggggggataatacgggggggtgtgtcaaaacaatagggctgggacattaatgtgtgtggagagagctttgggaaaaagtttgggggcataaaggtggatattgatgagtttttgagtgaaaaatatttttatcccggggagctagtggtgaaatatgag

SEQ ID NO: 435261 - DNA, 2918 bp, Homo sapiens
cctcccgagtacctgggactacaggcgcacaccatcacgcctggctaatttttaaatttttggcagacacaggatctcactatgttgcccaggctggtcttgaattcctgggctcaagcgatcctcctgcatcggcctcccaaagtgctgggattagaggcgtgaatcaccacgccctgccatggatccctttgaatggctgccagggcccaagagcctctgagcttccttccttatttgtaaatgacaaagatgagttgattctaagatgaagcctcagagggcaaggcagtaacaatagctaacactcagatgccagacgcagccttaagcgctttacatatgtttaatcttctgcatgacttatgacgcagatgtactgttatcatctttattttacagatgaggaaactgaggcacagtgaagtagcccgctcaagatgaatgattctgagtctgcacttctagggtcctaaaagtgtatgtttctaacattcctctaatgttctgtgcttccaactttgatattccgaaagttacttgatttctaagatcctaggattggaacatttgagaggacaaaacttctgagattggaatgtgtgttgtgcggaatctgccactgacggttctgactttctaagaaaacgagattaaaaaataatcaggccgagcatggtggctcacatctgtaatcctagcattttcggaggctgaggagggagaatcacttgagcccaggggttcaagaccagcctggacaacatagtgagacctttgtctcttaaaaaaaaacacacacacatcagtttggaccgggagtggtggtgtgagcctgtaatcccagcgctttgggaggcctaggaaggaggatcacttgaaaccagatgtttgagaccagcctgggcaacatggggaggctccatttctacaaaaaataaaaataaaaaattagccaggtgcggatgcacccttcttgtggtcgcagctactcgggaggctgaggtaggagaatccctgagctcaggagttggaggctgcagtgagccattacccttccactgcactccagcctgggggcaacaaagtgagaccctatctattaaagaaaaaaatcagtttgagcaaagaccccaggcggccgggaaaggtgttcgcttaagggcgaaagctaagaacctgcaaccttcccgtctctttcctaccacccgccgccgttaggaatcttcagatcccgctgtaaagaatggaggaaggaggagccatttatcctttaccaagatggcagcctcctggcaactccagtcactttataaatatggctgccacaggaagtacgtcacggaagagggtgggaaatctgcgcgcgcacgctgcaaaggggctttttgggacgccagtggctgagttcttcctttgacaagatggcggcaggaggcagtggcgttggtgggaagcgcagctcgaaaagcgatgccgattctggtttcctggggctgcggcccacttcggtggacccagcgctgaggcggcggcggcgaggcccaagaaataagaagcggggctggcggcggcttgctcaggagccgctggggctggaggttgaccagttcctggaagacgtgcggctacaggagcgcacgagcggtggcttgttgtcagaggccccaaatgaaaaactcttcttcgtggacactggctccaaggaaaaagggctgacaaagaagagaaccaaagtccagaagaagtcactgcttctcaagaaaccccttcgggttgacctcatcctcgagaacacatccaaagtccctgcccccaaagacgtcctcgcccaccaggtccccaacgccaagaagctcaggcggaaggagcagctatgggagaagctggccaagcagggcgagctgccccgggaggtgcgcagggcccaggcccggctcctcaacccttctgcaacaagggccaagcccgggccccaggacaccgtagagcggcccttctacgacctctgggcctcagacaaccccctggacaggccgttggttggccaggatgagtttttcctggagcagaccaagaagaaaggagtgaagcggcagcacgcctgcacaccaagccgtcccaggcgcccgccgtggaggtggcgcctgccggagcttcctacaatccatcctttgaagaccaccagaccctgctctcagcggcccacgaggtggagttgcagcggcagaaggaggcggagaagctggagcggcagctggccctgcccgccacggagcaggccgccacccaggagtccacattccaggagctgtgcgaggggctgctggaggagtcggatggtgagggggagccaggccagggcgaggggccggaggctggggatgccgaggtctgtcccacgcccgcccgcctggccaccacagagaagaagacggagcagcagcggcggcgggagaaggctgtgcacaggctgcgggtacagcaggccgcgttgcgggccgcccggctccggcaccaggagctgttccggctgcgcgggatcaaggcccaggtggccctgaggctggcggagctggcgcggcggcggaggcggcggcaggcgcggcgggaggctgaggctgacaagccccgaaggctgggacggctcaagtaccaggcacctgacatcgacgtgcagctgagctcggagctgacagactcgctcaggaccctgaagcccgagggcaacatccttcgagaccggttcaagagcttccagaggaggaatatgatcgagcctcgagagagagccaagtttaaaaccaaggccaaaggtgaaacttggtggaagaaaccgggcgtttcgtgagaatccaaattttaacttgcattaaaatgcccggaaaactttccctttaaattaaaaaaaatttttt

SEQ ID NO: 435262 - DNA, 2861 bp, Homo sapiens
cctcccgagtacctgggactacaggcgcacaccatcacgcctggctaatttttaaatttttggcagacacaggatctcactatgttgcccaggctggtcttgaattcctgggctcaagcgatcctcctgcatcggcctcccaaagtgctgggattagaggcgtgaatcaccacgccctgccatggatccctttgaatggctgccagggcccaagagcctctgagcttccttccttatttgtaaatgacaaagatgagttgattctaagatgaagcctcagagggcaaggcagtaacaatagctaacactcagatgccagacgcagccttaagcgctttacatatgtttaatcttctgcatgacttatgacgcagatgtactgttatcatctttattttacagatgaggaaactgaggcacagtgaagtagcccgctcaagatgaatgattctgagtctgcacttctagggtcctaaaagtgtatgtttctaacattcctctaatgttctgtgcttccaactttgatattccgaaagttacttgatttctaagatcctaggattggaacatttgagaggacaaaacttctgagattggaatgtgtgttgtgcggaatctgccactgacggttctgactttctaagaaaacgagattaaaaaataatcaggccgagcatggtggctcacatctgtaatcctagcattttcggaggctgaggagggagaatcacttgagcccaggggttcaagaccagcctggacaacatagtgagacctttgtctcttaaaaaaaaacacacacacatcagtttggaccgggagtggtggtgtgagcctgtaatcccagcgctttgggaggcctaggaaggaggatcacttgaaaccagatgtttgagaccagcctgggcaacatggggaggctccatttctacaaaaaataaaaataaaaaattagccaggtgcggatgcacccttcttgtggtcgcagctactcgggaggctgaggtaggagaatccctgagctcaggagttggaggctgcagtgagccattacccttccactgcactccagcctgggggcaacaaagtgagaccctatctattaaagaaaaaaatcagtttgagcaaagaccccaggcggccgggaaaggtgttcgcttaagggcgaaagctaagaacctgcaaccttcccgtctctttcctaccacccgccgccgttaggaatcttcagatcccgctgtaaagaatggaggaaggaggagccatttatcctttaccaagatggcagcctcctggcaactccagtcactttataaatatggctgccacaggaagtacgtcacggaagagggtgggaaatctgcgcgcgcacgctgcaaaggggctttttgggacgccagtggctgagttcttcctttgacaagatggcggcaggaggcagtggcgttggtgggaagcgcagctcgaaaagcgatgccgattctggtttcctggggctgcggcccacttcggtggacccagcgctgaggcggcggcggcgaggcccaagaaataagaagcggggctggcggcggcttgctcaggagccgctggggctggaggttgaccagttcctggaagacgtgcggctacaggagcgcacgagcggtggcttgttgtcagaggccccaaatgaaaaactcttcttcgtggacactggctccaaggaaaaagggctgacaaagaagagaaccaaagtccagaagaagtcactgcttctcaagaaaccccttcgggttgacctcatcctcgagaacacatccaaagtccctgcccccaaagacgtcctcgcccaccaggtccccaacgccaagaagctcaggcggaaggagcagctatgggagaagctggccaagcagggcgagctgccccgggaggtgcgcagggcccaggcccggctcctcaacccttctgcaacaagggccaagcccgggccccaggacaccgtagagcggcccttctacgacctctgggcctcagacaaccccctggacaggccgttggttggccaggatgagtttttcctggagcagaccaagaagaaaggagtgaagcggcagcacgcctgcacaccaagccgtcccaggcgcccgccgtggaggtggcgcctgccggagcttcctacaatccatcctttgaagaccaccagaccctgctctcagcggcccacgaggtggagttgcagcggcagaaggaggcggagaagctggagcggcagctggccctgcccgccacggagcaggccgccacccaggagtccacattccaggagctgtgcgaggggctgctggaggagtcggatggtgagggggagccaggccagggcgaggggccggaggctggggatgccgaggtctgtcccacgcccgcccgcctggccaccacagagaagaagacggagcagcagcggcggcgggagaaggctgtgcacaggctgcgggtacagcaggccgcgttgcgggccgcccggctccggcaccaggagctgttccggctgcgcgggatcaaggcccaggtggccctgaggctggcggagctggcgcggcggcggaggcggcggcaggcgcggcgggaggctgaggctgacaagccccgaaggctgggacggctcaagtaccaggcacctgacatcgacgtgcagctgagctcggagctgacagactcgctcaggaccctgaagcccgagggcaacatccttcgagaccggttcaagagcttccagaggaggaatatgatcgagcctcgagagagagccaagttcatacgcaagtacaaatgaagctaggtgagaagcggcgttaacgacgactgccagttatagc

SEQ ID NO: 435263 - DNA, 3836 bp, Homo sapiens
  misc_feature (3250)..(3250): n is a, c, g, or t
  misc_feature (3267)..(3267): n is a, c, g, or t
  misc_feature (3269)..(3269): n is a, c, g, or t
  misc_feature (3533)..(3533): n is a, c, g, or t
  misc_feature (3537)..(3537): n is a, c, g, or t
  misc_feature (3548)..(3548): n is a, c, g, or t
  misc_feature (3588)..(3588): n is a, c, g, or t
  misc_feature (3659)..(3659): n is a, c, g, or t
  misc_feature (3663)..(3663): n is a, c, g, or t
  misc_feature (3679)..(3679): n is a, c, g, or t
  misc_feature (3690)..(3690): n is a, c, g, or t
  misc_feature (3695)..(3695): n is a, c, g, or t
  misc_feature (3702)..(3703): n is a, c, g, or t
  misc_feature (3755)..(3755): n is a, c, g, or t
cctcccgagtacctgggactacaggcgcacaccatcacgcctggctaatttttaaatttttggcagacacaggatctcactatgttgcccaggctggtcttgaattcctgggctcaagcgatcctcctgcatcggcctcccaaagtgctgggattagaggcgtgaatcaccacgccctgccatggatccctttgaatggctgccagggcccaagagcctctgagcttccttccttatttgtaaatgacaaagatgagttgattctaagatgaagcctcagagggcaaggcagtaacaatagctaacactcagatgccagacgcagccttaagcgctttacatatgtttaatcttctgcatgacttatgacgcagatgtactgttatcatctttattttacagatgaggaaactgaggcacagtgaagtagcccgctcaagatgaatgattctgagtctgcacttctagggtcctaaaagtgtatgtttctaacattcctctaatgttctgtgcttccaactttgatattccgaaagttacttgatttctaagatcctaggattggaacatttgagaggacaaaacttctgagattggaatgtgtgttgtgcggaatctgccactgacggttctgactttctaagaaaacgagattaaaaaataatcaggccgagcatggtggctcacatctgtaatcctagcattttcggaggctgaggagggagaatcacttgagcccaggggttcaagaccagcctggacaacatagtgagacctttgtctcttaaaaaaaaacacacacacatcagtttggaccgggagtggtggtgtgagcctgtaatcccagcgctttgggaggcctaggaaggaggatcacttgaaaccagatgtttgagaccagcctgggcaacatggggaggctccatttctacaaaaaataaaaataaaaaattagccaggtgcggatgcacccttcttgtggtcgcagctactcgggaggctgaggtaggagaatccctgagctcaggagttggaggctgcagtgagccattacccttccactgcactccagcctgggggcaacaaagtgagaccctatctattaaagaaaaaaatcagtttgagcaaagaccccaggcggccgggaaaggtgttcgcttaagggcgaaagctaagaacctgcaaccttcccgtctctttcctaccacccgccgccgttaggaatcttcagatcccgctgtaaagaatggaggaaggaggagccatttatcctttaccaagatggcagcctcctggcaactccagtcactttataaatatggctgccacaggaagtacgtcacggaagagggtgggaaatctgcgcgcgcacgctgcaaaggggctttttgggacgccagtggctgagttcttcctttgacaagatggcggcaggaggcagtggcgttggtgggaagcgcagctcgaaaagcgatgccgattctggtttcctggggctgcggcccacttcggtggacccagcgctgaggcggcggcggcgaggcccaagaaataagaagcggggctggcggcggcttgctcaggagccgctggggctggaggttgaccagttcctggaagacgtgcggctacaggagcgcacgagcggtggcttgttgtcagaggccccaaatgaaaaactcttcttcgtggacactggctccaaggaaaaagggctgacaaagaagagaaccaaagtccagaagaagtcactgcttctcaagaaaccccttcgggttgacctcatcctcgagaacacatccaaagtccctgcccccaaagacgtcctcgcccaccaggtccccaacgccaagaagctcaggcggaaggagcagctatgggagaagctggccaagcagggcgagctgccccgggaggtgcgcagggcccaggcccggctcctcaacccttctgcaacaagggccaagcccgggccccaggacaccgtagagcggcccttctacgacctctgggcctcagacaaccccctggacaggccgttggttggccaggatgagtttttcctggagcagaccaagaagaaaggagtgaagcggcagcacgcctgcacaccaagccgtcccaggcgcccgccgtggaggtggcgcctgccggagcttcctacaatccatcctttgaagaccaccagaccctgctctcagcggcccacgaggtggagttgcagcggcagaaggaggcggagaagctggagcggcagctggccctgcccgccacggagcaggccgccacccaggagtccacattccaggagctgtgcgaggggctgctggaggagtcggatggtgagggggagccaggccagggcgaggggccggaggctggggatgccgaggtctgtcccacgcccgcccgcctggccaccacagagaagaagacggagcagcagcggcggcgggagaaggctgtgcacaggctgcgggtacagcaggccgcgttgcgggccgcccggctccggcaccaggagctgttccggctgcgcgggatcaaggcccaggtggccctgaggctggcggagctggcgcggcggcggaggcggcggcaggcgcggcgggaggctgaggctgacaagccccgaaggctgggacggctcaagtaccaggcacctgacatcgacgtgcagctgagctcggagctgacagactcgctcaggaccctgaaggtgctcactgtgtcctgccgtggagccccgtgcccagtgatgacaccatccttgctccccgtgccccccaggggctatgggcgacaccatggctgcccctgggctgggccagtggggccaatgcccaggggctgagggcacgggatgctgggatgagatcccaggcccgagggcaacatccttcgagaccggttcaagagcttccagaggaggaatatgatcgagcctcgagagagagccaagttcaaacgcaagtacaaggtgaagctggtggagaagcgggcgttccgtgagatccagttgtagctgccatcagatgccggagactcgcccttcaataaaaaatctcttctagctgagatcagtgggctccacgtgtggcttgtgtgcctcctgcgggcggctgctcccgggtgcagactctgcgtgtccccccgtggcgcacaagcatgtaggtgccagaactcaccgccagagcctgaatctcgctctgtcacccgggctggagtgcagtggcgcgatctcgactcnctgaaacctccgcctcncnggttcaagcaattcttctgcctcagcctcgccttgtggttttatagatggtttttgtgaaaatgaataatgttcgaaattgtattcattaatataagcgactctgtctcaaaaaaaaaaaaccaaaatcattattggtaagatacatagaatgtcagaggtgacgagggccatgaggaagagggggcacagaatgttgggggaggggttgcagttttaaataggatgtcaggggaggtcacagtgaaaagtgacattttggccnggcntggtggctcangcctgtaatcccagcacttggtgggaggctgaggcgggcngatcatctgaggtcaggagttcgagaccagcctggccaacatggtgaaaccccgtctctacttttataaanattngctgagtgtggtggcnggcacctgtantcccngatactnnggaggctgaggcaggagaatcgcttgaacccgggaggcggaggttgcagtgngctgagattgtgccactacactccagccttgttgtccagcactccaggcaacaagagcaaaactccatctcaaaaaaaaaa

SEQ ID NO: 435264 - DNA, 2848 bp, Homo sapiens
cctcccgagtacctgggactacaggcgcacaccatcacgcctggctaatttttaaatttttggcagacacaggatctcactatgttgcccaggctggtcttgaattcctgggctcaagcgatcctcctgcatcggcctcccaaagtgctgggattagaggcgtgaatcaccacgccctgccatggatccctttgaatggctgccagggcccaagagcctctgagcttccttccttatttgtaaatgacaaagatgagttgattctaagatgaagcctcagagggcaaggcagtaacaatagctaacactcagatgccagacgcagccttaagcgctttacatatgtttaatcttctgcatgacttatgacgcagatgtactgttatcatctttattttacagatgaggaaactgaggcacagtgaagtagcccgctcaagatgaatgattctgagtctgcacttctagggtcctaaaagtgtatgtttctaacattcctctaatgttctgtgcttccaactttgatattccgaaagttacttgatttctaagatcctaggattggaacatttgagaggacaaaacttctgagattggaatgtgtgttgtgcggaatctgccactgacggttctgactttctaagaaaacgagattaaaaaataatcaggccgagcatggtggctcacatctgtaatcctagcattttcggaggctgaggagggagaatcacttgagcccaggggttcaagaccagcctggacaacatagtgagacctttgtctcttaaaaaaaaacacacacacatcagtttggaccgggagtggtggtgtgagcctgtaatcccagcgctttgggaggcctaggaaggaggatcacttgaaaccagatgtttgagaccagcctgggcaacatggggaggctccatttctacaaaaaataaaaataaaaaattagccaggtgcggatgcacccttcttgtggtcgcagctactcgggaggctgaggtaggagaatccctgagctcaggagttggaggctgcagtgagccattacccttccactgcactccagcctgggggcaacaaagtgagaccctatctattaaagaaaaaaatcagtttgagcaaagaccccaggcggccgggaaaggtgttcgcttaagggcgaaagctaagaacctgcaaccttcccgtctctttcctaccacccgccgccgttaggaatcttcagatcccgctgtaaagaatggaggaaggaggagccatttatcctttaccaagatggcagcctcctggcaactccagtcactttataaatatggctgccacaggaagtacgtcacggaagagggtgggaaatctgcgcgcgcacgctgcaaaggggctttttgggacgccagtggctgagttcttcctttgacaagatggcggcaggaggcagtggcgttggtgggaagcgcagctcgaaaagcgatgccgattctggtttcctggggctgcggcccacttcggtggacccagcgctgaggcggcggcggcgaggcccaagaaataagaagcggggctggcggcggcttgctcaggagccgctggggctggaggttgaccagttcctggaagacgtgcggctacaggagcgcacgagcggtggcttgttgtcagaggccccaaatgaaaaactcttcttcgtggacactggctccaaggaaaaagggctgacaaagaagagaaccaaagtccagaagaagtcactgcttctcaagaaaccccttcgggttgacctcatcctcgagaacacatccaaagtccctgcccccaaagacgtcctcgcccaccaggtccccaacgccaagaagctcaggcggaaggagcagctatgggagaagctggccaagcagggcgagctgccccgggaggtgcgcagggcccaggcccggctcctcaacccttctgcaacaagggccaagcccgggccccaggacaccgtagagcggcccttctacgacctctgggcctcagacaaccccctggacaggccgttggttggccaggatgagtttttcctggagcagaccaagaagaaaggagtgaagcggcagcacgcctgcacaccaagccgtcccaggcgcccgccgtggaggtggcgcctgccggagcttcctacaatccatcctttgaagaccaccagaccctgctctcagcggcccacgaggtggagttgcagcggcagaaggaggcggagaagctggagcggcagctggccctgcccgccacggagcaggccgccacccaggagtccacattccaggagctgtgcgaggggctgctggaggagtcggatggtgagggggagccaggccagggcgaggggccggaggctggggatgccgaggtctgtcccacgcccgcccgcctggccaccacagagaagaagacggagcagcagcggcggcgggagaaggctgtgcacaggctgcgggtacagcaggccgcgttgcgggccgcccggctccggcaccaggagctgttccggctgcgcgcggcgggaggctgaggctgacaagccccgaaggctgggacggctcaagtaccaggcacctgacatcgacgtgcagctgagctcggagctgacagactcgctcaggaccctgaagcccgagggcaacatccttcgagaccggttcaagagcttccagaggaggaatatgatcgagcctcgagagagagccaagttcaaacgcaagtacaaggtgaagctggtggagaagcgggcgttccgtgagatccagttgtagctgccatcagatgccggagactcgcccttcaataaaaaatctcttctagctga

SEQ ID NO: 435265 - DNA, 2784 bp, Homo sapiens
cctcccgagtacctgggactacaggcgcacaccatcacgcctggctaatttttaaatttttggcagacacaggatctcactatgttgcccaggctggtcttgaattcctgggctcaagcgatcctcctgcatcggcctcccaaagtgctgggattagaggcgtgaatcaccacgccctgccatggatccctttgaatggctgccagggcccaagagcctctgagcttccttccttatttgtaaatgacaaagatgagttgattctaagatgaagcctcagagggcaaggcagtaacaatagctaacactcagatgccagacgcagccttaagcgctttacatatgtttaatcttctgcatgacttatgacgcagatgtactgttatcatctttattttacagatgaggaaactgaggcacagtgaagtagcccgctcaagatgaatgattctgagtctgcacttctagggtcctaaaagtgtatgtttctaacattcctctaatgttctgtgcttccaactttgatattccgaaagttacttgatttctaagatcctaggattggaacatttgagaggacaaaacttctgagattggaatgtgtgttgtgcggaatctgccactgacggttctgactttctaagaaaacgagattaaaaaataatcaggccgagcatggtggctcacatctgtaatcctagcattttcggaggctgaggagggagaatcacttgagcccaggggttcaagaccagcctggacaacatagtgagacctttgtctcttaaaaaaaaacacacacacatcagtttggaccgggagtggtggtgtgagcctgtaatcccagcgctttgggaggcctaggaaggaggatcacttgaaaccagatgtttgagaccagcctgggcaacatggggaggctccatttctacaaaaaataaaaataaaaaattagccaggtgcggatgcacccttcttgtggtcgcagctactcgggaggctgaggtaggagaatccctgagctcaggagttggaggctgcagtgagccattacccttccactgcactccagcctgggggcaacaaagtgagaccctatctattaaagaaaaaaatcagtttgagcaaagaccccaggcggccgggaaaggtgttcgcttaagggcgaaagctaagaacctgcaaccttcccgtctctttcctaccacccgccgccgttaggaatcttcagatcccgctgtaaagaatggaggaaggaggagccatttatcctttaccaagatggcagcctcctggcaactccagtcactttataaatatggctgccacaggaagtacgtcacggaagagggtgggaaatctgcgcgcgcacgctgcaaaggggctttttgggacgccagtggctgagttcttcctttgacaagatggcggcaggaggcagtggcgttggtgggaagcgcagctcgaaaagcgatgccgattctggtttcctggggctgcggcccacttcggtggacccagcgctgaggcggcggcggcgaggcccaagaaataagaagcggggctggcggcggcttgctcaggagccgctggggctggaggttgaccagttcctggaagacgtgcggctacaggagcgcacgagcggtggcttgttgtcagaggccccaaatgaaaaactcttcttcgtggacactggctccaaggaaaaagggctgacaaagaagagaaccaaagtccagaagaagtcactgcttctcaagaaaccccttcgggttgacctcatcctcgagaacacatccaaagtccctgcccccaaagacgtcctcgcccaccaggtccccaacgccaagaagctcaggcggaaggagcagctatgggagaagctggccaagcagggcgagctgccccgggaggtgcgcagggcccaggcccggctcctcaacccttctgcaacaagggccaagcccgggccccaggacaccgtagagcggcccttctacgacctctgggcctcagacaaccccctggacaggccgttggttggccaggatgagtttttcctggagcagaccaagaagaaaggagtgaagcggcagcacgcctgcacaccaagccgtcccaggcgcccgccgtggaggtggcgcctgccggagcttcctacaatccatcctttgaagaccaccagaccctgctctcagcggcccacgaggtggagttgcagcggcagaaggaggcggagaagctggagcggcagctggccctgcccgccacggagcaggccgccacccaggagtccacattccaggagctgtgcgaggggctgctggaggagtcggatggtgagggggagccaggccagggcgaggggccggaggctggggatgccgaggtctgtcccacgcccgcccgcctggccaccacagagaagaagacggagcagcagcggcggcgggagaaggctgtgcacaggctgcggcgggaggctgaggctgacaagccccgaaggctgggacggctcaagtaccaggcacctgacatcgacgtgcagctgagctcggagctgacagactcgctcaggaccctgaagcccgagggcaacatccttcgagaccggttcaagagcttccagaggaggaatatgatcgagcctcgagagagagccaagttcaaacgcaagtacaaggtgaagctggtggagaagcgggcgttccgtgagatccagttgtagctgccatcagatgccggagactcgcccttcaataaaaaatctcttctagctga

SEQ ID NO: 435266 - DNA, 3618 bp, Homo sapiens
cctcccgagtacctgggactacaggcgcacaccatcacgcctggctaatttttaaatttttggcagacacaggatctcactatgttgcccaggctggtcttgaattcctgggctcaagcgatcctcctgcatcggcctcccaaagtgctgggattagaggcgtgaatcaccacgccctgccatggatccctttgaatggctgccagggcccaagagcctctgagcttccttccttatttgtaaatgacaaagatgagttgattctaagatgaagcctcagagggcaaggcagtaacaatagctaacactcagatgccagacgcagccttaagcgctttacatatgtttaatcttctgcatgacttatgacgcagatgtactgttatcatctttattttacagatgaggaaactgaggcacagtgaagtagcccgctcaagatgaatgattctgagtctgcacttctagggtcctaaaagtgtatgtttctaacattcctctaatgttctgtgcttccaactttgatattccgaaagttacttgatttctaagatcctaggattggaacatttgagaggacaaaacttctgagattggaatgtgtgttgtgcggaatctgccactgacggttctgactttctaagaaaacgagattaaaaaataatcaggccgagcatggtggctcacatctgtaatcctagcattttcggaggctgaggagggagaatcacttgagcccaggggttcaagaccagcctggacaacatagtgagacctttgtctcttaaaaaaaaacacacacacatcagtttggaccgggagtggtggtgtgagcctgtaatcccagcgctttgggaggcctaggaaggaggatcacttgaaaccagatgtttgagaccagcctgggcaacatggggaggctccatttctacaaaaaataaaaataaaaaattagccaggtgcggatgcacccttcttgtggtcgcagctactcgggaggctgaggtaggagaatccctgagctcaggagttggaggctgcagtgagccattacccttccactgcactccagcctgggggcaacaaagtgagaccctatctattaaagaaaaaaatcagtttgagcaaagaccccaggcggccgggaaaggtgttcgcttaagggcgaaagctaagaacctgcaaccttcccgtctctttcctaccacccgccgccgttaggaatcttcagatcccgctgtaaagaatggaggaaggaggagccatttatcctttaccaagatggcagcctcctggcaactccagtcactttataaatatggctgccacaggaagtacgtcacggaagagggtgggaaatctgcgcgcgcacgctgcaaaggggctttttgggacgccagtggctgagttcttcctttgacaagatggcggcaggaggcagtggcgttggtgggaagcgcagctcgaaaagcgatgccgattctggtttcctggggctgcggcccacttcggtggacccagcgctgaggcggcggcggcgaggcccaagaaataagaagcggggctggcggcggcttgctcaggagccgctggggctggaggttgaccagttcctggaagacgtgcggctacaggagcgcacgagcggtggcttgttgtcagaggccccaaatgaaaaactcttcttcgtggacactggctccaaggaaaaagggctgacaaagaagagaaccaaagtccagaagaagtcactgcttctcaagaaaccccttcgggttgacctcatcctcgagaacacatccaaagtccctgcccccaaagacgtcctcgcccaccaggtccccaacgccaagaagctcaggcggaaggagcagctatgggagaagctggccaagcagggcgagctgccccgggaggtgcgcagggcccaggcccggctcctcaacccttctgcaacaagggccaagcccgggccccaggacaccgtagagcggcccttctacgacctctgggcctcagacaaccccctggacaggccgttggttggccaggatgagtttttcctggagcagaccaagaagaaaggagtgaagcggcagcacgcctgcacaccaagccgtcccaggcgcccgccgtggaggtggcgcctgccggagcttcctacaatccatcctttgaagaccaccagaccctgctctcagcggcccacgaggtggagttgcagcggcagaaggaggcggagaagctggagcggcagctggccctgcccgccacggagcaggccgccacccaggagtccacattccaggagctgtgcgaggggctgctggaggagtcggatggtgagggggagccaggccagggcgaggggccggaggctggggatgccgaggtctgtcccacgcccgcccgcctggccaccacagagaagaagacggagcagcagcggcggcgggagaaggctgtgcacaggctgcgggtacagcaggccgcgttgcgggccgcccggctccggcaccaggagctgttccggctgcgcgggatcaaggcccaggtggccctgaggctggcggagctggcgcggcggcggaggcggcggcaggcgcggcgggaggctgaggctgacaagccccgaaggctgggacggctcaagtaccaggcacctgacatcgacgtgcagctgagctcggagctgacagactcgctcaggaccctgaaggtgctcactgtgtcctgccgtggagccccgtgcccagtgatgacaccatccttgctccccgtgccccccaggggctatgggcgacaccatggctgcccctgggctgggccagtggggccaatgcccaggggctgagggcacgggatgctgggatgagatcccagggtgaggggccaggctaaggtttgagtccgggaccctaagaaggcctttccttccagctggtccctgttgcagtcccggtcacctttaggactagagggaccttcctgaagctcagaaccaaccctgtccctcccctgctcggaacctgctgtggctccccagtgcccctgaggaagcccagctcctctgtcagccacacgcctgggccgacccggccgtggggctccagccagttgtgctcatgagcggactgtgccttctccctctgatccagcctttgccctcgctgtccccttttctgtgtcgtcaccagcccacttcccgtgactcctctaagcccagcttagagatggccataggttggtggctgtcatcccaacactgagccccagcagctgagggccaggctgagtccctggtgcccacaggctgccctggggggagactgcatggggctgagccctgccaggaccccgaggagaggtccaggcccttgggcttctgccaggccctgctgaggcctccctctctgtcctgtagcccgagggcaacatccttcgagaccggttcaagagcttccagaggaggaatatgatcgagcctcgagagagagccaagttcaaacgcaagtacaaggtgaagctggtggagaagcgggcgttccgtgagatccagttgtagctgccatcagatgccggagactcgcccttcaataaaaaatctcttctagctga

SEQ ID NO: 435267 - DNA, 4179 bp, Homo sapiens
cctcccgagtacctgggactacaggcgcacaccatcacgcctggctaatttttaaatttttggcagacacaggatctcactatgttgcccaggctggtcttgaattcctgggctcaagcgatcctcctgcatcggcctcccaaagtgctgggattagaggcgtgaatcaccacgccctgccatggatccctttgaatggctgccagggcccaagagcctctgagcttccttccttatttgtaaatgacaaagatgagttgattctaagatgaagcctcagagggcaaggcagtaacaatagctaacactcagatgccagacgcagccttaagcgctttacatatgtttaatcttctgcatgacttatgacgcagatgtactgttatcatctttattttacagatgaggaaactgaggcacagtgaagtagcccgctcaagatgaatgattctgagtctgcacttctagggtcctaaaagtgtatgtttctaacattcctctaatgttctgtgcttccaactttgatattccgaaagttacttgatttctaagatcctaggattggaacatttgagaggacaaaacttctgagattggaatgtgtgttgtgcggaatctgccactgacggttctgactttctaagaaaacgagattaaaaaataatcaggccgagcatggtggctcacatctgtaatcctagcattttcggaggctgaggagggagaatcacttgagcccaggggttcaagaccagcctggacaacatagtgagacctttgtctcttaaaaaaaaacacacacacatcagtttggaccgggagtggtggtgtgagcctgtaatcccagcgctttgggaggcctaggaaggaggatcacttgaaaccagatgtttgagaccagcctgggcaacatggggaggctccatttctacaaaaaataaaaataaaaaattagccaggtgcggatgcacccttcttgtggtcgcagctactcgggaggctgaggtaggagaatccctgagctcaggagttggaggctgcagtgagccattacccttccactgcactccagcctgggggcaacaaagtgagaccctatctattaaagaaaaaaatcagtttgagcaaagaccccaggcggccgggaaaggtgttcgcttaagggcgaaagctaagaacctgcaaccttcccgtctctttcctaccacccgccgccgttaggaatcttcagatcccgctgtaaagaatggaggaaggaggagccatttatcctttaccaagatggcagcctcctggcaactccagtcactttataaatatggctgccacaggaagtacgtcacggaagagggtgggaaatctgcgcgcgcacgctgcaaaggggctttttgggacgccagtggctgagttcttcctttgacaagatggcggcaggaggcagtggcgttggtgggaagcgcagctcgaaaagcgatgccgattctggtttcctggggctgcggcccacttcggtggacccagcgctgaggcggcggcggcgaggcccaagaaataagaagcggggctggcggcggcttgctcaggagccgctggggctggaggttgaccagttcctggaagacgtgcggctacaggagcgcacgagcggtggcttgttgtcagaggccccaaatgaaaaactcttcttcgtggacactggctccaaggaaaaagggctgacaaagaagagaaccaaagtccagaagaagtcactgcttctcaagaaaccccttcgggttgacctcatcctcgagaacacatccaaagtccctgcccccaaagacgtcctcgcccaccaggtccccaacgccaagaagctcaggcggaaggagcagctatgggagaagctggccaagcagggcgagctgccccgggaggtgcgcagggcccaggcccggctcctcaacccttctgcaacaagggccaagcccgggccccaggacaccgtagagcggcccttctacgacctctgggcctcagacaaccccctggacaggccgttggttggccaggatgagtttttcctggagcagaccaagaagaaaggagtgaagcggcagcacgcctgcacaccaagccgtcccaggcgcccgccgtggaggtggcgcctgccggagcttcctacaatccatcctttgaagaccaccagaccctgctctcagcggcccacgaggtggagttgcagcggcagaaggaggcggagaagctggagcggcagctggccctgcccgccacggagcaggccgccacccaggagtccacattccaggagctgtgcgaggggctgctggaggagtcggatggtgagggggagccaggccagggcgaggggccggaggctggggatgccgaggtctgtcccacgcccgcccgcctggccaccacagagaagaagacggagcagcagcggcggcgggagaaggctgtgcacaggctgcgggtacagcaggccgcgttgcgggccgcccggctccggcaccaggagctgttccggctgcgcgggatcaaggcccaggtggccctgaggctggcggagctggcgcggcggcggaggcggcggcaggcgcggcgggaggctgaggctgacaagccccgaaggctgggacggctcaagtaccaggcacctgacatcgacgtgcagctgagctcggagctgacagactcgctcaggaccctgaaggtgctcactgtgtcctgccgtggagccccgtgcccagtgatgacaccatccttgctccccgtgccccccaggggctatgggcgacaccatggctgcccctgggctgggccagtggggccaatgcccaggggctgagggcacgggatgctgggatgagatcccagggtgaggggccaggctaaggtttgagtccgggaccctaagaaggcctttccttccagctggtccctgttgcagtcccggtcacctttaggactagagggaccttcctgaagctcagaaccaaccctgtccctcccctgctcggaacctgctgtggctccccagtgcccctgaggaagcccagctcctctgtcagccacacgcctgggccgacccggccgtggggctccagccagttgtgctcatgagcggactgtgccttctccctctgatccagcctttgccctcgctgtccccttttctgtgtcgtcaccagcccacttcccgtgactcctctaagcccagcttagagatggccataggttggtggctgtcatcccaacactgagccccagcagctgagggccaggctgagtccctggtgcccacaggctgccctggggggagactgcatggggctgagccctgccaggaccccgaggagaggtccaggcccttgggcttctgccaggccctgctgaggcctccctctctgtcctgtagcccgagggcaacatccttcgagaccggttcaagagcttccagaggaggaatatgatcgagcctcgagagagagccaagttcaaacgcaagtacaaggtgaagctggtggagaagcgggcgttccgtgagatccagttgtagctgccatcagatgccggagactcgcccttcaataaaaaatctcttctagctgaaaaaaatacaaaaaaaaagaagaataaataaaaaaaggggggcggcggcggcaaagaagctattctccgcccgcagggggcgcccagagtagtatccgcgcgtataccccgtgtttgtcgtcggtacccaaagaggtgggccccacatagaggaggaggcgcgtgatataagaggcaacggccaaggggccggcaggtatacaacagcgtcgagaacgtggggaagaacacgcgggcacaccgtgggagccacctgggggcgaagcggaaccccataaacatcggggggggggggcgaacaataacgtggggcaccaaaacttaccactaaaagagaacgaacttttacaaagcgggcctactagagggggaaacatctatataacacatgtcttctagaagggggggataatacgggggggtgtgtcaaaacaatagggctgggacattaatgtgtgtggagagagctttgggaaaaagtttgggggcataaaggtggatattgatgagtttttgagtgaaaaatatttttatcccggggagctagtggtgaaatatgag

SEQ ID NO: 435268 - DNA, 2655 bp, Homo sapiens
cctcccgagtacctgggactacaggcgcacaccatcacgcctggctaatttttaaatttttggcagacacaggatctcactatgttgcccaggctggtcttgaattcctgggctcaagcgatcctcctgcatcggcctcccaaagtgctgggattagaggcgtgaatcaccacgccctgccatggatccctttgaatggctgccagggcccaagagcctctgagcttccttccttatttgtaaatgacaaagatgagttgattctaagatgaagcctcagagggcaaggcagtaacaatagctaacactcagatgccagacgcagccttaagcgctttacatatgtttaatcttctgcatgacttatgacgcagatgtactgttatcatctttattttacagatgaggaaactgaggcacagtgaagtagcccgctcaagatgaatgattctgagtctgcacttctagggtcctaaaagtgtatgtttctaacattcctctaatgttctgtgcttccaactttgatattccgaaagttacttgatttctaagatcctaggattggaacatttgagaggacaaaacttctgagattggaatgtgtgttgtgcggaatctgccactgacggttctgactttctaagaaaacgagattaaaaaataatcaggccgagcatggtggctcacatctgtaatcctagcattttcggaggctgaggagggagaatcacttgagcccaggggttcaagaccagcctggacaacatagtgagacctttgtctcttaaaaaaaaacacacacacatcagtttggaccgggagtggtggtgtgagcctgtaatcccagcgctttgggaggcctaggaaggaggatcacttgaaaccagatgtttgagaccagcctgggcaacatggggaggctccatttctacaaaaaataaaaataaaaaattagccaggtgcggatgcacccttcttgtggtcgcagctactcgggaggctgaggtaggagaatccctgagctcaggagttggaggctgcagtgagccattacccttccactgcactccagcctgggggcaacaaagtgagaccctatctattaaagaaaaaaatcagtttgagcaaagaccccaggcggccgggaaaggtgttcgcttaagggcgaaagctaagaacctgcaaccttcccgtctctttcctaccacccgccgccgttaggaatcttcagatcccgctgtaaagaatggaggaaggaggagccatttatcctttaccaagatggcagcctcctggcaactccagtcactttataaatatggctgccacaggaagtacgtcacggaagagggtgggaaatctgcgcgcgcacgctgcaaaggggctttttgggacgccagtggctgagttcttcctttgacaagatggcggcaggaggcagtggcgttggtgggaagcgcagctcgaaaagcgatgccgattctggtttcctggggctgcggcccacttcggtggacccagcgctgaggcggcggcggcgaggcccaagaaataagaagcggggctggcggcggcttgctcaggagccgctggggctggaggttgaccagttcctggaagacgtgcggctacaggagcgcacgagcggtggcttgttgtcagaggccccaaatgaaaaactcttcttcgtggacactggctccaaggaaaaagggctgacaaagaagagaaccaaagtccagaagaagtcactgcttctcaagaaaccccttcgggttgacctcatcctcgagaacacatccaaagtccctgcccccaaagacgtcctcgcccaccaggtccccaacgccaagaagctcaggcggaaggagcagctatgggagaagctggccaagcagggcgagctgccccgggaggtgcgcagggcccaggcccggctcctcaacccttctgcaacaagggccaagcccgggccccaggacaccgtagagcggcccttctacgacctctgggcctcagacaaccccctggacaggccgttggttggccaggatgagtttttcctggagcagaccaagaagaaaggagtgaagcggcagcacgcctgcacaccaagccgtcccaggcgcccgccgtggaggtggcgcctgccggagcttcctacaatccatcctttgaagaccaccagaccctgctctcagcggcccacgaggtggagttgcagcggcagaaggaggcggagaagctggagcggcagctggccctgcccgccacggagcaggccgccacccaggagtccacattccaggagctgtgcgaggggctgctggaggagtcggatggtgagggggagccaggccagggcgaggggccggaggctggggatgccgaggtctgtcccacgcccgcccgcctggccaccacagagaagaagacggagcagcagcggcggcgggagaaggctgtgcacaggctgcgggtacagcaggccgcgttgcgggccgcccggctccggcaccaggagctgttccggctgcgcgggatcaaggcccaggtggccctgaggctggcggaacttgctccgttgctgtagcctgcttgtggcccatttgaaggtttaggctgacagtccccaaggctgtaacgcttaagttc

SEQ ID NO: 435269 - DNA, 2554 bp, Homo sapiens
  misc_feature (2487)..(2487): n is a, c, g, or t
  misc_feature (2494)..(2494): n is a, c, g, or t
  misc_feature (2497)..(2497): n is a, c, g, or t
cctcccgagtacctgggactacaggcgcacaccatcacgcctggctaatttttaaatttttggcagacacaggatctcactatgttgcccaggctggtcttgaattcctgggctcaagcgatcctcctgcatcggcctcccaaagtgctgggattagaggcgtgaatcaccacgccctgccatggatccctttgaatggctgccagggcccaagagcctctgagcttccttccttatttgtaaatgacaaagatgagttgattctaagatgaagcctcagagggcaaggcagtaacaatagctaacactcagatgccagacgcagccttaagcgctttacatatgtttaatcttctgcatgacttatgacgcagatgtactgttatcatctttattttacagatgaggaaactgaggcacagtgaagtagcccgctcaagatgaatgattctgagtctgcacttctagggtcctaaaagtgtatgtttctaacattcctctaatgttctgtgcttccaactttgatattccgaaagttacttgatttctaagatcctaggattggaacatttgagaggacaaaacttctgagattggaatgtgtgttgtgcggaatctgccactgacggttctgactttctaagaaaacgagattaaaaaataatcaggccgagcatggtggctcacatctgtaatcctagcattttcggaggctgaggagggagaatcacttgagcccaggggttcaagaccagcctggacaacatagtgagacctttgtctcttaaaaaaaaacacacacacatcagtttggaccgggagtggtggtgtgagcctgtaatcccagcgctttgggaggcctaggaaggaggatcacttgaaaccagatgtttgagaccagcctgggcaacatggggaggctccatttctacaaaaaataaaaataaaaaattagccaggtgcggatgcacccttcttgtggtcgcagctactcgggaggctgaggtaggagaatccctgagctcaggagttggaggctgcagtgagccattacccttccactgcactccagcctgggggcaacaaagtgagaccctatctattaaagaaaaaaatcagtttgagcaaagaccccaggcggccgggaaaggtgttcgcttaagggcgaaagctaagaacctgcaaccttcccgtctctttcctaccacccgccgccgttaggaatcttcagatcccgctgtaaagaatggaggaaggaggagccatttatcctttaccaagatggcagcctcctggcaactccagtcactttataaatatggctgccacaggaagtacgtcacggaagagggtgggaaatctgcgcgcgcacgctgcaaaggggctttttgggacgccagtggctgagttcttcctttgacaagatggcggcaggaggcagtggcgttggtgggaagcgcagctcgaaaagcgatgccgattctggtttcctggggctgcggcccacttcggtggacccagcgctgaggcggcggcggcgaggcccaagaaataagaagcggggctggcggcggcttgctcaggagccgctggggctggaggttgaccagttcctggaagacgtgcggctacaggagcgcacgagcggtggcttgttgtcagaggccccaaatgaaaaactcttcttcgtggacactggctccaaggaaaaagggctgacaaagaagagaaccaaagtccagaagaagtcactgcttctcaagaaaccccttcgggttgacctcatcctcgagaacacatccaaagtccctgcccccaaagacgtcctcgcccaccaggtccccaacgccaagaagctcaggcggaaggagcagctatgggagaagctggccaagcagggcgagctgccccgggaggtgcgcagggcccaggcccggctcctcaacccttctgcaacaagggccaagcccgggccccaggacaccgtagagcggcccttctacgacctctgggcctcagacaaccccctggacaggccgttggttggccaggatgagtttttcctggagcagaccaagaagaaaggagtgaagcggcagcacgcctgcacaccaagccgtcccaggcgcccgccgtggaggtggcgcctgccggagcttcctacaatccatcctttgaagaccaccagaccctgctctcagcggcccacgaggtggagttgcagcggcagaaggaggcggagaagctggagcggcagctggccctgcccgccacggagcaggccgccacccaggagtccacattccaggagctgtgcgaggggctgctggaggagtcggatggtgagggggagccaggccagggcgaggggccggaggctggggatgccgaggtctgtcccacgcccgcccgcctggccaccacagagaagaagacggagcagcagcggcggcgggagaaggctgtgcacaggctgcgggtacagcnaggccgnttngggccgcccgcttctccaccagcttcaccttgtacttgcgtttgaacttggctctct

SEQ ID NO: 435270 - DNA, 2685 bp, Homo sapiens
cctcccgagtacctgggactacaggcgcacaccatcacgcctggctaatttttaaatttttggcagacacaggatctcactatgttgcccaggctggtcttgaattcctgggctcaagcgatcctcctgcatcggcctcccaaagtgctgggattagaggcgtgaatcaccacgccctgccatggatccctttgaatggctgccagggcccaagagcctctgagcttccttccttatttgtaaatgacaaagatgagttgattctaagatgaagcctcagagggcaaggcagtaacaatagctaacactcagatgccagacgcagccttaagcgctttacatatgtttaatcttctgcatgacttatgacgcagatgtactgttatcatctttattttacagatgaggaaactgaggcacagtgaagtagcccgctcaagatgaatgattctgagtctgcacttctagggtcctaaaagtgtatgtttctaacattcctctaatgttctgtgcttccaactttgatattccgaaagttacttgatttctaagatcctaggattggaacatttgagaggacaaaacttctgagattggaatgtgtgttgtgcggaatctgccactgacggttctgactttctaagaaaacgagattaaaaaataatcaggccgagcatggtggctcacatctgtaatcctagcattttcggaggctgaggagggagaatcacttgagcccaggggttcaagaccagcctggacaacatagtgagacctttgtctcttaaaaaaaaacacacacacatcagtttggaccgggagtggtggtgtgagcctgtaatcccagcgctttgggaggcctaggaaggaggatcacttgaaaccagatgtttgagaccagcctgggcaacatggggaggctccatttctacaaaaaataaaaataaaaaattagccaggtgcggatgcacccttcttgtggtcgcagctactcgggaggctgaggtaggagaatccctgagctcaggagttggaggctgcagtgagccattacccttccactgcactccagcctgggggcaacaaagtgagaccctatctattaaagaaaaaaatcagtttgagcaaagaccccaggcggccgggaaaggtgttcgcttaagggcgaaagctaagaacctgcaaccttcccgtctctttcctaccacccgccgccgttaggaatcttcagatcccgctgtaaagaatggaggaaggaggagccatttatcctttaccaagatggcagcctcctggcaactccagtcactttataaatatggctgccacaggaagtacgtcacggaagagggtgggaaatctgcgcgcgcacgctgcaaaggggctttttgggacgccagtggctgagttcttcctttgacaagatggcggcaggaggcagtggcgttggtgggaagcgcagctcgaaaagcgatgccgattctggtttcctggggctgcggcccacttcggtggacccagcgctgaggcggcggcggcgaggcccaagaaataagaagcggggctggcggcggcttgctcaggagccgctggggctggaggttgaccagttcctggaagacgtgcggctacaggagcgcacgagcggtggcttgttgtcagaggccccaaatgaaaaactcttcttcgtggacactggctccaaggaaaaagggctgacaaagaagagaaccaaagtccagaagaagtcactgcttctcaagaaaccccttcgggttgacctcatcctcgagaacacatccaaagtccctgcccccaaagacgtcctcgcccaccaggtccccaacgccaagaagctcaggcggaaggagcagctatgggagaagctggccaagcagggcgagctgccccgggaggtgcgcagggcccaggcccggctcctcaacccttctgcaacaagggccaagcccgggccccaggacaccgtagagcggcccttctacgacctctgggcctcagacaaccccctggacaggccgttggttggccaggatgagtttttcctggagcagaccaagaagaaaggagtgaagcggcagcacgcctgcacaccaagccgtcccaggcgcccgccgtggaggtggcgcctgccggagcttcctacaatccatcctttgaagaccaccagaccctgctctcagcggcccacgaggtggagttgcagcggcagaaggaggcggagaagctggagcggcagctggccctgcccgccacggagcaggccgccacccaggagtccacattccaggagctgtgcgaggggctgctggaggagtcggatggtgagggggagccaggccagggcgaggggccggaggctggggatgccgaggtctgtcccacgcccgcccgcctggccaccacgtaccaggcacctgacatcgacgtgcagctgagctcggagctgacagactcgctcaggaccctgaagcccgagggcaacatccttcgagaccggttcaagagcttccagaggaggaatatgatcgagcctcgagagagagccaagttcaaacgcaagtacaaggtgaagctggtggagaagcgggcgttccgtgagatccagttgtagctgccatcagatgccggagactcgcccttcaataaaaaatctcttctagctga

SEQ ID NO: 435271 - DNA, 3025 bp, Homo sapiens
  misc_feature (2656)..(2656): n is a, c, g, or t
cctcccgagtacctgggactacaggcgcacaccatcacgcctggctaatttttaaatttttggcagacacaggatctcactatgttgcccaggctggtcttgaattcctgggctcaagcgatcctcctgcatcggcctcccaaagtgctgggattagaggcgtgaatcaccacgccctgccatggatccctttgaatggctgccagggcccaagagcctctgagcttccttccttatttgtaaatgacaaagatgagttgattctaagatgaagcctcagagggcaaggcagtaacaatagctaacactcagatgccagacgcagccttaagcgctttacatatgtttaatcttctgcatgacttatgacgcagatgtactgttatcatctttattttacagatgaggaaactgaggcacagtgaagtagcccgctcaagatgaatgattctgagtctgcacttctagggtcctaaaagtgtatgtttctaacattcctctaatgttctgtgcttccaactttgatattccgaaagttacttgatttctaagatcctaggattggaacatttgagaggacaaaacttctgagattggaatgtgtgttgtgcggaatctgccactgacggttctgactttctaagaaaacgagattaaaaaataatcaggccgagcatggtggctcacatctgtaatcctagcattttcggaggctgaggagggagaatcacttgagcccaggggttcaagaccagcctggacaacatagtgagacctttgtctcttaaaaaaaaacacacacacatcagtttggaccgggagtggtggtgtgagcctgtaatcccagcgctttgggaggcctaggaaggaggatcacttgaaaccagatgtttgagaccagcctgggcaacatggggaggctccatttctacaaaaaataaaaataaaaaattagccaggtgcggatgcacccttcttgtggtcgcagctactcgggaggctgaggtaggagaatccctgagctcaggagttggaggctgcagtgagccattacccttccactgcactccagcctgggggcaacaaagtgagaccctatctattaaagaaaaaaatcagtttgagcaaagaccccaggcggccgggaaaggtgttcgcttaagggcgaaagctaagaacctgcaaccttcccgtctctttcctaccacccgccgccgttaggaatcttcagatcccgctgtaaagaatggaggaaggaggagccatttatcctttaccaagatggcagcctcctggcaactccagtcactttataaatatggctgccacaggaagtacgtcacggaagagggtgggaaatctgcgcgcgcacgctgcaaaggggctttttgggacgccagtggctgagttcttcctttgacaagatggcggcaggaggcagtggcgttggtgggaagcgcagctcgaaaagcgatgccgattctggtttcctggggctgcggcccacttcggtggacccagcgctgaggcggcggcggcgaggcccaagaaataagaagcggggctggcggcggcttgctcaggagccgctggggctggaggttgaccagttcctggaagacgtgcggctacaggagcgcacgagcggtggcttgttgtcagaggccccaaatgaaaaactcttcttcgtggacactggctccaaggaaaaagggctgacaaagaagagaaccaaagtccagaagaagtcactgcttctcaagaaaccccttcgggttgacctcatcctcgagaacacatccaaagtccctgcccccaaagacgtcctcgcccaccaggtccccaacgccaagaagctcaggcggaaggagcagctatgggagaagctggccaagcagggcgagctgccccgggaggtgcgcagggcccaggcccggctcctcaacccttctgcaacaagggccaagcccgggccccaggacaccgtagagcggcccttctacgacctctgggcctcagacaaccccctggacaggccgttggttggccaggatgagtttttcctggagcagaccaagaagaaaggagtgaagcggcagcacgcctgcacaccaagccgtcccaggcgcccgccgtggaggtggcgcctgccggagcttcctacaatccatcctttgaagaccaccagaccctgctctcagcggcccacgaggtggagttgcagcggcagaaggaggcggagaagctggagcggcagctggccctgcccgccacggagcaggccgccacccaggagtccacattccaggagctgtgcgaggggctgctggaggagtcggatggtgagggggagccaggccagggcgaggggccggaggctggggatgccgaggtctgtcccacgcccgcccgcctggccaccactgtggccacacacgaggagaatgaatgactgtgatgctgcatgctggctgtgctgtggatgaatgtgcttgtgtcacagggcttgctgtgtgtaccatgcatgtggcctgctgatttgctgtgtgacctggccctgtgcttcctgtgcaacctatgtgatgcctttgttacctgtgcattgctgctggtgtgattcaattgtgcccatgtgttgtgccccatagatgtgctngtgctgtgatgcattggctgctgtgctggcatgagtgcgtgctgtgcagtgcgctggctgtgtgagtgcttgaggctgacaagccccgaaggcttggggcggctcaatgtaccaggcacctgacatcgacgtgcagctgagctcggagctgacagactcgctcaggaccctgaagcccgagggcaacatccttcgagaccggttcaagagcttccagaggaggaatatgatcgagcctcgagagagagccaagttcaaacgcaagtacaaggtgaagctggtggagaagcgggcgttccgtgagatccagttgtagctgccatcagatgccggagactcgcccttcaataaaaaatctcttctagctga

SEQ ID NO: 435272 - DNA, 2653 bp, Homo sapiens
cctcccgagtacctgggactacaggcgcacaccatcacgcctggctaatttttaaatttttggcagacacaggatctcactatgttgcccaggctggtcttgaattcctgggctcaagcgatcctcctgcatcggcctcccaaagtgctgggattagaggcgtgaatcaccacgccctgccatggatccctttgaatggctgccagggcccaagagcctctgagcttccttccttatttgtaaatgacaaagatgagttgattctaagatgaagcctcagagggcaaggcagtaacaatagctaacactcagatgccagacgcagccttaagcgctttacatatgtttaatcttctgcatgacttatgacgcagatgtactgttatcatctttattttacagatgaggaaactgaggcacagtgaagtagcccgctcaagatgaatgattctgagtctgcacttctagggtcctaaaagtgtatgtttctaacattcctctaatgttctgtgcttccaactttgatattccgaaagttacttgatttctaagatcctaggattggaacatttgagaggacaaaacttctgagattggaatgtgtgttgtgcggaatctgccactgacggttctgactttctaagaaaacgagattaaaaaataatcaggccgagcatggtggctcacatctgtaatcctagcattttcggaggctgaggagggagaatcacttgagcccaggggttcaagaccagcctggacaacatagtgagacctttgtctcttaaaaaaaaacacacacacatcagtttggaccgggagtggtggtgtgagcctgtaatcccagcgctttgggaggcctaggaaggaggatcacttgaaaccagatgtttgagaccagcctgggcaacatggggaggctccatttctacaaaaaataaaaataaaaaattagccaggtgcggatgcacccttcttgtggtcgcagctactcgggaggctgaggtaggagaatccctgagctcaggagttggaggctgcagtgagccattacccttccactgcactccagcctgggggcaacaaagtgagaccctatctattaaagaaaaaaatcagtttgagcaaagaccccaggcggccgggaaaggtgttcgcttaagggcgaaagctaagaacctgcaaccttcccgtctctttcctaccacccgccgccgttaggaatcttcagatcccgctgtaaagaatggaggaaggaggagccatttatcctttaccaagatggcagcctcctggcaactccagtcactttataaatatggctgccacaggaagtacgtcacggaagagggtgggaaatctgcgcgcgcacgctgcaaaggggctttttgggacgccagtggctgagttcttcctttgacaagatggcggcaggaggcagtggcgttggtgggaagcgcagctcgaaaagcgatgccgattctggtttcctggggctgcggcccacttcggtggacccagcgctgaggcggcggcggcgaggcccaagaaataagaagcggggctggcggcggcttgctcaggagccgctggggctggaggttgaccagttcctggaagacgtgcggctacaggagcgcacgagcggtggcttgttgtcagaggccccaaatgaaaaactcttcttcgtggacactggctccaaggaaaaagggctgacaaagaagagaaccaaagtccagaagaagtcactgcttctcaagaaaccccttcgggttgacctcatcctcgagaacacatccaaagtccctgcccccaaagacgtcctcgcccaccaggtccccaacgccaagaagctcaggcggaaggagcagctatgggagaagctggccaagcagggcgagctgccccgggaggtgcgcagggcccaggcccggctcctcaacccttctgcaacaagggccaagcccgggccccaggacaccgtagagcggcccttctacgacctctgggcctcagacaaccccctggacaggccgttggttggccaggatgagtttttcctggagcagaccaagaagaaaggagtgaagcggcagcacgcctgcacaccaagccgtcccaggcgcccgccgtggaggtggcgcctgccggagcttcctacaatccatcctttgaagaccaccagaccctgctctcagcggcccacgaggtggagttgcagcggcagaaggaggcggagaagctggagcggcagctggccctgcccgccacggagcaggccgccacccaggagtccacattccaggagctgtgcgaggggctgctggaggagtcggatggtgagggggagccaggccagggcgaggggccggaggctggggatgccgaggtaccaggcacctgacatcgacgtgcagctgagctcggagctgacagactcgctcaggaccctgaagcccgagggcaacatccttcgagaccggttcaagagcttccagaggaggaatatgatcgagcctcgagagagagccaagttcaaacgcaagtacaaggtgaagctggtggagaagcgggcgttccgtgagatccagttgtagctgccatcagatgccggagactcgcccttcaataaaaaatctcttctagctga

SEQ ID NO: 435273 - DNA, 2575 bp, Homo sapiens
cctcccgagtacctgggactacaggcgcacaccatcacgcctggctaatttttaaatttttggcagacacaggatctcactatgttgcccaggctggtcttgaattcctgggctcaagcgatcctcctgcatcggcctcccaaagtgctgggattagaggcgtgaatcaccacgccctgccatggatccctttgaatggctgccagggcccaagagcctctgagcttccttccttatttgtaaatgacaaagatgagttgattctaagatgaagcctcagagggcaaggcagtaacaatagctaacactcagatgccagacgcagccttaagcgctttacatatgtttaatcttctgcatgacttatgacgcagatgtactgttatcatctttattttacagatgaggaaactgaggcacagtgaagtagcccgctcaagatgaatgattctgagtctgcacttctagggtcctaaaagtgtatgtttctaacattcctctaatgttctgtgcttccaactttgatattccgaaagttacttgatttctaagatcctaggattggaacatttgagaggacaaaacttctgagattggaatgtgtgttgtgcggaatctgccactgacggttctgactttctaagaaaacgagattaaaaaataatcaggccgagcatggtggctcacatctgtaatcctagcattttcggaggctgaggagggagaatcacttgagcccaggggttcaagaccagcctggacaacatagtgagacctttgtctcttaaaaaaaaacacacacacatcagtttggaccgggagtggtggtgtgagcctgtaatcccagcgctttgggaggcctaggaaggaggatcacttgaaaccagatgtttgagaccagcctgggcaacatggggaggctccatttctacaaaaaataaaaataaaaaattagccaggtgcggatgcacccttcttgtggtcgcagctactcgggaggctgaggtaggagaatccctgagctcaggagttggaggctgcagtgagccattacccttccactgcactccagcctgggggcaacaaagtgagaccctatctattaaagaaaaaaatcagtttgagcaaagaccccaggcggccgggaaaggtgttcgcttaagggcgaaagctaagaacctgcaaccttcccgtctctttcctaccacccgccgccgttaggaatcttcagatcccgctgtaaagaatggaggaaggaggagccatttatcctttaccaagatggcagcctcctggcaactccagtcactttataaatatggctgccacaggaagtacgtcacggaagagggtgggaaatctgcgcgcgcacgctgcaaaggggctttttgggacgccagtggctgagttcttcctttgacaagatggcggcaggaggcagtggcgttggtgggaagcgcagctcgaaaagcgatgccgattctggtttcctggggctgcggcccacttcggtggacccagcgctgaggcggcggcggcgaggcccaagaaataagaagcggggctggcggcggcttgctcaggagccgctggggctggaggttgaccagttcctggaagacgtgcggctacaggagcgcacgagcggtggcttgttgtcagaggccccaaatgaaaaactcttcttcgtggacactggctccaaggaaaaagggctgacaaagaagagaaccaaagtccagaagaagtcactgcttctcaagaaaccccttcgggttgacctcatcctcgagaacacatccaaagtccctgcccccaaagacgtcctcgcccaccaggtccccaacgccaagaagctcaggcggaaggagcagctatgggagaagctggccaagcagggcgagctgccccgggaggtgcgcagggcccaggcccggctcctcaacccttctgcaacaagggccaagcccgggccccaggacaccgtagagcggcccttctacgacctctgggcctcagacaaccccctggacaggccgttggttggccaggatgagtttttcctggagcagaccaagaagaaaggagtgaagcggcagcacgcctgcacaccaagccgtcccaggcgcccgccgtggaggtggcgcctgccggagcttcctacaatccatcctttgaagaccaccagaccctgctctcagcggcccacgaggtggagttgcagcggcagaaggaggcggagaagctggagcggcagctggccctgcccgccacggagcaggccgccacccaggagtccacattccaggagctgtgcgaggggctgctggaggagtcggatgctgagctcggagctgacagactcgctcaggaccctgaagcccgagggcaacatccttcgagaccggttcaagagcttccagaggaggaatatgatcgagcctcgagagagagccaagttcaaacgcaagtacaaggtgaagctggtggagaagcgggcgttccgtgagatccagttgtagctgccatcagatgccggagactcgcccttcaataaaaaatctcttctagctga

SEQ ID NO: 435274 - DNA, 2394 bp, Homo sapiens
cctcccgagtacctgggactacaggcgcacaccatcacgcctggctaatttttaaatttttggcagacacaggatctcactatgttgcccaggctggtcttgaattcctgggctcaagcgatcctcctgcatcggcctcccaaagtgctgggattagaggcgtgaatcaccacgccctgccatggatccctttgaatggctgccagggcccaagagcctctgagcttccttccttatttgtaaatgacaaagatgagttgattctaagatgaagcctcagagggcaaggcagtaacaatagctaacactcagatgccagacgcagccttaagcgctttacatatgtttaatcttctgcatgacttatgacgcagatgtactgttatcatctttattttacagatgaggaaactgaggcacagtgaagtagcccgctcaagatgaatgattctgagtctgcacttctagggtcctaaaagtgtatgtttctaacattcctctaatgttctgtgcttccaactttgatattccgaaagttacttgatttctaagatcctaggattggaacatttgagaggacaaaacttctgagattggaatgtgtgttgtgcggaatctgccactgacggttctgactttctaagaaaacgagattaaaaaataatcaggccgagcatggtggctcacatctgtaatcctagcattttcggaggctgaggagggagaatcacttgagcccaggggttcaagaccagcctggacaacatagtgagacctttgtctcttaaaaaaaaacacacacacatcagtttggaccgggagtggtggtgtgagcctgtaatcccagcgctttgggaggcctaggaaggaggatcacttgaaaccagatgtttgagaccagcctgggcaacatggggaggctccatttctacaaaaaataaaaataaaaaattagccaggtgcggatgcacccttcttgtggtcgcagctactcgggaggctgaggtaggagaatccctgagctcaggagttggaggctgcagtgagccattacccttccactgcactccagcctgggggcaacaaagtgagaccctatctattaaagaaaaaaatcagtttgagcaaagaccccaggcggccgggaaaggtgttcgcttaagggcgaaagctaagaacctgcaaccttcccgtctctttcctaccacccgccgccgttaggaatcttcagatcccgctgtaaagaatggaggaaggaggagccatttatcctttaccaagatggcagcctcctggcaactccagtcactttataaatatggctgccacaggaagtacgtcacggaagagggtgggaaatctgcgcgcgcacgctgcaaaggggctttttgggacgccagtggctgagttcttcctttgacaagatggcggcaggaggcagtggcgttggtgggaagcgcagctcgaaaagcgatgccgattctggtttcctggggctgcggcccacttcggtggacccagcgctgaggcggcggcggcgaggcccaagaaataagaagcggggctggcggcggcttgctcaggagccgctggggctggaggttgaccagttcctggaagacgtgcggctacaggagcgcacgagcggtggcttgttgtcagaggccccaaatgaaaaactcttcttcgtggacactggctccaaggaaaaagggctgacaaagaagagaaccaaagtccagaagaagtcactgcttctcaagaaaccccttcgggttgacctcatcctcgagaacacatccaaagtccctgcccccaaagacgtcctcgcccaccaggtccccaacgccaagaagctcaggcggaaggagcagctatgggagaagctggccaagcagggcgagctgccccgggaggtgcgcagggcccaggcccggctcctcaacccttctgcaacaagggccaagcccgggccccaggacaccgtagagcggcccttctacgacctctgggcctcagacaaccccctggacaggccgttggttggccaggatgagtttttcctggagcagaccaagaagaaaggagtgaagcggcagcacgcctgcacaccaagccgtcccaggcgcccgccgtggaggtggcgcctgccggagcttcctacaatccatcctttgaagaccaccagaccctgctctcagcggcccacgaggtggagttgcagcggcagaaggaggcggagaagctggagcggcagctggccctgcccgccacggagcaggccgccacccagggcaccaggagccattcaggactggcagggtgacgcagaaccgaggagggggacagccggagcggcggagtggaaccaggtggcacaccgcgtgcccgaag

SEQ ID NO: 435275 - DNA, 2462 bp, Homo sapiens
  misc_feature (2344)..(2344): n is a, c, g, or t
  misc_feature (2347)..(2347): n is a, c, g, or t
cctcccgagtacctgggactacaggcgcacaccatcacgcctggctaatttttaaatttttggcagacacaggatctcactatgttgcccaggctggtcttgaattcctgggctcaagcgatcctcctgcatcggcctcccaaagtgctgggattagaggcgtgaatcaccacgccctgccatggatccctttgaatggctgccagggcccaagagcctctgagcttccttccttatttgtaaatgacaaagatgagttgattctaagatgaagcctcagagggcaaggcagtaacaatagctaacactcagatgccagacgcagccttaagcgctttacatatgtttaatcttctgcatgacttatgacgcagatgtactgttatcatctttattttacagatgaggaaactgaggcacagtgaagtagcccgctcaagatgaatgattctgagtctgcacttctagggtcctaaaagtgtatgtttctaacattcctctaatgttctgtgcttccaactttgatattccgaaagttacttgatttctaagatcctaggattggaacatttgagaggacaaaacttctgagattggaatgtgtgttgtgcggaatctgccactgacggttctgactttctaagaaaacgagattaaaaaataatcaggccgagcatggtggctcacatctgtaatcctagcattttcggaggctgaggagggagaatcacttgagcccaggggttcaagaccagcctggacaacatagtgagacctttgtctcttaaaaaaaaacacacacacatcagtttggaccgggagtggtggtgtgagcctgtaatcccagcgctttgggaggcctaggaaggaggatcacttgaaaccagatgtttgagaccagcctgggcaacatggggaggctccatttctacaaaaaataaaaataaaaaattagccaggtgcggatgcacccttcttgtggtcgcagctactcgggaggctgaggtaggagaatccctgagctcaggagttggaggctgcagtgagccattacccttccactgcactccagcctgggggcaacaaagtgagaccctatctattaaagaaaaaaatcagtttgagcaaagaccccaggcggccgggaaaggtgttcgcttaagggcgaaagctaagaacctgcaaccttcccgtctctttcctaccacccgccgccgttaggaatcttcagatcccgctgtaaagaatggaggaaggaggagccatttatcctttaccaagatggcagcctcctggcaactccagtcactttataaatatggctgccacaggaagtacgtcacggaagagggtgggaaatctgcgcgcgcacgctgcaaaggggctttttgggacgccagtggctgagttcttcctttgacaagatggcggcaggaggcagtggcgttggtgggaagcgcagctcgaaaagcgatgccgattctggtttcctggggctgcggcccacttcggtggacccagcgctgaggcggcggcggcgaggcccaagaaataagaagcggggctggcggcggcttgctcaggagccgctggggctggaggttgaccagttcctggaagacgtgcggctacaggagcgcacgagcggtggcttgttgtcagaggccccaaatgaaaaactcttcttcgtggacactggctccaaggaaaaagggctgacaaagaagagaaccaaagtccagaagaagtcactgcttctcaagaaaccccttcgggttgacctcatcctcgagaacacatccaaagtccctgcccccaaagacgtcctcgcccaccaggtccccaacgccaagaagctcaggcggaaggagcagctatgggagaagctggccaagcagggcgagctgccccgggaggtgcgcagggcccaggcccggctcctcaacccttctgcaacaagggccaagcccgggccccaggacaccgtagagcggcccttctacgacctctgggcctcagacaaccccctggacaggccgttggttggccaggatgagtttttcctggagcagaccaagaagaaaggagtgaagcggcagcacgcctgcacaccaagccgtcccaggcgcccgccgtggaggtggcgcctgccggagcttcctacaatccatcctttgaagaccaccagaccctgctctcagcggcccacgaggtggagttgcagcggcagaaggaggcggagaagctggagcggcagctggccctgcccgccacggagcaggccgccacccagaggggtcactccaggagctgtggagggtgtggagggagcgtggggggggcngcngggaggccgggggatcgggtgcacccccggtggccaagaaaatggcgggggaagggcactgggcaagcgtgggcgctcccaaatttgggaacactagggggggggagcaggatat

SEQ ID NO: 435276 - DNA, 4831 bp, Homo sapiens
  misc_feature (2752)..(2752): n is a, c, g, or t
  misc_feature (2779)..(2779): n is a, c, g, or t
  misc_feature (3763)..(3763): n is a, c, g, or t
cctcccgagtacctgggactacaggcgcacaccatcacgcctggctaatttttaaatttttggcagacacaggatctcactatgttgcccaggctggtcttgaattcctgggctcaagcgatcctcctgcatcggcctcccaaagtgctgggattagaggcgtgaatcaccacgccctgccatggatccctttgaatggctgccagggcccaagagcctctgagcttccttccttatttgtaaatgacaaagatgagttgattctaagatgaagcctcagagggcaaggcagtaacaatagctaacactcagatgccagacgcagccttaagcgctttacatatgtttaatcttctgcatgacttatgacgcagatgtactgttatcatctttattttacagatgaggaaactgaggcacagtgaagtagcccgctcaagatgaatgattctgagtctgcacttctagggtcctaaaagtgtatgtttctaacattcctctaatgttctgtgcttccaactttgatattccgaaagttacttgatttctaagatcctaggattggaacatttgagaggacaaaacttctgagattggaatgtgtgttgtgcggaatctgccactgacggttctgactttctaagaaaacgagattaaaaaataatcaggccgagcatggtggctcacatctgtaatcctagcattttcggaggctgaggagggagaatcacttgagcccaggggttcaagaccagcctggacaacatagtgagacctttgtctcttaaaaaaaaacacacacacatcagtttggaccgggagtggtggtgtgagcctgtaatcccagcgctttgggaggcctaggaaggaggatcacttgaaaccagatgtttgagaccagcctgggcaacatggggaggctccatttctacaaaaaataaaaataaaaaattagccaggtgcggatgcacccttcttgtggtcgcagctactcgggaggctgaggtaggagaatccctgagctcaggagttggaggctgcagtgagccattacccttccactgcactccagcctgggggcaacaaagtgagaccctatctattaaagaaaaaaatcagtttgagcaaagaccccaggcggccgggaaaggtgttcgcttaagggcgaaagctaagaacctgcaaccttcccgtctctttcctaccacccgccgccgttaggaatcttcagatcccgctgtaaagaatggaggaaggaggagccatttatcctttaccaagatggcagcctcctggcaactccagtcactttataaatatggctgccacaggaagtacgtcacggaagagggtgggaaatctgcgcgcgcacgctgcaaaggggctttttgggacgccagtggctgagttcttcctttgacaagatggcggcaggaggcagtggcgttggtgggaagcgcagctcgaaaagcgatgccgattctggtttcctggggctgcggcccacttcggtggacccagcgctgaggcggcggcggcgaggcccaagaaataagaagcggggctggcggcggcttgctcaggagccgctggggctggaggttgaccagttcctggaagacgtgcggctacaggagcgcacgagcggtggcttgttgtcagaggccccaaatgaaaaactcttcttcgtggacactggctccaaggaaaaagggctgacaaagaagagaaccaaagtccagaagaagtcactgcttctcaagaaaccccttcgggttgacctcatcctcgagaacacatccaaagtccctgcccccaaagacgtcctcgcccaccaggtccccaacgccaagaagctcaggcggaaggagcagctatgggagaagctggccaagcagggcgagctgccccgggaggtgcgcagggcccaggcccggctcctcaacccttctgcaacaagggccaagcccgggccccaggacaccgtagagcggcccttctacgacctctgggcctcagacaaccccctggacaggccgttggttggccaggatgagtttttcctggagcagaccaagaagaaaggagtgaagcggcagcacgcctgcacaccaagccgtcccaggcgcccgccgtggaggtggcgcctgccggagcttcctacaatccatcctttgaagaccaccaggtacactgccccgtccaggcctccctcctcagtgggctctgcctcttggtcaggccttcactagcttcctccctgtgctgggaactccaatgacccagacagccctgggcctgtccgcaacggggctcacggtccagtgcaagagacctgttcccagacagtgatgggcagagtggttggggctgggagcccagacggggcacctggcccagcctggggggtcaggaagggctcccgggaggaggggtcgcctgagccgaggcagaggctgagggaggggtttgcagtgggaggaggggagtgggttttccaggtggtgggaacagcactgcaaaggcacagagttgagagagaccgtggcgccttccaggaagcctgtggggcagagatgaaaaaggctgtggtgacacggtggcacactggcagccaagtgacagttatatatgggcgaggctagctcagcgatgggaaagtctagctggagccactgtgcatttagcgggcatctgttgagcacagatgctgtggacaaaggggacaaaaacccctcccttggccgggtgnggtgcctcacacctgtaatcccagcantttgggaggctgaggcgggcagatcattggaggtcaggagttggagaccagcctgaccaacatggtgaaaccctgtctctactaaatacagaaaattagcagggcatggcagcacgcatctgtggtcccaactgcttgggaggctgaggtgggaggattgcttgagcccaggaggtccaggctgcagtgagctatgatcgcaccacggcactgcagcctgtgtaacagagcgagactcaaaaaacaagcacaaccctccctcaaggaacagcccttctcatggggtcacgtgactggagagatgctgagatgtttgcggtagatgcaggacgcttgtccgaatcgttttcagcattcataagaaggagatagctagccaggaacagaggcagcttcctcatctggtagagaaaagtgtctgcggaaaaaagcaacagtgtgctcatggttgaaagcgtgagggtgccgctcactgccatctgttcctggaccagatgtgggagggggcgtggagatcagacattcgcttttagatttgtacagaactacttcgtagagataaaattcacttaaccatacggtcagcctagttagagtatgtgattcagtggcttttagtgaccattgtgtaaccatccccgcagtcaattttagaacattttcactgtccgtaaaggaaacctcacacatgtcagccatcacccccgcaattccctgtctcgtgtggtcttgggctgccaggcttcctgtctcagggaccagcccaccctgaccaattcacatagatgaaactgtgggccgggcatggtggctcacacctgtaatcccagcactttgggaggccgaggtaggtggaccacctgaggtcaggagttcaagaccagcctgaccaacatggagaaaccccatctctactaaagttacagaattagccgggtatggtggcacatgcctgtaatagtagctactcgggaggctgaggcnggagaatcgcttgaacccaggaggcgggggttgtggtgagctgagatcacaccattgcactccagtctgggcaacaagacagaaactctatctcaaaaaaaaaatgtgaagcgtgcaggtcagactgccttcacagacgtgcagagcaggtgtgagggcgagggtttgaggtgccctctggctctgtgcagggtgggtgtgctggtagacggggtgtggggaggaaagcctgggccggggcgggatccacgggcactggatgagggacagatgggaggtaagagggtctagtctcagtgtcccaggaggggttcagggacccatcctcactcccgcccctcagaccctgctctcagcggcccacgaggtggagttgcagcggcagaaggaggcggagaagctggagcggcagctggccctgcccgccacggagcaggccgccacccaggagtccacattccaggagctgtgcgaggggctgctggaggagtcggatggtgagggggagccaggccagggcgaggggccggaggctggggatgccgaggtctgtcccacgcccgcccgcctggccaccacagagaagaagacggagcagcagcggcggcgggagaaggctgtgcacaggctgcgggtacagcaggccgcgttgcgggccgcccggctccggcaccaggagctgttccggctgcgcgggatcaaggcccaggtggccctgaggctggcggagctggcgcggcggcggaggcggcggcaggcgcggcgggaggctgaggctgacaagccccgaaggctgggacggctcaagtaccaggcacctgacatcgacgtgcagctgagctcggagctgacagactcgctcaggaccctgaagcccgagggcaacatccttcgagaccggttcaagagcttccagaggaggaatatgatcgagcctcgagagagagccaagttcaaacgcaagtacaaggtgaagctggtggagaagcgggcgttccgtgagatccagttgtagctgccatcagatgccggagactcgcccttcaataaaaaatctcttctagctga

SEQ ID NO: 435277 - DNA, 2800 bp, Homo sapiens
cctcccgagtacctgggactacaggcgcacaccatcacgcctggctaatttttaaatttttggcagacacaggatctcactatgttgcccaggctggtcttgaattcctgggctcaagcgatcctcctgcatcggcctcccaaagtgctgggattagaggcgtgaatcaccacgccctgccatggatccctttgaatggctgccagggcccaagagcctctgagcttccttccttatttgtaaatgacaaagatgagttgattctaagatgaagcctcagagggcaaggcagtaacaatagctaacactcagatgccagacgcagccttaagcgctttacatatgtttaatcttctgcatgacttatgacgcagatgtactgttatcatctttattttacagatgaggaaactgaggcacagtgaagtagcccgctcaagatgaatgattctgagtctgcacttctagggtcctaaaagtgtatgtttctaacattcctctaatgttctgtgcttccaactttgatattccgaaagttacttgatttctaagatcctaggattggaacatttgagaggacaaaacttctgagattggaatgtgtgttgtgcggaatctgccactgacggttctgactttctaagaaaacgagattaaaaaataatcaggccgagcatggtggctcacatctgtaatcctagcattttcggaggctgaggagggagaatcacttgagcccaggggttcaagaccagcctggacaacatagtgagacctttgtctcttaaaaaaaaacacacacacatcagtttggaccgggagtggtggtgtgagcctgtaatcccagcgctttgggaggcctaggaaggaggatcacttgaaaccagatgtttgagaccagcctgggcaacatggggaggctccatttctacaaaaaataaaaataaaaaattagccaggtgcggatgcacccttcttgtggtcgcagctactcgggaggctgaggtaggagaatccctgagctcaggagttggaggctgcagtgagccattacccttccactgcactccagcctgggggcaacaaagtgagaccctatctattaaagaaaaaaatcagtttgagcaaagaccccaggcggccgggaaaggtgttcgcttaagggcgaaagctaagaacctgcaaccttcccgtctctttcctaccacccgccgccgttaggaatcttcagatcccgctgtaaagaatggaggaaggaggagccatttatcctttaccaagatggcagcctcctggcaactccagtcactttataaatatggctgccacaggaagtacgtcacggaagagggtgggaaatctgcgcgcgcacgctgcaaaggggctttttgggacgccagtggctgagttcttcctttgacaagatggcggcaggaggcagtggcgttggtgggaagcgcagctcgaaaagcgatgccgattctggtttcctggggctgcggcccacttcggtggacccagcgctgaggcggcggtggcttgttgtcagaggccccaaatgaaaaactcttcttcgtggacactggctccaaggaaaaagggctgacaaagaagagaaccaaagtccagaagaagtcactgcttctcaagaaaccccttcgggttgacctcatcctcgagaacacatccaaagtccctgcccccaaagacgtcctcgcccaccaggtccccaacgccaagaagctcaggcggaaggagcagctatgggagaagctggccaagcagggcgagctgccccgggaggtgcgcagggcccaggcccggctcctcaacccttctgcaacaagggccaagcccgggccccaggacaccgtagagcggcccttctacgacctctgggcctcagacaaccccctggacaggccgttggttggccaggatgagtttttcctggagcagaccaagaagaaaggagtgaagcggcagcacgcctgcacaccaagccgtcccaggcgcccgccgtggaggtggcgcctgccggagcttcctacaatccatcctttgaagaccaccagaccctgctctcagcggcccacgaggtggagttgcagcggcagaaggaggcggagaagctggagcggcagctggccctgcccgccacggagcaggccgccacccaggagtccacattccaggagctgtgcgaggggctgctggaggagtcggatggtgagggggagccaggccagggcgaggggccggaggctggggatgccgaggtctgtcccacgcccgcccgcctggccaccacagagaagaagacggagcagcagcggcggcgggagaaggctgtgcacaggctgcgggtacagcaggccgcgttgcgggccgcccggctccggcaccaggagctgttccggctgcgcgggatcaaggcccaggtggccctgaggctggcggagctggcgcggcggcggaggcggcggcaggcgcggcgggaggctgaggctgacaagccccgaaggctgggacggctcaagtaccaggcacctgacatcgacgtgcagctgagctcggagctgacagactcgctcaggaccctgaagcccgagggcaacatccttcgagaccggttcaagagcttccagaggaggaatatgatcgagcctcgagagagagccaagttcaaacgcaagtacaaggtgaagctggtggagaagcgggcgttccgtgagatccagttgtagctgccatcagatgccggagactcgcccttcaataaaaaatctcttctagctga

SEQ ID NO: 435278 - DNA, 3326 bp, Homo sapiens
cctcccgagtacctgggactacaggcgcacaccatcacgcctggctaatttttaaatttttggcagacacaggatctcactatgttgcccaggctggtcttgaattcctgggctcaagcgatcctcctgcatcggcctcccaaagtgctgggattagaggcgtgaatcaccacgccctgccatggatccctttgaatggctgccagggcccaagagcctctgagcttccttccttatttgtaaatgacaaagatgagttgattctaagatgaagcctcagagggcaaggcagtaacaatagctaacactcagatgccagacgcagccttaagcgctttacatatgtttaatcttctgcatgacttatgacgcagatgtactgttatcatctttattttacagatgaggaaactgaggcacagtgaagtagcccgctcaagatgaatgattctgagtctgcacttctagggtcctaaaagtgtatgtttctaacattcctctaatgttctgtgcttccaactttgatattccgaaagttacttgatttctaagatcctaggattggaacatttgagaggacaaaacttctgagattggaatgtgtgttgtgcggaatctgccactgacggttctgactttctaagaaaacgagattaaaaaataatcaggccgagcatggtggctcacatctgtaatcctagcattttcggaggctgaggagggagaatcacttgagcccaggggttcaagaccagcctggacaacatagtgagacctttgtctcttaaaaaaaaacacacacacatcagtttggaccgggagtggtggtgtgagcctgtaatcccagcgctttgggaggcctaggaaggaggatcacttgaaaccagatgtttgagaccagcctgggcaacatggggaggctccatttctacaaaaaataaaaataaaaaattagccaggtgcggatgcacccttcttgtggtcgcagctactcgggaggctgaggtaggagaatccctgagctcaggagttggaggctgcagtgagccattacccttccactgcactccagcctgggggcaacaaagtgagaccctatctattaaagaaaaaaatcagtttgagcaaagaccccaggcggccgggaaaggtgttcgcttaagggcgaaagctaagaacctgcaaccttcccgtctctttcctaccacccgccgccgttaggaatcttcagatcccgctgtaaagaatggaggaaggaggagccatttatcctttaccaagatggcagcctcctggcaactccagtcactttataaatatggctgccacaggaagtacgtcacggaagagggtgggaaatctgcgcgcgcacgctgcaaaggggctttttgggacgccagtggctgagttcttcctttgacaagatggcggcaggaggcagtggcgttggtgggaagcgcagctcgaaaagcgatgccgattctggtttcctggggctgcggcccacttcggtggacccagcgctgaggcggcggcggcgaggcccaagaaataagaagcggggctggcggcggcttgctcaggagccgctggggctggaggttgaccagttcctggaagacgtgcggctacaggagcgcacgagcggtggcttgttgtcagaggccccaaatgaaaaactcttcttcgtggacactggctccaaggaaaaagggctgacaaagaagagaaccaaagtccagaagaagtcactgcttctcaagaaaccccttcgggttgacctcatcctcgagaacacatccaaagtccctgcccccaaagacgtcctcgcccaccaggtccccaacgccaagaagctcaggcggaaggagcagctatgggagaagctggccaagcagggcgagctgccccgggaggtgcgcagggcccaggcccggctcctcaacccttctgcaacaagggccaagcccgggccccaggacaccgtagagcggcccttctacgacctctgggcctcagacagtgagtgatcctgctgtcacctatgaatggggacaggacggccatgtgcagtttgtgtgtgttgtgcactgcacgagagtacagtgtgaaagggagtgctttgtgggtgctttggtgacctcccagcagagtcgtgcgtcctgaaggggcggccgtttcccactcgtgcttttcctttcctgagttgtgaggcttcaggaaaggaagccttcagctttggtctcttccactttctgaacccgtccagacacagttttgtcctggtgatcaaggcccttggggtctagaatcagtccttcccttgcctgagcttcagggtcagcctttttgaaatgtggagggactgggggggagcctttggtgcctcttccatgctgggactgtcccagcagctcccctcgctgtatccacagaccccctggacaggccgttggttggccaggatgagtttttcctggagcagaccaagaagaaaggagtgaagcggcagcacgcctgcacaccaagccgtcccaggcgcccgccgtggaggtggcgcctgccggagcttcctacaatccatcctttgaagaccaccagaccctgctctcagcggcccacgaggtggagttgcagcggcagaaggaggcggagaagctggagcggcagctggccctgcccgccacggagcaggccgccacccaggagtccacattccaggagctgtgcgaggggctgctggaggagtcggatggtgagggggagccaggccagggcgaggggccggaggctggggatgccgaggtctgtcccacgcccgcccgcctggccaccacagagaagaagacggagcagcagcggcggcgggagaaggctgtgcacaggctgcgggtacagcaggccgcgttgcgggccgcccggctccggcaccaggagctgttccggctgcgcgggatcaaggcccaggtggccctgaggctggcggagctggcgcggcggcggaggcggcggcaggcgcggcgggaggctgaggctgacaagccccgaaggctgggacggctcaagtaccaggcacctgacatcgacgtgcagctgagctcggagctgacagactcgctcaggaccctgaagcccgagggcaacatccttcgagaccggttcaagagcttccagaggaggaatatgatcgagcctcgagagagagccaagttcaaacgcaagtacaaggtgaagctggtggagaagcgggcgttccgtgagatccagttgtagctgccatcagatgccggagactcgcccttcaataaaaaatctcttctagctga

SEQ ID NO: 435279 - DNA, 2740 bp, Homo sapiens
cctcccgagtacctgggactacaggcgcacaccatcacgcctggctaatttttaaatttttggcagacacaggatctcactatgttgcccaggctggtcttgaattcctgggctcaagcgatcctcctgcatcggcctcccaaagtgctgggattagaggcgtgaatcaccacgccctgccatggatccctttgaatggctgccagggcccaagagcctctgagcttccttccttatttgtaaatgacaaagatgagttgattctaagatgaagcctcagagggcaaggcagtaacaatagctaacactcagatgccagacgcagccttaagcgctttacatatgtttaatcttctgcatgacttatgacgcagatgtactgttatcatctttattttacagatgaggaaactgaggcacagtgaagtagcccgctcaagatgaatgattctgagtctgcacttctagggtcctaaaagtgtatgtttctaacattcctctaatgttctgtgcttccaactttgatattccgaaagttacttgatttctaagatcctaggattggaacatttgagaggacaaaacttctgagattggaatgtgtgttgtgcggaatctgccactgacggttctgactttctaagaaaacgagattaaaaaataatcaggccgagcatggtggctcacatctgtaatcctagcattttcggaggctgaggagggagaatcacttgagcccaggggttcaagaccagcctggacaacatagtgagacctttgtctcttaaaaaaaaacacacacacatcagtttggaccgggagtggtggtgtgagcctgtaatcccagcgctttgggaggcctaggaaggaggatcacttgaaaccagatgtttgagaccagcctgggcaacatggggaggctccatttctacaaaaaataaaaataaaaaattagccaggtgcggatgcacccttcttgtggtcgcagctactcgggaggctgaggtaggagaatccctgagctcaggagttggaggctgcagtgagccattacccttccactgcactccagcctgggggcaacaaagtgagaccctatctattaaagaaaaaaatcagtttgagcaaagaccccaggcggccgggaaaggtgttcgcttaagggcgaaagctaagaacctgcaaccttcccgtctctttcctaccacccgccgccgttaggaatcttcagatcccgctgtaaagaatggaggaaggaggagccatttatcctttaccaagatggcagcctcctggcaactccagtcactttataaatatggctgccacaggaagtacgtcacggaagagggtgggaaatctgcgcgcgcacgctgcaaaggggctttttgggacgccagtggctgagttcttcctttgacaagatggcggcaggaggcagtggcgttggtgggaagcgcagctcgaaaagcgatgccgattctggtttcctggggctgcggcccacttcggtggacccagcgctgaggcggcggcggcgaggcccaagaaataagaagcggggctggcggcggcttgctcaggagccgctggggctggaggttgaccagttcctggaagacgtgcggctacaggagcgcacgagcggtggcttgttgtcagaggccccaaatgaaaaactcttcttcgtggacactggctccaaggaaaaagggctgacaaagaagagaaccaaagtccagaagaagtcactgcttctcaagaaaccccttcgggttgacctcatcctcgagaacacatccaaagtccctgcccccaaagacgtcctcgcccaccaggtccccaacgccaagaagctcaggcggaaggagcagctatgggagaagctggccaagcagggcgagctgccccgggaggtgccggcagcacgcctgcacaccaagccgtcccaggcgcccgccgtggaggtggcgcctgccggagcttcctacaatccatcctttgaagaccaccagaccctgctctcagcggcccacgaggtggagttgcagcggcagaaggaggcggagaagctggagcggcagctggccctgcccgccacggagcaggccgccacccaggagtccacattccaggagctgtgcgaggggctgctggaggagtcggatggtgagggggagccaggccagggcgaggggccggaggctggggatgccgaggtctgtcccacgcccgcccgcctggccaccacagagaagaagacggagcagcagcggcggcgggagaaggctgtgcacaggctgcgggtacagcaggccgcgttgcgggccgcccggctccggcaccaggagctgttccggctgcgcgggatcaaggcccaggtggccctgaggctggcggagctggcgcggcggcggaggcggcggcaggcgcggcgggaggctgaggctgacaagccccgaaggctgggacggctcaagtaccaggcacctgacatcgacgtgcagctgagctcggagctgacagactcgctcaggaccctgaagcccgagggcaacatccttcgagaccggttcaagagcttccagaggaggaatatgatcgagcctcgagagagagccaagttcaaacgcaagtacaaggtgaagctggtggagaagcgggcgttccgtgagatccagttgtagctgccatcagatgccggagactcgcccttcaataaaaaatctcttctagctga

SEQ ID NO: 435280 - DNA, 2448 bp, Homo sapiens
cctcccgagtacctgggactacaggcgcacaccatcacgcctggctaatttttaaatttttggcagacacaggatctcactatgttgcccaggctggtcttgaattcctgggctcaagcgatcctcctgcatcggcctcccaaagtgctgggattagaggcgtgaatcaccacgccctgccatggatccctttgaatggctgccagggcccaagagcctctgagcttccttccttatttgtaaatgacaaagatgagttgattctaagatgaagcctcagagggcaaggcagtaacaatagctaacactcagatgccagacgcagccttaagcgctttacatatgtttaatcttctgcatgacttatgacgcagatgtactgttatcatctttattttacagatgaggaaactgaggcacagtgaagtagcccgctcaagatgaatgattctgagtctgcacttctagggtcctaaaagtgtatgtttctaacattcctctaatgttctgtgcttccaactttgatattccgaaagttacttgatttctaagatcctaggattggaacatttgagaggacaaaacttctgagattggaatgtgtgttgtgcggaatctgccactgacggttctgactttctaagaaaacgagattaaaaaataatcaggccgagcatggtggctcacatctgtaatcctagcattttcggaggctgaggagggagaatcacttgagcccaggggttcaagaccagcctggacaacatagtgagacctttgtctcttaaaaaaaaacacacacacatcagtttggaccgggagtggtggtgtgagcctgtaatcccagcgctttgggaggcctaggaaggaggatcacttgaaaccagatgtttgagaccagcctgggcaacatggggaggctccatttctacaaaaaataaaaataaaaaattagccaggtgcggatgcacccttcttgtggtcgcagctactcgggaggctgaggtaggagaatccctgagctcaggagttggaggctgcagtgagccattacccttccactgcactccagcctgggggcaacaaagtgagaccctatctattaaagaaaaaaatcagtttgagcaaagaccccaggcggccgggaaaggtgttcgcttaagggcgaaagctaagaacctgcaaccttcccgtctctttcctaccacccgccgccgttaggaatcttcagatcccgctgtaaagaatggaggaaggaggagccatttatcctttaccaagatggcagcctcctggcaactccagtcactttataaatatggctgccacaggaagtacgtcacggaagagggtgggaaatctgcgcgcgcacgctgcaaaggggctttttgggacgccagtggctgagttcttcctttgacaagatggcggcaggaggcagtggcgttggtgggaagcgcagctcgaaaagcgatgccgattctggtttcctggggctgcggcccacttcggtggacccagcgctgaggcggcggcggcgaggcccaagaaataagaagcggggctggcggcggcttgctcaggagccgctggggctggaggttgaccagttcctggaagacgtgcggctacaggagcgcacgagcggtggcttgttgtcagaggccccaaatgaaaaactcttcttcgtggacactggctccaaggaaaaagggctgacaaagaagagaaccaaagtccagaagaagtcactgcttctcaagaaaccccttcgggttgacctcatcctcgagaacacatccaaagtccctgcccccaaagacgtcctcgcccaccaggtccccaacgccaagaagctcaggcggaaggagcagctatgggagaagctggccaagcagggcgagctgccccgggaggtgcgcagggcccaggcccggctcctcaacccttctgcaacaagggccaagcccgggccccaggacaccgtagagcggcccttctacgacctctgggcctcagacaaccccctggacaggccgttggttggccaggatgagtttttcctggagcagaccaagaagaaaggagtgaagcggcagcacgcctgcacaccaagccgtcccaggcgcccgccgtggagcggcgggaggctgaggctgacaagccccgaaggctgggacggctcaagtaccaggcacctgacatcgacgtgcagctgagctcggagctgacagactcgctcaggaccctgaagcccgagggcaacatccttcgagaccggttcaagagcttccagaggaggaatatgatcgagcctcgagagagagccaagttcaaacgcaagtacaaggtgaagctggtggagaagcgggcgttccgtgagatccagttgtagctgccatcagatgccggagactcgcccttcaataaaaaatctcttctagctga

SEQ ID NO: 435281 - DNA, 2401 bp, Homo sapiens
cctcccgagtacctgggactacaggcgcacaccatcacgcctggctaatttttaaatttttggcagacacaggatctcactatgttgcccaggctggtcttgaattcctgggctcaagcgatcctcctgcatcggcctcccaaagtgctgggattagaggcgtgaatcaccacgccctgccatggatccctttgaatggctgccagggcccaagagcctctgagcttccttccttatttgtaaatgacaaagatgagttgattctaagatgaagcctcagagggcaaggcagtaacaatagctaacactcagatgccagacgcagccttaagcgctttacatatgtttaatcttctgcatgacttatgacgcagatgtactgttatcatctttattttacagatgaggaaactgaggcacagtgaagtagcccgctcaagatgaatgattctgagtctgcacttctagggtcctaaaagtgtatgtttctaacattcctctaatgttctgtgcttccaactttgatattccgaaagttacttgatttctaagatcctaggattggaacatttgagaggacaaaacttctgagattggaatgtgtgttgtgcggaatctgccactgacggttctgactttctaagaaaacgagattaaaaaataatcaggccgagcatggtggctcacatctgtaatcctagcattttcggaggctgaggagggagaatcacttgagcccaggggttcaagaccagcctggacaacatagtgagacctttgtctcttaaaaaaaaacacacacacatcagtttggaccgggagtggtggtgtgagcctgtaatcccagcgctttgggaggcctaggaaggaggatcacttgaaaccagatgtttgagaccagcctgggcaacatggggaggctccatttctacaaaaaataaaaataaaaaattagccaggtgcggatgcacccttcttgtggtcgcagctactcgggaggctgaggtaggagaatccctgagctcaggagttggaggctgcagtgagccattacccttccactgcactccagcctgggggcaacaaagtgagaccctatctattaaagaaaaaaatcagtttgagcaaagaccccaggcggccgggaaaggtgttcgcttaagggcgaaagctaagaacctgcaaccttcccgtctctttcctaccacccgccgccgttaggaatcttcagatcccgctgtaaagaatggaggaaggaggagccatttatcctttaccaagatggcagcctcctggcaactccagtcactttataaatatggctgccacaggaagtacgtcacggaagagggtgggaaatctgcgcgcgcacgctgcaaaggggctttttgggacgccagtggctgagttcttcctttgacaagatggcggcaggaggcagtggcgttggtgggaagcgcagctcgaaaagcgatgccgattctggtttcctggggctgcggcccacttcggtggacccagcgctgaggcggcggcggcgaggcccaagaaataagaagcggggctggcggcggcttgctcaggagccgctggggctggaggttgaccagttcctggaagacgtgcggctacaggagcgcacgagcggtggcttgttgtcagaggccccaaatgaaaaactcttcttcgtggacactggctccaaggaaaaagggctgacaaagaagagaaccaaagtccagaagaagtcactgcttctcaagaaaccccttcgggttgacctcatcctcgagaacacatccaaagtccctgcccccaaagacgtcctcgcccaccaggtccccaacgccaagaagctcaggcggaaggagcagctatgggagaagctggccaagcagggcgagctgccccgggaggtgcgcagggcccaggcccggctcctcaacccttctgcaacaagggccaagcccgggccccaggacaccgtagagcggcccttctacgacctctgggcctcagacaaccccctggacaggccgttggttggccaggatgagtttttcctggagcagaccaagaagaaaggagtgaagcggcgggaggctgaggctgacaagccccgaaggctgggacggctcaagtaccaggcacctgacatcgacgtgcagctgagctcggagctgacagactcgctcaggaccctgaagcccgagggcaacatccttcgagaccggttcaagagcttccagaggaggaatatgatcgagcctcgagagagagccaagttcaaacgcaagtacaaggtgaagctggtggagaagcgggcgttccgtgagatccagttgtagctgccatcagatgccggagactcgcccttcaataaaaaatctcttctagctga

SEQ ID NO: 435282 - DNA, 2285 bp, Homo sapiens
  misc_feature (2118)..(2118): n is a, c, g, or t
  misc_feature (2125)..(2125): n is a, c, g, or t
  misc_feature (2137)..(2137): n is a, c, g, or t
  misc_feature (2152)..(2153): n is a, c, g, or t
  misc_feature (2165)..(2165): n is a, c, g, or t
  misc_feature (2168)..(2169): n is a, c, g, or t
  misc_feature (2189)..(2189): n is a, c, g, or t
  misc_feature (2191)..(2191): n is a, c, g, or t
  misc_feature (2198)..(2199): n is a, c, g, or t
cctcccgagtacctgggactacaggcgcacaccatcacgcctggctaatttttaaatttttggcagacacaggatctcactatgttgcccaggctggtcttgaattcctgggctcaagcgatcctcctgcatcggcctcccaaagtgctgggattagaggcgtgaatcaccacgccctgccatggatccctttgaatggctgccagggcccaagagcctctgagcttccttccttatttgtaaatgacaaagatgagttgattctaagatgaagcctcagagggcaaggcagtaacaatagctaacactcagatgccagacgcagccttaagcgctttacatatgtttaatcttctgcatgacttatgacgcagatgtactgttatcatctttattttacagatgaggaaactgaggcacagtgaagtagcccgctcaagatgaatgattctgagtctgcacttctagggtcctaaaagtgtatgtttctaacattcctctaatgttctgtgcttccaactttgatattccgaaagttacttgatttctaagatcctaggattggaacatttgagaggacaaaacttctgagattggaatgtgtgttgtgcggaatctgccactgacggttctgactttctaagaaaacgagattaaaaaataatcaggccgagcatggtggctcacatctgtaatcctagcattttcggaggctgaggagggagaatcacttgagcccaggggttcaagaccagcctggacaacatagtgagacctttgtctcttaaaaaaaaacacacacacatcagtttggaccgggagtggtggtgtgagcctgtaatcccagcgctttgggaggcctaggaaggaggatcacttgaaaccagatgtttgagaccagcctgggcaacatggggaggctccatttctacaaaaaataaaaataaaaaattagccaggtgcggatgcacccttcttgtggtcgcagctactcgggaggctgaggtaggagaatccctgagctcaggagttggaggctgcagtgagccattacccttccactgcactccagcctgggggcaacaaagtgagaccctatctattaaagaaaaaaatcagtttgagcaaagaccccaggcggccgggaaaggtgttcgcttaagggcgaaagctaagaacctgcaaccttcccgtctctttcctaccacccgccgccgttaggaatcttcagatcccgctgtaaagaatggaggaaggaggagccatttatcctttaccaagatggcagcctcctggcaactccagtcactttataaatatggctgccacaggaagtacgtcacggaagagggtgggaaatctgcgcgcgcacgctgcaaaggggctttttgggacgccagtggctgagttcttcctttgacaagatggcggcaggaggcagtggcgttggtgggaagcgcagctcgaaaagcgatgccgattctggtttcctggggctgcggcccacttcggtggacccagcgctgaggcggcggcggcgaggcccaagaaataagaagcggggctggcggcggcttgctcaggagccgctggggctggaggttgaccagttcctggaagacgtgcggctacaggagcgcacgagcggtggcttgttgtcagaggccccaaatgaaaaactcttcttcgtggacactggctccaaggaaaaagggctgacaaagaagagaaccaaagtccagaagaagtcactgcttctcaagaaaccccttcgggttgacctcatcctcgagaacacatccaaagtccctgcccccaaagacgtcctcgcccaccaggtccccaacgccaagaagctcaggcggaaggagcagctatgggagaagctggccaagcagggcgagctgccccgggaggtgcgcagggcccaggcccggctcctcaacccttctgcaacaagggccaagcccgggccccaggacaccgtagagcggcccttctacgacctctgggcctcagacaaccccctggacaggccgttggttggccaggatgagtttttcctggagcagaccaagaagaaaggagtgaagcggcagacgcctgacaccaagcgtnccaggcnccgcgtggaggngggcctgcgagttcnnaaatccatcttngannacacagacctgtctcagggncncgagggnnttgcgggcaagggcgggaaatgagggggggcctggccgcaggggggcgcaccgggtccatccgaagggcacggggggacctggggg

SEQ ID NO: 435283 - DNA, 2275 bp, Homo sapiens
cctcccgagtacctgggactacaggcgcacaccatcacgcctggctaatttttaaatttttggcagacacaggatctcactatgttgcccaggctggtcttgaattcctgggctcaagcgatcctcctgcatcggcctcccaaagtgctgggattagaggcgtgaatcaccacgccctgccatggatccctttgaatggctgccagggcccaagagcctctgagcttccttccttatttgtaaatgacaaagatgagttgattctaagatgaagcctcagagggcaaggcagtaacaatagctaacactcagatgccagacgcagccttaagcgctttacatatgtttaatcttctgcatgacttatgacgcagatgtactgttatcatctttattttacagatgaggaaactgaggcacagtgaagtagcccgctcaagatgaatgattctgagtctgcacttctagggtcctaaaagtgtatgtttctaacattcctctaatgttctgtgcttccaactttgatattccgaaagttacttgatttctaagatcctaggattggaacatttgagaggacaaaacttctgagattggaatgtgtgttgtgcggaatctgccactgacggttctgactttctaagaaaacgagattaaaaaataatcaggccgagcatggtggctcacatctgtaatcctagcattttcggaggctgaggagggagaatcacttgagcccaggggttcaagaccagcctggacaacatagtgagacctttgtctcttaaaaaaaaacacacacacatcagtttggaccgggagtggtggtgtgagcctgtaatcccagcgctttgggaggcctaggaaggaggatcacttgaaaccagatgtttgagaccagcctgggcaacatggggaggctccatttctacaaaaaataaaaataaaaaattagccaggtgcggatgcacccttcttgtggtcgcagctactcgggaggctgaggtaggagaatccctgagctcaggagttggaggctgcagtgagccattacccttccactgcactccagcctgggggcaacaaagtgagaccctatctattaaagaaaaaaatcagtttgagcaaagaccccaggcggccgggaaaggtgttcgcttaagggcgaaagctaagaacctgcaaccttcccgtctctttcctaccacccgccgccgttaggaatcttcagatcccgctgtaaagaatggaggaaggaggagccatttatcctttaccaagatggcagcctcctggcaactccagtcactttataaatatggctgccacaggaagtacgtcacggaagagggtgggaaatctgcgcgcgcacgctgcaaaggggctttttgggacgccagtggctgagttcttcctttgacaagatggcggcaggaggcagtggcgttggtgggaagcgcagctcgaaaagcgatgccgattctggtttcctggggctgcggcccacttcggtggacccagcgctgaggcggcggcggcgaggcccaagaaataagaagcggggctggcggcggcttgctcaggagccgctggggctggaggttgaccagttcctggaagacgtgcggctacaggagcgcacgagcggtggcttgttgtcagaggccccaaatgaaaaactcttcttcgtggacactggctccaaggaaaaagggctgacaaagaagagaaccaaagtccagaagaagtcactgcttctcaagaaaccccttcgggttgacctcatcctcgagaacacatccaaagtccctgcccccaaagacgtcctcgcccaccaggtccccaacgccaagaagctcaggcggaaggagcagctatgggagaagctggccaagcagggcgagctgccccgggaggtgcgcagggcccaggcccggctcctcaacccttctgcaacaagggccaagcccgggccccaggacaccgtagagcggcccttctacgacctctgggcctcagacaaccccatggcctccatgactttttccaaaaaaaaaacaaaaaaaaaaaaaaaaaaaaggggggggaggatataagagaatactgtcacaataagggatgccaccaatattggcagttatacccggtattctttgcaacaagagtggggcccccataaagagagcaccaaatataaaaagtagaagccactgtagccgcacgttgcacaaatgtacacgaaagctgaaaactgtgctctgtggtactttgaaag

SEQ ID NO: 435284 - DNA, 2423 bp, Homo sapiens
cctcccgagtacctgggactacaggcgcacaccatcacgcctggctaatttttaaatttttggcagacacaggatctcactatgttgcccaggctggtcttgaattcctgggctcaagcgatcctcctgcatcggcctcccaaagtgctgggattagaggcgtgaatcaccacgccctgccatggatccctttgaatggctgccagggcccaagagcctctgagcttccttccttatttgtaaatgacaaagatgagttgattctaagatgaagcctcagagggcaaggcagtaacaatagctaacactcagatgccagacgcagccttaagcgctttacatatgtttaatcttctgcatgacttatgacgcagatgtactgttatcatctttattttacagatgaggaaactgaggcacagtgaagtagcccgctcaagatgaatgattctgagtctgcacttctagggtcctaaaagtgtatgtttctaacattcctctaatgttctgtgcttccaactttgatattccgaaagttacttgatttctaagatcctaggattggaacatttgagaggacaaaacttctgagattggaatgtgtgttgtgcggaatctgccactgacggttctgactttctaagaaaacgagattaaaaaataatcaggccgagcatggtggctcacatctgtaatcctagcattttcggaggctgaggagggagaatcacttgagcccaggggttcaagaccagcctggacaacatagtgagacctttgtctcttaaaaaaaaacacacacacatcagtttggaccgggagtggtggtgtgagcctgtaatcccagcgctttgggaggcctaggaaggaggatcacttgaaaccagatgtttgagaccagcctgggcaacatggggaggctccatttctacaaaaaataaaaataaaaaattagccaggtgcggatgcacccttcttgtggtcgcagctactcgggaggctgaggtaggagaatccctgagctcaggagttggaggctgcagtgagccattacccttccactgcactccagcctgggggcaacaaagtgagaccctatctattaaagaaaaaaatcagtttgagcaaagaccccaggcggccgggaaaggtgttcgcttaagggcgaaagctaagaacctgcaaccttcccgtctctttcctaccacccgccgccgttaggaatcttcagatcccgctgtaaagaatggaggaaggaggagccatttatcctttaccaagatggcagcctcctggcaactccagtcactttataaatatggctgccacaggaagtacgtcacggaagagggtgggaaatctgcgcgcgcacgctgcaaaggggctttttgggacgccagtggctgagttcttcctttgacaagatggcggcaggaggcagtggcgttggtgggaagcgcagctcgaaaagcgatgccgattctggtttcctggggctgcggcccacttcggtggacccagcgctgaggcggcggcggcgaggcccaagaaataagaagcggggctggcggcggcttgctcaggagccgctggggctggaggttgaccagttcctggaagacgtgcggctacaggagcgcacgagcggtggcttgttgtcagaggccccaaatgaaaaactcttcttcgtggacactggctccaaggaaaaagggctgacaaagaagagaaccaaagtccagaagaagtcactgcttctcaagaaaccccttcgggttgacctcatcctcgagaacacatccaaagtccctgcccccaaagacgtcctcgcccaccaggtccccaacgccaagaagctcaggcggaaggagtccacattccaggagctgtgcgaggggctgctggaggagtcggatggtgagggggagccaggccagggcgaggggccggaggctggggatgccgaggtctgtcccacgcccgcccgcctggccaccacagagaagaagacggagcagcagcggcggcgggagaaggctgtgcacaggctgcgggtacagcaggccgcgttgcgggccgcccggctccggcaccaggagctgttccggctgcgcgcggcgggaggctgaggctgacaagccccgaaggctgggacggctcaagtaccaggcacctgacatcgacgtgcagctgagctcggagctgacagactcgctcaggaccctgaagcccgagggcaacatccttcgagaccggttcaagagcttccagaggaggaatatgatcgagcctcgagagagagccaagttcaaacgcaagtacaaggtgaagctggtggagaagcgggcgttccgtgagatccagttgtagctgccatcagatgccggagactcgcccttcaataaaaaatctcttctagctga

SEQ ID NO: 435285 - DNA, 1843 bp, Homo sapiens
cctcccgagtacctgggactacaggcgcacaccatcacgcctggctaatttttaaatttttggcagacacaggatctcactatgttgcccaggctggtcttgaattcctgggctcaagcgatcctcctgcatcggcctcccaaagtgctgggattagaggcgtgaatcaccacgccctgccatggatccctttgaatggctgccagggcccaagagcctctgagcttccttccttatttgtaaatgacaaagatgagttgattctaagatgaagcctcagagggcaaggcagtaacaatagctaacactcagatgccagacgcagccttaagcgctttacatatgtttaatcttctgcatgacttatgacgcagatgtactgttatcatctttattttacagatgaggaaactgaggcacagtgaagtagcccgctcaagatgaatgattctgagtctgcacttctagggtcctaaaagtgtatgtttctaacattcctctaatgttctgtgcttccaactttgatattccgaaagttacttgatttctaagatcctaggattggaacatttgagaggacaaaacttctgagattggaatgtgtgttgtgcggaatctgccactgacggttctgactttctaagaaaacgagattaaaaaataatcaggccgagcatggtggctcacatctgtaatcctagcattttcggaggctgaggagggagaatcacttgagcccaggggttcaagaccagcctggacaacatagtgagacctttgtctcttaaaaaaaaacacacacacatcagtttggaccgggagtggtggtgtgagcctgtaatcccagcgctttgggaggcctaggaaggaggatcacttgaaaccagatgtttgagaccagcctgggcaacatggggaggctccatttctacaaaaaataaaaataaaaaattagccaggtgcggatgcacccttcttgtggtcgcagctactcgggaggctgaggtaggagaatccctgagctcaggagttggaggctgcagtgagccattacccttccactgcactccagcctgggggcaacaaagtgagaccctatctattaaagaaaaaaatcagtttgagcaaagaccccaggcggccgggaaaggtgttcgcttaagggcgaaagctaagaacctgcaaccttcccgtctctttcctaccacccgccgccgttaggaatcttcagatcccgctgtaaagaatggaggaaggaggagccatttatcctttaccaagatggcagcctcctggcaactccagtcactttataaatatggctgccacaggaagtacgtcacggaagagggtgggaaatctgcgcgcgcacgctgcaaaggggctttttgggacgccagtggctgagttcttcctttgacaagatggcggcaggaggcagtggcgttggtgggaagcgcagctcgaaaagcgatgccgattctggtttcctggggctgcggcccacttcggtggacccagcgctgaggcggcggcggcgggaggctgaggctgacaagccccgaaggctgggacggctcaagtaccaggcacctgacatcgacgtgcagctgagctcggagctgacagactcgctcaggaccctgaagcccgagggcaacatccttcgagaccggttcaagagcttccagaggaggaatatgatcgagcctcgagagagagccaagttcaaacgcaagtacaaggtgaagctggtggagaagcgggcgttccgtgagatccagttgtagctgccatcagatgccggagactcgcccttcaataaaaaatctcttctagctga

SEQ ID NO: 435286 - DNA, 1974 bp, Homo sapiens
cctcccgagtacctgggactacaggcgcacaccatcacgcctggctaatttttaaatttttggcagacacaggatctcactatgttgcccaggctggtcttgaattcctgggctcaagcgatcctcctgcatcggcctcccaaagtgctgggattagaggcgtgaatcaccacgccctgccatggatccctttgaatggctgccagggcccaagagcctctgagcttccttccttatttgtaaatgacaaagatgagttgattctaagatgaagcctcagagggcaaggcagtaacaatagctaacactcagatgccagacgcagccttaagcgctttacatatgtttaatcttctgcatgacttatgacgcagatgtactgttatcatctttattttacagatgaggaaactgaggcacagtgaagtagcccgctcaagatgaatgattctgagtctgcacttctagggtcctaaaagtgtatgtttctaacattcctctaatgttctgtgcttccaactttgatattccgaaagttacttgatttctaagatcctaggattggaacatttgagaggacaaaacttctgagattggaatgtgtgttgtgcggaatctgccactgacggttctgactttctaagaaaacgagattaaaaaataatcaggccgagcatggtggctcacatctgtaatcctagcattttcggaggctgaggagggagaatcacttgagcccaggggttcaagaccagcctggacaacatagtgagacctttgtctcttaaaaaaaaacacacacacatcagtttggaccgggagtggtggtgtgagcctgtaatcccagcgctttgggaggcctaggaaggaggatcacttgaaaccagatgtttgagaccagcctgggcaacatggggaggctccatttctacaaaaaataaaaataaaaaattagccaggtgcggatgcacccttcttgtggtcgcagctactcgggaggctgaggtaggagaatccctgagctcaggagttggaggctgcagtgagccattacccttccactgcactccagcctgggggcaacaaagtgagaccctatctattaaagaaaaaaatcagtttgagcaaagaccccaggcggccgggaaaggtgttcgcttaagggcgaaagctaagaacctgcaaccttcccgtctctttcctaccacccgccgccgttaggaatcttcagatcccgctgtaaagaatggaggaaggaggagccatttatcctttaccaagatggcagcctcctggcaactccagtcactttataaatatggctgccacaggaagtacgtcacggaagagggtgggaaatctgcgcgcgcacgctgcaaaggggctttttgggacgccagtggctgagttcttcctttgacaagatggcggcaggaggcagtggcgttggtgggaagcgcagctcgaaaagcgatgccgattctggtttcctggggctgcggcccacttcggtggacccagcgctgaggcggcggcggcgaggcccaagaaataagaagcggggctggcggcggcttgctcaggagccgctggggctggaggttgaccagttcctggaagacgtgcggctacaggagcgcacgagcggtggcttgttgtcagaggccccaaatgaaaaactcttcttcgtggacactggctccaaggaaaaaggtaccaggcacctgacatcgacgtgcagctgagctcggagctgacagactcgctcaggaccctgaagcccgagggcaacatccttcgagaccggttcaagagcttccagaggaggaatatgatcgagcctcgagagagagccaagttcaaacgcaagtacaaggtgaagctggtggagaagcgggcgttccgtgagatccagttgtagctgccatcagatgccggagactcgcccttcaataaaaaatctcttctagctga

SEQ ID NO: 435287 - DNA, 1843 bp, Homo sapiens
cctcccgagtacctgggactacaggcgcacaccatcacgcctggctaatttttaaatttttggcagacacaggatctcactatgttgcccaggctggtcttgaattcctgggctcaagcgatcctcctgcatcggcctcccaaagtgctgggattagaggcgtgaatcaccacgccctgccatggatccctttgaatggctgccagggcccaagagcctctgagcttccttccttatttgtaaatgacaaagatgagttgattctaagatgaagcctcagagggcaaggcagtaacaatagctaacactcagatgccagacgcagccttaagcgctttacatatgtttaatcttctgcatgacttatgacgcagatgtactgttatcatctttattttacagatgaggaaactgaggcacagtgaagtagcccgctcaagatgaatgattctgagtctgcacttctagggtcctaaaagtgtatgtttctaacattcctctaatgttctgtgcttccaactttgatattccgaaagttacttgatttctaagatcctaggattggaacatttgagaggacaaaacttctgagattggaatgtgtgttgtgcggaatctgccactgacggttctgactttctaagaaaacgagattaaaaaataatcaggccgagcatggtggctcacatctgtaatcctagcattttcggaggctgaggagggagaatcacttgagcccaggggttcaagaccagcctggacaacatagtgagacctttgtctcttaaaaaaaaacacacacacatcagtttggaccgggagtggtggtgtgagcctgtaatcccagcgctttgggaggcctaggaaggaggatcacttgaaaccagatgtttgagaccagcctgggcaacatggggaggctccatttctacaaaaaataaaaataaaaaattagccaggtgcggatgcacccttcttgtggtcgcagctactcgggaggctgaggtaggagaatccctgagctcaggagttggaggctgcagtgagccattacccttccactgcactccagcctgggggcaacaaagtgagaccctatctattaaagaaaaaaatcagtttgagcaaagaccccaggcggccgggaaaggtgttcgcttaagggcgaaagctaagaacctgcaaccttcccgtctctttcctaccacccgccgccgttaggaatcttcagatcccgctgtaaagaatggaggaaggaggagccatttatcctttaccaagatggcagcctcctggcaactccagtcactttataaatatggctgccacaggaagtacgtcacggaagagggtgggaaatctgcgcgcgcacgctgcaaaggggctttttgggacgccagtggctgagttcttcctttgacaagatggcggcaggaggcagtggcgttggtgggaagcgcagctcgaaaagcgatgccgattctggtttcctggggctgcggcccacttcggtggacccagcgctgaggcggcggcggcgaggcccaagaaataagaagcggggctggcggcggcttgctcaggagccgctggggctggaggttgaccagttcctggaagacgtgcggctacaggagcgcacgagcggtggcttgttgtcagaggccccaaatgaaaaactcttcttcgtggacactggctccaaggaaaaagggctgacaaagaagagaaccaaagtccagaagaagtcactgcttctcaagaaaccccttcgggttgacctcatcctcgagaacacatccaaagtccctgcccccaaagaagtgagtgtcccagcatccct

SEQ ID NO: 435288 - DNA, 2065 bp, Homo sapiens
cctcccgagtacctgggactacaggcgcacaccatcacgcctggctaatttttaaatttttggcagacacaggatctcactatgttgcccaggctggtcttgaattcctgggctcaagcgatcctcctgcatcggcctcccaaagtgctgggattagaggcgtgaatcaccacgccctgccatggatccctttgaatggctgccagggcccaagagcctctgagcttccttccttatttgtaaatgacaaagatgagttgattctaagatgaagcctcagagggcaaggcagtaacaatagctaacactcagatgccagacgcagccttaagcgctttacatatgtttaatcttctgcatgacttatgacgcagatgtactgttatcatctttattttacagatgaggaaactgaggcacagtgaagtagcccgctcaagatgaatgattctgagtctgcacttctagggtcctaaaagtgtatgtttctaacattcctctaatgttctgtgcttccaactttgatattccgaaagttacttgatttctaagatcctaggattggaacatttgagaggacaaaacttctgagattggaatgtgtgttgtgcggaatctgccactgacggttctgactttctaagaaaacgagattaaaaaataatcaggccgagcatggtggctcacatctgtaatcctagcattttcggaggctgaggagggagaatcacttgagcccaggggttcaagaccagcctggacaacatagtgagacctttgtctcttaaaaaaaaacacacacacatcagtttggaccgggagtggtggtgtgagcctgtaatcccagcgctttgggaggcctaggaaggaggatcacttgaaaccagatgtttgagaccagcctgggcaacatggggaggctccatttctacaaaaaataaaaataaaaaattagccaggtgcggatgcacccttcttgtggtcgcagctactcgggaggctgaggtaggagaatccctgagctcaggagttggaggctgcagtgagccattacccttccactgcactccagcctgggggcaacaaagtgagaccctatctattaaagaaaaaaatcagtttgagcaaagaccccaggcggccgggaaaggtgttcgcttaagggcgaaagctaagaacctgcaaccttcccgtctctttcctaccacccgccgccgttaggaatcttcagatcccgctgtaaagaatggaggaaggaggagccatttatcctttaccaagatggcagcctcctggcaactccagtcactttataaatatggctgccacaggaagtacgtcacggaagagggtgggaaatctgcgcgcgcacgctgcaaaggggctttttgggacgccagtggctgagttcttcctttgacaagatggcggcaggaggcagtggcgttggtgggaagcgcagctcgaaaagcgatgccgattctggtttcctggggctgcggcccacttcggtggacccagcgctgaggcggcggcggcgggaggctgaggctgacaagccccgaaggctgggacggctcaagtaccaggcacctgacatcgacgtgcagctgagctcggagctgacagactcgctcaggaccctgaagcccgagggcaacatccttcgagaccggttcaagagcttccagaggaggaatatgatcgagcctcgagagagagccaagttcaaacgcaagtacaaggtgaagctggtggagaagcgggcgttccgtgagatccagttgtagctgccatcagatgccggagactcgcccttcaataaaaaatctcttctagctgaaaaaacaaaaaaaaaaaaaaaaaaaaggggggggaggatataagagaatactgtcacaataagggatgccaccaatattggcagttatacccggtattctttgcaacaagagtggggcccccataaagagagcaccaaatataaaaagtagaagccactgtagccgcacgttgcacaaatgtacacgaaagctgaaaactgtgctctgtggtactttgaaag

SEQ ID NO: 435289 - DNA, 2127 bp, Homo sapiens
cctcccgagtacctgggactacaggcgcacaccatcacgcctggctaatttttaaatttttggcagacacaggatctcactatgttgcccaggctggtcttgaattcctgggctcaagcgatcctcctgcatcggcctcccaaagtgctgggattagaggcgtgaatcaccacgccctgccatggatccctttgaatggctgccagggcccaagagcctctgagcttccttccttatttgtaaatgacaaagatgagttgattctaagatgaagcctcagagggcaaggcagtaacaatagctaacactcagatgccagacgcagccttaagcgctttacatatgtttaatcttctgcatgacttatgacgcagatgtactgttatcatctttattttacagatgaggaaactgaggcacagtgaagtagcccgctcaagatgaatgattctgagtctgcacttctagggtcctaaaagtgtatgtttctaacattcctctaatgttctgtgcttccaactttgatattccgaaagttacttgatttctaagatcctaggattggaacatttgagaggacaaaacttctgagattggaatgtgtgttgtgcggaatctgccactgacggttctgactttctaagaaaacgagattaaaaaataatcaggccgagcatggtggctcacatctgtaatcctagcattttcggaggctgaggagggagaatcacttgagcccaggggttcaagaccagcctggacaacatagtgagacctttgtctcttaaaaaaaaacacacacacatcagtttggaccgggagtggtggtgtgagcctgtaatcccagcgctttgggaggcctaggaaggaggatcacttgaaaccagatgtttgagaccagcctgggcaacatggggaggctccatttctacaaaaaataaaaataaaaaattagccaggtgcggatgcacccttcttgtggtcgcagctactcgggaggctgaggtaggagaatccctgagctcaggagttggaggctgcagtgagccattacccttccactgcactccagcctgggggcaacaaagtgagaccctatctattaaagaaaaaaatcagtttgagcaaagaccccaggcggccgggaaaggtgttcgcttaagggcgaaagctaagaacctgcaaccttcccgtctctttcctaccacccgccgccgttaggaatcttcagatcccgctgtaaagaatggaggaaggaggagccatttatcctttaccaagatggcagcctcctggcaactccagtcactttataaatatggctgccacaggaagtacgtcacggaagagggtgggaaatctgcgcgcgcacgctgcaaaggggctttttgggacgccagtggctgagttcttcctttgacaagatggcggcaggaggcagtggcgttggtgggaagcgcagctcgaaaagcgatgccgattctggtttcctggggctgcggcccacttcggtggacccagcgctgaggcggcggcggcgaggcccaagaaataagaagcggggctggcggcggcttgctcaggagccgctggggctggaggttgaccagttcctggaagacgtgcggctacaggagcgcacgagcggacggagtctcgctctatcgcccaggctggagtaggcgcgatctcagctcaccgcaacctccgcctcccaggctcaagcgattctcctgcctcagctccttagtagctgggattacaggcgggcgccaccacgctcggctatttttcttttcttttcttttttcttttttttttgagacggagtctttctctgtagtccaggctggagtgcaatggcacgatctcggctcactgcaacctctgcctcctgggttcaagtgattctcctgcttcagcctcccaagtagctgggattacaggcatgcaccaccacgtccggctaatttttgtatttttagtagagacagggttttgccatgttacaggccaggctggtcttgaactcctgaccttaggtgatccacccgccccggccccctaaggtgctaagattacaggtgtgagccaccacacccagcctaatttttgtatttttagtaa

SEQ ID NO: 435290 - DNA, 355 bp, Homo sapiens
ggtgagatgtgtgggaagggcatcctgggtgatgggagggtgaggagggccgggagctgctctgtgttcctgcagtagagtctgtctcagagcccttccatcccagtggccgagaactctgtgctggagccaggtggctgggattcctgtcccagctccagtgctgactgatcctgggaaggtggtctcacctttctgcaacctatatcttcctctaaaatgcagatgagggccgggcatggtggctcacgcctgtaatcccagcacttcgggaggccgagacaggtggatcacctgaggtcgggagtttgagaccagcctgaccaacgtggtgaaaccctgtctctactaaaaa

SEQ ID NO: 435291 - DNA, 1959 bp, Homo sapiens
  misc_feature (1097)..(1097): n is a, c, g, or t
ctaggtaggaagggggcctgctggttggttggggcttcatgatacttgcagtggtggaggcagctgttgggggttcttagaaatagagtcctccagccagctctaagggcttcctgccctggcctcagccttagcaggccagagtgagcagtgggcagaaaccttgacctcacttaatatggccttcgtccaggtgaagcagaaagagctgtgtctgcccttcgcttgggtccgtgtgagagcaaggcctttggcaagcctgtgtcgtgcctgtaccactggggctgcctcccacaccctcccctgcacacccctagtgccgcagtaagcacgcccaccattaaagcagaccaggagttactaacctgcctgccttcctcagaggctcagtgttgagttggaagagaggggttttacagtgggccagtccttaaggtggtgtgggtgctgggctgtggttgtggccttaggtctgctggcgggtgtgctgcacctccttggcctcccctctcctgggctcaaggaagtaaacaagtcctctgtatgatggggaggccaggacctctcgtccctttaaggcagcttggtgcctgccagtcacctcagcgggcggcagtcagtgggcttgtgtgcatctgtaaactcagcactttgggaggctgaggcaggaggattgctggagcccaggagttcaagaacagcccaggcaatgtagtgagaacccatctctacaaaaaaataaactaggctgggtgcggtgggctcacgcctgtaatcccagcattttgggagacggaggcaggcggatgacctgaggtcaggagctcaagaccagcctgggcaacatggtgaaaccccgtctctactaaaaatacaaaaattagccgggggtggtggcgggcgcctgtaatcccagctgctcgggaggctgaggcaggagaagcgcttgaactggggaggcagggttgcagtgagccgagatcgtgccattgcactccagcctgggtgacaagagcgaaactccgtctcaaaaaaaataaattagccgggcctggtggtgcacacctgtggtcccagctactcaggaggatggcttnaacccaggacatcaaggctgtgcagtgagctgtgatctgggcaacagagtgagaccccatctcaaaagggaagctcgagggctctgctttgtgtgctggtgacagtgttctcaagccagttctgcccaagagccaacagctctcgggaccccacggctccaggacagggctccttccctagaatgtgctctatctcaggaatcctctttcgaggatctgtgacgggatctaggtcagggaatgtcccccctgtctctggcaagccaggctccccttggccagccaggtctcatctgacacgttttcttttcctgcccccacaggccttagcagtaggaggactaggctccattataagagttcttacagcaagaaagactgtttaaaaaaaataaaaagactcatgttaccttgagaagaattctggatgcccaggctggtgaagaagggattgacaatggaccatcttcctaggaactcccaagtaaactatttcaggacatgtatctgctgaaatgtattttattttcaaggtggaggggaaaatcgtctgtttcctaaatcctgtttaggatctgatagtctatgcctttgtctccgagtactgcagaactgacattttgacggtctaccagcgtggcggctggtgttggtcagatgcacctgtgtgcactgggggagggatggtttgggcaggtgcagatccaagggctgtggtaaacgggagagcttgtgtttttgaagtggaaaaaaacccaagagtttgtacagacatcctgtcttcccagagaaggtggacactcttgggctcattgtaaagtgcctgctgcatcaataaagctcttggcttattagtctatac

SEQ ID NO: 435292 - DNA, 1083 bp, Homo sapiens
ggcggctgcgcgcggaggcggtggaggaggtgctgggagcagccgggcagccgcttcccgcccccgagcaggagccggtgcgagcggagcagagccgaggtcgggccgcgagcggagccggctgagcgggcgccgagctcccgccatggcccggaacacgctgtcctcgcgcttccgccgggtggacatcgacgaatttgacgagaacaaatttgtggacgagcaggaggaggcggcggcggcggcggcggagccaggcccggacccgagcgaggtggacgggctcctgcggcaaggggacatgcttcgggcattccatgcagccttgcggaactctcccgtcaacaccaagaatcaagctgtgaaggagcgagcccagggcgtggtgctgaaagtgctcacaaacttcaagagcagtgagattgagcaggctgtgcagtcactggacagaaacggcgttgacttgttaatgaagtacatttataaaggctttgagaagcccacagaaaatagcagcgcagtgttactccagtggcacgaaaaggccttagcagtaggaggactaggctccattataagagttcttacagcaagaaagactgtttaaaaaaaataaaaagactcatgttaccttgagaagaattctggatgcccaggctggtgaagaagggattgacaatggaccatcttcctaggaactcccaagtaaactatttcaggacatgtatctgctgaaatgtattttattttcaaggtggaggggaaaatcgtctgtttcctaaatcctgtttaggatctgatagtctatgcctttgtctccgagtactgcagaactgacattttgacggtctaccagcgtggcggctggtgttggtcagatgcacctgtgtgcactgggggagggatggtttgggcaggtgcagatccaagggctgtggtaaacgggagagcttgtgtttttgaagtggaaaaaaacccaagagtttgtacagacatcctgtcttcccagagaaggtggacactcttgggctcattgtaaagtgcctgctgcatcaataaagctcttggcttattagtctatac

SEQ ID NO: 435293 - DNA, 2286 bp, Homo sapiens
  misc_feature (1097)..(1097): n is a, c, g, or t
ctaggtaggaagggggcctgctggttggttggggcttcatgatacttgcagtggtggaggcagctgttgggggttcttagaaatagagtcctccagccagctctaagggcttcctgccctggcctcagccttagcaggccagagtgagcagtgggcagaaaccttgacctcacttaatatggccttcgtccaggtgaagcagaaagagctgtgtctgcccttcgcttgggtccgtgtgagagcaaggcctttggcaagcctgtgtcgtgcctgtaccactggggctgcctcccacaccctcccctgcacacccctagtgccgcagtaagcacgcccaccattaaagcagaccaggagttactaacctgcctgccttcctcagaggctcagtgttgagttggaagagaggggttttacagtgggccagtccttaaggtggtgtgggtgctgggctgtggttgtggccttaggtctgctggcgggtgtgctgcacctccttggcctcccctctcctgggctcaaggaagtaaacaagtcctctgtatgatggggaggccaggacctctcgtccctttaaggcagcttggtgcctgccagtcacctcagcgggcggcagtcagtgggcttgtgtgcatctgtaaactcagcactttgggaggctgaggcaggaggattgctggagcccaggagttcaagaacagcccaggcaatgtagtgagaacccatctctacaaaaaaataaactaggctgggtgcggtgggctcacgcctgtaatcccagcattttgggagacggaggcaggcggatgacctgaggtcaggagctcaagaccagcctgggcaacatggtgaaaccccgtctctactaaaaatacaaaaattagccgggggtggtggcgggcgcctgtaatcccagctgctcgggaggctgaggcaggagaagcgcttgaactggggaggcagggttgcagtgagccgagatcgtgccattgcactccagcctgggtgacaagagcgaaactccgtctcaaaaaaaataaattagccgggcctggtggtgcacacctgtggtcccagctactcaggaggatggcttnaacccaggacatcaaggctgtgcagtgagctgtgatctgggcaacagagtgagaccccatctcaaaagggaagctcgagggctctgctttgtgtgctggtgacagtgttctcaagccagttctgcccaagagccaacagctctcgggaccccacggctccaggacagggctccttccctagaatgtgctctatctcaggaatcctctttcgaggatctgtgacgggatctaggtcagggaatgtcccccctgtctctggcaagccaggctccccttggccagccaggtctcatctgacacgttttcttttcctgcccccacaggccttagcagtaggaggactaggctccattataagagttcttacagcaagaaagactgtttaaaaaaaataaaaagactcatgttaccttgagaagaattctggatgcccaggctggtgaagaagggattgacaatggaccatcttcctaggaactcccaagtaaactatttcaggacatgtatctgctgaaatgtattttattttcaaggtggaggggaaaatcgtctgtttcctaaatcctgtttaggatctgatagtctatgcctttgtctccgagtactgcagaactgacattttgacggtctaccagcgtggcggctggtgttggtcagatgcacctgtgtgcactgggggagggatggtttgggcaggtgcagatccaagggctgtggtaaacgggagagcttgtgtttttgaagtggaaaaaaacccaagagtttgtacagacatcctgtcttcccagagaaggtggacactcttgggctcattgtaaagtgcctgctgcatcaataaagctcttggcttattagtctatacattgcggtgtgtttcgtgtatgtaaaaaaaaatggtaatgaatgggatggtaatgaatgagagttcagttgttgttccggaaacccgatgtggaaggagtagacctgtgtccctgttgagccacccctgggagcgagcatggcaatccacaggccctctgccacaggacgccagcctcggcctcagagctgccggctgctgcagagaggtgtttgctgaataaactatttattgtttcttattcctttgatttgtatgtaattaattttggagcttatttaattaatttaataaagtgccaaacatttaataattgaaaaaaaaaaa

SEQ ID NO: 435294 - DNA, 1410 bp, Homo sapiens
ggcggctgcgcgcggaggcggtggaggaggtgctgggagcagccgggcagccgcttcccgcccccgagcaggagccggtgcgagcggagcagagccgaggtcgggccgcgagcggagccggctgagcgggcgccgagctcccgccatggcccggaacacgctgtcctcgcgcttccgccgggtggacatcgacgaatttgacgagaacaaatttgtggacgagcaggaggaggcggcggcggcggcggcggagccaggcccggacccgagcgaggtggacgggctcctgcggcaaggggacatgcttcgggcattccatgcagccttgcggaactctcccgtcaacaccaagaatcaagctgtgaaggagcgagcccagggcgtggtgctgaaagtgctcacaaacttcaagagcagtgagattgagcaggctgtgcagtcactggacagaaacggcgttgacttgttaatgaagtacatttataaaggctttgagaagcccacagaaaatagcagcgcagtgttactccagtggcacgaaaaggccttagcagtaggaggactaggctccattataagagttcttacagcaagaaagactgtttaaaaaaaataaaaagactcatgttaccttgagaagaattctggatgcccaggctggtgaagaagggattgacaatggaccatcttcctaggaactcccaagtaaactatttcaggacatgtatctgctgaaatgtattttattttcaaggtggaggggaaaatcgtctgtttcctaaatcctgtttaggatctgatagtctatgcctttgtctccgagtactgcagaactgacattttgacggtctaccagcgtggcggctggtgttggtcagatgcacctgtgtgcactgggggagggatggtttgggcaggtgcagatccaagggctgtggtaaacgggagagcttgtgtttttgaagtggaaaaaaacccaagagtttgtacagacatcctgtcttcccagagaaggtggacactcttgggctcattgtaaagtgcctgctgcatcaataaagctcttggcttattagtctatacattgcggtgtgtttcgtgtatgtaaaaaaaaatggtaatgaatgggatggtaatgaatgagagttcagttgttgttccggaaacccgatgtggaaggagtagacctgtgtccctgttgagccacccctgggagcgagcatggcaatccacaggccctctgccacaggacgccagcctcggcctcagagctgccggctgctgcagagaggtgtttgctgaataaactatttattgtttcttattcctttgatttgtatgtaattaattttggagcttatttaattaatttaataaagtgccaaacatttaataattgaaaaaaaaaaa

SEQ ID NO: 435295 - DNA, 1084 bp, Homo sapiens
ggcggctgcgcgcggaggcggtggaggaggtgctgggagcagccgggcagccgcttcccgcccccgagcaggagccggtgcgagcggagcagagccgaggtcgggccgcgagcggagccggctgagcgggcgccgagctcccgccatggcccggaacacgctgtcctcgcgcttccgccgggtggacatcgacgaatttgacgagaacaaatttgtggacgagcaggaggaggcggcggcggcggcggcggagccaggcccggacccgagcgaggtggacgggctcctgcggcaaggggacatgcttcgggcattccatgcagccttgcggaactctcccgtcaacaccaagaatcaagctgtgaaggagcgagcccagggcgtggtgctgaaagtgctcacaaacttcaagagcagtgagattgagcaggctgtgcagtcactggacagaaacggcgttgacttgttaatgaagtacatttataaaggctttgagaagcccacagaaaatagcagcgcagtgttactccagtggcacgaaaaggccttagcagtaggaggactaggctccattataagagttcttacagcaagaaagactgtttaaaaaaaataaaaagactcatgttaccttgagaagaattctggatgcccaggctggtgaagaagggattgacaatggaccatcttcctaggaactcccaagtaaactatttcaggacatgtatctgctgaaatgtattttattttcaaggtggaggggaaaatcgtctgtttcctaaatcctgtttaggatctgatagtctatgcctttgtctccgagtactgcagaactgacattttgacggtctaccagcgtggcggctggtgttggtcagatgcacctgtgtgcactgggggagggatggtttgggcaggtgcagatccaagggctgtggtaaacgggagagcttgtgtttttgaagtggaaaaaaacccaagagtttgtacagacatcctgtcttcccagagaaggtcacaaattcttgacctccttcacagtaactgctctaactctttgccctcgcgtataactaagaatctt

SEQ ID NO: 435296 - DNA, 920 bp, Homo sapiens
gaagccgtggaaggtgggtggtatggatgagatcccatctgactctgttcctgagctgtttctgaagtgagcttgttcatgacggcatggatgtgcttgagcctagctatccttaactggtggtgatgcacaggggacatgcttcgggcattccatgcagccttgcggaactctcccgtcaacaccaagaatcaagctgtgaaggagcgagcccagggcgtggtgctgaaagtgctcacaaacttcaagagcagtgagattgagcaggctgtgcagtcactggacagaaacggcgttgacttgttaatgaagtacatttataaaggctttgagaagcccacagaaaatagcagcgcagtgttactccagtggcacgaaaaggccttagcagtaggaggactaggctccattataagagttcttacagcaagaaagactgtttaaaaaaaataaaaagactcatgttaccttgagaagaattctggatgcccaggctggtgaagaagggattgacaatggaccatcttcctaggaactcccaagtaaactatttcaggacatgtatctgctgaaatgtattttattttcaaggtggaggggaaaatcgtctgtttcctaaatcctgtttaggatctgatagtctatgcctttgtctccgagtactgcagaactgacattttgacggtctaccagcgtggcggctggtgttggtcagatgcacctgtgtgcactgggggagggatggtttgggcaggtgcagatccaagggctgtggtaaacgggagagcttgtgtttttgaagtggaaaaaaacccaagagtttgtacagacatcctgtcttcccagagaaggtggacactcttgggctcattgtaaagtgcctgctgcatcaataaagctcttggcttattagtctatac

SEQ ID NO: 435297 - DNA, 1379 bp, Homo sapiens
ggcggctgcgcgcggaggcggtggaggaggtgctgggagcagccgggcagccgcttcccgcccccgagcaggagccggtgcgagcggagcagagccgaggtcgggccgcgagcggagccggctgagcgggcgccgagctcccgccatggcccggaacacgctgtcctcgcgcttccgccgggtggacatcgacgaatttgacgagaacaaatttgtggacgagcaggaggaggcggcggcggcggcggcggagccaggcccggacccgagcgaggtggacgggctcctgcggcaaggggacatgcttcgggcattccatgcagccttgcggaactctcccgtcaacaccaagaatcaagctgtgaaggagcgagcccagggcgtggtgctgaaagtgctcacaaacttcaagagcagtgagattgagcaggctgtgcagtcactggacagaaacggcgttgacttgttaatgaagtacatttataaaggctttgagaagcccacagaaaatagcagcgcagtgttactccagtggcacgaaaaggccttagcagtaggaggactaggctccattataagagttcttacagcaagaaagactgtttaaaaaaaataaaaagactcatgttaccttgagaagaattctggatgcccaggctggtgaagaagggattgacaatggaccatcttcctaggaactcccaagtaaactatttcaggacatgtatctgctgaaatgtattttattttcaaggtggaggggaaaatcgtctgtttcctaaatcctgtttaggatctgatagtctatgcctttgtctccgagtactgcagaactgacattggtcagatgcacctgtgtgcactgggggagggatggtttgggcaggtgcagatccaagggctgtggtaaacgggagagcttgtgtttttgaagtggaaaaaaacccaagagtttgtacagacatcctgtcttcccagagaaggtggacactcttgggctcattgtaaagtgcctgctgcatcaataaagctcttggcttattagtctatacattgcggtgtgtttcgtgtatgtaaaaaaaaatggtaatgaatgggatggtaatgaatgagagttcagttgttgttccggaaacccgatgtggaaggagtagacctgtgtccctgttgagccacccctgggagcgagcatggcaatccacaggccctctgccacaggacgccagcctcggcctcagagctgccggctgctgcagagaggtgtttgctgaataaactatttattgtttcttattcctttgatttgtatgtaattaattttggagcttatttaattaatttaataaagtgccaaacatttaataattgaaaaaaaaaaa

SEQ ID NO: 435298 - DNA, 1029 bp, Homo sapiens
ggcggctgcgcgcggaggcggtggaggaggtgctgggagcagccgggcagccgcttcccgcccccgagcaggagccggtgcgagcggagcagagccgaggtcgggccgcgagcggagccggctgagcgggcgccgagctcccgccatggcccggaacacgctgtcctcgcgcttccgccgggtggacatcgacgaatttgacgagaacaaatttgtggacgagcaggaggaggcggcggcggcggcggcggagccaggcccggacccgagcgaggtggacgggctcctgcggcaaggggacatgcttcgggcattccatgcagccttgcggaactctcccgtcaacaccaagaatcaagctgtgaaggagcgagcccagggcgtggtgctgaaagtgctcacaaacttcaagagcagtgagattgagcaggctgtgcagtcactggacagaaacggcgttgacttgttaatgaagtacatttataaaggctttgagaagcccacagaaaatagcagcgcagtgttactccagtggcacgaaaaggccttagcagtaggaggactaggctccattataagagttcttacagcaagaaagactgtttaaaaaaaataggattgacaatggaccatcttcctaggaactcccaagtaaactatttcaggacatgtatctgctgaaatgtattttattttcaaggtggaggggaaaatcgtctgtttcctaaatcctgtttaggatctgatagtctatgcctttgtctccgagtactgcagaactgacattttgacggtctaccagcgtggcggctggtgttggtcagatgcacctgtgtgcactgggggagggatggtttgggcaggtgcagatccaagggctgtggtaaacgggagagcttgtgtttttgaagtggaaaaaaacccaagagtttgtacagacatcctgtcttcccagagaaggtggacactcttgggctcattgtaaagtgcctgctgcatcaataaagctcttggcttattagtctatac

SEQ ID NO: 435299 - DNA, 4447 bp, Homo sapiens
gtcggaggtgaggagacgtcgccgggtgaggaagcggggggctagcggcctggcgctgcggcgaccgaccggggcgtcaggatccctggcccccggagagcgaagggcgggcgggtcccggagcaagaagaattgtatagaaatgtaaaaaacatttatgtgtgcttcacatgtggcatgaaaaaaatgaggacctctggtcaaaattgcctgagttcagaatttcatgctggaaggaaagttagacgtaacttctaatttctagttccagtaagcatctcttcttggaaaatttccaaaaaagagtcctgctctgttgcccaggctggagtacattggtgtgatgatcatggttcactgcagcctcgacctcccaggctcaagcaattctcctacctcagcctcctgagtaactgggactataggatttctttgaagaaaaatgtgcttcttgaatcaactgcagtctctcctctgcataagagctcttaagggtactagcaggatagaagcaaatgaaactgaaagctcatctgcagctcagaaaagcaaagacatggaattttaaagagtgaaggtagcatggtgtcggccatgggtgaacaagacacagccagacaatgtggaccaatttcttcaaactacggcttttctgctgtctgcttgcagtgttgatggtggtggtgctggtcatcaatgttactcaggtagagtacttggaccatgagactgtttcagccactttcatcgacagcagtggacagtttgtttcctcccaggtgacaggaattagccgaaatccctactgtggctatgatcagcagaccctgtccagccaggagcgcatggaggaggactccttgctggctgccttgcaccggcaggttcctgatgtgggcccagtcccctttgtgaagagcactgacccttcttccagctactttgtcatcttgaactctgctgccttctttaaggtgggaagccagcttgaggtgctggttcatgtgcaggattttcaaagaaagcccaagaagtatggtggagactacctgcaggccagaattcactccctcaagctgcaggctggggctgtgggcagggtggtggattaccagaatgggttttacaaggttttctttactttgctatggccaggcaaagttaaagtatccgtatctctggtccaccccagtgaagggatcagagttcttcagcgcttacaggaagataaaccagacagggtctatttcaagagtctcttccgttcaggaagaatttctgaaactactgagtgcaacgtgtgtcttcctgggaatctgcccctgtgtaactttacagacctctacactggggagccctggttctgcttcaaaccaaagaagctcccttgcagcagcagaattacccatttcaaaggtggatacctgaaaggtctcctaaccgctgcagagagtgctttcttccagagtggtgtcaatatcaaaatgccagtcaactccagtggacctgattgggtaactgtgattcccaggagaataaaagaaactaacagtctagaactatctcaaggctcaggaacttttccttctgggtattattataaagaccagtggaggcccagaaagtttaagatgcgtcagtttaatgaccctgacaacattacagagtgcttacaaagaaaagtggtgcatttatttggtgactcaacaatcaggcaatggtttgaataccttactacatttgttccagatttagtggagtttaacttgggtagtcccaagaatgtgggtcccttccttgcagtggaccagaagcacaacatcctgctcaaataccgctgccatggtccacccatccgcttcacgactgtctttagcaatgagctccattatgtggcgaatgagctgaatggcattgtgggagggaagaacacagtggttgccatagctgtatggtctcacttcagcaccttccctttggaagtgtacatccggcggctcaggaacatccgtcgagcagtggttcggctcctcgatcgaagcccaaagaccgtggtggtcatccggacggccaacgcccaagagctgggacctgaggtgagccttttcaacagcgactggtacaactttcagctggacaccatccttcggaggatgttctcaggggttggagtatatctcgtcgatgcctgggagatgaccctggcccattatctaccgcacaagctgcatccagatgaagttattgtgaagaaccagctggacatgttcttgtcctttgtgtgccccttggaaacctagcctgtcttggaagggactggaggaatcatattcaatgaccttctcaattgacctgagttacagaaagtggccccagtgagagatgactgcccttaataagtataaaatttcaaaaagatctggacttaatatgatgacttataaggagcttagaaaatgcaggttacatttatatctacctataggattttatccaatgttgacttagccatggtagaactcttaactgcatctacacactatattgctcttgtaaccaaagatgctaatgagtgtatttgaattagcttctcctaggaggggtgactactttgctaaagagtatgaaaaatgttttgatggaagggacaagtttggttggtagtagagtgtttgtagcttatctggtaaaggaaattgagtgcatctgcatgcatagcacaagtaatccatcttctggcggttaactagagaaagcttatagtcagaggctcttgtgaatgcactgaagactgctgtgtctcaggagtttctcttgatgatctaccttttctgaattacttgaaaaggccaatgtgcttggttcgagttttttagtgaatatttacaatttcctgcttttatctagaaaagaagcaaaagggaaatatgaaagcagtatatataaaatctgtgctttggaattgatatttgcatttggtgattgttttttatttgattcagctaaattttatgtgttgaatacttactctagaataactacttttggaactggaagggggaaatctgtaaatggaaatttatttttatgttctgaaatttgagggtttaggaattgacttttgtgtaaagaatgctacggtattataaagctgtggaagttttttccactagtttcaggtgttttttttttttgttgttgttgttgttattttgaactacttaccaaaattagaagttaaaatctaattagaaattaataagatactaaaattcatgacagttttttgtttgtttgtttgtttgttttttggtatttcttgatttgggcataaaaggcacacccattctctcatgcttggaagaagctgctattcctactggctatctaagaagaatggaattattaattttatttgacttattaattttaaacgagtttaatttgggatcatttagtaagtactcttttctttttgagctgtgatagattatagtctagtttaagttgctcctaagtagacagatgaagaaactagggaggctttagagaggaagacagatgcttgaagtatgaacaatatatacccttagaagaatgggtcaaataatttgggtttttaatttaaaataggagggccccagatcttactttcctgtccttgaggaacaccttcaagtttttaaagtattttagggggaaagaagatttttaattgtttctgagcctaatgaggtaataaaatatattaaaatagtttaattttaatggtccttacgctttacagtacctaaggatcacttgtagtatctgacaaaaatgcagaattaaagagtcatggcagggtgtggtagctcaagcctgtaatcccagcactttgggaggccaggcaggaggattgcttgaggccaggagtttgagaccagcctgggcaacatagtaagacctcatctctacaaaaaataaaaaattatccaggtgtgggccgacagtcccagctactagggaggctaaggcagggtgattgattgagcccagtagtttgaggctgcagtgagttatgattgcgccactacactcccacttgggcaacagacaagagatcttatctctaaaaaatttttgttaaataataaaagaattaaggccagggatgttggctcacatctgtaatcccagcagggattatagtctcgggaggctgaggtgggcggattgcttgagcccggaaggtcaagaccagcctgggtgccatggtgaaaccccatctctacaaaaaaatacaaaaactagctgggtgtggtggcaccacctgtagtccccgctacttaggaggctgaggtgggaggattgcttgagcccaggaggcagaaggttgcagaggttgcagtgagccttgattgtgccactgtactccagtctgggcaacagggcaagaccctgtctc

SEQ ID NO: 435300 - DNA, 1796 bp, Homo sapiens
atgatgcctctgggatttatgaaaccaacctttgtggcgagtgctcagtgattctgatgcaatggtggtattccacactgtgagaaacactaagagaagaggtaagatagaatgagggaataaacatggcttgtttattattttgggggatttaccaataactggtttaattctgttcatgatccaatagtattggtgatattagctccattttatagatgaggaactcatgtttagatctgaaataaggtatgtgagagtccatatctcttttcagctaaacttgtgagactttcgtaaagaagcgtttgtatttatttatttgtttttgagacagggtcttgctcttttgcccaggctggagtgcagtggcatgatatggctcactgcagccttgacttcctgggctcaagggatccttctgcctcagcctcctgagtagctgggactacaggtatgtaccaccatgcccagctaatttttgtatctttttgtagagactacattttgccatgttgtccaggctggtcttgaactcctgagctcaagcatctgcccacctcagcttcccaaagtgctgggattacaggtgtgagccactgtgcccagctgagagtttttcttgtcgtgaaagaacttgacatttcctcaaggatttataaaggaggctgaggagtaattttcccaggagaattttaaaaagaaagcgggcattgctcctccagtggtttggaatgatgccacttgattgtgcaaatgatttcttatgatcttgtctggttttctgttattttttgatttggtgacatagctctcaaagatttggtgacacagcttcttgagtcactttcatctctcttaaaaaaaatttttttttaacaacttttaagttcaggggtacatgtgccagtttgtttcataggtaaacttacgtcatgggggtttgttgtatagatgatttcatcacccaggtgttaagcctagtacccattagtaatttttcctgatcctctccctcctcctaccctccaccctccaatagaccccagtgtgtgttgttgccctttatgtgtccatgtgttctcatcatttagctctcacttatcagtgagaacaactttcatcccacatctaatttgtctttcttcactctggtgtggaaattttgatagagattccaatatcacttaaacgtttcccagaatatttagatagaataatttagtttcttctgaaaagtttattttaggctagtgccacatggttgtgaatattagcatggtagccaaataatagtttgtttaaatgtatatttcccaatataaatataaggggcatcataatttttaaaaactataaaatctagaagaaaaatctatggataaaatccataattctatcatctgaatgcaatgaacattagcatttaggtatattttcttgcaggttttttaaccatatacttatagagaatatgtaatttgggtctgtgttttttacatataaatatttttctatgttaaatagtcttcataagttaattataaagatctgcttaatagttctgctactgcagttttcattattagataagttggtcattatagttggacatttaggtttacaatattaaagcagtggtttatatcaatttcagtggtttaaaatatgaatttctattttggaatgaaagtattaatttaatgtagtgaatctcatattccagaactgagatgattgatttgatgctatttgtgacagacagaacccataataaagcctttctatgcaagtta

SEQ ID NO: 435301 - DNA, 1271 bp, Homo sapiens
tttattgttttcactttccatgtgattagattgaggctaaatattttggcaggaaaattatagaagaagttttcctgcaaatatttttacaggaaattatgtttttgtaagaaaattattattgtacaataataattatataattattataactatagacaagtaaattgtatatttttttcttaccataaaagtctaaactcatgaaagtagtttatatgtgctctcttaaaaatcactttatttaagctatgaaatttgattatgctgtaatgtggccaggcctgtacacttccttcattacttgttttttgtctgtctccatgtcagctccatgaagaaggagatgctgtgtgttttgcttactgtagtagccctggattctaggacagtacctggcttaagaagcttaagaattatttgttgaataaacagttttttctgaaattgatgaaataataaaaaatgactgcacattcccatatcaagaatttgagaagttaacattttatgtttttgtttttggtctaagtacaagagacctagttttattgtgactcagtttctggaatagttgccccggatttcgagtgcttttctccttacctccaccctcccccatgttttaatgcagccctccaaaaatatttactgagtgtggactctagaccagggcctgtgctaggatacaaagatgaatgaggcaccacccttatcttcgagtagtatatgttttattttattttatttttttcccctgctgcctcccttgagtagtacatgttttagtaaggggaacagacactaaagagtcctggtaatgatgagcaaagtactgcatgagtaagtatctggggggcaagtgtccccactaggactcctgtcagatctggaaaaggcctgaggaatctgatacatgacttaatgcagcgtatacttgcagcctgaaaactaagtaatgacaaaatagacattcttgtcagtgtgagccattctctgagtccaaggggagtacataattcaaaccagaattggtcattttggagtttgcactcttagcagtatacagtggagtgaaatttaagaatcaatttaatttcttttcagtttttatgtacataaaacctgcttactacaagagacccagtttattattttgtgttggttaacattcataagtatatttcatcataataaggctccgtgaaattagtcattttatcatttgccaataaagacatatatctgaaaataaatgttcctgaacctga

SEQ ID NO: 435302 - DNA, 1232 bp, Homo sapiens
atgatgcctctgggatttatgaaaccaacctttgtggcgagtgctcagtgattctgatgcaatggtggtattccacactgtgagaaacactaagagaagaggtaagatagaatgagggaataaacatggcttgtttattattttgggggatttaccaataactggtttaattctgttcatgatccaatagtattggtgatattagctccattttatagatgaggaactcatgtttagatctgaaataaggtatgtgagagtccatatctcttttcagctaaacttgtgagactttcgtaaagaagcgtttgtatttatttatttgtttttgagacagggtcttgctcttttgcccaggctggagtgcagtggcatgatatggctcactgcagccttgacttcctgggctcaagggatccttctgcctcagcctcctgagtagctgggactacaggtatgtaccaccatgcccagctaatttttgtatctttttgtagagactacattttgccatgttgtccaggctggtcttgaactcctgagctcaagcatctgcccacctcagcttcccaaagtgctgggattacaggtgtgagccactgtgcccagctgagagtttttcttgtcgtgaaagaacttgacatttcctcaaggatttataaaggaggctgaggagtaattttcccaggagaattttaaaaagaaagcgggcattgctcctccagtggtttggaatgatgccacttgattgtgcaaatgatttcttatgatcttgtctggttttctgttattttttgatttggtgacatagctctcaaagatttggtgacacagcttcttgagtcactttcatctctcttaaaaaaaatttttttttaacaacttttaagttcaggggtacatgtgccagtttgtttcataggtaaacttacgtcatgggggtttgttgtatagatgatttcatcacccaggtgttaagcctagtacccattagtaattttctgatcttcctctctacctcactcaatagaccaatgtggttgtgccttatggtcagtgtcttattattaggctcatatcgtggaacattttcccattatggctctcactggtgtgattgttcagatcaattcttacgtcccaatagaaaaatggtcgaaattaggacgccggggatattgggccactgtggtttccacagggtaaacaacagacactcgaccttttccctc

SEQ ID NO: 435303 - DNA, 827 bp, Homo sapiens
  misc_feature (803)..(803): n is a, c, g, or t
  misc_feature (815)..(815): n is a, c, g, or t
atgatgcctctgggatttatgaaaccaacctttgtggcgagtgctcagtgattctgatgcaatggtggtattccacactgtgagaaacactaagagaagaggtaagatagaatgagggaataaacatggcttgtttattattttgggggatttaccaataactggtttaattctgttcatgatccaatagtattggtgatattagctccattttatagatgaggaactcatgtttagatctgaaataaggtatgtgagagtccatatctcttttcagctaaacttgtgagactttcgtaaagaagcgtttgtatttatttatttgtttttgagacagggtcttgctcttttgcccaggctggagtgcagtggcatgatatggctcactgcagccttgacttcctgggctcaagggatccttctgcctcagcctcctgagtagctgggactacaggtatgtaccaccatgcccagctaatttttgtatctttttgtagagactacattttgccatgttgtccaggctggtcttgaactcctgagctcaagcatctgcccacctcagcttcccaaagtgctgggattacaggtgtgagccactgtgcccagctgagagtttttcttgtcgtgaaagaacttgacatttcctcaaggatttataaaggaggctgaggagtaattttcccaggagaattttaaaaagaaagcgggcattgctcctccagtggtttggaatgatgccacttgattgtgcaaatgatttcttatgatcttgtctggttttctgttataactctgcagangtgtgagctganacagtctgactt

SEQ ID NO: 435304 - DNA, 4614 bp, Homo sapiens
gtcggaggtgaggagacgtcgccgggtgaggaagcggggggctagcggcctggcgctgcggcgaccgaccggggcgtcaggatccctggcccccggagagcgaagggcgggcgggtcccggaggcaccttcactaacccggtgcggagcacttggcgacgcctccctgcccatctcatatctctcggctcatcgctgctctgggcaccagctgcctcttggctggcgctgctgtcacacggtggactgttctggccttactgagctgccgtttggggacatcagattcagcaagaagaattgtatagaaatgtaaaaaacatttatgtgtgcttcacatgtggcatgaaaaaaatgaggacctctggtcaaaattgcctgagttcagaatttcatgctggaaggaaagttagacgtaacttctaatttctagttccagtaagcatctcttcttggaaaatttccaaaaaagagtcctgctctgttgcccaggctggagtacattggtgtgatgatcatggttcactgcagcctcgacctcccaggctcaagcaattctcctacctcagcctcctgagtaactgggactataggatttctttgaagaaaaatgtgcttcttgaatcaactgcagtctctcctctgcataagagctcttaagggtactagcaggatagaagcaaatgaaactgaaagctcatctgcagctcagaaaagcaaagacatggaattttaaagagtgaaggtagcatggtgtcggccatgggtgaacaagacacagccagacaatgtggaccaatttcttcaaactacggcttttctgctgtctgcttgcagtgttgatggtggtggtgctggtcatcaatgttactcaggtagagtacttggaccatgagactgtttcagccactttcatcgacagcagtggacagtttgtttcctcccaggtgacaggaattagccgaaatccctactgtggctatgatcagcagaccctgtccagccaggagcgcatggaggaggactccttgctggctgccttgcaccggcaggttcctgatgtgggcccagtcccctttgtgaagagcactgacccttcttccagctactttgtcatcttgaactctgctgccttctttaaggtgggaagccagcttgaggtgctggttcatgtgcaggattttcaaagaaagcccaagaagtatggtggagactacctgcaggccagaattcactccctcaagctgcaggctggggctgtgggcagggtggtggattaccagaatgggttttacaaggttttctttactttgctatggccaggcaaagttaaagtatccgtatctctggtccaccccagtgaagggatcagagttcttcagcgcttacaggaagataaaccagacagggtctatttcaagagtctcttccgttcaggaagaatttctgaaactactgagtgcaacgtgtgtcttcctgggaatctgcccctgtgtaactttacagacctctacactggggagccctggttctgcttcaaaccaaagaagctcccttgcagcagcagaattacccatttcaaaggtggatacctgaaaggtctcctaaccgctgcagagagtgctttcttccagagtggtgtcaatatcaaaatgccagtcaactccagtggacctgattgggtaactgtgattcccaggagaataaaagaaactaacagtctagaactatctcaaggctcaggaacttttccttctgggtattattataaagaccagtggaggcccagaaagtttaagatgcgtcagtttaatgaccctgacaacattacagagtgcttacaaagaaaagtggtgcatttatttggtgactcaacaatcaggcaatggtttgaataccttactacatttgttccagatttagtggagtttaacttgggtagtcccaagaatgtgggtcccttccttgcagtggaccagaagcacaacatcctgctcaaataccgctgccatggtccacccatccgcttcacgactgtctttagcaatgagctccattatgtggcgaatgagctgaatggcattgtgggagggaagaacacagtggttgccatagctgtatggtctcacttcagcaccttccctttggaagtgtacatccggcggctcaggaacatccgtcgagcagtggttcggctcctcgatcgaagcccaaagaccgtggtggtcatccggacggccaacgcccaagagctgggacctgaggtgagccttttcaacagcgactggtacaactttcagctggacaccatccttcggaggatgttctcaggggttggagtatatctcgtcgatgcctgggagatgaccctggcccattatctaccgcacaagctgcatccagatgaagttattgtgaagaaccagctggacatgttcttgtcctttgtgtgccccttggaaacctagcctgtcttggaagggactggaggaatcatattcaatgaccttctcaattgacctgagttacagaaagtggccccagtgagagatgactgcccttaataagtataaaatttcaaaaagatctggacttaatatgatgacttataaggagcttagaaaatgcaggttacatttatatctacctataggattttatccaatgttgacttagccatggtagaactcttaactgcatctacacactatattgctcttgtaaccaaagatgctaatgagtgtatttgaattagcttctcctaggaggggtgactactttgctaaagagtatgaaaaatgttttgatggaagggacaagtttggttggtagtagagtgtttgtagcttatctggtaaaggaaattgagtgcatctgcatgcatagcacaagtaatccatcttctggcggttaactagagaaagcttatagtcagaggctcttgtgaatgcactgaagactgctgtgtctcaggagtttctcttgatgatctaccttttctgaattacttgaaaaggccaatgtgcttggttcgagttttttagtgaatatttacaatttcctgcttttatctagaaaagaagcaaaagggaaatatgaaagcagtatatataaaatctgtgctttggaattgatatttgcatttggtgattgttttttatttgattcagctaaattttatgtgttgaatacttactctagaataactacttttggaactggaagggggaaatctgtaaatggaaatttatttttatgttctgaaatttgagggtttaggaattgacttttgtgtaaagaatgctacggtattataaagctgtggaagttttttccactagtttcaggtgttttttttttttgttgttgttgttgttattttgaactacttaccaaaattagaagttaaaatctaattagaaattaataagatactaaaattcatgacagttttttgtttgtttgtttgtttgttttttggtatttcttgatttgggcataaaaggcacacccattctctcatgcttggaagaagctgctattcctactggctatctaagaagaatggaattattaattttatttgacttattaattttaaacgagtttaatttgggatcatttagtaagtactcttttctttttgagctgtgatagattatagtctagtttaagttgctcctaagtagacagatgaagaaactagggaggctttagagaggaagacagatgcttgaagtatgaacaatatatacccttagaagaatgggtcaaataatttgggtttttaatttaaaataggagggccccagatcttactttcctgtccttgaggaacaccttcaagtttttaaagtattttagggggaaagaagatttttaattgtttctgagcctaatgaggtaataaaatatattaaaatagtttaattttaatggtccttacgctttacagtacctaaggatcacttgtagtatctgacaaaaatgcagaattaaagagtcatggcagggtgtggtagctcaagcctgtaatcccagcactttgggaggccaggcaggaggattgcttgaggccaggagtttgagaccagcctgggcaacatagtaagacctcatctctacaaaaaataaaaaattatccaggtgtgggccgacagtcccagctactagggaggctaaggcagggtgattgattgagcccagtagtttgaggctgcagtgagttatgattgcgccactacactcccacttgggcaacagacaagagatcttatctctaaaaaatttttgttaaataataaaagaattaaggccagggatgttggctcacatctgtaatcccagcagggattatagtctcgggaggctgaggtgggcggattgcttgagcccggaaggtcaagaccagcctgggtgccatggtgaaaccccatctctacaaaaaaatacaaaaactagctgggtgtggtggcaccacctgtagtccccgctacttaggaggctgaggtgggaggattgcttgagcccaggaggcagaaggttgcagaggttgcagtgagccttgattgtgccactgtactccagtctgggcaacagggcaagaccctgtctc

SEQ ID NO: 435305 - DNA, 4648 bp, Homo sapiens
gtcggaggtgaggagacgtcgccgggtgaggaagcggggggctagcggcctggcgctgcggcgaccgaccggggcgtcaggatccctggcccccggagagcgaagggcgggcgggtcccggaggcaccttcactaacccggtgcggagcacttggcgacgcctccctgcccatctcatatctctcggctcatcgctgctctgggcaccagctgcctcttggctggcgctgctgtcacacggtggactgttctggccttactgagctgccgtttggggacatcagattcaggtcgtatggggagaaacgagtgtaactttacaagcaagaagaattgtatagaaatgtaaaaaacatttatgtgtgcttcacatgtggcatgaaaaaaatgaggacctctggtcaaaattgcctgagttcagaatttcatgctggaaggaaagttagacgtaacttctaatttctagttccagtaagcatctcttcttggaaaatttccaaaaaagagtcctgctctgttgcccaggctggagtacattggtgtgatgatcatggttcactgcagcctcgacctcccaggctcaagcaattctcctacctcagcctcctgagtaactgggactataggatttctttgaagaaaaatgtgcttcttgaatcaactgcagtctctcctctgcataagagctcttaagggtactagcaggatagaagcaaatgaaactgaaagctcatctgcagctcagaaaagcaaagacatggaattttaaagagtgaaggtagcatggtgtcggccatgggtgaacaagacacagccagacaatgtggaccaatttcttcaaactacggcttttctgctgtctgcttgcagtgttgatggtggtggtgctggtcatcaatgttactcaggtagagtacttggaccatgagactgtttcagccactttcatcgacagcagtggacagtttgtttcctcccaggtgacaggaattagccgaaatccctactgtggctatgatcagcagaccctgtccagccaggagcgcatggaggaggactccttgctggctgccttgcaccggcaggttcctgatgtgggcccagtcccctttgtgaagagcactgacccttcttccagctactttgtcatcttgaactctgctgccttctttaaggtgggaagccagcttgaggtgctggttcatgtgcaggattttcaaagaaagcccaagaagtatggtggagactacctgcaggccagaattcactccctcaagctgcaggctggggctgtgggcagggtggtggattaccagaatgggttttacaaggttttctttactttgctatggccaggcaaagttaaagtatccgtatctctggtccaccccagtgaagggatcagagttcttcagcgcttacaggaagataaaccagacagggtctatttcaagagtctcttccgttcaggaagaatttctgaaactactgagtgcaacgtgtgtcttcctgggaatctgcccctgtgtaactttacagacctctacactggggagccctggttctgcttcaaaccaaagaagctcccttgcagcagcagaattacccatttcaaaggtggatacctgaaaggtctcctaaccgctgcagagagtgctttcttccagagtggtgtcaatatcaaaatgccagtcaactccagtggacctgattgggtaactgtgattcccaggagaataaaagaaactaacagtctagaactatctcaaggctcaggaacttttccttctgggtattattataaagaccagtggaggcccagaaagtttaagatgcgtcagtttaatgaccctgacaacattacagagtgcttacaaagaaaagtggtgcatttatttggtgactcaacaatcaggcaatggtttgaataccttactacatttgttccagatttagtggagtttaacttgggtagtcccaagaatgtgggtcccttccttgcagtggaccagaagcacaacatcctgctcaaataccgctgccatggtccacccatccgcttcacgactgtctttagcaatgagctccattatgtggcgaatgagctgaatggcattgtgggagggaagaacacagtggttgccatagctgtatggtctcacttcagcaccttccctttggaagtgtacatccggcggctcaggaacatccgtcgagcagtggttcggctcctcgatcgaagcccaaagaccgtggtggtcatccggacggccaacgcccaagagctgggacctgaggtgagccttttcaacagcgactggtacaactttcagctggacaccatccttcggaggatgttctcaggggttggagtatatctcgtcgatgcctgggagatgaccctggcccattatctaccgcacaagctgcatccagatgaagttattgtgaagaaccagctggacatgttcttgtcctttgtgtgccccttggaaacctagcctgtcttggaagggactggaggaatcatattcaatgaccttctcaattgacctgagttacagaaagtggccccagtgagagatgactgcccttaataagtataaaatttcaaaaagatctggacttaatatgatgacttataaggagcttagaaaatgcaggttacatttatatctacctataggattttatccaatgttgacttagccatggtagaactcttaactgcatctacacactatattgctcttgtaaccaaagatgctaatgagtgtatttgaattagcttctcctaggaggggtgactactttgctaaagagtatgaaaaatgttttgatggaagggacaagtttggttggtagtagagtgtttgtagcttatctggtaaaggaaattgagtgcatctgcatgcatagcacaagtaatccatcttctggcggttaactagagaaagcttatagtcagaggctcttgtgaatgcactgaagactgctgtgtctcaggagtttctcttgatgatctaccttttctgaattacttgaaaaggccaatgtgcttggttcgagttttttagtgaatatttacaatttcctgcttttatctagaaaagaagcaaaagggaaatatgaaagcagtatatataaaatctgtgctttggaattgatatttgcatttggtgattgttttttatttgattcagctaaattttatgtgttgaatacttactctagaataactacttttggaactggaagggggaaatctgtaaatggaaatttatttttatgttctgaaatttgagggtttaggaattgacttttgtgtaaagaatgctacggtattataaagctgtggaagttttttccactagtttcaggtgttttttttttttgttgttgttgttgttattttgaactacttaccaaaattagaagttaaaatctaattagaaattaataagatactaaaattcatgacagttttttgtttgtttgtttgtttgttttttggtatttcttgatttgggcataaaaggcacacccattctctcatgcttggaagaagctgctattcctactggctatctaagaagaatggaattattaattttatttgacttattaattttaaacgagtttaatttgggatcatttagtaagtactcttttctttttgagctgtgatagattatagtctagtttaagttgctcctaagtagacagatgaagaaactagggaggctttagagaggaagacagatgcttgaagtatgaacaatatatacccttagaagaatgggtcaaataatttgggtttttaatttaaaataggagggccccagatcttactttcctgtccttgaggaacaccttcaagtttttaaagtattttagggggaaagaagatttttaattgtttctgagcctaatgaggtaataaaatatattaaaatagtttaattttaatggtccttacgctttacagtacctaaggatcacttgtagtatctgacaaaaatgcagaattaaagagtcatggcagggtgtggtagctcaagcctgtaatcccagcactttgggaggccaggcaggaggattgcttgaggccaggagtttgagaccagcctgggcaacatagtaagacctcatctctacaaaaaataaaaaattatccaggtgtgggccgacagtcccagctactagggaggctaaggcagggtgattgattgagcccagtagtttgaggctgcagtgagttatgattgcgccactacactcccacttgggcaacagacaagagatcttatctctaaaaaatttttgttaaataataaaagaattaaggccagggatgttggctcacatctgtaatcccagcagggattatagtctcgggaggctgaggtgggcggattgcttgagcccggaaggtcaagaccagcctgggtgccatggtgaaaccccatctctacaaaaaaatacaaaaactagctgggtgtggtggcaccacctgtagtccccgctacttaggaggctgaggtgggaggattgcttgagcccaggaggcagaaggttgcagaggttgcagtgagccttgattgtgccactgtactccagtctgggcaacagggcaagaccctgtctc

SEQ ID NO: 435306 - DNA, 3800 bp, Homo sapiens
ccatcttgcactcccagagtattgggattacagacatgagccactgcacctgcccagctccccaactccctgccattttttaagagacggtttcgtttcatcgacagcagtggacagtttgtttcctcccaggtgacaggaattagccgaaatccctactgtggctatgatcagcagaccctgtccagccaggagcgcatggaggaggactccttgctggctgccttgcaccggcaggttcctgatgtgggcccagtcccctttgtgaagagcactgacccttcttccagctactttgtcatcttgaactctgctgccttctttaaggtgggaagccagcttgaggtgctggttcatgtgcaggattttcaaagaaagcccaagaagtatggtggagactacctgcaggccagaattcactccctcaagctgcaggctggggctgtgggcagggtggtggattaccagaatgggttttacaaggttttctttactttgctatggccaggcaaagttaaagtatccgtatctctggtccaccccagtgaagggatcagagttcttcagcgcttacaggaagataaaccagacagggtctatttcaagagtctcttccgttcaggaagaatttctgaaactactgagtgcaacgtgtgtcttcctgggaatctgcccctgtgtaactttacagacctctacactggggagccctggttctgcttcaaaccaaagaagctcccttgcagcagcagaattacccatttcaaaggtggatacctgaaaggtctcctaaccgctgcagagagtgctttcttccagagtggtgtcaatatcaaaatgccagtcaactccagtggacctgattgggtaactgtgattcccaggagaataaaagaaactaacagtctagaactatctcaaggctcaggaacttttccttctgggtattattataaagaccagtggaggcccagaaagtttaagatgcgtcagtttaatgaccctgacaacattacagagtgcttacaaagaaaagtggtgcatttatttggtgactcaacaatcaggcaatggtttgaataccttactacatttgttccagatttagtggagtttaacttgggtagtcccaagaatgtgggtcccttccttgcagtggaccagaagcacaacatcctgctcaaataccgctgccatggtccacccatccgcttcacgactgtctttagcaatgagctccattatgtggcgaatgagctgaatggcattgtgggagggaagaacacagtggttgccatagctgtatggtctcacttcagcaccttccctttggaagtgtacatccggcggctcaggaacatccgtcgagcagtggttcggctcctcgatcgaagcccaaagaccgtggtggtcatccggacggccaacgcccaagagctgggacctgaggtgagccttttcaacagcgactggtacaactttcagctggacaccatccttcggaggatgttctcaggggttggagtatatctcgtcgatgcctgggagatgaccctggcccattatctaccgcacaagctgcatccagatgaagttattgtgaagaaccagctggacatgttcttgtcctttgtgtgccccttggaaacctagcctgtcttggaagggactggaggaatcatattcaatgaccttctcaattgacctgagttacagaaagtggccccagtgagagatgactgcccttaataagtataaaatttcaaaaagatctggacttaatatgatgacttataaggagcttagaaaatgcaggttacatttatatctacctataggattttatccaatgttgacttagccatggtagaactcttaactgcatctacacactatattgctcttgtaaccaaagatgctaatgagtgtatttgaattagcttctcctaggaggggtgactactttgctaaagagtatgaaaaatgttttgatggaagggacaagtttggttggtagtagagtgtttgtagcttatctggtaaaggaaattgagtgcatctgcatgcatagcacaagtaatccatcttctggcggttaactagagaaagcttatagtcagaggctcttgtgaatgcactgaagactgctgtgtctcaggagtttctcttgatgatctaccttttctgaattacttgaaaaggccaatgtgcttggttcgagttttttagtgaatatttacaatttcctgcttttatctagaaaagaagcaaaagggaaatatgaaagcagtatatataaaatctgtgctttggaattgatatttgcatttggtgattgttttttatttgattcagctaaattttatgtgttgaatacttactctagaataactacttttggaactggaagggggaaatctgtaaatggaaatttatttttatgttctgaaatttgagggtttaggaattgacttttgtgtaaagaatgctacggtattataaagctgtggaagttttttccactagtttcaggtgttttttttttttgttgttgttgttgttattttgaactacttaccaaaattagaagttaaaatctaattagaaattaataagatactaaaattcatgacagttttttgtttgtttgtttgtttgttttttggtatttcttgatttgggcataaaaggcacacccattctctcatgcttggaagaagctgctattcctactggctatctaagaagaatggaattattaattttatttgacttattaattttaaacgagtttaatttgggatcatttagtaagtactcttttctttttgagctgtgatagattatagtctagtttaagttgctcctaagtagacagatgaagaaactagggaggctttagagaggaagacagatgcttgaagtatgaacaatatatacccttagaagaatgggtcaaataatttgggtttttaatttaaaataggagggccccagatcttactttcctgtccttgaggaacaccttcaagtttttaaagtattttagggggaaagaagatttttaattgtttctgagcctaatgaggtaataaaatatattaaaatagtttaattttaatggtccttacgctttacagtacctaaggatcacttgtagtatctgacaaaaatgcagaattaaagagtcatggcagggtgtggtagctcaagcctgtaatcccagcactttgggaggccaggcaggaggattgcttgaggccaggagtttgagaccagcctgggcaacatagtaagacctcatctctacaaaaaataaaaaattatccaggtgtgggccgacagtcccagctactagggaggctaaggcagggtgattgattgagcccagtagtttgaggctgcagtgagttatgattgcgccactacactcccacttgggcaacagacaagagatcttatctctaaaaaatttttgttaaataataaaagaattaaggccagggatgttggctcacatctgtaatcccagcagggattatagtctcgggaggctgaggtgggcggattgcttgagcccggaaggtcaagaccagcctgggtgccatggtgaaaccccatctctacaaaaaaatacaaaaactagctgggtgtggtggcaccacctgtagtccccgctacttaggaggctgaggtgggaggattgcttgagcccaggaggcagaaggttgcagaggttgcagtgagccttgattgtgccactgtactccagtctgggcaacagggcaagaccctgtctc

SEQ ID NO: 435307 - DNA, 2409 bp, Homo sapiens
gtcggaggtgaggagacgtcgccgggtgaggaagcggggggctagcggcctggcgctgcggcgaccgaccggggcgtcaggatccctggcccccggagagcgaagggcgggcgggtcccggagcaagaagaattgtatagaaatgtaaaaaacatttatgtgtgcttcacatgtggcatgaaaaaaatgaggacctctggtcaaaattgcctgagttcagaatttcatgctggaaggaaagttagacgtaacttctaatttctagttccagtaagcatctcttcttggaaaatttccaaaaaagagtcctgctctgttgcccaggctggagtacattggtgtgatgatcatggttcactgcagcctcgacctcccaggctcaagcaattctcctacctcagcctcctgagtaactgggactataggatttctttgaagaaaaatgtgcttcttgaatcaactgcagtctctcctctgcataagagctcttaagggtactagcaggatagaagcaaatgaaactgaaagctcatctgcagctcagaaaagcaaagacatggaattttaaagagtgaaggtagcatggtgtcggccatgggtgaacaagacacagccagacaatgtggaccaatttcttcaaactacggcttttctgctgtctgcttgcagtgttgatggtggtggtgctggtcatcaatgttactcaggtagagtacttggaccatgagactgtttcagccactttcatcgacagcagtggacagtttgtttcctcccaggtgacaggaattagccgaaatccctactgtggctatgatcagcagaccctgtccagccaggagcgcatggaggaggactccttgctggctgccttgcaccggcaggttcctgatgtgggcccagtcccctttgtgaagagcactgacccttcttccagctactttgtcatcttgaactctgctgccttctttaaggtgggaagccagcttgaggtgctggttcatgtgcaggattttcaaagaaagcccaagaagtatggtggagactacctgcaggccagaattcactccctcaagctgcaggctggggctgtgggcagggtggtggattaccagaatgggttttacaaggttttctttactttgctatggccaggcaaagttaaagtatccgtatctctggtccaccccagtgaagggatcagagttcttcagcgcttacaggaagataaaccagacagggtctatttcaagagtctcttccgttcaggaagaatttctgaaactactgagtgcaacgtgtgtcttcctgggaatctgcccctgtgtaactttacagacctctacactggggagccctggttctgcttcaaaccaaagaagctcccttgcagcagcagaattacccatttcaaaggtggatacctgaaaggtctcctaaccgctgcagagagtgctttcttccagagctccatgaagaaggagatgctgtgtgttttgcttactgtagtagccctggattctaggacagtacctggcttaagaagcttaagaattatttgttgaataaacagttttttctgaaattgatgaaataataaaaaatgactgcacattcccatatcaagaatttgagaagttaacattttatgtttttgtttttggtctaagtacaagagacctagttttattgtgactcagtttctggaatagttgccccggatttcgagtgcttttctccttacctccaccctcccccatgttttaatgcagccctccaaaaatatttactgagtgtggactctagaccagggcctgtgctaggatacaaagatgaatgaggcaccacccttatcttcgagtagtatatgttttattttattttatttttttcccctgctgcctcccttgagtagtacatgttttagtaaggggaacagacactaaagagtcctggtaatgatgagcaaagtactgcatgagtaagtatctggggggcaagtgtccccactaggactcctgtcagatctggaaaaggcctgaggaatctgatacatgacttaatgcagcgtatacttgcagcctgaaaactaagtaatgacaaaatagacattcttgtcagtgtgagccattctctgagtccaaggggagtacataattcaaaccagaattggtcattttggagtttgcactcttagcagtatacagtggagtgaaatttaagaatcaatttaatttcttttcagtttttatgtacataaaacctgcttactacaagagacccagtttattattttgtgttggttaacattcataagtatatttcatcataataaggctccgtgaaattagtcattttatcatttgccaataaagacatatatctgaaaataaatgttcctgaacctga

SEQ ID NO: 435308 - DNA, 4532 bp, Homo sapiens
taccagtttgaatacatggcccagcacctggtgtttgccaactgcattcctttgatcctaaagttcttcaatcaaaacatcatgtcctacatcactgccaagaacagcattttgatcctgaatgaaagtggcgcgccgcccctgacgttacccggatcggagaggttggaattcagattacggctgcgattcgggtgtctcggaccccggtgtgcaccggaccacggggaggcggctccaaaggcgcggtgaacgttggtgagggagggcagctctgcgcagccccaagacatggctcacaacaagatcccgccgcggtggctgaactgtccccggcgcggccagccggtggcaggaagattcttacctctgaagacaatgttaggaccaagatatgatagtcaagttgctgaagaaaatcggttccatcccagcatgctctcaaattacctaaagagcctaaaggttaaaatgggcttgttggtggacctgacaaatacttcaaggttctatgaccgaaatgacatagaaaaagaaggaatcaaatatataaaacttcagtgtaaaggacatggtgagtgccctaccactgagaatactgagacctttattcgtctgtgtgagcggtttaatgaaagaaatccacctgaacttataggtgttcattgtactcatggcttcaatcgcactggtttcctcatatgtgcctttttggtggagaaaatggattggagtatcgaagcagcagttgctacttttgcccaagccagaccaccaggaatctacaagggtgattatttgaaggaactttttcgtcggtatggtgacatagaggaagcaccacccccacctctattgccagattggtgttttgaggatgatgaagacgaagatgaggatgaggatggaaagaaggaatcagaacccgggtcaagtgcttcttttggcaaaaggagaaaagaacggttaaaactgggcgctattttcttggaaggtgttactgttaaaggtgtaactcaagtaacaacacaaccaaagttaggagaggtacagcagaagtgtcatcaattctgtggctgggaagggtctggattccctggagcacagcctgtttccatggacaagcaaaatattaaacttttagacctgaagccatacaaagtaagctggaaagcagatggtactcggtacatgatgttgattgatggcacaaatgaagtttttatgattgatagagacaattcagtatttcatgtttcaaatctggaatttccatttcgtaaagatcttcgtatgcatttatcaaatactctcttggatggcgagatgattattgacagagtaaatggacaggctgttcctagatatttgatatatgacataattaaattcaattcacagcccgttggagattgtgattttaatgttcgtctgcagtgtatagaacgagaaattataagtcctcgacacgaaaaaatgaagactgggctcattgacaaaacacaggaaccatttagcgtcagaaataagccgttttttgacatctgtacttcaagaaagctacttgaaggaaattttgccaaagaagtgagccatgaaatggatggacttatttttcagcctactggaaaatacaaacctggtcgatgtgatgatattttgaaatggaagcctcccagtctgaattctgtggattttcgtctaaaaataacaagaatgggaggagaagggttacttcctcagaatgttggcctcctgtatgttggaggttatgaaagaccctttgcacaaatcaaggtgacaaaagagctgaaacagtatgacaacaaaattatagaatgcaaatttgagaacaacagctgggtcttcatgagacagagaacagacaaaagttttcctaatgcctacaacactgccatggctgtgtgtaacagcatctcaaaccctgtcaccaaggagatgctgtttgagttcatcgacagatgtactgcagcttctcaaggacagaagcgaaaacatcatctggaccctgacacggagctcatgccaccaccacctcccaaaagaccacgccctttaacctaagacctgcctgtgacttgagggttaagaagaaagaggaatgaggaaaaaacgctgttgcccatttttgtagccagagaaattgaaaaacgactgtggcttgatgttgatacacatttgaattttttttaaaaaaagaaagttatcgtagccagcctgtaaatacttgatgcattcgtttcctcagtgctgcaatacatcgtggacttaaacatcttatttatctgataaactcagccttaccttgtggaatctgaagattgaaatatccaaaggtttaaacaagatggaaatcaatgaaaaagaggccttgtttatatatgggtagcttcacatttaatttataaagttaacaatctggaaactgtgagcccataaaacagtattttttagaagttgtgttacaactgtagcaaattttccttttaaaaaatccaggcaatggcattaaacattcttgctatcatttaccatggatttcctacatttctgagatccctgtattcaaaaacaaatgacagggttgttaagttgtactatattaaacaacttggtctggtttatatcattttaacaagttttttggaaatgtaaaagaaaaaagtaaagctccatttttgtgaattgcattgtttctaaaggaagtattttgagtattttcatctgtttgtattgtttcgactatgatatcagatatccagtgtgtccattctggcagtggttttgagttacttcatggaacttggacatacaccaccaggtcctttatgtgttgttctcctgggagacttctttttttaaatgccagggctacttctgctttacctcagtggtatcagcacattgtaaattacgttaaaacacacaactcactgtgatctatgggagtgatatcaaatacaaacgatgttgtgttccttctctcgaacaaaacagcaaagggaatgccagctaacttctttgattagaaggtaatgtcatggaatagaatgctgtcaccagaaaatgctctcccactgctagataaatgcagaggcaaagtgtagacatctgtaggaactaaatatcaaggaaatcaagacatttattttcaaagcgagaattctatctacattctattctgcggatgttatttctgttatacatctgaattttaaaatgtttactgatagataatggatttaaagggcggctaattgattgtctgccattgttgataaactgttctaattggtttgtgaaagaactctgagaattagctaaatggaggctagtgtatttatttttagaggtacatgttttaagtaaatgtatttaaaacaaattttcatggtctgaattgtatatgtaaatgcatatctgtgtaagtatatgcaagtgtatattcttctactgattcagtcagacacgaaatccaactgaattacccggtagactgaatatctgacgggatttctatatggacatagcacagatgaaccaaaaatgtatttatattcacctgagttttaatgtttttaaacaaagttttctcctgcagtgcttttctatatgaaatagttgagtcaagcttgggcttttttcttcgttgttcccaagtcatgtaatgtatagtgaatttatccaaaacgccattgtaacgttttttactagagtgtttttgcacatttgggcgctaaagggattaaaacaactgatgccacaatgactattgaaggagggaaaattctcaaggttccatagtatcttttacaaaatggattaaaaaaaaaatgcctatgcaacttcaaatagtctgatgcctgcttccccaggacgagtgactcttccacggtgtgctgctttccctccgagcctgtggaaaggcagagcccttttgcagatacgaaagcaagcttttgccaatgatctttaatggagttaaaatgtttatggtaattgtaacctttcaaatgagttacgtgaaaagagcatctcacttttaatacacccagatattttcttcaagtctttgtgcattttagcaggacttaattttcttaatttattctttcctttcaattatagtgacatagagtagttggccttataagtagatcccatttagcccctgaacataataccatctgcagtattataaaagtcatttagaaggtcagggggataatctagaggcaggattttggacattgtgaaggaaatgtgctccttctcagctcacttcaataactattttctgagactgaagttttttagacaagaataagaaaactttgctttcttcagttatcacatgtgaaagcttttgctttttgttaggaaaaggtgtggatgactctactgcgtggatggttacatttgctttccgtgaaatgctcagaaaatgtcaggacattccttttccaattgtgtgtcagtgcgtattgtaataaaactactgatttaaatta

SEQ ID NO: 435309 - DNA, 942 bp, Homo sapiens
  misc_feature (771)..(771): n is a, c, g, or t
  misc_feature (783)..(783): n is a, c, g, or t
aatagacactatattaattatatcaaatatgcggcagtagcaaaaattataatctaattcatgcattttatataacatgtatatcctgcgtactaagtactacagccacagagtgagccatgaaatggatggacttatttttcagcctactggaaaatacaaacctggtcgatgtgatgatattttgaaatggaagcctcccagtctgaattctgtggattttcgtctaaaaataacaagaatgggaggagaaggaacctcagaggatccagaacggcagctggtccttgctggactgttcctgtccatgtgcctggtcatggtgctggggaacctgctcatcatccggccatgagccctgactcccacctccacacctccatgtacttcttcctctccaacctgtccttgcctgacatcggtttcacctccaccacggtcccccagatgactgtggacatccagtctcgcagcagagtcatctcctatgcaggctgcctgactcagaagtctctctttgccatttttggaggcacggaagagagacatgctcctgagtgtgatggcctatgaccggtttgtagccatctgtcaccctctatatcattcagccatcatgaacctgtgtttctgtggcttcctagttttgctgtcttttttttttctcagtcttttagactcccagctgtacaacttgattgccttactaatgacctgcttcaaggaggtggacattcctaatttcttctgtgacctttctcaactcccccntcttgccgttgngacaccttcatcaataacataatcatgtatttccctactgccatatttgggttttcttcccacctcgggagacccctttcctctttactattaaaatcgctccctccattgctgagggtttcatccttcagggggggaagtataaagaccctcttcccc

SEQ ID NO: 435310 - DNA, 868 bp, Homo sapiens
  misc_feature (697)..(697): n is a, c, g, or t
  misc_feature (709)..(709): n is a, c, g, or t
atatatttatctgataatttagtgaagtttaacataagcggccagaaccccggccttctgtataagtgctgctctgattcaaatacaaacctggtcgatgtgatgatattttgaaatggaagcctcccagtctgaattctgtggattttcgtctaaaaataacaagaatgggaggagaaggaacctcagaggatccagaacggcagctggtccttgctggactgttcctgtccatgtgcctggtcatggtgctggggaacctgctcatcatccggccatgagccctgactcccacctccacacctccatgtacttcttcctctccaacctgtccttgcctgacatcggtttcacctccaccacggtcccccagatgactgtggacatccagtctcgcagcagagtcatctcctatgcaggctgcctgactcagaagtctctctttgccatttttggaggcacggaagagagacatgctcctgagtgtgatggcctatgaccggtttgtagccatctgtcaccctctatatcattcagccatcatgaacctgtgtttctgtggcttcctagttttgctgtcttttttttttctcagtcttttagactcccagctgtacaacttgattgccttactaatgacctgcttcaaggaggtggacattcctaatttcttctgtgacctttctcaactcccccntcttgccgttgngacaccttcatcaataacataatcatgtatttccctactgccatatttgggttttcttcccacctcgggagacccctttcctctttactattaaaatcgctccctccattgctgagggtttcatccttcagggggggaagtataaagaccctcttcccc

SEQ ID NO: 435311 - DNA, 4461 bp, Homo sapiens
gaagttgcggtgcattgtgggttctcctggagctgtggagttgatcctgaatgaaagtggcgcgccgcccctgacgttacccggatcggagaggttggaattcagattacggctgcgattcgggtgtctcggaccccggtgtgcaccggaccacggggaggcggctccaaaggcgcggtgaacgttggtgagggagggcagctctgcgcagccccaagacatggctcacaacaagatcccgccgcggtggctgaactgtccccggcgcggccagccggtggcaggaagattcttacctctgaagacaatgttaggaccaagatatgatagtcaagttgctgaagaaaatcggttccatcccagcatgctctcaaattacctaaagagcctaaaggttaaaatgggcttgttggtggacctgacaaatacttcaaggttctatgaccgaaatgacatagaaaaagaaggaatcaaatatataaaacttcagtgtaaaggacatggtgagtgccctaccactgagaatactgagacctttattcgtctgtgtgagcggtttaatgaaagaaatccacctgaacttataggtgttcattgtactcatggcttcaatcgcactggtttcctcatatgtgcctttttggtggagaaaatggattggagtatcgaagcagcagttgctacttttgcccaagccagaccaccaggaatctacaagggtgattatttgaaggaactttttcgtcggtatggtgacatagaggaagcaccacccccacctctattgccagattggtgttttgaggatgatgaagacgaagatgaggatgaggatggaaagaaggaatcagaacccgggtcaagtgcttcttttggcaaaaggagaaaagaacggttaaaactgggcgctattttcttggaaggtgttactgttaaaggtgtaactcaagtaacaacacaaccaaagttaggagaggtacagcagaagtgtcatcaattctgtggctgggaagggtctggattccctggagcacagcctgtttccatggacaagcaaaatattaaacttttagacctgaagccatacaaagtaagctggaaagcagatggtactcggtacatgatgttgattgatggcacaaatgaagtttttatgattgatagagacaattcagtatttcatgtttcaaatctggaatttccatttcgtaaagatcttcgtatgcatttatcaaatactctcttggatggcgagatgattattgacagagtaaatggacaggctgttcctagatatttgatatatgacataattaaattcaattcacagcccgttggagattgtgattttaatgttcgtctgcagtgtatagaacgagaaattataagtcctcgacacgaaaaaatgaagactgggctcattgacaaaacacaggaaccatttagcgtcagaaataagccgttttttgacatctgtacttcaagaaagctacttgaaggaaattttgccaaagaagtgagccatgaaatggatggacttatttttcagcctactggaaaatacaaacctggtcgatgtgatgatattttgaaatggaagcctcccagtctgaattctgtggattttcgtctaaaaataacaagaatgggaggagaagggttacttcctcagaatgttggcctcctgtatgttggaggttatgaaagaccctttgcacaaatcaaggtgacaaaagagctgaaacagtatgacaacaaaattatagaatgcaaatttgagaacaacagctgggtcttcatgagacagagaacagacaaaagttttcctaatgcctacaacactgccatggctgtgtgtaacagcatctcaaaccctgtcaccaaggagatgctgtttgagttcatcgacagatgtactgcagcttctcaaggacagaagcgaaaacatcatctggaccctgacacggagctcatgccaccaccacctcccaaaagaccacgccctttaacctaagacctgcctgtgacttgagggttaagaagaaagaggaatgaggaaaaaacgctgttgcccatttttgtagccagagaaattgaaaaacgactgtggcttgatgttgatacacatttgaattttttttaaaaaaagaaagttatcgtagccagcctgtaaatacttgatgcattcgtttcctcagtgctgcaatacatcgtggacttaaacatcttatttatctgataaactcagccttaccttgtggaatctgaagattgaaatatccaaaggtttaaacaagatggaaatcaatgaaaaagaggccttgtttatatatgggtagcttcacatttaatttataaagttaacaatctggaaactgtgagcccataaaacagtattttttagaagttgtgttacaactgtagcaaattttccttttaaaaaatccaggcaatggcattaaacattcttgctatcatttaccatggatttcctacatttctgagatccctgtattcaaaaacaaatgacagggttgttaagttgtactatattaaacaacttggtctggtttatatcattttaacaagttttttggaaatgtaaaagaaaaaagtaaagctccatttttgtgaattgcattgtttctaaaggaagtattttgagtattttcatctgtttgtattgtttcgactatgatatcagatatccagtgtgtccattctggcagtggttttgagttacttcatggaacttggacatacaccaccaggtcctttatgtgttgttctcctgggagacttctttttttaaatgccagggctacttctgctttacctcagtggtatcagcacattgtaaattacgttaaaacacacaactcactgtgatctatgggagtgatatcaaatacaaacgatgttgtgttccttctctcgaacaaaacagcaaagggaatgccagctaacttctttgattagaaggtaatgtcatggaatagaatgctgtcaccagaaaatgctctcccactgctagataaatgcagaggcaaagtgtagacatctgtaggaactaaatatcaaggaaatcaagacatttattttcaaagcgagaattctatctacattctattctgcggatgttatttctgttatacatctgaattttaaaatgtttactgatagataatggatttaaagggcggctaattgattgtctgccattgttgataaactgttctaattggtttgtgaaagaactctgagaattagctaaatggaggctagtgtatttatttttagaggtacatgttttaagtaaatgtatttaaaacaaattttcatggtctgaattgtatatgtaaatgcatatctgtgtaagtatatgcaagtgtatattcttctactgattcagtcagacacgaaatccaactgaattacccggtagactgaatatctgacgggatttctatatggacatagcacagatgaaccaaaaatgtatttatattcacctgagttttaatgtttttaaacaaagttttctcctgcagtgcttttctatatgaaatagttgagtcaagcttgggcttttttcttcgttgttcccaagtcatgtaatgtatagtgaatttatccaaaacgccattgtaacgttttttactagagtgtttttgcacatttgggcgctaaagggattaaaacaactgatgccacaatgactattgaaggagggaaaattctcaaggttccatagtatcttttacaaaatggattaaaaaaaaaatgcctatgcaacttcaaatagtctgatgcctgcttccccaggacgagtgactcttccacggtgtgctgctttccctccgagcctgtggaaaggcagagcccttttgcagatacgaaagcaagcttttgccaatgatctttaatggagttaaaatgtttatggtaattgtaacctttcaaatgagttacgtgaaaagagcatctcacttttaatacacccagatattttcttcaagtctttgtgcattttagcaggacttaattttcttaatttattctttcctttcaattatagtgacatagagtagttggccttataagtagatcccatttagcccctgaacataataccatctgcagtattataaaagtcatttagaaggtcagggggataatctagaggcaggattttggacattgtgaaggaaatgtgctccttctcagctcacttcaataactattttctgagactgaagttttttagacaagaataagaaaactttgctttcttcagttatcacatgtgaaagcttttgctttttgttaggaaaaggtgtggatgactctactgcgtggatggttacatttgctttccgtgaaatgctcagaaaatgtcaggacattccttttccaattgtgtgtcagtgcgtattgtaataaaactactgatttaaatta

SEQ ID NO: 435312 - DNA, 4403 bp, Homo sapiens
gaagttgcggtgcattgtgggttctcctggagctgtggagttgatcctgaatgaaagtggcgcgccgcccctgacgttacccggatcggagaggttggaattcagattacggctgcgattcgggtgtctcggaccccggtgtgcaccggaccacggggaggcggctccaaaggcgcggtgaacgttggtgagggagggcagctctgcgcagccccaagacatggctcacaacaagatcccgccgcggtggctgaactgtccccggcgcggccagccggtggcaggaagattcttacctctgaagacaatgttaggaccaagatatgatagtcaagttgctgaagaaaatcggttccatcccagcatgctctcaaattacctaaagagcctaaaggttaaaatgggcttgttggtggacctgacaaatacttcaaggttctatgaccgaaatgacatagaaaaagaaggaatcaaatatataaaacttcagtgtaaaggacatggtgagtgccctaccactgagaatactgagacctttattcgtctgtgtgagcggtttaatgaaagaaatccacctgaacttataggtgttcattgtactcatggcttcaatcgcactggtttcctcatatgtgcctttttggtggagaaaatggattggagtatcgaagcagcagttgctacttttgcccaagccagaccaccaggaatctacaagggtgattatttgaaggaactttttcgtcggtatggtgacatagaggaagcaccacccccacctctattgccagattggtgttttgaggatgatgaagacgaagatgaggatgaggatggaaagaaggaatcagaacccgggtcaagtgcttcttttggcaaaaggagaaaagaacggttaaaactgggcgctattttcttggaaggtgttactgttaaaggtgtaactcaagtaacaacacaaccaaagttaggagaggtacagcagaagtgtcatcaattctgtggctgggaagggtctggattccctggagcacagcctgtttccatggacaagcaaaatattaaacttttagacctgaagccatacaaagtaagctggaaagcagatggtactcggtacatgatgttgattgatggcacaaatgaagtttttatgattgatagagacaattcagtatttcatgtttcaaatctggaatttccatttcgtaaagatcttcgtatgcatttatcaaatactctcttggatggcgagatgattattgacagagtaaatggacaggctgttcctagatatttgatatatgacataattaaattcaattcacagcccgttggagattgtgattttaatgttcgtctgcagtgtatagaacgagaaattataagtcctcgacacgaaaaaatgaagactgggctcattgacaaaacacaggaaccatttagcgtcagaaataagccgttttttgacatctgtacttcaagaaagctacttgaaggaaattttgccaaagaagtgagccatgaaatggatggacttatttttcagcctactggaaaatacaaacctggtcgatgtgatgatattttgaaatggaagcctcccagtctgaattctgtggattttcgtctaaaaataacaagaatgggaggagaagggttacttcctcagaatgttggcctcctgtatgttggaggttatgaaagaccctttgcacaaatcaaggtgacaaaagagctgaaacagtatgacaacaaaattatagaatgcaaatttgagaacaacagctgggtcttcatgagacagagaacagacaaaagttttcctaatgcctacaacactgccatggctgtgtgtaacagcatctcaaaccctgtcaccaaggagatgctgtttgagttcatcgacagatgtactgcagcttctcaaggacagaagcgaaaacatcatctggaccctgacacggagctcatgccaccaccacctcccaaaagaccacgccctttaacctaagacctgcctgtgacttgagggttaagaagaaagaggaatgaggaaaaaacgctgttgcccatttttgtagccagagaaattgaaaaacgactgtggcttgatgttgatacacatttgaattttttttaaaaaaagaaagttatcgtagccagcctgtaaatacttgatgcattcgtttcctcagtgctgcaatacatcgtggacttaaacatcttatttatctgataaactcagccttaccttgtggaatctgaagattgaaatatccaaaggtttaaacaagatggaaatcaatgaaaaagaggccttgtttatatatgggtagcttcacatttaatttataaagttaacaatctggaaactgtgagcccataaaacagtattttttagaagttgtgttacaactgtagcaaattttccttttaaaaaatccaggcaatggcattaaacattcttgctatcatttaccatggatttcctacatttctgagatccctgtattcaaaaacaaatgacagggttgttaagttgtactatattaaacaacttggtctggtttatatcattttaacaagttttttggaaatgtaaaagaaaaaagtaaagctccatttttgtgaattgcattgtttctaaaggaagtattttgagtattttcatctgtttgtattgtttcgactatgatatcagatatccagtgtgtccattctggcagtggttttgagttacttcatggaacttggacatacaccaccaggtcctttatgtgttgttctcctgggagacttctttttttaaatgccagggctacttctgctttacctcagtggtatcagcacattgtaaattacgttaaaacacacaactcactgtgatctatgggagtgatatcaaatacaaacgatgttgtgttccttctctcgaacaaaacagcaaagggaatgccagctaacttctttgattagaaggtaatgtcatggaatagaatgctgtcaccagaaaatgctctcccactgctagataaatgcagaggcaaagtgtagacatctgtaggaactaaatatcaaggaaatcaagacatttattttcaaagcgagaattctatctacattctattctgcggatgttatttctgttatacatctgaattttaaaatgtttactgatagataatggatttaaagggcggctaattgattgtctgccattgttgataaactgttctaattggtttgtgaaagaactctgagaattagctaaatggaggctagtgtatttatttttagaggtacatgttttaagtaaatgtatttaaaacaaattttcatggtctgaattgtatatgtaaatgcatatctgtgtaagtatatgcaagtgtatattcttctactgattcagtcagacacgaaatccaactgaattacccggtagactgaatatctgacgggatttctatatggacatagcacagatgaaccaaaaatgtatttatattcacctgagttttaatgtttttaaacaaagttttctcctgcagtgcttttctatatgaaatagttgagtcaagcttgggcttttttcttcgttgttcccaagtcatgtaatgtatagtgaatttatccaaaacgccattgtaacgttttttactagagtgtttttgcacatttgggcgctaaagggattaaaacaactgatgccacaatgactattgaaggagggaaaattctcaaggttccatagtatcttttacaaaatggattgactcttccacggtgtgctgctttccctccgagcctgtggaaaggcagagcccttttgcagatacgaaagcaagcttttgccaatgatctttaatggagttaaaatgtttatggtaattgtaacctttcaaatgagttacgtgaaaagagcatctcacttttaatacacccagatattttcttcaagtctttgtgcattttagcaggacttaattttcttaatttattctttcctttcaattatagtgacatagagtagttggccttataagtagatcccatttagcccctgaacataataccatctgcagtattataaaagtcatttagaaggtcagggggataatctagaggcaggattttggacattgtgaaggaaatgtgctccttctcagctcacttcaataactattttctgagactgaagttttttagacaagaataagaaaactttgctttcttcagttatcacatgtgaaagcttttgctttttgttaggaaaaggtgtggatgactctactgcgtggatggttacatttgctttccgtgaaatgctcagaaaatgtcaggacattccttttccaattgtgtgtcagtgcgtattgtaataaaactactgatttaaatta

SEQ ID NO: 435313 - DNA, 4441 bp, Homo sapiens
gaagttgcggtgcattgtgggttctcctggagctgtggagttgatcctgaatgaaagtggcgcgccgcccctgacgttacccggatcggagaggttggaattcagattacggctgcgattcgggtgtctcggaccccggtgtgcaccggaccacggggaggcggctccaaaggcgcggtgaacgttggtgagggagggcagctctgcgcagccccaagacatggctcacaacaagatcccgccgcggtggctgaactgtccccggcgcggccagccggtggcaggaagattcttacctctgaagacaatgttaggaccaagatatgatagtcaagttgctgaagaaaatcggttccatcccagcatgctctcaaattacctaaagagcctaaaggttaaaatgggcttgttggtggacctgacaaatacttcaaggttctatgaccgaaatgacatagaaaaagaaggaatcaaatatataaaacttcagtgtaaaggacatggtgagtgccctaccactgagaatactgagacctttattcgtctgtgtgagcggtttaatgaaagaaatccacctgaacttataggtgttcattgtactcatggcttcaatcgcactggtttcctcatatgtgcctttttggtggagaaaatggattggagtatcgaagcagcagttgctacttttgcccaagccagaccaccaggaatctacaagggtgattatttgaaggaactttttcgtcggtatggtgacatagaggaagcaccacccccacctctattgccagattggtgttttgaggatgatgaagacgaagatgaggatgaggatggaaagaaggaatcagaacccgggtcaagtgcttcttttggcaaaaggagaaaagaacggttaaaactgggcgctattttcttggaaggtgttactgttaaaggtgtaactcaagtaacaacacaaccaaagttaggagaggtacagcagaagtgtcatcaattctgtggctgggaagggtctggattccctggagcacagcctgtttccatggacaagcaaaatattaaacttttagacctgaagccatacaaagtaagctggaaagcagatggtactcggtacatgatgttgattgatggcacaaatgaagtttttatgattgatagagacaattcagtatttcatgtttcaaatctggaatttccatttcgtaaagatcttcgtatgcatttatcaaatactctcttggatggcgagatgattattgacagagtaaatggacaggctgttcctagatatttgatatatgacataattaaattcaattcacagcccgttggagattgtgattttaatgttcgtctgcagtgtatagaacgagaaattataagtcctcgacacgaaaaaatgaagactgggctcattgacaaaacacaggaaccatttagcgtcagaaataagccgttttttgacatctgtacttcaagaaagctacttgaaggaaattttgccaaagaagtgagccatgaaatggatggacttatttttcagcctactggaaaatacaaacctggtcgatgtgatgatattttgaaatggaagcctcccagtctgaattctgtggattttcgtctaaaaataacaagaatgggaggagaagggttacttcctcagaatgttggcctcctgtatgttggaggttatgaaagaccctttgcacaaatcaaggtgacaaaagagctgaaacagtatgacaacaaaattatagaatgcaaatttgagaacaacagctgggtcttcatgagacagagaacagacaaaagttttcctaatgcctacaacactgccatggctgtgtgtaacagcatctcaaaccctgtcaccaaggagatgctgtttgagttcatcgacagatgtactgcagcttctcaaggacagaagcgaaaacatcatctggaccctgacacggagctcatgccaccaccacctcccaaaagaccacgccctttaacctaagacctgcctgtgacttgagggttaagaagaaagaggaatgaggaaaaaacgctgttgcccatttttgtagccagagaaattgaaaaacgactgtggcttgatgttgatacacatttgaattttttttaaaaaaagaaagttatcgtagccagcctgtaaatacttgatgcattcgtttcctcagtgctgcaatacatcgtggacttaaacatcttatttatctgataaactcagccttaccttgtggaatctgaagattgaaatatccaaaggtttaaacaagatggaaatcaatgaaaaagaggccttgtttatatatgggtagcttcacatttaatttataaagttaacaatctggaaactgtgagcccataaaacagtattttttagaagttgtgttacaactgtagcaaattttccttttaaaaaatccaggcaatggcattaaacattcttgctatcatttaccatggatttcctacatttctgagatccctgtattcaaaaacaaatgacagggttgttaagttgtactatattaaacaacttggtctggtttatatcattttaacaagttttttggaaatgtaaaagaaaaaagtaaagctccatttttgtgaattgcattgtttctaaaggaagtattttgagtattttcatctgtttgtattgtttcgactatgatatcagatatccagtgtgtccattctggcagtggttttgagttacttcatggaacttggacatacaccaccaggtcctttatgtgttgttctcctgggagacttctttttttaaatgccagggctacttctgctttacctcagtggtatcagcacattgtaaattacgttaaaacacacaactcactgtgatctatgggagtgatatcaaatacaaacgatgttgtgttccttctctcgaacaaaacagcaaagggaatgccagctaacttctttgattagaaggtaatgtcatggaatagaatgctgtcaccagaaaatgctctcccactgctagataaatgcagaggcaaagtgtagacatctgtaggaactaaatatcaaggaaatcaagacatttattttcaaagcgagaattctatctacattctattctgcggatgttatttctgttatacatctgaattttaaaatgtttactgatagataatggattgtctgccattgttgataaactgttctaattggtttgtgaaagaactctgagaattagctaaatggaggctagtgtatttatttttagaggtacatgttttaagtaaatgtatttaaaacaaattttcatggtctgaattgtatatgtaaatgcatatctgtgtaagtatatgcaagtgtatattcttctactgattcagtcagacacgaaatccaactgaattacccggtagactgaatatctgacgggatttctatatggacatagcacagatgaaccaaaaatgtatttatattcacctgagttttaatgtttttaaacaaagttttctcctgcagtgcttttctatatgaaatagttgagtcaagcttgggcttttttcttcgttgttcccaagtcatgtaatgtatagtgaatttatccaaaacgccattgtaacgttttttactagagtgtttttgcacatttgggcgctaaagggattaaaacaactgatgccacaatgactattgaaggagggaaaattctcaaggttccatagtatcttttacaaaatggattaaaaaaaaaatgcctatgcaacttcaaatagtctgatgcctgcttccccaggacgagtgactcttccacggtgtgctgctttccctccgagcctgtggaaaggcagagcccttttgcagatacgaaagcaagcttttgccaatgatctttaatggagttaaaatgtttatggtaattgtaacctttcaaatgagttacgtgaaaagagcatctcacttttaatacacccagatattttcttcaagtctttgtgcattttagcaggacttaattttcttaatttattctttcctttcaattatagtgacatagagtagttggccttataagtagatcccatttagcccctgaacataataccatctgcagtattataaaagtcatttagaaggtcagggggataatctagaggcaggattttggacattgtgaaggaaatgtgctccttctcagctcacttcaataactattttctgagactgaagttttttagacaagaataagaaaactttgctttcttcagttatcacatgtgaaagcttttgctttttgttaggaaaaggtgtggatgactctactgcgtggatggttacatttgctttccgtgaaatgctcagaaaatgtcaggacattccttttccaattgtgtgtcagtgcgtattgtaataaaactactgatttaaatta

SEQ ID NO: 435314 - DNA, 4911 bp, Homo sapiens
gaagttgcggtgcattgtgggttctcctggagctgtggagttgatcctgaatgaaagtggcgcgccgcccctgacgttacccggatcggagaggttggaattcagattacggctgcgattcgggtgtctcggaccccggtgtgcaccggaccacggggaggcggctccaaaggcgcggtgaacgttggtgagggagggcagctctgcgcagccccaagacatggctcacaacaagatcccgccgcggtggctgaactgtccccggcgcggccagccggtggcaggaagattcttacctctgaagacaatgttaggaccaagatatgatagtcaagttgctgaagaaaatcggttccatcccagcatgctctcaaattacctaaagagcctaaaggttaaaatgggcttgttggtggacctgacaaatacttcaaggttctatgaccgaaatgacatagaaaaagaaggaatcaaatatataaaacttcagtgtaaaggacatggtgagtgccctaccactgagaatactgagacctttattcgtctgtgtgagcggtttaatgaaagaaatccacctgaacttataggtgttcattgtactcatggcttcaatcgcactggtttcctcatatgtgcctttttggtggagaaaatggattggagtatcgaagcagcagttgctacttttgcccaagccagaccaccaggaatctacaagggtgattatttgaaggaactttttcgtcggtatggtgacatagaggaagcaccacccccacctctattgccagattggtgttttgaggatgatgaagacgaagatgaggatgaggatggaaagaaggaatcagaacccgggtcaagtgcttcttttggcaaaaggagaaaagaacggttaaaactgggcgctattttcttggaaggtgttactgttaaaggtgtaactcaagtaacaacacaaccaaagttaggagaggtacagcagaagtgtcatcaattctgtggctgggaagggtctggattccctggagcacagcctgtttccatggacaagcaaaatattaaacttttagacctgaagccatacaaagtaagctggaaagcagatggtactcggtacatgatgttgattgatggcacaaatgaagtttttatgattgatagagacaattcagtatttcatgtttcaaatctggaatttccatttcgtaaagatcttcgtatgcatttatcaaatactctcttggatggcgagatgattattgacagagtaaatggacaggctgttcctagatatttgatatatgacataattaaattcaattcacagcccgttggagattgtgattttaatgttcgtctgcagtgtatagaacgagaaattataagtcctcgacacgaaaaaatgaagactgggctcattgacaaaacacaggaaccatttagcgtcagaaataagccgttttttgacatctgtacttcaagaaagctacttgaaggaaattttgccaaagaagtgagccatgaaatggatggacttatttttcagcctactggaaaatacaaacctggtcgatgtgatgatattttgaaatggaagcctcccagtctgaattctgtggattttcgtctaaaaataacaagaatgggaggagaagggttacttcctcagaatgttggcctcctgtatgttggaggttatgaaagaccctttgcacaaatcaaggtgacaaaagagctgaaacagtatgacaacaaaattatagaatgcaaatttgagaacaacagctgggtcttcatgagacagagaacagacaaaagttttcctaatgcctacaacactgccatggctgtgtgtaacagcatctcaaaccctgtcaccaaggagatgctgtttgagttcatcgacagatgtactgcagcttctcaaggacagaagcgaaaacatcatctggaccctgacacggagctcatgccaccaccacctcccaaaagaccacgccctttaacctaagacctgcctgtgacttgagggttaagaagaaagaggaatgaggaaaaaacgctgttgcccatttttgtagccagagaaattgaaaaacgactgtggcttgatgttgatacacatttgaattttttttaaaaaaagaaagttatcgtagccagcctgtaaatacttgatgcattcgtttcctcagtgctgcaatacatcgtggacttaaacatcttatttatctgataaactcagccttaccttgtggaatctgaagattgaaatatccaaaggtttaaacaagatggaaatcaatgaaaaagaggccttgtttatatatgggtagcttcacatttaatttataaagttaacaatctggaaactgtgagcccataaaacagtattttttagaagttgtgttacaactgtagcaaattttccttttaaaaaatccaggcaatggcattaaacattcttgctatcatttaccatggatttcctacatttctgagatccctgtattcaaaaacaaatgacagggttgttaagttgtactatattaaacaacttggtctggtttatatcattttaacaagttttttggaaatgtaaaagaaaaaagtaaagctccatttttgtgaattgcattgtttctaaaggaagtattttgagtattttcatctgtttgtattgtttcgactatgatatcagatatccagtgtgtccattctggcagtggttttgagttacttcatggaacttggacatacaccaccaggtcctttatgtgttgttctcctgggagacttctttttttaaatgccagggctacttctgctttacctcagtggtatcagcacattgtaaattacgttaaaacacacaactcactgtgatctatgggagtgatatcaaatacaaacgatgttgtgttccttctctcgaacaaaacagcaaagggaatgccagctaacttctttgattagaaggtaatgtcatggaatagaatgctgtcaccagaaaatgctctcccactgctagataaatgcagaggcaaagtgtagacatctgtaggaactaaatatcaaggaaatcaagacatttattttcaaagcgagaattctatctacattctattctgcggatgttatttctgttatacatctgaattttaaaatgtttactgatagataatggatttaaagggcggctaattgattgtctgccattgttgataaactgttctaattggtttgtgaaagaactctgagaattagctaaatggaggctagtgtatttatttttagaggtacatgttttaagtaaatgtatttaaaacaaattttcatggtctgaattgtatatgtaaatgcatatctgtgtaagtatatgcaagtgtatattcttctactgattcagtcagacacgaaatccaactgaattacccggtagactgaatatctgacgggatttctatatggacatagcacagatgaaccaaaaatgtatttatattcacctgagttttaatgtttttaaacaaagttttctcctgcagtgcttttctatatgaaatagttgagtcaagcttgggcttttttcttcgttgttcccaagtcatgtaatgtatagtgaatttatccaaaacgccattgtaacgttttttactagagtgtttttgcacatttgggcgctaaagggattaaaacaactgatgccacaatgactattgaaggagggaaaattctcaaggttccatagtatcttttacaaaatggattaaaaaaaaaatgcctatgcaacttcaaatagtctgatgcctgcttccccaggacgagtgactcttccacggtgtgctgctttccctccgagcctgtggaaaggcagagcccttttgcagatacgaaagcaagcttttgccaatgatctttaatggagttaaaatgtttatggtaattgtaacctttcaaatgagttacgtgaaaagagcatctcacttttaatacacccagatattttcttcaagtctttgtgcattttagcaggacttaattttcttaatttattctttcctttcaattatagtgacatagagtagttggccttataagtagatcccatttagcccctgaacataataccatctgcagtattataaaagtcatttagaaggtcagggggataatctagaggcaggattttggacattgtgaaggaaatgtgctccttctcagctcacttcaataactattttctgagactgaagttttttagacaagaataagaaaactttgctttcttcagttatcacatgtgaaagcttttgctttttgttaggaaaaggtgtggatgactctactgcgtggatggttacatttgctttccgtgaaatgctcagaaaatgtcaggacattccttttccaattgtgtgtcagtgcgtattgtaataaaactactgatttaaattaaaaaaaaaaaaaaaaaaaaaaaaaaaaaaaaaaaaaaaaaaaaaaaaaaaaaaaaacaaaaacaaaaacaataaaacaaaaaaaaaaagaagggggggggccccagtaacacactcccgcctcaggggggacgaacacaggtacggcagcacacagtgtatgtctgtgaacaacacggcggccccacaaaagaggagacagcacgtatttaacacaaccagccggcggcgcggcgcgcgaacactaaacaaacaccgcggggagagagcagacacataacgactacggactgagcggctcatctagtggaagcgcaagaacccctcaatcaccccggcaggcggaggagcaacaaacagcgtagcggacaacacctaggcagccaaagcaggacacctcacgtcgcgccgggaggaacccaatataacaagccacgagacgcacacccgg

SEQ ID NO: 435315 - DNA, 4392 bp, Homo sapiens
gaagttgcggtgcattgtgggttctcctggagctgtggagttgatcctgaatgaaagtggcgcgccgcccctgacgttacccggatcggagaggttggaattcagattacggctgcgattcgggtgtctcggaccccggtgtgcaccggaccacggggaggcggctccaaaggcgcggtgaacgttggtgagggagggcagctctgcgcagccccaagacatggctcacaacaagatcccgccgcggtggctgaactgtccccggcgcggccagccggtggcaggaagattcttacctctgaagacaatgttaggaccaagatatgatagtcaagttgctgaagaaaatcggttccatcccagcatgctctcaaattacctaaagagcctaaaggttaaaatgggcttgttggtggacctgacaaatacttcaaggttctatgaccgaaatgacatagaaaaagaaggaatcaaatatataaaacttcagtgtaaaggacatggtgagtgccctaccactgagaatactgagacctttattcgtctgtgtgagcggtttaatgaaagaaatccacctgaacttataggtgttcattgtactcatggcttcaatcgcactggtttcctcatatgtgcctttttggtggagaaaatggattggagtatcgaagcagcagttgctacttttgcccaagccagaccaccaggaatctacaagggtgattatttgaaggaactttttcgtcggtatggtgacatagaggaagcaccacccccacctctattgccagattggtgttttgaggatgatgaagacgaagatgaggatgaggatggaaagaaggaatcagaacccgggtcaagtgcttcttttggcaaaaggagaaaagaacggttaaaactgggcgctattttcttggaaggtgttactgttaaaggtgtaactcaagtaacaacacaaccaaagttaggagaggtacagcagaagtgtcatcaattctgtggctgggaagggtctggattccctggagcacagcctgtttccatggacaagcaaaatattaaacttttagacctgaagccatacaaagtaagctggaaagcagatggtactcggtacatgatgttgattgatggcacaaatgaagtttttatgattgatagagacaattcagtatttcatgtttcaaatctggaatttccatttcgtaaagatcttcgtatgcatttatcaaatactctcttggatggcgagatgattattgacagagtaaatggacaggctgttcctagatatttgatatatgacataattaaattcaattcacagcccgttggagattgtgattttaatgttcgtctgcagtgtatagaacgagaaattataagtcctcgacacgaaaaaatgaagactgggctcattgacaaaacacaggaaccatttagcgtcagaaataagccgttttttgacatctgtacttcaagaaagaaatacaaacctggtcgatgtgatgatattttgaaatggaagcctcccagtctgaattctgtggattttcgtctaaaaataacaagaatgggaggagaagggttacttcctcagaatgttggcctcctgtatgttggaggttatgaaagaccctttgcacaaatcaaggtgacaaaagagctgaaacagtatgacaacaaaattatagaatgcaaatttgagaacaacagctgggtcttcatgagacagagaacagacaaaagttttcctaatgcctacaacactgccatggctgtgtgtaacagcatctcaaaccctgtcaccaaggagatgctgtttgagttcatcgacagatgtactgcagcttctcaaggacagaagcgaaaacatcatctggaccctgacacggagctcatgccaccaccacctcccaaaagaccacgccctttaacctaagacctgcctgtgacttgagggttaagaagaaagaggaatgaggaaaaaacgctgttgcccatttttgtagccagagaaattgaaaaacgactgtggcttgatgttgatacacatttgaattttttttaaaaaaagaaagttatcgtagccagcctgtaaatacttgatgcattcgtttcctcagtgctgcaatacatcgtggacttaaacatcttatttatctgataaactcagccttaccttgtggaatctgaagattgaaatatccaaaggtttaaacaagatggaaatcaatgaaaaagaggccttgtttatatatgggtagcttcacatttaatttataaagttaacaatctggaaactgtgagcccataaaacagtattttttagaagttgtgttacaactgtagcaaattttccttttaaaaaatccaggcaatggcattaaacattcttgctatcatttaccatggatttcctacatttctgagatccctgtattcaaaaacaaatgacagggttgttaagttgtactatattaaacaacttggtctggtttatatcattttaacaagttttttggaaatgtaaaagaaaaaagtaaagctccatttttgtgaattgcattgtttctaaaggaagtattttgagtattttcatctgtttgtattgtttcgactatgatatcagatatccagtgtgtccattctggcagtggttttgagttacttcatggaacttggacatacaccaccaggtcctttatgtgttgttctcctgggagacttctttttttaaatgccagggctacttctgctttacctcagtggtatcagcacattgtaaattacgttaaaacacacaactcactgtgatctatgggagtgatatcaaatacaaacgatgttgtgttccttctctcgaacaaaacagcaaagggaatgccagctaacttctttgattagaaggtaatgtcatggaatagaatgctgtcaccagaaaatgctctcccactgctagataaatgcagaggcaaagtgtagacatctgtaggaactaaatatcaaggaaatcaagacatttattttcaaagcgagaattctatctacattctattctgcggatgttatttctgttatacatctgaattttaaaatgtttactgatagataatggatttaaagggcggctaattgattgtctgccattgttgataaactgttctaattggtttgtgaaagaactctgagaattagctaaatggaggctagtgtatttatttttagaggtacatgttttaagtaaatgtatttaaaacaaattttcatggtctgaattgtatatgtaaatgcatatctgtgtaagtatatgcaagtgtatattcttctactgattcagtcagacacgaaatccaactgaattacccggtagactgaatatctgacgggatttctatatggacatagcacagatgaaccaaaaatgtatttatattcacctgagttttaatgtttttaaacaaagttttctcctgcagtgcttttctatatgaaatagttgagtcaagcttgggcttttttcttcgttgttcccaagtcatgtaatgtatagtgaatttatccaaaacgccattgtaacgttttttactagagtgtttttgcacatttgggcgctaaagggattaaaacaactgatgccacaatgactattgaaggagggaaaattctcaaggttccatagtatcttttacaaaatggattaaaaaaaaaatgcctatgcaacttcaaatagtctgatgcctgcttccccaggacgagtgactcttccacggtgtgctgctttccctccgagcctgtggaaaggcagagcccttttgcagatacgaaagcaagcttttgccaatgatctttaatggagttaaaatgtttatggtaattgtaacctttcaaatgagttacgtgaaaagagcatctcacttttaatacacccagatattttcttcaagtctttgtgcattttagcaggacttaattttcttaatttattctttcctttcaattatagtgacatagagtagttggccttataagtagatcccatttagcccctgaacataataccatctgcagtattataaaagtcatttagaaggtcagggggataatctagaggcaggattttggacattgtgaaggaaatgtgctccttctcagctcacttcaataactattttctgagactgaagttttttagacaagaataagaaaactttgctttcttcagttatcacatgtgaaagcttttgctttttgttaggaaaaggtgtggatgactctactgcgtggatggttacatttgctttccgtgaaatgctcagaaaatgtcaggacattccttttccaattgtgtgtcagtgcgtattgtaataaaactactgatttaaatta

SEQ ID NO: 435316 - DNA, 4937 bp, Homo sapiens
gaagttgcggtgcattgtgggttctcctggagctgtggagttgatcctgaatgaaagtggcgcgccgcccctgacgttacccggatcggagaggttggaattcagattacggctgcgattcgggtgtctcggaccccggtgtgcaccggaccacggggaggcggctccaaaggcgcggtgaacgttggtgagggagggcagctctgcgcagccccaagacatggctcacaacaagatcccgccgcggtggctgaactgtccccggcgcggccagccggtggcaggaagattcttacctctgaagacaatgttaggaccaagatatgatagtcaagttgctgaagaaaatcggttccatcccagcatgctctcaaattacctaaagagcctaaaggttaaaatgggcttgttggtggacctgacaaatacttcaaggttctatgaccgaaatgacatagaaaaagaaggaatcaaatatataaaacttcagtgtaaaggacatggtgagtgccctaccactgagaatactgagacctttattcgtctgtgtgagcggtttaatgaaagaaatccacctgaacttataggtgttcattgtactcatggcttcaatcgcactggtttcctcatatgtgcctttttggtggagaaaatggattggagtatcgaagcagcagttgctacttttgcccaagccagaccaccaggaatctacaagggtgattatttgaaggaactttttcgtcggtatggtgacatagaggaagcaccacccccacctctattgccagattggtgttttgaggatgatgaagacgaagatgaggatgaggatggaaagaaggaatcagaacccgggtcaagtgcttcttttggcaaaaggagaaaagaacggttaaaactgggcgctattttcttggaaggtgttactgttaaaggtgtaactcaagtaacaacacaaccaaagttaggagaggtacagcagaagtgtcatcaattctgtggctgggaagggtctggattccctggagcacagcctgtttccatggacaagcaaaatattaaacttttagacctgaagccatacaaagtaagctggaaagcagatggtactcggtacatgatgttgattgatggcacaaatgaagtttttatgattgatagagacaattcagtatttcatgtttcaaatctggaatttccatttcgtaaagatcttcgtatgcatttatcaaatactctcttggatggcgagatgattattgacagagtaaatggacaggctgttcctagatatttgatatatgacataattaaattcaattcacagcccgttggagattgtgattttaatgttcgtctgcagtgtatagaacgagaaattataagtcctcgacacgaaaaaatgaagactgggctcattgacaaaacacaggaaccatttagcgtcagaaataagccgttttttgacatctgtacttcaagaaagctacttgaaggaaattttgccaaagaagtgagccatgaaatggatggacttatttttcagcctactggaaaatacaaacctggtcgatgtgatgatattttgaaatggaagcctcccagtctgaattctgtggattttcgtctaaaaataacaagaatgggaggagaagggttacttcctcagaatgttggcctcctgtatgttggaggttatgaaagaccctttgcacaaatcaaggtgacaaaagagctgaaacagtatgacaacaaaattatagaatgcaaatttgagaacaacagctgggtcttcatgagacagagaacagacaaaagttttcctaatgcctacaacactgccatggctgtgtgtaacagcatctcaaaccctgtcaccaaggagatgctgtttgagttcatcgacagatgtactgcagcttctcaaggacagaagcgaaaacatcatctggaccctgacacggagctcatgccaccaccacctcccaaaagaccacgccctttaacctaagacctgcctgtgacttgagggttaagaagaaagaggaatgaggaaaaaacgctgttgcccatttttgtagccagagaaattgaaaaacgactgtggcttgatgttgatacacatttgaattttttttaaaaaaagaaagttatcgtagccagcctgtaaatacttgatgcattcgtttcctcagtgctgcaatacatcgtggacttaaacatcttatttatctgataaactcagccttaccttgtggaatctgaagattgaaatatccaaaggtttaaacaagatggaaatcaatgaaaaagaggccttgtttatatatgggtagcttcacatttaatttataaagttaacaatctggaaactgtgagcccataaaacagtattttttagaagttgtgttacaactgtagcaaattttccttttaaaaaatccaggcaatggcattaaacattcttgctatcatttaccatggatttcctacatttctgagatccctgtattcaaaaacaaatgacagggttgttaagttgtactatattaaacaacttggtctggtttatatcattttaacaagttttttggaaatgtaaaagaaaaaagtaaagctccatttttgtgaattgcattgtttctaaaggaagtattttgagtattttcatctgtttgtattgtttcgactatgatatcagatatccagtgtgtccattctggcagtggttttgagttacttcatggaacttggacatacaccaccaggtcctttatgtgttgttctcctgggagacttctttttttaaatgccagggctacttctgctttacctcagtggtatcagcacattgtaaattacgttaaaacacacaactcactgtgatctatgggagtgatatcaaatacaaacgatgttgtgttccttctctcgaacaaaacagcaaagggaatgccagctaacttctttgattagaaggtaatgtcatggaatagaatgctgtcaccagaaaatgctctcccactgctagataaatgcagaggcaaagtgtagacatctgtaggaactaaatatcaaggaaatcaagacatttattttcaaagcgagaattctatctacattctattctgcggatgttatttctgttatacatctgaattttaaaatgtttactgatagataatggatttaaagggcggctaattgattgtctgccattgttgataaactgttctaattggtttgtgaaagaactctgagaattagctaaatggaggctagtgtatttatttttagaggtacatgttttaagtaaatgtatttaaaacaaattttcatggtctgaattgtatatgtaaatgcatatctgtgtaagtatatgcaagtgtatattcttctactgattcagtcagacacgaaatccaactgaattacccggtagactgaatatctgacgggatttctatatggacatagcacagatgaaccaaaaatgtatttatattcacctgagttttaatgtttttaaacaaagttttctcctgcagtgcttttctatatgaaatagttgagtcaagcttgggcttttttcttcgttgttcccaagtcatgtaatgtatagtgaatttatccaaaacgccattgtaacgttttttactagagtgtttttgcacatttgggcgctaaagggattaaaacaactgatgccacaatgactattgaaggagggaaaattctcaaggttccatagtatcttttacaaaatggattaaaaaaaaaatgcctatgcaacttcaaatagtctgatgcctgcttccccaggacgagtgactcttccacggtgtgctgctttccctccgagcctgtggaaaggcagagcccttttgcagatacgaaagcaagcttttgccaatgatctttaatggagttaaaatgtttatggtaattgtaacctttcaaatgagttacgtgaaaagagcatctcacttttaatacacccagatattttcttcaagtctttgtgcattttagcaggacttaattttcttaatttattctttcctttcaattatagtgacatagagtagttggccttataagtagatcccatttagcccctgaacataataccatctgcagtattataaaagtcatttagaaggtcagggggataatctagaggcaggattttggacattgtgaaggaaatgtgctccttctcagctcacttcaataactattttctgagactgaagttttttagacaagaataagaaaactttgctttcttcagttatcacatgtgaaagcttttgctttttgttaggaaaaggtgtggatgactctactgcgtggatggttacatttgctttccgtgaaatgctcagaaaatgtcaggacattccttttccaattgtgtgtcagtgcgtattgtaataaaactactgatttaaattagcataagtgtatctactttgttttactggtgatactcttgtgtcccttctattgctggcatcacatcctactgctgtcagccacacccagtgtaatccatctggctttgtagagattagcataaagacttggaaagcctctatttttctttctgagaaactgagaaatttgattgacacaggggggtgtagtttgaaccttttatttttgaagtggagaggaatgggagaaagcacatctttatatgatgtttatattatttctcttcatctaatcttagcagtctactgtatgagtagatattctgttacattatttttaatgcatttaaattttttagaatactcagcaatagcaataaatattctgaaatgatgaagtcgtgaactaccaaatttttttttgcattgcatttttatagtatggaatttgccatctttaaatgtttaaataataccaccattttgaactctgca

SEQ ID NO: 435317 - DNA, 2443 bp, Homo sapiens
  misc_feature (1775)..(1775): n is a, c, g, or t
gaagttgcggtgcattgtgggttctcctggagctgtggagttgatcctgaatgaaagtggcgcgccgcccctgacgttacccggatcggagaggttggaattcagattacggctgcgattcgggtgtctcggaccccggtgtgcaccggaccacggggaggcggctccaaaggcgcggtgaacgttggtgagggagggcagctctgcgcagccccaagacatggctcacaacaagatcccgccgcggtggctgaactgtccccggcgcggccagccggtggcaggaagattcttacctctgaagacaatgttaggaccaagatatgatagtcaagttgctgaagaaaatcggttccatcccagcatgctctcaaattacctaaagagcctaaaggttaaaatgggcttgttggtggacctgacaaatacttcaaggttctatgaccgaaatgacatagaaaaagaaggaatcaaatatataaaacttcagtgtaaaggacatggtgagtgccctaccactgagaatactgagacctttattcgtctgtgtgagcggtttaatgaaagaaatccacctgaacttataggtgttcattgtactcatggcttcaatcgcactggtttcctcatatgtgcctttttggtggagaaaatggattggagtatcgaagcagcagttgctacttttgcccaagccagaccaccaggaatctacaagggtgattatttgaaggaactttttcgtcggtatggtgacatagaggaagcaccacccccacctctattgccagattggtgttttgaggatgatgaagacgaagatgaggatgaggatggaaagaaggaatcagaacccgggtcaagtgcttcttttggcaaaaggagaaaagaacggttaaaactgggcgctattttcttggaaggtgttactgttaaaggtgtaactcaagtaacaacacaaccaaagttaggagaggtacagcagaagtgtcatcaattctgtggctgggaagggtctggattccctggagcacagcctgtttccatggacaagcaaaatattaaacttttagacctgaagccatacaaagtaagctggaaagcagatggtactcggtacatgatgttgattgatggcacaaatgaagtttttatgattgatagagacaattcagtatttcatgtttcaaatctggaatttccatttcgtaaagatcttcgtatgcatttatcaaatactctcttggatggcgagatgattattgacagagtaaatggacaggctgttcctagatatttgatatatgacataattaaattcaattcacagcccgttggagattgtgattttaatgttcgtctgcagtgtatagaacgagaaattataagtcctcgacacgaaaaaatgaagactgggctcattgacaaaacacaggaaccatttagcgtcagaaataagccgttttttgacatctgtacttcaagaaagctacttgaaggaaattttgccaaagaagtgagccatgaaatggatggacttatttttcagcctactggaaaatacaaacctggtcgatgtgatgatattttgaaatggaagcctcccagtctgaattctgtggattttcgtctaaaaataacaagaatgggaggagaagggttacttcctcagaatgttggcctcctgtatgttggaggttatgaaagaccctttgcacaaatcaaggtatgtttgttcattttcagtgtacttttcctggatgttctcttatctngaatccatcaaaaccttgctaataataatcaacatataaaaatatcgtgttccagcactttgggaggctaagacaggtggatcacttgagcccaggaggttgagaccatgctgggaaccctgtctctacaaaaagaaaaattttttgtcattagccaagttcagtggcatgtgcctatagtcccagctactctggaggctgaggtgggaagatcacttaagccccatgagtttgaggctgcagtgagccgtgatcacaccactgtactccagcctgggtgacagagtgagaccctgtctcaaaaaaaaaaaaaaaaaaaaaaagtgaatgtgaggtgataatttcataagcttttgcatatttctgctgaagaaatctttcagcttttcaaaggaattgattattttaatattcttgccatagtaaaattgactttgaccgaaacagttcagtgattcatttagaagagtacatttagagattaatctttgagatcatcccttttgccattaaaaaaatgtttacaagtcgggtacggtggctcatgcctgcactaccagtgctttttgaggccgaggtgggagggtcagggctggaagattgcttgggcccagaagttcgagactagcctgggcaacatagtgaaacctcatctctacaaaatagta

SEQ ID NO: 435318 - DNA, 2346 bp, Homo sapiens
  misc_feature (2175)..(2175): n is a, c, g, or t
  misc_feature (2187)..(2187): n is a, c, g, or t
gaagttgcggtgcattgtgggttctcctggagctgtggagttgatcctgaatgaaagtggcgcgccgcccctgacgttacccggatcggagaggttggaattcagattacggctgcgattcgggtgtctcggaccccggtgtgcaccggaccacggggaggcggctccaaaggcgcggtgaacgttggtgagggagggcagctctgcgcagccccaagacatggctcacaacaagatcccgccgcggtggctgaactgtccccggcgcggccagccggtggcaggaagattcttacctctgaagacaatgttaggaccaagatatgatagtcaagttgctgaagaaaatcggttccatcccagcatgctctcaaattacctaaagagcctaaaggttaaaatgggcttgttggtggacctgacaaatacttcaaggttctatgaccgaaatgacatagaaaaagaaggaatcaaatatataaaacttcagtgtaaaggacatggtgagtgccctaccactgagaatactgagacctttattcgtctgtgtgagcggtttaatgaaagaaatccacctgaacttataggtgttcattgtactcatggcttcaatcgcactggtttcctcatatgtgcctttttggtggagaaaatggattggagtatcgaagcagcagttgctacttttgcccaagccagaccaccaggaatctacaagggtgattatttgaaggaactttttcgtcggtatggtgacatagaggaagcaccacccccacctctattgccagattggtgttttgaggatgatgaagacgaagatgaggatgaggatggaaagaaggaatcagaacccgggtcaagtgcttcttttggcaaaaggagaaaagaacggttaaaactgggcgctattttcttggaaggtgttactgttaaaggtgtaactcaagtaacaacacaaccaaagttaggagaggtacagcagaagtgtcatcaattctgtggctgggaagggtctggattccctggagcacagcctgtttccatggacaagcaaaatattaaacttttagacctgaagccatacaaagtaagctggaaagcagatggtactcggtacatgatgttgattgatggcacaaatgaagtttttatgattgatagagacaattcagtatttcatgtttcaaatctggaatttccatttcgtaaagatcttcgtatgcatttatcaaatactctcttggatggcgagatgattattgacagagtaaatggacaggctgttcctagatatttgatatatgacataattaaattcaattcacagcccgttggagattgtgattttaatgttcgtctgcagtgtatagaacgagaaattataagtcctcgacacgaaaaaatgaagactgggctcattgacaaaacacaggaaccatttagcgtcagaaataagccgttttttgacatctgtacttcaagaaagctacttgaaggaaattttgccaaagaagtgagccatgaaatggatggacttatttttcagcctactggaaaatacaaacctggtcgatgtgatgatattttgaaatggaagcctcccagtctgaattctgtggattttcgtctaaaaataacaagaatgggaggagaaggaacctcagaggatccagaacggcagctggtccttgctggactgttcctgtccatgtgcctggtcatggtgctggggaacctgctcatcatccggccatgagccctgactcccacctccacacctccatgtacttcttcctctccaacctgtccttgcctgacatcggtttcacctccaccacggtcccccagatgactgtggacatccagtctcgcagcagagtcatctcctatgcaggctgcctgactcagaagtctctctttgccatttttggaggcacggaagagagacatgctcctgagtgtgatggcctatgaccggtttgtagccatctgtcaccctctatatcattcagccatcatgaacctgtgtttctgtggcttcctagttttgctgtcttttttttttctcagtcttttagactcccagctgtacaacttgattgccttactaatgacctgcttcaaggaggtggacattcctaatttcttctgtgacctttctcaactcccccntcttgccgttgngacaccttcatcaataacataatcatgtatttccctactgccatatttgggttttcttcccacctcgggagacccctttcctctttactattaaaatcgctccctccattgctgagggtttcatccttcagggggggaagtataaagaccctcttcccc

SEQ ID NO: 435319 - DNA, 2439 bp, Homo sapiens
  misc_feature (2268)..(2268): n is a, c, g, or t
  misc_feature (2280)..(2280): n is a, c, g, or t
gaagttgcggtgcattgtgggttctcctggagctgtggagttgatcctgaatgaaagtggcgcgccgcccctgacgttacccggatcggagaggttggaattcagattacggctgcgattcgggtgtctcggaccccggtgtgcaccggaccacggggaggcggctccaaaggcgcggtgaacgttggtgagggagggcagctctgcgcagccccaagacatggctcacaacaagatcccgccgcggtggctgaactgtccccggcgcggccagccggtggcaggaagattcttacctctgaagacaatgttaggaccaagatatgatagtcaagttgctgaagaaaatcggttccatcccagcatgctctcaaattacctaaagagcctaaaggttaaaatgggcttgttggtggacctgacaaatacttcaaggttctatgaccgaaatgacatagaaaaagaaggaatcaaatatataaaacttcagtgtaaaggacatggtgagtgccctaccactgagaatactgagacctttattcgtctgtgtgagcggtttaatgaaagaaatccacctgaacttataggtgttcattgtactcatggcttcaatcgcactggtttcctcatatgtgcctttttggtggagaaaatggattggagtatcgaagcagcagttgctacttttgcccaagccagaccaccaggaatctacaagggtgattatttgaaggaactttttcgtcggtatggtgacatagaggaagcaccacccccacctctattgccagattggtgttttgaggatgatgaagacgaagatgaggatgaggatggaaagaaggaatcagaacccgggtcaagtgcttcttttggcaaaaggagaaaagaacggttaaaactgggcgctattttcttggaaggtgttactgttaaaggtgtaactcaagtaacaacacaaccaaagttaggagaggtacagcagaagtgtcatcaattctgtggctgggaagggtctggattccctggagcacagcctgtttccatggacaagcaaaatattaaacttttagacctgaagccatacaaagtaagctggaaagcagatggtactcggtacatgatgttgattgatggcacaaatgaagtttttatgattgatagagacaattcagtatttcatgtttcaaatctggaatttccatttcgtaaagatcttcgtatgcatttatcaaatactctcttggatggcgagatgattattgacagagtaaatggacaggctgttcctagatatttgatatatgacataattaaattcaattcacagcccgttggagattgtgattttaatgttcgtctgcagtgtatagaacgagaaattataagtcctcgacacgaaaaaatgaagactgggctcattgacaaaacacaggaaccatttagcgtcagaaataagccgttttttgacatctgtacttcaagaaagctacttgaaggaaattttgccaaagaagtgagccatgaaatggatggacttatttttcagcctactggaatacggggttttgccttgttgccgaggctggtctaaagctcctgagctcaagcaatccgcctgcctcagcctcgcaaagtgctgggattacagaaatacaaacctggtcgatgtgatgatattttgaaatggaagcctcccagtctgaattctgtggattttcgtctaaaaataacaagaatgggaggagaaggaacctcagaggatccagaacggcagctggtccttgctggactgttcctgtccatgtgcctggtcatggtgctggggaacctgctcatcatccggccatgagccctgactcccacctccacacctccatgtacttcttcctctccaacctgtccttgcctgacatcggtttcacctccaccacggtcccccagatgactgtggacatccagtctcgcagcagagtcatctcctatgcaggctgcctgactcagaagtctctctttgccatttttggaggcacggaagagagacatgctcctgagtgtgatggcctatgaccggtttgtagccatctgtcaccctctatatcattcagccatcatgaacctgtgtttctgtggcttcctagttttgctgtcttttttttttctcagtcttttagactcccagctgtacaacttgattgccttactaatgacctgcttcaaggaggtggacattcctaatttcttctgtgacctttctcaactcccccntcttgccgttgngacaccttcatcaataacataatcatgtatttccctactgccatatttgggttttcttcccacctcgggagacccctttcctctttactattaaaatcgctccctccattgctgagggtttcatccttcagggggggaagtataaagaccctcttcccc

SEQ ID NO: 435320 - DNA, 379 bp, Homo sapiens
agcaatttatttttagaatttcagaattttctgaataccttatattaaaaccttttcagaatgaatgtgtcccttaatagattgaatgacttgagggtgaggattgtgatttgcccattttataaacttctgttgtactttatatggagccttgaatataataagtgagtttttgataagcctgcataaatagaggatagcgaggaaattgcatggtgtttgtttcctatagtatcgaagcagcagttgctacttttgcccaagccagaccaccaggaatctacaagggtgattatttgaaggaactttttcgtcggtatggtgacatagaggaagcaccacccccacctctattgccagattggtgttttgaggatga

SEQ ID NO: 435321 - DNA, 505 bp, Homo sapiens
cagaccagagtgcagtggtgtaatctctgctcactgcagcctctacctcccgggttcaagcgattctcctgtctcagcctcccaagtagctgggactacaggcgtatgcacacacacccggctaattgtgtatttttagtagtgacggggtttcaccatgttaaccaggctggtctcaaactcctgacctcaggtgatccacccgcctcagtgagccactgtgcccggccaaaaagattttttagattgggatataactagtattcagtaaagtgcacacgtcttaattataaggcttcatgaattattatattcatatacacccatgtatctacctccctcatacccccatcaagatacagaacatttccagcatcgtagaaggctgtctccttcatgccccctttccagtcaatgtcttcttccaggagaaatcattatttttaacctttatcaccatagatttgtgcctgtatttgaacatcatataaatggaatcatacag

SEQ ID NO: 435322 - DNA, 781 bp, Homo sapiens
cagaccagagtgcagtggtgtaatctctgctcactgcagcctctacctcccgggttcaagcgattctcctgtctcagcctcccaagtagctgggactacaggcgtatgcacacacacccggctaattgtgtatttttagtagtgacggggtttcaccatgttaaccaggctggtctcaaactcctgacctcaggtgatccacccgcctcagtgagccactgtgcccggccaaaaagattttttagattgggatataactagtattcagtaaagtgcacacgtcttaattataaggcttcatgaattattatattcatatacacccatgtatctacctccctcatacccccatcaagatacagaacatttccagcatcgtagaaggctgtctccttcatgccccctttccagtcaatgtcttcttccaggagaaatcattatttttaacctttatcaccatagatttgtgcctgtatttgaacatcatataaatggaatcatacagtattctgctgtgtctgatgtctttcacgaaacatactgtctgtgagggttattcaggttgtcaagggtatcattagtttattcatttattttgctgagtcatattccattgtatggatgtatttaccctttctgctgtttatgggcatttgggatgttctgtaagtttttattacgtattatttttattattgtttagttctaagaattgttaaatttctattattatttctttattttgtttttcagaagaatatatattttaatttccaaacaa

SEQ ID NO: 435323 - DNA, 599 bp, Homo sapiens
gggagatggcccaggacctgttgagtcccagagatgtggggatgtcctgagcagttctagggagctcagggcaggaggcttggctttggtagtacttagtggctcaagcggcttgggtgacagataagtctgtgcatgttccagggcggcattgacacccgggttcggggtgtggaggtcctgggccctaagcccacattctggccactgttccgggagcagctgtgtcgccgaacatgtctcttctacacaattcgggcacaagcctggagccgggacatagcagaggaccaccggcgcctcctccagctctgtcccagactgaacagggttttgcgccacgagcagaattttgctgaccgcttcctccctgatgatgaggccgcccaggcactgggcaagacctgctgggaggccctggtcagccccctggtgcagaacatcacctctcccggtaaccatgctgacacctggccccactaaccagttccttgtccttattcccagggatcacctgagttaatgctcttggttcttttggttcctgtctttatccctgaaggcctgtcacctcagtgttcctctctccttcctgcccc

SEQ ID NO: 435324 - DNA, 523 bp, Homo sapiens
  misc_feature (92)..(92): n is a, c, g, or t
ggtaactacagtaacataaggtatatgagactcttataggataggagaggtaaagatgttcttcacggaggatcaagccttctctgtatgtncacacttgtcctggtctgtctcgaggtcaccttctggtgctttctgatccgcattttgttgaataagaagtaaacctgcgtccgaggagctgcggcggggtaaggtctacctggccaggtagacctaaccaccacactctgggagaccagattataacccaagagctgagagacacgttgtttaggcactcagggatagcaccaagaacagaacctatgcctaccacacgcaccatcctcatgatgcttctcaatcgctactcagagccgccgggcagccctgagcgtgcaggtaccattgtggaggggtggttttgcagaggaatcacacagtgccagccaggtttacatatcagctccttactggaaagatacaaggaaacttcaggaaatgagcaagcattgtgctcaagttaggtcttaagtagaac

SEQ ID NO: 435325 - DNA, 3837 bp, Homo sapiens
cgcatatcttgtgtaagaacggtatcacgaatgacttctcatgattcctgtcatgttccgagataatacgctgaggctgttatttacatatttgaagtgctccatgtcatacatcgtacgatcctctatactcgagatgcgagctgtcaggcttgctagcttggcgctcggtcgacgtcgtcatgactggtcaatgcctggcggctggcgtgatctttctccctcctctgccctgagctgtctgttctcccatctcccatggagacctgttcctgacctgtcttctttcagatgcggaaggcgtgagtgccctgggatggctgctggatcagtacttagaacagagagagacctctcggaaccccttgagtcgagcagcgtcctttgcttctcgagttcgtcgcctttgccacttgctggtgcatgtggaacctcctcctgggccttctcctgagccatccactcggcccttcagcaagaacagcaagggtcgggaccggagcccggcgccttcgccagtgcttccaagcagcagcctgaggaacataacccagtgctggctgagcgtggtgcaggagcaggtcagcagattcctggctgcagcttggagggccccagactttgtgcctcgttactgtaaactctatgagcacttgcagagagcaggctccgagctgtttgggcctcgggcagccttcatgctggctctgcgcagtggcttctctggcgccttgctgcagcagtccttcctcactgctgctcacatgagtgagcagtttgccaggtacattgaccaacagatccagggtggcctgattggtggagcccctggagtggaaatgctggggcagcttcagcggcacctggaacccattatggtcctttctggtctggaactggccacaacttttgagcacttctatcagcattatatggcggaccgtctcctgagctttggttcgagctggctggagggggctgtgctagagcagattggcctctgttttcccaaccgcctcccacagctgatgctgcagagcctgagcacctctgaggagctgcagcgccagttccacctcttccagctccagcggctcgacaagttgttcttggagcaggaagatgaggaggaaaagagactagaggaagaggaggaggaagaggaggaagaggaagctgagaaagaattatttatcgaagatccaagtccagccatttctatactggtcctgtcaccacgctgctggcccgtctccccactctgctacctgtaccatcccagaaagtgccttcccacagaattctgtgatgcccttgaccgtttctccagtttctacagccagagtcagaaccatccagtcctggacatgggaccacatcggcgactgcagtggacgtggctgggccgggctgagctgcagtttgggaagcagatactgcatgtgtccaccgtgcagatgtggctgctgctgaaattcaatcagacagaggaggtgtcagtagagaccttgctgaaggattctgacctctccccagagctgctgctccaggcactcgtgcccctcacctcagggaatggccctttgaccctgcatgagggccaggactttccacacgggggtgtgctgcggcttcatgagcctgggccccagcgcagtggggaggccctgtggctgatacctccccaggcatacctgaacgtagagaaggatgaaggccgaaccctggaacagaagaggaatctcttgagctgtcttcttgttcgtattctcaaagcccatggggaaaagggcctccacattgatcagctggtttgtctggtgctggaggcctggcagaagggtccaaatcctcctggaaccctgggccacactgttgctgggggtgtggcctgtaccagtacagatgtcctctcttgcatcctgcacctcttaggccagggctacgtgaaacggcgtgatgaccggccccagatcctgatgtatgccgctccagagcccatggggccctgccggggtcaggcagatgtccctttctgtggcagccagagcgaaacctccaagcccagcccagaagctgtggctaccctggcatctctacagctgcctgcaggccgcaccatgagcccccaggaagtagaagggttgatgaagcagacggtgcgtcaggtgcaggagacgctgaacttagagccagatgtcgctcagcaccttttggctcattcccactggggcgctgaacagctgctgcagagctacagtgaggaccctgagccactgctgctggcagctgggctgtgcgtacaccaggctcaggctgtacccgtacggcctgaccactgccccgtctgtgtgagccccctggggtgtgacgacgacctgccctctctctgctgcatgcactattgctgtaagtcttgctggaatgagtacctgacaactcggatcgagcagaaccttgttttgaattgcacctgccccattgccgactgccccgcccagcccaccggagccttcattcgtgccatcgtctcctcgccagaggtcatctccaagtatgagaaggcgctcctgcgtggctatgtggagagctgctccaacctgacctggtgcaccaacccccagggctgcgaccgcatcctgtgccgccagggcctgggctgtgggaccacctgctccaagtgtggctgggcctcttgcttcaactgtagcttccctgaggcacactaccctgctagctgtggccatatgtctcagtgggtcgacgacggtggctactatgacggcatgagcgtggaggcgcagagcaagcacctggccaagctcatctccaagcgctgtcccagctgtcaggctcccatcgagaagaacgaggggtgcctgcacatgacctgtgccaaatgtaaccatggattctgctggcgctgcctcaagtcctggaagccaaatcacaaagactattacaactgctctgccatggtaagcaaggcagctcgccaggagaagcggtttcaggactataatgagaggtgcactttccatcaccaggcgcgggagtttgctgtgaacttgcggaaccgggtgtctgccatccatgaagtgcccccgcccagatccttcaccttcctcaatgatgcctgccagggactggagcaggctcggaaggtgctggcctacgcctgcgtgtacagcttctacagccaggacgcagagtacatggatgtggtggagcagcagacagagaacctggagctgcacaccaatgccctgcagatcctcctggaggaaaccctgctgcggtgcagagacctggcctcctccctgcgcctcctgcgggccgactgcctcagcacgggcatggagctgctccggcggatccaggagaggctgcttgccatcctgcagcattctgcccaggatttccgggttggtcttcagagtccatcagtagaggcctgggaggcaaaaggacccaacatgcctggcagtcagccccaggcctcctcagggccagaggcagaagaggaggaggaagacgatgaggatgatgtgcccgagtggcagcaggatgagtttgatgaggagctggacaatgacagcttctcctacgatgagtctgagaacctggaccaagagactttcttctttggtgatgaggaagaggatgaagatgaggcctatgactgagggggcagatgcaggaaacacctagagcagccccagagtcacggggctgagggggcgggagctgcccctgtcatagggagggggattcccagcgtctgtagtgcttcctgtttgctgaataaaggtctctttctcacacacaaaaaaaaaa

SEQ ID NO: 435326 - DNA, 3229 bp, Homo sapiens
tgtattagctggaatgctttcaagagaaaccctttcactaactgtttatctaccctgaagtccggtttatacaggaaaggcttgattgtttccacttccaattatttttaactcattttaaaaataatatggtggttctctagtaacttttaaataaaaccaatgaggtcttttaaaaatatatcattatgaactcacagattttaaaatattttgtgtggttccatcacacattgcaggtggatttttttttttttggattctcaaattgtcccatctttggtaagacagcatctctcaggcaggctcctagtccctttaatactctccctttgacagcttccttgctttccagtatgaacagatgtctcaggctcaccttgcctgagctgtgaaacaggaggaggaagagatccagcccagtgggtctttaaaactgtgagctccttgagggcaaaatgcaagtgttttctctctggtgtttttgcatggaacctgcctggctcagggctaggcgctgggtctagggatgggctcctagatacccgtggctcatcagggaggcaggcgcagggaaggctgagatctggaagcttgacaaggtatctctctgtctgaaaatgctggggccctcctccccatagggactagtaggagcaaagcttgacacctcaacccctaaaccccttgtttcgcccattctgtgtctccacccttctccttgacacttgcctaggtcagaaccatccagtcctggacatgggaccacatcggcgactgcagtggacgtggctgggccgggctgagctgcagtttgggaagcagatactgcatgtgtccaccgtgcagatgtggctgctgctgaaattcaatcagacagaggaggtgtcagtagagaccttgctgaaggattctgacctctccccagagctgctgctccaggcactcgtgcccctcacctcagggaatggccctttgaccctgcatgagggccaggactttccacacgggggtgtgctgcggcttcatgagcctgggccccagcgcagtggggaggccctgtggctgatacctccccaggcatacctgaacgtagagaaggatgaaggccgaaccctggaacagaagaggaatctcttgagctgtcttcttgttcgtattctcaaagcccatggggaaaagggcctccacattgatcagctggtttgtctggtgctggaggcctggcagaagggtccaaatcctcctggaaccctgggccacactgttgctgggggtgtggcctgtaccagtacagatgtcctctcttgcatcctgcacctcttaggccagggctacgtgaaacggcgtgatgaccggccccagatcctgatgtatgccgctccagagcccatggggccctgccggggtcaggcagatgtccctttctgtggcagccagagcgaaacctccaagcccagcccagaagctgtggctaccctggcatctctacagctgcctgcaggccgcaccatgagcccccaggaagtagaagggttgatgaagcagacggtgcgtcaggtgcaggagacgctgaacttagagccagatgtcgctcagcaccttttggctcattcccactggggcgctgaacagctgctgcagagctacagtgaggaccctgagccactgctgctggcagctgggctgtgcgtacaccaggctcaggctgtacccgtacggcctgaccactgccccgtctgtgtgagccccctggggtgtgacgacgacctgccctctctctgctgcatgcactattgctgtaagtcttgctggaatgagtacctgacaactcggatcgagcagaaccttgttttgaattgcacctgccccattgccgactgccccgcccagcccaccggagccttcattcgtgccatcgtctcctcgccagaggtcatctccaagtatgagaaggcgctcctgcgtggctatgtggagagctgctccaacctgacctggtgcaccaacccccagggctgcgaccgcatcctgtgccgccagggcctgggctgtgggaccacctgctccaagtgtggctgggcctcttgcttcaactgtagcttccctgaggcacactaccctgctagctgtggccatatgtctcagtgggtcgacgacggtggctactatgacggcatgagcgtggaggcgcagagcaagcacctggccaagctcatctccaagcgctgtcccagctgtcaggctcccatcgagaagaacgaggggtgcctgcacatgacctgtgccaaatgtaaccatggattctgctggcgctgcctcaagtcctggaagccaaatcacaaagactattacaactgctctgccatggtaagcaaggcagctcgccaggagaagcggtttcaggactataatgagaggtgcactttccatcaccaggcgcgggagtttgctgtgaacttgcggaaccgggtgtctgccatccatgaagtgcccccgcccagatccttcaccttcctcaatgatgcctgccagggactggagcaggctcggaaggtgctggcctacgcctgcgtgtacagcttctacagccaggacgcagagtacatggatgtggtggagcagcagacagagaacctggagctgcacaccaatgccctgcagatcctcctggaggaaaccctgctgcggtgcagagacctggcctcctccctgcgcctcctgcgggccgactgcctcagcacgggcatggagctgctccggcggatccaggagaggctgcttgccatcctgcagcattctgcccaggatttccgggttggtcttcagagtccatcagtagaggcctgggaggcaaaaggacccaacatgcctggcagtcagccccaggcctcctcagggccagaggcagaagaggaggaggaagacgatgaggatgatgtgcccgagtggcagcaggatgagtttgatgaggagctggacaatgacagcttctcctacgatgagtctgagaacctggaccaagagactttcttctttggtgatgaggaagaggatgaagatgaggcctatgactgagggggcagatgcaggaaacacctagagcagccccagagtcacggggctgagggggcgggagctgcccctgtcatagggagggggattcccagcgtctgtagtgcttcctgtttgctgaataaaggtctctttctcacacacaaaaaaaaaa

SEQ ID NO: 435327 - DNA, 4946 bp, Homo sapiens
ccaggctgaatggtgggagctgcttttctttatcaaaaagttggacttgtgtgagcagcagccaattttccagaatctttggaagaacctggatgagaccctgggtgaaaaggccctaggtgagatctctgtgtccgtggaaatggccgagagtctgctgcaggttctcagtagtcgatttgagggcagcactctcaatgacctgctcaactcccagatctacaccaagtatgggctgctgtctaatgaaccaagcagctcgtctacttcacgaaatcactcctgtaccccagatccagaagaggagtccaagtcggaggccagcttctcagaggaagagactgagtccctcaaagcaaaggccgaggcccctaagacagaggccgagcccaccaagacaaggaccgagacccccatggcacagagtgattctcagctgtttaaccagcttctggtgactgaggggatgaccctgcccactgagatgaaggaggcagccagtgaaatggccagagccttgcggggtcccggtcctcgcagctccctggatcagcatgtggcagcggtcgtggccactgtgcagatatccagcttggacacaaacctgcagctttcagggctctctgccctctctcaggctgtggaggaggtcactgagcgggaccaccctctggtccgtcctgacagatcgctgagagagaagctagtgaagatgctggtggagctgctgaccaaccaggtgggagagaagatggtggtcgtgcaggccctgcgcctcctttacctgctcatgaccaagcacgagtggcggccgctctttgccagggagggtggcatctatgctgtgctggtctgcatgcaagaatataagacttctgtcttggtgcagcaggctgggctggcggcactgaagatgctggccgtcgccagctcctcggagatccccacttttgttactggccgagattctatccactctttgtttgatgctcagatgaccagagagatcttcgccagcatcgactcagccacacgcccgggctctgagagcctgctcctcactgtccctgcagccgtgatcctgatgctgaatactgaggggtgctcttctgcagcgagaaatggcttactcctgctcaacctacttttgtgcaaccaccacactctgggagaccagattataacccaagagctgagagacacgttgtttaggcactcagggatagcaccaagaacagaacctatgcctaccacacgcaccatcctcatgatgcttctcaatcgctactcagagccgccgggcagccctgagcgtgcagcactagagacccccatcatccagggtcaggatgggtcccctgagctactgattcgatccctggttgggggcccatctgcagaactactcctggacttggagcgtgtgctgtgccgtgagggcagccccggaggtgccgtgaggcccctcctcaagcgcctccagcaggagacccagcctttcctcctgttgctgcggactctggatgctccggggcccaacaagactctgctgctgtctgtgctgagggtcataacccgactgctggatttccctgaggcaatggtcctcccctggcacgaggtcttggagccctgcctcaactgcctgagtggccctagcagtgactccgagattgttcaggagctgacctgcttcctacatcgcctggcctcgatgcataaggactatgctgtggtgctctgctgcctgggagcaaaagagatcctctccaaagtcctggacaagcactcagctcagctgctgctgggctgtgagcttcgggacctggtgacagagtgtgagaagtacgcacagctctatagcaacctcacctccagcatcctggccggctgcattcagatggtgctgggccagatcgaagaccacagacgaacccaccaacccatcaatatccccttctttgatgtgttcctcaggcatctctgccagggctccagtgtggaagtgaaggaggacaagtgctgggagaaggtggaggtgtcctccaacccgcaccgagccagcaagctgacggaccacaaccccaagacctactgggagtccaacggcagcaccggctcccactacatcaccctgcacatgcaccgtggtgttcttgttaggcagctcactttgctggtggccagtgaggactcaagctacatgccagccagggtggtggtgtttgggggtgacagcaccagctgcatcggcactgagctcaacacggtgaatgtgatgccctctgccagccgggtgatcctcttggagaacctgaaccgcttctggcccatcatccagatccgcataaagcgctgccagcagggcggcattgacacccgggttcggggtgtggaggtcctgggccctaagcccacattctggccactgttccgggagcagctgtgtcgccgaacatgtctcttctacacaattcgggcacaagcctggagccgggacatagcagaggaccaccggcgcctcctccagctctgtcccagactgaacagggttttgcgccacgagcagaattttgctgaccgcttcctccctgatgatgaggccgcccaggcactgggcaagacctgctgggaggccctggtcagccccctggtgcagaacatcacctctcccgatgcggaaggcgtgagtgccctgggatggctgctggatcagtacttagaacagagagagacctctcggaaccccttgagtcgagcagcgtcctttgcttctcgagttcgtcgcctttgccacttgctggtgcatgtggaacctcctcctgggccttctcctgagccatccactcggcccttcagcaagaacagcaagggtcgggaccggagcccggcgccttcgccagtgcttccaagcagcagcctgaggaacataacccagtgctggctgagcgtggtgcaggagcaggtcagcagattcctggctgcagcttggagggccccagactttgtgcctcgttactgtaaactctatgagcacttgcagagagcaggctccgagctgtttgggcctcgggcagccttcatgctggctctgcgcagtggcttctctggcgccttgctgcagcagtccttcctcactgctgctcacatgagtgagcagtttgccaggtacattgaccaacagatccagggtggcctgattggtggagcccctggagtggaaatgctggggcagcttcagcggcacctggaacccattatggtcctttctggtctggaactggccacaacttttgagcacttctatcagcattatatggcggaccgtctcctgagctttggttcgagctggctggagggggctgtgctagagcagattggcctctgttttcccaaccgcctcccacagctgatgctgcagagcctgagcacctctgaggagctgcagcgccagttccacctcttccagctccagcggctcgacaagttgttcttggagcaggaagatgaggaggaaaagagactagaggaagaggaggaggaagaggaggaagaggaagctgagaaagaattatttatcgaagatccaagtccagccatttctatactggtcctgtcaccacgctgctggcccgtctccccactctgctacctgtaccatcccagaaagtgccttcccacagaattctgtgatgcccttgaccgtttctccagtttctacagccagagtcagaaccatccagtcctggacatgggaccacatcggcgactgcagtggacgtggctgggccgggctgagctgcagtttgggaagcagatactgcatgtgtccaccgtgcagatgtggctgctgctgaaattcaatcagacagaggaggtgtcagtagagaccttgctgaaggattctgacctctccccagagctgctgctccaggcactcgtgcccctcacctcagggaatggccctttgaccctgcatgagggccaggactttccacacgggggtgtgctgcggcttcatgagcctgggccccagcgcagtggggaggccctgtggctgatacctccccaggcatacctgaacgtagagaaggatgaaggccgaaccctggaacagaagaggaatctcttgagctgtcttcttgttcgtattctcaaagcccatggggaaaagggcctccacattgatcagctggtttgtctggtgctggaggcctggcagaagggtccaaatcctcctggaaccctgggccacactgttgctgggggtgtggcctgtaccagtacagatgtcctctcttgcatcctgcacctcttaggccagggctacgtgaaacggcgtgatgaccggccccagatcctgatgtatgccgctccagagcccatggggccctgccggggtcaggcagatgtccctttctgtggcagccagagcgaaacctccaagcccagcccagaagctgtggctaccctggcatctctacagctgcctgcaggccgcaccatgagcccccaggaagtagaagggttgatgaagcagacggtgcgtcaggtgcaggagacgctgaacttagagccagatgtcgctcagcaccttttggctcattcccactggggcgctgaacagctgctgcagagctacagtgaggaccctgagccactgctgctggcagctgggctgtgcgtacaccaggctcaggctgtacccgtacggcctgaccactgccccgtctgtgtgagccccctggggtgtgacgacgacctgccctctctctgctgcatgcactattgctgtaagtcttgctggaatgagtacctgacaactcggatcgagcagaaccttgttttgaattgcactgcccctgtcatagggagggggattcccagcgtctgtagtgcttcctgtttgctgaataaaggtctctttctcacacacaaaaaaaaaa

SEQ ID NO: 435328 - DNA, 3669 bp, Homo sapiens
ccaggctgaatggtgggagctgcttttctttatcaaaaagttggacttgtgtgagcagcagccaattttccagaatctttggaagaacctggatgagaccctgggtgaaaaggccctaggtgagatctctgtgtccgtggaaatggccgagagtctgctgcaggttctcagtagtcgatttgagggcagcactctcaatgacctgctcaactcccagatctacaccaagtatgggctgctgtctaatgaaccaagcagctcgtctacttcacgaaatcactcctgtaccccagatccagaagaggagtccaagtcggaggccagcttctcagaggaagagactgagtccctcaaagcaaaggccgaggcccctaagacagaggccgagcccaccaagacaaggaccgagacccccatggcacagagtgattctcagctgtttaaccagcttctggtgactgaggggatgaccctgcccactgagatgaaggaggcagccagtgaaatggccagagccttgcggggtcccggtcctcgcagctccctggatcagcatgtggcagcggtcgtggccactgtgcagatatccagcttggacacaaacctgcagctttcagggctctctgccctctctcaggctgtggaggaggtcactgagcgggaccaccctctggtccgtcctgacagatcgctgagagagaagctagtgaagatgctggtggagctgctgaccaaccaggtgggagagaagatggtggtcgtgcaggccctgcgcctcctttacctgctcatgaccaagcacgagtggcggccgctctttgccagggagggtggcatctatgctgtgctggtctgcatgcaagaatataagacttctgtcttggtgcagcaggctgggctggcggcactgaagatgctggccgtcgccagctcctcggagatccccacttttgttactggccgagattctatccactctttgtttgatgctcagatgaccagagagatcttcgccagcatcgactcagccacacgcccgggctctgagagcctgctcctcactgtccctgcagccgtgatcctgatgctgaatactgaggggtgctcttctgcagcgagaaatggcttactcctgctcaacctacttttgtgcaaccaccacactctgggagaccagattataacccaagagctgagagacacgttgtttaggcactcagggatagcaccaagaacagaacctatgcctaccacacgcaccatcctcatgatgcttctcaatcgctactcagagccgccgggcagccctgagcgtgcagcactagagacccccatcatccagggtcaggatgggtcccctgagctactgattcgatccctggttgggggcccatctgcagaactactcctggacttggagcgtgtgctgtgccgtgagggcagccccggaggtgccgtgaggcccctcctcaagcgcctccagcaggagacccagcctttcctcctgttgctgcggactctggatgctccggggcccaacaagactctgctgctgtctgtgctgagggtcataacccgactgctggatttccctgaggcaatggtcctcccctggcacgaggtcttggagccctgcctcaactgcctgagtggccctagcagtgactccgagattgttcaggagctgacctgcttcctacatcgcctggcctcgatgcataaggactatgctgtggtgctctgctgcctgggagcaaaagagatcctctccaaagtcctggacaagcactcagctcagctgctgctgggctgtgagcttcgggacctggtgacagagtgtgagaagtacgcacagctctatagcaacctcacctccagcatcctggccggctgcattcagatggtgctgggccagatcgaagaccacagacgaacccaccaacccatcaatatccccttctttgatgtgttcctcaggcatctctgccagggctccagtgtggaagtgaaggaggacaagtgctgggagaaggtggaggtgtcctccaacccgcaccgagccagcaagctgacggaccacaaccccaagacctactgggagtccaacggcagcaccggctcccactacatcaccctgcacatgcaccgtggtgttcttgttaggcagctcactttgctggtggccagtgaggactcaagctacatgccagccagggtggtggtgtttgggggtgacagcaccagctgcatcggcactgagctcaacacggtgaatgtgatgccctctgccagccgggtgatcctcttggagaacctgaaccgcttctggcccatcatccagatccgcataaagcgctgccagcagggcggcattgacacccgggttcggggtgtggaggtcctgggccctaagcccacattctggccactgttccgggagcagctgtgtcgccgaacatgtctcttctacacaattcgggcacaagcctggagccgggacatagcagaggaccaccggcgcctcctccagctctgtcccagactgaacagggttttgcgccacgagcagaattttgctgaccgcttcctccctgatgatgaggccgcccaggcactgggcaagacctgctgggaggccctggtcagccccctggtgcagaacatcacctctcccgatgcggaaggcgtgagtgccctgggatggctgctggatcagtacttagaacagagagagacctctcggaaccccttgagtcgagcagcgtcctttgcttctcgagttcgtcgcctttgccacttgctggtgcatgtggaacctcctcctgggccttctcctgagccatccactcggcccttcagcaagaacagcaagggtcgggaccggagcccggcgccttcgccagtgcttccaagcagcagcctgaggaacataacccagtgctggctgagcgtggtgcaggagcaggtcagcagattcctggctgcagcttggagggccccagactttgtgcctcgttactgtaaactctatgagcacttgcagagagcaggctccgagctgtttgggcctcgggcagccttcatgctggctctgcgcagtggcttctctggcgccttgctgcagcagtccttcctcactgctgctcacatgagtgagcagtttgccaggtacattgaccaacagatccagggtggcctgattggtggagcccctggagtggaaatgctggggcagcttcagcggcacctggaacccattatggtcctttctggtctggaactggccacaacttttgagcacttctatcagtgagtgcaggtctggaggcataggggatgggaggcctagatctagagagtggaaagatttgagtcttataggggagatgagaaaagaggctgtgtagaggagagattaagatgtggagatggctggccaggcgcggtggctcacgcatgtaatcccagcattctggcaggcagatcacctgaggtcaggagttcaagaccagcctgaccaacatggtgaaaccctttctctactaaaaatacaaaaattagccaggttgcaatggtgtgatctcggctcactgcaacctctgcctgatgggttcaagcgattctcctgcctcagcctcctgagtagctgggattacaggcatgcaccac

SEQ ID NO: 435329 - DNA, 617 bp, Homo sapiens
cgcatatcttgtgtaagaacggtatcacgaatgacttctcatgattcctgtcatgttccgagataatacgctgaggctgttatttacatatttgaagtgctccatgtcatacatcgtacgatcctctatactcgagatgcgagctgtcaggcttgctagcttggcgctcggtcgacgtcgtcatgactggtcaatgcctggcggctggcgtgatctttctccctcctctgccctgagctgtctgttctcccatctcccatggagacctgttcctgacctgtcttctttcagatgcggaaggcgtgagtgccctgggatggctgctggatcagtacttagaacagagagagacctctcggaaccccttgagtcgagcagcgtcctttgcttctcgagttcgtcgcctttgccacttgctggtgcatgtggaacctcctcctgggccttctcctgagccatccactcggccctgtaagtcccagctgtggccagtggagctgactctgcggacagtggtgtatctggctccctcctccctgggtcttactcttgctgctttgctaccggcctttccaggcccctgagacctactggcctttccaggagatcactaccca

SEQ ID NO: 435330 - DNA, 826 bp, Homo sapiens
aagactagaccaaggaagggagcccaagggcccttgaaatccttctgtccctcaggaggaagaggaggaagaggaagctgagaaagaattatttatcgaagatccaagtccagccatttctatactggtcctgtcaccacgctgctggcccgtctccccactctgctacctgtaccatcccagaaagtgccttcccacagaattctgtgatgcccttgaccgtttctccagtttctacagccagagtgaggaactagggagaggaaattggagatcggggtgagattcggggtggcaagagaggaagaggagaggacctttggacaggatatagatgtgaagaaaaatatcagctcctagcgagggatgagaaagcatgggttgtagtttcattaatttctgctctcatcagtttcttcaactttctatgaatttgttctgttttctttttctaacttcaagtgaggtgcttatttgatttttagtcttttcagacttttttccaaataaaagtgtttaagactattcatttccctctcaatactgctttagtggcatcctataaagttttaaaagattttttttctttatttttttgacatggagtctcactctgtcacccagaccagagtgcagtggtgtaatctctgctcactgcagcctctacctcccgggttcaagcgattctcctgtctcagcctcccaagtagctgggactacaggcgtatgcacacacacccggctaattgtgtatttttagtagtgacggggtttcaccatgttaaccaggctggtctcaaactcctgacctcaggtgatccacccg

SEQ ID NO: 435331 - DNA, 6221 bp, Homo sapiens
ccaggctgaatggtgggagctgcttttctttatcaaaaagttggacttgtgtgagcagcagccaattttccagaatctttggaagaacctggatgagaccctgggtgaaaaggccctaggtgagatctctgtgtccgtggaaatggccgagagtctgctgcaggttctcagtagtcgatttgagggcagcactctcaatgacctgctcaactcccagatctacaccaagtatgggctgctgtctaatgaaccaagcagctcgtctacttcacgaaatcactcctgtaccccagatccagaagaggagtccaagtcggaggccagcttctcagaggaagagactgagtccctcaaagcaaaggccgaggcccctaagacagaggccgagcccaccaagacaaggaccgagacccccatggcacagagtgattctcagctgtttaaccagcttctggtgactgaggggatgaccctgcccactgagatgaaggaggcagccagtgaaatggccagagccttgcggggtcccggtcctcgcagctccctggatcagcatgtggcagcggtcgtggccactgtgcagatatccagcttggacacaaacctgcagctttcagggctctctgccctctctcaggctgtggaggaggtcactgagcgggaccaccctctggtccgtcctgacagatcgctgagagagaagctagtgaagatgctggtggagctgctgaccaaccaggtgggagagaagatggtggtcgtgcaggccctgcgcctcctttacctgctcatgaccaagcacgagtggcggccgctctttgccagggagggtggcatctatgctgtgctggtctgcatgcaagaatataagacttctgtcttggtgcagcaggctgggctggcggcactgaagatgctggccgtcgccagctcctcggagatccccacttttgttactggccgagattctatccactctttgtttgatgctcagatgaccagagagatcttcgccagcatcgactcagccacacgcccgggctctgagagcctgctcctcactgtccctgcagccgtgatcctgatgctgaatactgaggggtgctcttctgcagcgagaaatggcttactcctgctcaacctacttttgtgcaaccaccacactctgggagaccagattataacccaagagctgagagacacgttgtttaggcactcagggatagcaccaagaacagaacctatgcctaccacacgcaccatcctcatgatgcttctcaatcgctactcagagccgccgggcagccctgagcgtgcagcactagagacccccatcatccagggtcaggatgggtcccctgagctactgattcgatccctggttgggggcccatctgcagaactactcctggacttggagcgtgtgctgtgccgtgagggcagccccggaggtgccgtgaggcccctcctcaagcgcctccagcaggagacccagcctttcctcctgttgctgcggactctggatgctccggggcccaacaagactctgctgctgtctgtgctgagggtcataacccgactgctggatttccctgaggcaatggtcctcccctggcacgaggtcttggagccctgcctcaactgcctgagtggccctagcagtgactccgagattgttcaggagctgacctgcttcctacatcgcctggcctcgatgcataaggactatgctgtggtgctctgctgcctgggagcaaaagagatcctctccaaagtcctggacaagcactcagctcagctgctgctgggctgtgagcttcgggacctggtgacagagtgtgagaagtacgcacagctctatagcaacctcacctccagcatcctggccggctgcattcagatggtgctgggccagatcgaagaccacagacgaacccaccaacccatcaatatccccttctttgatgtgttcctcaggcatctctgccagggctccagtgtggaagtgaaggaggacaagtgctgggagaaggtggaggtgtcctccaacccgcaccgagccagcaagctgacggaccacaaccccaagacctactgggagtccaacggcagcaccggctcccactacatcaccctgcacatgcaccgtggtgttcttgttaggcagctcactttgctggtggccagtgaggactcaagctacatgccagccagggtggtggtgtttgggggtgacagcaccagctgcatcggcactgagctcaacacggtgaatgtgatgccctctgccagccgggtgatcctcttggagaacctgaaccgcttctggcccatcatccagatccgcataaagcgctgccagcagggcggcattgacacccgggttcggggtgtggaggtcctgggccctaagcccacattctggccactgttccgggagcagctgtgtcgccgaacatgtctcttctacacaattcgggcacaagcctggagccgggacatagcagaggaccaccggcgcctcctccagctctgtcccagactgaacagggttttgcgccacgagcagaattttgctgaccgcttcctccctgatgatgaggccgcccaggcactgggcaagacctgctgggaggccctggtcagccccctggtgcagaacatcacctctcccgatgcggaaggcgtgagtgccctgggatggctgctggatcagtacttagaacagagagagacctctcggaaccccttgagtcgagcagcgtcctttgcttctcgagttcgtcgcctttgccacttgctggtgcatgtggaacctcctcctgggccttctcctgagccatccactcggcccttcagcaagaacagcaagggtcgggaccggagcccggcgccttcgccagtgcttccaagcagcagcctgaggaacataacccagtgctggctgagcgtggtgcaggagcaggtcagcagattcctggctgcagcttggagggccccagactttgtgcctcgttactgtaaactctatgagcacttgcagagagcaggctccgagctgtttgggcctcgggcagccttcatgctggctctgcgcagtggcttctctggcgccttgctgcagcagtccttcctcactgctgctcacatgagtgagcagtttgccaggtacattgaccaacagatccagggtggcctgattggtggagcccctggagtggaaatgctggggcagcttcagcggcacctggaacccattatggtcctttctggtctggaactggccacaacttttgagcacttctatcagcattatatggcggaccgtctcctgagctttggttcgagctggctggagggggctgtgctagagcagattggcctctgttttcccaaccgcctcccacagctgatgctgcagagcctgagcacctctgaggagctgcagcgccagttccacctcttccagctccagcggctcgacaagttgttcttggagcaggaagatgaggaggaaaagagactagaggaagaggaggaggaagaggaggaagaggaagctgagaaagaattatttatcgaagatccaagtccagccatttctatactggtcctgtcaccacgctgctggcccgtctccccactctgctacctgtaccatcccagaaagtgccttcccacagaattctgtgatgcccttgaccgtttctccagtttctacagccagagtcagaaccatccagtcctggacatgggaccacatcggcgactgcagtggacgtggctgggccgggctgagctgcagtttgggaagcagatactgcatgtgtccaccgtgcagatgtggctgctgctgaaattcaatcagacagaggaggtgtcagtagagaccttgctgaaggattctgacctctccccagagctgctgctccaggcactcgtgcccctcacctcagggaatggccctttgaccctgcatgagggccaggactttccacacgggggtgtgctgcggcttcatgagcctgggccccagcgcagtggggaggccctgtggctgatacctccccaggcatacctgaacgtagagaaggatgaaggccgaaccctggaacagaagaggaatctcttgagctgtcttcttgttcgtattctcaaagcccatggggaaaagggcctccacattgatcagctggtttgtctggtgctggaggcctggcagaagggtccaaatcctcctggaaccctgggccacactgttgctgggggtgtggcctgtaccagtacagatgtcctctcttgcatcctgcacctcttaggccagggctacgtgaaacggcgtgatgaccggccccagatcctgatgtatgccgctccagagcccatggggccctgccggggtcaggcagatgtccctttctgtggcagccagagcgaaacctccaagcccagcccagaagctgtggctaccctggcatctctacagctgcctgcaggccgcaccatgagcccccaggaagtagaagggttgatgaagcagacggtgcgtcaggtgcaggagacgctgaacttagagccagatgtcgctcagcaccttttggctcattcccactggggcgctgaacagctgctgcagagctacagtgaggaccctgagccactgctgctggcagctgggctgtgcgtacaccaggctcaggctgtacccgtacggcctgaccactgccccgtctgtgtgagccccctggggtgtgacgacgacctgccctctctctgctgcatgcactattgctgtaagtcttgctggaatgagtacctgacaactcggatcgagcagaaccttgttttgaattgcacctgccccattgccgactgccccgcccagcccaccggagccttcattcgtgccatcgtctcctcgccagaggtcatctccaagtatgagaaggcgctcctgcgtggctatgtggagagctgctccaacctgacctggtgcaccaacccccagggctgcgaccgcatcctgtgccgccagggcctgggctgtgggaccacctgctccaagtgtggctgggcctcttgcttcaactgtagcttccctgaggcacactaccctgctagctgtggccatatgtctcagtgggtcgacgacggtggctactatgacggcatgagcgtggaggcgcagagcaagcacctggccaagctcatctccaagcgctgtcccagctgtcaggctcccatcgagaagaacgaggggtgcctgcacatgacctgtgccaaatgtaaccatggattctgctggcgctgcctcaagtcctggaagccaaatcacaaagactattacaactgctctgccatggtaagcaaggcagctcgccaggagaagcggtttcaggactataatgagaggtgcactttccatcaccaggcgcgggagtttgctgtgaacttgcggaaccgggtgtctgccatccatgaagtgcccccgcccagatccttcaccttcctcaatgatgcctgccagggactggagcaggctcggaaggtgctggcctacgcctgcgtgtacagcttctacagccaggacgcagagtacatggatgtggtggagcagcagacagagaacctggagctgcacaccaatgccctgcagatcctcctggaggaaaccctgctgcggtgcagagacctggcctcctccctgcgcctcctgcgggccgactgcctcagcacgggcatggagctgctccggcggatccaggagaggctgcttgccatcctgcagcattctgcccaggatttccgggttggtcttcagagtccatcagtagaggcctgggaggcaaaaggacccaacatgcctggcagtcagccccaggcctcctcagggccagaggcagaagaggaggaggaagacgatgaggatgatgtgcccgagtggcagcaggatgagtttgatgaggagctggacaatgacagcttctcctacgatgagtctgagaacctggaccaagagactttcttctttggtgatgaggaagaggatgaagatgaggcctatgactgagggggcagatgcaggaaacacctagagcagccccagagtcacggggctgagggggcgggagctgcccctgtcatagggagggggattcccagcgtctgtagtgcttcctgtttgctgaataaaggtctctttctcacacacaaaaaaaaaa

SEQ ID NO: 435332 - DNA, 6103 bp, Homo sapiens
ccaggctgaatggtgggagctgcttttctttatcaaaaagttggacttgtgtgagcagcagccaattttccagaatctttggaagaacctggatgagaccctgggtgaaaaggccctaggtgagatctctgtgtccgtggaaatggccgagagtctgctgcaggttctcagtagtcgatttgagggcagcactctcaatgacctgctcaactcccagatctacaccaagtatgggctgctgtctaatgaaccaagcagctcgtctacttcacgaaatcactcctgtaccccagatccagaagaggagtccaagtcggaggccagcttctcagaggaagagactgagtccctcaaagcaaaggccgaggcccctaagacagaggccgagcccaccaagacaaggaccgagacccccatggcacagagtgattctcagctgtttaaccagcttctggtgactgaggggatgaccctgcccactgagatgaaggaggcagccagtgaaatggccagagccttgcggggtcccggtcctcgcagctccctggatcagcatgtggcagcggtcgtggccactgtgcagatatccagcttggacacaaacctgcagctttcagggctctctgccctctctcaggctgtggaggaggtcactgagcgggaccaccctctggtccgtcctgacagatcgctgagagagaagctagtgaagatgctggtggagctgctgaccaaccaggtgggagagaagatggtggtcgtgcaggccctgcgcctcctttacctgctcatgaccaagcacgagtggcggccgctctttgccagggagggtggcatctatgctgtgctggtctgcatgcaagaatataagacttctgtcttggtgcagcaggctgggctggcggcactgaagatgctggccgtcgccagctcctcggagatccccacttttgttactggccgagattctatccactctttgtttgatgctcagatgaccagagagatcttcgccagcatcgactcagccacacgcccgggctctgagagcctgctcctcactgtccctgcagccgtgatcctgatgctgaatactgaggggtgctcttctgcagcgagaaatggcttactcctgctcaacctacttttgtgcaaccaccacactctgggagaccagattataacccaagagctgagagacacgttgtttaggcactcagggatagcaccaagaacagaacctatgcctaccacacgcaccatcctcatgatgcttctcaatcgctactcagagccgccgggcagccctgagcgtgcagcactagagacccccatcatccagggtcaggatgggtcccctgagctactgattcgatccctggttgggggcccatctgcagaactactcctggacttggagcgtgtgctgtgccgtgagggcagccccggaggtgccgtgaggcccctcctcaagcgcctccagcaggagacccagcctttcctcctgttgctgcggactctggatgctccggggcccaacaagactctgctgctgtctgtgctgagggtcataacccgactgctggatttccctgaggcaatggtcctcccctggcacgaggtcttggagccctgcctcaactgcctgagtggccctagcagtgactccgagattgttcaggagctgacctgcttcctacatcgcctggcctcgatgcataaggactatgctgtggtgctctgctgcctgggagcaaaagagatcctctccaaagtcctggacaagcactcagctcagctgctgctgggctgtgagcttcgggacctggtgacagagtgtgagaagtacgcacagctctatagcaacctcacctccagcatcctggccggctgcattcagatggtgctgggccagatcgaagaccacagacgaacccaccaacccatcaatatccccttctttgatgtgttcctcaggcatctctgccagggctccagtgtggaagtgaaggaggacaagtgctgggagaaggtggaggtgtcctccaacccgcaccgagccagcaagctgacggaccacaaccccaagacctactgggagtccaacggcagcaccggctcccactacatcaccctgcacatgcaccgtggtgttcttgttaggcagctcactttgctggtggccagtgaggactcaagctacatgccagccagggtggtggtgtttgggggtgacagcaccagctgcatcggcactgagctcaacacggtgaatgtgatgccctctgccagccgggtgatcctcttggagaacctgaaccgcttctggcccatcatccagatccgcataaagcgctgccagcagggcggcattgacacccgggttcggggtgtggaggtcctgggccctaagcccacattctggccactgttccgggagcagctgtgtcgccgaacatgtctcttctacacaattcgggcacaagcctggagccgggacatagcagaggaccaccggcgcctcctccagctctgtcccagactgaacagggttttgcgccacgagcagaattttgctgaccgcttcctccctgatgatgaggccgcccaggcactgggcaagacctgctgggaggccctggtcagccccctggtgcagaacatcacctctcccgatgcggaaggcgtgagtgccctgggatggctgctggatcagtacttagaacagagagagacctctcggaaccccttgagtcgagcagcgtcctttgcttctcgagttcgtcgcctttgccacttgctggtgcatgtggaacctcctcctgggccttctcctgagccatccactcggcccttcagcaagaacagcaagggtcgggaccggagcccggcgccttcgccagtgcttccaagcagcagcctgaggaacataacccagtgctggctgagcgtggtgcaggagcaggtcagcagattcctggctgcagcttggagggccccagactttgtgcctcgttactgtaaactctatgagcacttgcagagagcaggctccgagctgtttgggcctcgggcagccttcatgctggctctgcgcagtggcttctctggcgccttgctgcagcagtccttcctcactgctgctcacatgagtgagcagtttgccaggtacattgaccaacagatccagggtggcctgattggtggagcccctggagtggaaatgctggggcagcttcagcggcacctggaacccattatggtcctttctggtctggaactggccacaacttttgagcacttctatcagcattatatggcggaccgtctcctgagctttggttcgagctggctggagggggctgtgctagagcagattggcctctgttttcccaaccgcctcccacagctgatgctgcagagcctgagcacctctgaggagctgcagcgccagttccacctcttccagctccagcggctcgacaagttgttcttggagcaggaagatgaggaggaaaagagactagaggaagaggaggaggaagaggaggaagaggaagctgagaaagaattatttatcgaagatccaagtccagccatttctatactggtcctgtcaccacgctgctggcccgtctccccactctgctacctgtaccatcccagaaagtgccttcccacagaattctgtgatgcccttgaccgtttctccagtttctacagccagagtcagaaccatccagtcctggacatgggaccacatcggcgactgcagtggacgtggctgggccgggctgagctgcagtttgggaagcagatactgcatgtgtccaccgtgcagatgtggctgctgctgaaattcaatcagacagaggaggtgtcagtagagaccttgctgaaggattctgacctctccccagagctgctgctccaggcactcgtgcccctcacctcagggaatggccctttgaccctgcatgagggccaggactttccacacgggggtgtgctgcggcttcatgagcctgggccccagcgcagtggggaggccctgtggctgatacctccccaggcatacctgaacgtagagaaggatgaaggccgaaccctggaacagaagaggaatctcttgagctgtcttcttgttcgtattctcaaagcccatggggaaaagggcctccacattgatcagctggtttgtctggtgctggaggcctggcagaagggtccaaatcctcctggaaccctgggccacactgttgctgggggtgtggcctgtaccagtacagatgtcctctcttgcatcctgcacctcttaggccagggctacgtgaaacggcgtgatgaccggccccagatcctgatgtatgccgctccagagcccatggggccctgccggggtcaggcagatgtccctttctgtggcagccagagcgaaacctccaagcccagcccagaagctgtggctaccctggcatctctacagctgcctgcaggccgcaccatgagcccccaggaagtagaagggttgatgaagcagacggtgcgtcaggtgcaggagacgctgaacttagagccagatgtcgctcagcaccttttggctcattcccactggggcgctgaacagctgctgcagagctacagtgaggaccctgagccactgctgctggcagctgggcttcttgctggaatgagtacctgacaactcggatcgagcagaaccttgttttgaattgcacctgccccattgccgactgccccgcccagcccaccggagccttcattcgtgccatcgtctcctcgccagaggtcatctccaagtatgagaaggcgctcctgcgtggctatgtggagagctgctccaacctgacctggtgcaccaacccccagggctgcgaccgcatcctgtgccgccagggcctgggctgtgggaccacctgctccaagtgtggctgggcctcttgcttcaactgtagcttccctgaggcacactaccctgctagctgtggccatatgtctcagtgggtcgacgacggtggctactatgacggcatgagcgtggaggcgcagagcaagcacctggccaagctcatctccaagcgctgtcccagctgtcaggctcccatcgagaagaacgaggggtgcctgcacatgacctgtgccaaatgtaaccatggattctgctggcgctgcctcaagtcctggaagccaaatcacaaagactattacaactgctctgccatggtaagcaaggcagctcgccaggagaagcggtttcaggactataatgagaggtgcactttccatcaccaggcgcgggagtttgctgtgaacttgcggaaccgggtgtctgccatccatgaagtgcccccgcccagatccttcaccttcctcaatgatgcctgccagggactggagcaggctcggaaggtgctggcctacgcctgcgtgtacagcttctacagccaggacgcagagtacatggatgtggtggagcagcagacagagaacctggagctgcacaccaatgccctgcagatcctcctggaggaaaccctgctgcggtgcagagacctggcctcctccctgcgcctcctgcgggccgactgcctcagcacgggcatggagctgctccggcggatccaggagaggctgcttgccatcctgcagcattctgcccaggatttccgggttggtcttcagagtccatcagtagaggcctgggaggcaaaaggacccaacatgcctggcagtcagccccaggcctcctcagggccagaggcagaagaggaggaggaagacgatgaggatgatgtgcccgagtggcagcaggatgagtttgatgaggagctggacaatgacagcttctcctacgatgagtctgagaacctggaccaagagactttcttctttggtgatgaggaagaggatgaagatgaggcctatgactgagggggcagatgcaggaaacacctagagcagccccagagtcacggggctgagggggcgggagctgcccctgtcatagggagggggattcccagcgtctgtagtgcttcctgtttgctgaataaaggtctctttctcacacacaaaaaaaaaa

SEQ ID NO: 435333 - DNA, 6168 bp, Homo sapiens
ccaggctgaatggtgggagctgcttttctttatcaaaaagttggacttgtgtgagcagcagccaattttccagaatctttggaagaacctggatgagaccctgggtgaaaaggccctaggtgagatctctgtgtccgtggaaatggccgagagtctgctgcaggttctcagtagtcgatttgagggcagcactctcaatgacctgctcaactcccagatctacaccaagtatgggctgctgtctaatgaaccaagcagctcgtctacttcacgaaatcactcctgtaccccagatccagaagaggagtccaagtcggaggccagcttctcagaggaagagactgagtccctcaaagcaaaggccgaggcccctaagacagaggccgagcccaccaagacaaggaccgagacccccatggcacagagtgattctcagctgtttaaccagcttctggtgactgaggggatgaccctgcccactgagatgaaggaggcagccagtgaaatggccagagccttgcggggtcccggtcctcgcagctccctggatcagcatgtggcagcggtcgtggccactgtgcagatatccagcttggacacaaacctgcagctttcagggctctctgccctctctcaggctgtggaggaggtcactgagcgggaccaccctctggtccgtcctgacagatcgctgagagagaagctagtgaagatgctggtggagctgctgaccaaccaggtgggagagaagatggtggtcgtgcaggccctgcgcctcctttacctgctcatgaccaagcacgagtggcggccgctctttgccagggagggtggcatctatgctgtgctggtctgcatgcaagaatataagacttctgtcttggtgcagcaggctgggctggcggcactgaagatgctggccgtcgccagctcctcggagatccccacttttgttactggccgagattctatccactctttgtttgatgctcagatgaccagagagatcttcgccagcatcgactcagccacacgcccgggctctgagagcctgctcctcactgtccctgcagccgtgatcctgatgctgaatactgaggggtgctcttctgcagcgagaaatggcttactcctgctcaacctacttttgtgcaaccaccacactctgggagaccagattataacccaagagctgagagacacgttgtttaggcactcagggatagcaccaagaacagaacctatgcctaccacacgcaccatcctcatgatgcttctcaatcgctactcagagccgccgggcagccctgagcgtgcagcactagagacccccatcatccagggtcaggatgggtcccctgagctactgattcgatccctggttgggggcccatctgcagaactactcctggacttggagcgtgtgctgtgccgtgagggcagccccggaggtgccgtgaggcccctcctcaagcgcctccagcaggagacccagcctttcctcctgttgctgcggactctggatgctccggggcccaacaagactctgctgctgtctgtgctgagggtcataacccgactgctggatttccctgaggcaatggtcctcccctggcacgaggtcttggagccctgcctcaactgcctgagtggccctagcagtgactccgagattgttcaggagctgacctgcttcctacatcgcctggcctcgatgcataaggactatgctgtggtgctctgctgcctgggagcaaaagagatcctctccaaagtcctggacaagcactcagctcagctgctgctgggctgtgagcttcgggacctggtgacagagtgtgagaagtacgcacagctctatagcaacctcacctccagcatcctggccggctgcattcagatggtgctgggccagatcgaagaccacagacgaacccaccaacccatcaatatccccttctttgatgtgttcctcaggcatctctgccagggctccagtgtggaagtgaaggaggacaagtgctgggagaaggtggaggtgtcctccaacccgcaccgagccagcaagctgacggaccacaaccccaagacctactgggagtccaacggcagcaccggctcccactacatcaccctgcacatgcaccgtggtgttcttgttaggcagctcactttgctggtggccagtgaggactcaagctacatgccagccagggtggtggtgtttgggggtgacagcaccagctgcatcggcactgagctcaacacggtgaatgtgatgccctctgccagccgggtgatcctcttggagaacctgaaccgcttctggcccatcatccagatccgcataaagcgctgccagcagggcggcattgacacccgggttcggggtgtggaggtcctgggccctaagcccacattctggccactgttccgggagcagctgtgtcgccgaacatgtctcttctacacaattcgggcacaagcctggagccgggacatagcagaggaccaccggcgcctcctccagctctgtcccagactgaacagggttttgcgccacgagcagaattttgctgaccgcttcctccctgatgatgaggccgcccaggcactgggcaagacctgctgggaggccctggtcagccccctggtgcagaacatcacctctcccgatgcggaaggcgtgagtgccctgggatggctgctggatcagtacttagaacagagagagacctctcggaaccccttgagtcgagcagcgtcctttgcttctcgagttcgtcgcctttgccacttgctggtgcatgtggaacctcctcctgggccttctcctgagccatccactcggcccttcagcaagaacagcaagggtcgggaccggagcccggcgccttcgccagtgcttccaagcagcagcctgaggaacataacccagtgctggctgagcgtggtgcaggagcaggtcagcagattcctggctgcagcttggagggccccagactttgtgcctcgttactgtaaactctatgagcacttgcagagagcaggctccgagctgtttgggcctcgggcagccttcatgctggctctgcgcagtggcttctctggcgccttgctgcagcagtccttcctcactgctgctcacatgagtgagcagtttgccaggtacattgaccaacagatccagggtggcctgattggtggagcccctggagtggaaatgctggggcagcttcagcggcacctggaacccattatggtcctttctggtctggaactggccacaacttttgagcacttctatcagcattatatggcggaccgtctcctgagctttggttcgagctggctggagggggctgtgctagagcagattggcctctgttttcccaaccgcctcccacagctgatgctgcagagcctgagcacctctgaggagctgcagcgccagttccacctcttccagctccagcggctcgacaagttgttcttggagcaggaagatgaggaggaaaagagactagaggaagaggaggaggaagaggaggaagaggaagctgagaaagaattatttatcgaagatccaagtccagccatttctatactggtcctgtcaccacgctgctggcccgtctccccactctgctacctgtaccatcccagaaagtgccttcccacagaattctgtgatgcccttgaccgtttctccagtttctacagccagagtcagaaccatccagtcctggacatgggaccacatcggcgactgcagtggacgtggctgggccgggctgagctgcagtttgggaagcagatactgcatgtgtccaccgtgcagatgtggctgctgctgaaattcaatcagacagaggaggtgtcagtagagaccttgctgaaggattctgacctctccccagagctgctgctccaggcactcgtgcccctcacctcagggaatggccctttgaccctgcatgagggccaggactttccacacgggggtgtgctgcggcttcatgagcctgggccccagcgcagtggggaggccctgtggctgatacctccccaggcatacctgaacgtagagaaggatgaaggccgaaccctggaacagaagaggaatctcttgagctgtcttcttgttcgtattctcaaagcccatggggaaaagggcctccacattgatcagctggtttgtctggtgctggaggcctggcagaagggtccaaatcctcctggaaccctgggccacactgttgctgggggtgtggcctgtaccagtacagatgtcctctcttgcatcctgcacctcttaggccagggctacgtgaaacggcgtgatgaccggccccagatcctgatgtatgccgctccagagcccatggggccctgccggggtcaggcagatgtccctttctgtggcagccagagcgaaacctccaagcccagcccagaagctgtggctaccctggcatctctacagctgcctgcaggccgcaccatgagcccccaggaagtagaagggttgatgaagcagacggtgcgtcaggtgcaggagacgctgaacttagagccagatgtcgctcagcaccttttggctcattcccactggggcgctgaacagctgctgcagagctacagtgaggaccctgagccactgctgctggcagctgggctgtgcgtacaccaggctcaggctgtacccgtacggcctgaccactgccccgtctgtgtgagccccctggggtgtgacgacgacctgccctctctctgctgcatgcactattgctgtaagtcttgctggaatgagtacctgacaactcggatcgagcagaaccttgttttgaattgcacctgccccattgccgactgccccgcccagcccaccggagccttcattcgtgccatcgtctcctcgccagaggtcatctccaagtatgagaaggcgctcctgcgtggctatgtggagagctgctccaacctgacctggtgcaccaacccccagggctgcgaccgcatcctgtgccgccagggcctgggctgtgggaccacctgctccaagtgtggctgggcctcttgcttcaactgtagcttccctgaggcacactaccctgctagctgtggccatatgtctcagtgggtcgacgacggtggctactatgacggcatgagcgtggaggcgcagagcaagcacctggccaagctcatctccaagcgctgtcccagctgtcaggctcccatcgagaagaacgaggggtgcctgcacatgacctgtgccaaatgtaaccatggattctgctggcgctgcctcaagtcctggaagccaaatcacaaagactattacaactgctctgccatggtaagcaaggcagctcgccaggagaagcggtttcaggactataatgagaggtgcactttccatcaccaggcgcgggagtttgctgtgaacttgcggaaccgggtgtctgccatccatgaagtgcccccgcccagatccttcaccttcctcaatgatgcctgccagggactggagcaggctcggaaggtgctggcctacgcctgcgtgtacagcttctacagccaggacgcagagtacatggatgtggtggagcagcagacagagaacctggagctgcacaccaatgccctgcagatcctcctggaggaaaccctgctgcggtgcagagacctggcctcctccctgcgcctcctgcgggccgactgcctcagcacgggcatggagctgctccggcggatccaggagaggctgcttgccatcctgcagcattctgcccaggatttccgggttggtcttcagagtccatcagtagaggcctgggaggcaaaaggacccaacatgcctggcagtcagccccaggcctcctcagggccagaggcagaagaggaggaggaagacgatgaggatgatgtgcccgagtggcagcaggatgagtttgatgaggagctggacaatgacagcttctcctacgatgagtctgagaacctatgactgagggggcagatgcaggaaacacctagagcagccccagagtcacggggctgagggggcgggagctgcccctgtcatagggagggggattcccagcgtctgtagtgcttcctgtttgctgaataaaggtctctttctcacacacaaaaaaaaaa

SEQ ID NO: 435334 - DNA, 1345 bp, Homo sapiens
ccaggctgaatggtgggagctgcttttctttatcaaaaagttggacttgtgtgagcagcagccaattttccagaatctttggaagaacctggatgagaccctgggtgaaaaggccctaggtgagatctctgtgtccgtggaaatggccgagagtctgctgcaggttctcagtagtcgatttgagggcagcactctcaatgacctgctcaactcccagatctacaccaagtatgggctgctgtctaatgaaccaagcagctcgtctacttcacgaaatcactcctgtaccccagatccagaagaggagtccaagtcggaggccagcttctcagaggaagagactgagtccctcaaagcaaaggccgaggcccctaagacagaggccgagcccaccaagacaaggaccgagacccccatggcacagagtgattctcagctgtttaaccagcttctggtgactgaggggatgaccctgcccactgagatgaaggaggcagccagtgaaatggccagagccttgcggggtcccggtcctcgcagctccctggatcagcatgtggcagcggtcgtggccactgtgcagatatccagcttggacacaaacctgcagctttcagggctctctgccctctctcaggctgtggaggaggtcactgagcgggaccaccctctggtccgtcctgacagatcgctgagagagaagctagtgaagatgctggtggagctgctgaccaaccaggtgggagagaagatggtggtcgtgcaggccctgcgcctcctttacctgctcatgaccaagcacgagtggcggccgctctttgccagggagggtggcatctatgctgtgctggtctgcatgcaagaatataagacttctgtcttggtgcagcaggctgggctggcggcactgaagatgctggccgtcgccagctcctcggagatccccacttttgttactggccgagattctatccactctttgtttgatgctcagatgaccagagagatcttcgccagcatcgactcagccacacgcccgggctctgagagcctgctcctcactgtccctgcagccgtgatcctgatgctgaatactgaggggtcagggcattaccttcccaactccaggctcctgcttagtcccaaaccctgctactcctgtgctccaggctcatgtactccacagaaattcccctcacgctgtcacctccggattaagcattggtggcgctgccaactgttgttggaggagaacccaagtggattggggatagggagattcccagagagggcagagacacactgacttccctttatgggtttgggaggagtggcccaaggtcag

SEQ ID NO: 435335 - DNA, 544 bp, Homo sapiens
aaaggccccatgccctctacctccttctcaaatccttctgtctgctcaccaggatttccgggttggtcttcagagtccatcagtagaggcctgggaggcaaaaggacccaacatgcctggcagtcagtaagtggggtgggcagagccatggaggaggcagtgggacatggcagcctcctctgggctgagtgtggtggctctccctaggccccaggcctcctcagggccagaggcagaagaggaggaggaagacgatgaggatgatgtgcccgagtggcagcaggatgagtttgatgaggagctggacaatgacagcttctcctacgatgagtctgagaacctggaccaagagactttcttctttggtgatgaggaagaggatgaagatgaggcctatgactgagggggcagatgcaggaaacacctagagcagccccagagtcacggggctgagggggcgggagctgcccctgtcatagggagggggattcccagcgtctgtagtgcttcctgtttgctgaataaaggtctctttctcacacac

SEQ ID NO: 435336 - DNA, 212 bp, Homo sapiens
ggtggagctgctgaccaaccaggtgggagagaagatggtggtcgtgcaggccctgcgcctcctttacctgctcatgaccaagcacgagtggcggccgctctttgccagggagggtggcatctatgctgtgctggtctgcatgcaagaatataagacttctgtcttggtgcagcaggctgggctggcggtgagtacattgggcctggcgggag

SEQ ID NO: 435337 - DNA, 305 bp, Homo sapiens
aggtctaagtccttctaaaggtttctttaaaggtttttaaacaaaatgctaaacctaaaaacattgtcctgtcagttcccaaattaaatcgacttagacctcacatattaatgttgagaagttctgcttaattttaaaatggtttctataaagggttttattgtatgaaatagaactttatatttttgcatatgtatagatagtaattatatttaatgtataactatagcattatggtgagtggaatttgacattgtccaaacctttttcatttttgagtgattaaaaatgaaatgtcctttgta

SEQ ID NO: 435338 - DNA, 1834 bp, Homo sapiens
agcggaccgcattggtggaccggcccccagcccgtccatgggcgttgtggccgccaccgcaggttccgcctcccgttccctccgccctcaacgtacgtcgcaccgcctctctgtagccgcccgcggagcatcgcagccggcccgggcccccgccagcctccctcctcgcgtccctcggtgtcctccgcgggccggcgcgatgcggctgggcccgaggaccgcggcgttggggctgctgctgctgtgcgccgccgcggccggcgccggcaaggccgaggagctgcactacccgctgggcgagcgccgcagcgactacgaccgcgaggcgctgctgggcgtccaggaagatgtggatgaatatgttaaactcggccacgaagagcagcaaaaaagactgcaggcgatcataaagaaaatcgacttggactcagatggctttctcactgaaagtgaactcagttcatggattcagatgtcttttaagcattatgctatgcaagaagcaaaacaacagtttgttgaatatgataaaaacagtgatgatactgtgacttgggatgaatataacattcagatgtatgatcgtgtgattgactttgatgagaacactgctctggatgatgcagaagaggagtcctttaggaagcttcacttaaaggacaagaagcgatttgaaaaagctaaccaggattcaggtcccggtttgagtcttgaagaatttattgcttttgagcatcctgaagaagttgattatatgacggaatttgtcattcaagaagctttagaagaacatgacaaaaatggtgatggatttgttagtttggaagaatttcttggtgattacaggtgggatccaactgcaaatgaagatccagaatggatacttgttgagaaagacagattcgtgaatgattatgacaaagataacgatggcaggcttgatccccaagagctgttaccttgggtagtacctaataatcagggcattgcacaagaggaggcgcttcatctaattgatgaaatggatttgaatggtgacaaaagctctctgaagaagagattctggaaaacccggacttgtttctcaccagtgaagccacagattatggcagacagctccatgatgactatttctatcatgatgagctttaatctctgagcctgtctcagtagagtactggctccttttataatttgttaccagctttacttttgtgataaaatattgatgttgtattttacactcttaagtcttaaccacagtcagaattatcttaatgtagattataattttggtcttttaggaaaaaaaaacaaaaatctgatatttatttcaaaatgtattgaagcaacaaaatattaatattgtgccatatgacaacaaagtctttcctaaatactccatctgtttagtactgtattgtggaatatttgagttctatttccatacttgaaaacatggaggattttagagatgcctgaacaatattatttaagtagtatgtgaccgagctataaatttttgtttttgttctaagtagatttaatttgggaactgacaggacaatgtttttaggtttagcattttgtttaaaaacctttaaagaaacctttagaaggacttagacctcacatattaatgttgagaagttctgcttaattttaaaatggtttctataaagggttttattgtatgaaatagaactttatatttttgcatatgtatagatagtaattatatttaatgtataactatagcattatggtgagtggaatttgacattgtccaaacctttttcatttttgagtgattaaaaatgaaatgtcctttgta

SEQ ID NO: 435339 - DNA, 1894 bp, Homo sapiens
agcggaccgcattggtggaccggcccccagcccgtccatgggcgttgtggccgccaccgcaggttccgcctcccgttccctccgccctcaacgtacgtcgcaccgcctctctgtagccgcccgcggagcatcgcagccggcccgggcccccgccagcctccctcctcgcgtccctcggtgtcctccgcgggccggcgcgatgcggctgggcccgaggaccgcggcgttggggctgctgctgctgtgcgccgccgcggccggcgccggcaaggccgaggagctgcactacccgctgggcgagcgccgcagcgactacgaccgcgaggcgctgctgggcgtccaggaagatgtggatgaatatgttaaactcggccacgaagagcagcaaaaaagactgcaggcgatcataaagaaaatcgacttggactcagatggctttctcactgaaagtgaactcagttcatggattcagatgtcttttaagcattatgctatgcaagaagcaaaacaacagtttgttgaatatgataaaaacagtgatgatactgtgacttgggatgaatataacattcagatgtatgatcgtgtgattgactttgatgagaacactgctctggatgatgcagaagaggagtcctttaggaagcttcacttaaaggacaagaagcgatttgaaaaagctaaccaggattcaggtcccggtttgagtcttgaagaatttattgcttttgagcatcctgaagaagttgattatatgacggaatttgtcattcaagaagctttagaagaacatgacaaaaatggtgatggatttgttagtttggaagaatttcttggtgattacaggtgggatccaactgcaaatgaagatccagaatggatacttgttgagaaagacagattcgtgaatgattatgacaaagataacgatggcaggcttgatccccaagagctgttaccttgggtagtacctaataatcagggcattgcacaagaggaggcgcttcatctaattgatgaaatggatttgaatggtgacaaaagctctctgaagaagagattctggaaaacccggacttgtttctcaccagtgaagccacagattatggcagacagctccatgatgactatttctatcatgatgagctttaatctctgagcctgtctcagtagagtactggctccttttataatttgttaccagctttacttttgtgataaaatattgatgttgtattttacactcttaagtcttaaccacagtcagaattatcttaatgtagattataattttggtcttttaggaaaaaaaaacaaaaatctgatatttatttcaaaatgtattgaagcaacaaaatattaatattgtgccatatgacaacaaagtctttcctaaatactccatctgtttagtactgtattgtggaatatttgagttctatttccatacttgaaaacatggaggattttagagatgcctgaacaatattatttaagtagtatgtgaccgagctataaatttttgtttttgttctaagtagatttaatttgggaactgacaggacaatgtttttaggtttagcattttgtttaaaaacctttaaagaaacctttagaaggacttagacctcacatattaatgttgagaagttctgcttaattttaaaatggtttctataaagggttttattgtatgaaatagaactttatatttttgcatatgtatagatagtaattatatttaatgtataactatagcattatggtgagtggaatttgacattgtccaaacctttttcatttttgagtgattaaaaatgaaatgtcctttgtacctttgtatatgtttgtttgcttttctttaactttcagataaatattgaatttagcatag

SEQ ID NO: 435340 - DNA, 1272 bp, Homo sapiens
  misc_feature (1169)..(1169): n is a, c, g, or t
  misc_feature (1172)..(1172): n is a, c, g, or t
agcggaccgcattggtggaccggcccccagcccgtccatgggcgttgtggccgccaccgcaggttccgcctcccgttccctccgccctcaacgtacgtcgcaccgcctctctgtagccgcccgcggagcatcgcagccggcccgggcccccgccagcctccctcctcgcgtccctcggtgtcctccgcgggccggcgcgatgcggctgggcccgaggaccgcggcgttggggctgctgctgctgtgcgccgccgcggccggcgccggcaaggccgaggagctgcactacccgctgggcgagcgccgcagcgactacgaccgcgaggcgctgctgggcgtccaggaagatgtggatgaatatgttaaactcggccacgaagagcagcaaaaaagactgcaggcgatcataaagaaaatcgacttggactcagatggctttctcactgaaagtgaactcagttcatggattcagatgtcttttaagcattatgctatgcaagaagcaaaacaacagtttgttgaatatgataaaaacagtgatgatactgtgacttgggatgaatataacattcagatgtatgatcgtgtgattgactttgatgagaacactgctctggatgatgcagaagaggagtcctttaggaagcttcacttaaaggacaagaagcgatttgaaaaagctaaccaggattcaggtcccggtttgagtcttgaagaatttattgcttttgagcatcctgaagaagttgattatatgacggaatttgtcattcaagaagctttagaagaacatgacaaaaatggtgatggatttgttagtttggaagaatttcttggtgattacaggtgggatccaactgcaaatgaagatccagaatggatacttgttgagaaagacagattcgtgaatgattatgacaaagataacgatggcaggcttgatccccaagagctgttaccttgggtagtacctaataatcagggcattgcacaagaggaggcgcttcatctaattgatgaaatggatttgaatggtgacaaaagctctctgaagaagagattctggaaaacccggacttgtttctcaccagtgaagccacagattatggcagacagctccatgatgactatttctatcatgatgagctttaatccgagctgttcaaaanaangggccttttaattgggccccctcctttcggggccaactctcgcgggttgtcacctcagtttacccgagatttttggagaaaactggggttggaacacaat

SEQ ID NO: 435341 - DNA, 1888 bp, Homo sapiens
agcggaccgcattggtggaccggcccccagcccgtccatgggcgttgtggccgccaccgcaggttccgcctcccgttccctccgccctcaacgtacgtcgcaccgcctctctgtagccgcccgcggagcatcgcagccggcccgggcccccgccagcctccctcctcgcgtccctcggtgtcctccgcgggccggcgcgatgcggctgggcccgaggaccgcggcgttggggctgctgctgctgtgcgccgccgcggccggcgccggcaaggccgaggagctgcactacccgctgggcgagcgccgcagcgactacgaccgcgaggcgctgctgggcgtccaggaagatgtggatgaatatgttaaactcggccacgaagagcagcaaaaaagactgcaggcgatcataaagaaaatcgacttggactcagatggctttctcactgaaagtgaactcagttcatggattcagatgtcttttaagcattatgctatgcaagaagcaaaacaacagtttgttgaatatgataaaaacagtgatgatactgtgacttgggatgaatataacattcagatgtatgatcgtgtgattgactttgatgagaacactgctctggatgatgcagaagaggagtcctttaggaaggaatttgccatttgtaaaaaacagtctttctgtttttggcttcttcgatttaatcttcacttaaaggacaagaagcgatttgaaaaagctaaccaggattcaggtcccggtttgagtcttgaagaatttattgcttttgagcatcctgaagaagttgattatatgacggaatttgtcattcaagaagctttagaagaacatgacaaaaatggtgatggatttgttagtttggaagaatttcttggtgattacaggtgggatccaactgcaaatgaagatccagaatggatacttgttgagaaagacagattcgtgaatgattatgacaaagataacgatggcaggcttgatccccaagagctgttaccttgggtagtacctaataatcagggcattgcacaagaggaggcgcttcatctaattgatgaaatggatttgaatggtgacaaaagctctctgaagaagagattctggaaaacccggacttgtttctcaccagtgaagccacagattatggcagacagctccatgatgactatttctatcatgatgagctttaatctctgagcctgtctcagtagagtactggctccttttataatttgttaccagctttacttttgtgataaaatattgatgttgtattttacactcttaagtcttaaccacagtcagaattatcttaatgtagattataattttggtcttttaggaaaaaaaaacaaaaatctgatatttatttcaaaatgtattgaagcaacaaaatattaatattgtgccatatgacaacaaagtctttcctaaatactccatctgtttagtactgtattgtggaatatttgagttctatttccatacttgaaaacatggaggattttagagatgcctgaacaatattatttaagtagtatgtgaccgagctataaatttttgtttttgttctaagtagatttaatttgggaactgacaggacaatgtttttaggtttagcattttgtttaaaaacctttaaagaaacctttagaaggacttagacctcacatattaatgttgagaagttctgcttaattttaaaatggtttctataaagggttttattgtatgaaatagaactttatatttttgcatatgtatagatagtaattatatttaatgtataactatagcattatggtgagtggaatttgacattgtccaaacctttttcatttttgagtgattaaaaatgaaatgtcctttgta

SEQ ID NO: 435342 - DNA, 1924 bp, Homo sapiens
agcggaccgcattggtggaccggcccccagcccgtccatgggcgttgtggccgccaccgcaggttccgcctcccgttccctccgccctcaacgtacgtcgcaccgcctctctgtagccgcccgcggagcatcgcagccggcccgggcccccgccagcctccctcctcgcgtccctcggtgtcctccgcgggccggcgcgatgcggctgggcccgaggaccgcggcgttggggctgctgctgctgtgcgccgccgcggccggcgccggcaaggccgaggagctgcactacccgctgggcgagcgccgcagcgactacgaccgcgaggcgctgctgggcgtccaggaagatgtggatgaatatgttaaactcggccacgaagagcagcaaaaaagactgcaggcgatcataaagaaaatcgacttggactcagatggctttctcactgaaagtgaactcagttcatggattcagatgtcttttaagcattatgctatgcaagaagcaaaacaacagtttgttgaatatgataaaaacagtgatgatactgtgacttgggatgaatataacattcagatgtatgatcgtgtgattgactttgatgagaacactgctctggatgatgcagaagaggagtcctttaggaagcatcaatgtggaggtttggggctccatcctcagagccagtctgcttagcttcacatttagctccagcacttcacggttgtgtaactttggcttcacttaaaggacaagaagcgatttgaaaaagctaaccaggattcaggtcccggtttgagtcttgaagaatttattgcttttgagcatcctgaagaagttgattatatgacggaatttgtcattcaagaagctttagaagaacatgacaaaaatggtgatggatttgttagtttggaagaatttcttggtgattacaggtgggatccaactgcaaatgaagatccagaatggatacttgttgagaaagacagattcgtgaatgattatgacaaagataacgatggcaggcttgatccccaagagctgttaccttgggtagtacctaataatcagggcattgcacaagaggaggcgcttcatctaattgatgaaatggatttgaatggtgacaaaagctctctgaagaagagattctggaaaacccggacttgtttctcaccagtgaagccacagattatggcagacagctccatgatgactatttctatcatgatgagctttaatctctgagcctgtctcagtagagtactggctccttttataatttgttaccagctttacttttgtgataaaatattgatgttgtattttacactcttaagtcttaaccacagtcagaattatcttaatgtagattataattttggtcttttaggaaaaaaaaacaaaaatctgatatttatttcaaaatgtattgaagcaacaaaatattaatattgtgccatatgacaacaaagtctttcctaaatactccatctgtttagtactgtattgtggaatatttgagttctatttccatacttgaaaacatggaggattttagagatgcctgaacaatattatttaagtagtatgtgaccgagctataaatttttgtttttgttctaagtagatttaatttgggaactgacaggacaatgtttttaggtttagcattttgtttaaaaacctttaaagaaacctttagaaggacttagacctcacatattaatgttgagaagttctgcttaattttaaaatggtttctataaagggttttattgtatgaaatagaactttatatttttgcatatgtatagatagtaattatatttaatgtataactatagcattatggtgagtggaatttgacattgtccaaacctttttcatttttgagtgattaaaaatgaaatgtcctttgta

SEQ ID NO: 435343 - DNA, 1183 bp, Homo sapiens
agcggaccgcattggtggaccggcccccagcccgtccatgggcgttgtggccgccaccgcaggttccgcctcccgttccctccgccctcaacgtacgtcgcaccgcctctctgtagccgcccgcggagcatcgcagccggcccgggcccccgccagcctccctcctcgcgtccctcggtgtcctccgcgggccggcgcgatgcggctgggcccgaggaccgcggcgttggggctgctgctgctgtgcgccgccgcggccggcgccggcaaggccgaggagctgcactacccgctgggcgagcgccgcagcgactacgaccgcgaggcgctgctgggcgtccaggaagatgtggatgaatatgttaaactcggccacgaagagcagcaaaaaagactgcaggcgatcataaagaaaatcgacttggactcagatggctttctcactgaaagtgaactcagttcatggattcagatgtcttttaagcattatgctatgcaagaagcaaaacaacagtttgttgaatatgataaaaacagtgatgatactgtgacttgggatgaatataacattcagatgtatgatcgtgtgattgactttgatgagaacactgctctggatgatgcagaagaggagtcctttaggaagcttcacttaaaggacaagaagcgatttgaaaaagctaaccaggattcaggtcccggtttgagtcttgaagaatttattgcttttgagcatcctgaagaagttgattatatgacggaatttgtcattcaagaagctttagaagaacatgacaaaaatggtgatggatttgttagtttggaagaatttcttggtgattacaggtgggatccaagtaagtcacctgggagaatgtgaaaagagaaaaggaattgaagaaagacattgaaagacagccttgctcattgaaagctctcttcaacaggaaatgtaatgaggatctgtgtctgatcctacttgtttcgttaactgtaatacaagttcaacaaatggatttatagcttatctgagaacgctgtcttgcttacttttacttccgtgtctagagtcaaacatttttctttcttttcaaacaaatctaattttattatcagtttaaatggggaaggaagtaaggtagatatttttaaacaaaatcctgtgctgttgcaggtggatctt

SEQ ID NO: 435344 - DNA, 1417 bp, Homo sapiens
gttgcttaaagacaccaaacaatgccatttttaaattggtcaccagttttacttattctgattgtcactttaaaattacacatggcattactttgtgaaaacatgtaagaaactttgtatagaaacatgatatacagtaaaacattacccacctcacatctgggaaaactagatatcggaacaaatagcagttaacaaaattactagtttgtgaaaacatccaatgattttaaaactgggttgtttagactcgtgtcacttttgaaaatgactatatatttgttcttatgtcaggacttttcagttaagtagttctgttttattgggctttctttagtaaactttaaattcacttcctttattctagggatataccaaacttcttattggatacatgtgatattcttgtgtatgtatatttgtgtttttttatattaagcctgcaaatgaagatccagaatggatacttgttgagaaagacagattcgtgaatgattatgacaaagataacgatggcaggcttgatccccaagagctgttaccttgggtagtacctaataatcagggcattgcacaagaggaggcgcttcatctaattgatgaaatggatttgaatggtgacaaaagctctctgaagaagagattctggaaaacccggacttgtttctcaccagtgaagccacagattatggcagacagctccatgatgactatttctatcatgatgagctttaatctctgagcctgtctcagtagagtactggctccttttataatttgttaccagctttacttttgtgataaaatattgatgttgtattttacactcttaagtcttaaccacagtcagaattatcttaatgtagattataattttggtcttttaggaaaaaaaaacaaaaatctgatatttatttcaaaatgtattgaagcaacaaaatattaatattgtgccatatgacaacaaagtctttcctaaatactccatctgtttagtactgtattgtggaatatttgagttctatttccatacttgaaaacatggaggattttagagatgcctgaacaatattatttaagtagtatgtgaccgagctataaatttttgtttttgttctaagtagatttaatttgggaactgacaggacaatgtttttaggtttagcattttgtttaaaaacctttaaagaaacctttagaaggacttagacctcacatattaatgttgagaagttctgcttaattttaaaatggtttctataaagggttttattgtatgaaatagaactttatatttttgcatatgtatagatagtaattatatttaatgtataactatagcattatggtgagtggaatttgacattgtccaaacctttttcatttttgagtgattaaaaatgaaatgtcctttgta

SEQ ID NO: 435345 - DNA, 987 bp, Homo sapiens
cggaccgttgtactggcttgtgggagaagtgtacgaatgggtatgagaagtcagatttaggatatattgtgtatacataacgatggcaggcttgatccccaagagctgttaccttgggtagtacctaataatcagggcattgcacaagaggaggcgcttcatctaattgatgaaatggatttgaatggtgacaaaagctctctgaagaagagattctggaaaacccggacttgtttctcaccagtgaagccacagattatggcagacagctccatgatgactatttctatcatgatgagctttaatctctgagcctgtctcagtagagtactggctccttttataatttgttaccagctttacttttgtgataaaatattgatgttgtattttacactcttaagtcttaaccacagtcagaattatcttaatgtagattataattttggtcttttaggaaaaaaaaacaaaaatctgatatttatttcaaaatgtattgaagcaacaaaatattaatattgtgccatatgacaacaaagtctttcctaaatactccatctgtttagtactgtattgtggaatatttgagttctatttccatacttgaaaacatggaggattttagagatgcctgaacaatattatttaagtagtatgtgaccgagctataaatttttgtttttgttctaagtagatttaatttgggaactgacaggacaatgtttttaggtttagcattttgtttaaaaacctttaaagaaacctttagaaggacttagacctcacatattaatgttgagaagttctgcttaattttaaaatggtttctataaagggttttattgtatgaaatagaactttatatttttgcatatgtatagatagtaattatatttaatgtataactatagcattatggtgagtggaatttgacattgtccaaacctttttcatttttgagtgattaaaaatgaaatgtcctttgta

SEQ ID NO: 435346 - DNA, 503 bp, Homo sapiens
  misc_feature (8)..(8): n is a, c, g, or t
  misc_feature (13)..(13): n is a, c, g, or t
  misc_feature (15)..(16): n is a, c, g, or t
  misc_feature (31)..(32): n is a, c, g, or t
  misc_feature (34)..(34): n is a, c, g, or t
  misc_feature (44)..(44): n is a, c, g, or t
  misc_feature (50)..(50): n is a, c, g, or t
  misc_feature (58)..(58): n is a, c, g, or t
tttctttncgttntnntgccaccattttttnntnttgtcccctntccccncccccccncccctaaatactccatctgtttagtactgtattgtggaatatttgagttctatttccatacttgaaaacatggaggattttagagatgcctgaacaatattatttaagtagtatgtgaccgagctataaatttttgtttttgttctaagtagatttaatttgggaactgacaggacaatgtttttaggtttagcattttgtttaaaaacctttaaagaaacctttagaaggacttagacctcacatattaatgttgagaagttctgcttaattttaaaatggtttctataaagggttttattgtatgaaatagaactttatatttttgcatatgtatagatagtaattatatttaatgtataactatagcattatggtgagtggaatttgacattgtccaaacctttttcatttttgagtgattaaaaatgaaatgtcctttgta

SEQ ID NO: 435347 - DNA, 1355 bp, Homo sapiens
agcggaccgcattggtggaccggcccccagcccgtccatgggcgttgtggccgccaccgcaggttccgcctcccgttccctccgccctcaacgtacgtcgcaccgcctctctgtagccgcccgcggagcatcgcagccggcccgggcccccgccagcctccctcctcgcgtccctcggtgtcctccgcgggccggcgcgatgcggctgggcccgaggaccgcggcgttggggctgctgctgctgtgcgccgccgcggccggcgccggcaaggccgaggagctgcactacccgctgggcgagcgccgcagcgactacgaccgcgaggcgctgctgggcgtccaggaagatgtggatgaatatgttaaactcggccacgaagagcagcaaaaaagactgcaggcgatcataaagaaaatcgacttggactcagatggctttctcactgaaagtgaactcagttcatggattcagatgtcttttaagcattatgctatgcaagaagcaaaacaacagtttgttgaatatgataaaaacagtgatgatactgtgacttgggatgaatataacattcagatgtatgatcgtgtgattgactttgatgagaacactgctctggatgatgcagaagaggagtcctttaggaaggtcttaatgcatatgggaaagttttgaccacttttagtcaagagaaaagcagctactttatcctcgttgtatgtggtgcttgctctccgatttataactcttccactatataggatggacgggcgaaagcgaatttgataaaggctaagccaggattcaggtcccggttggatgctctttgaagaatgtcattcgctttgtgagcatcctgaagaacgttgcaatgtatatgacggtcactttagtcattcaagaaggctttcagtaagacactatgacaaaaatggtgcatggcatttgcttaccttttggaacgaaatttcttgcggtgattcacagggtgcggatcccaactgcccacaatgagaagcctgcaaatgaagatccagaatggatacttgttgagaaagacagattcgtgaatgattatgacaaagataacgatggcaggcttgatccccaagagctgttaccttgggtagtacctaataatcagggcattgcacaagaggaggaggcgctttcatctaagttgaatgcaacatgggatttgaagttggttgacaaaacatatgcgtctactgacacgcaaagagcattctgggaacaaaccccggaacttgtttacttccacccagttgaaaggcccacacggatttattgcgcgcagaacacgctccattgtatgactacttttcctaatccatga

SEQ ID NO: 435348 - DNA, 834 bp, Homo sapiens
tattagagatttttatcccagtttgatagatgaggaaaccagagaggttaagcagtttgcgctgacaccacagctagtaagtggcattgctggaattcaggtctgggtctatatgactctagagcttgtgagtctatcctgcccctaatacatgtatttgtgtagcttaccttcaaagggacgatgtgaagataaatgagataacggatgggaatgtactttaaatttcacatagtttgtatttttcaaagtatttaaaatgatgtggtatactaatgagaaattttaattttcaaagcttcacttaaaggacaagaagcgatttgaaaaagctaaccaggattcaggtcccggtttgagtcttgaagaatttattgcttttgagcatcctgaagaagttgattatatgacggaatttgtcattcaagaagctttagaagaacatgacaaaaatggtgatggatttgttagtttggaagaatttcttggtgattacaggtgggatccaagtaagtcacctgggagaatgtgaaaagagaaaaggaattgaagaaagacattgaaagacagccttgctcattgaaagctctcttcaacaggaaatgtaatgaggatctgtgtctgatcctacttgtttcgttaactgtaatacaagttcaacaaatggatttatagcttatctgagaacgctgtcttgcttacttttacttccgtgtctagagtcaaacatttttctttcttttcaaacaaatctaattttattatcagtttaaatggggaaggaagtaaggtagatatttttaaactgataataaaattagatttgtttgaaaa

SEQ ID NO: 435349 - DNA, 573 bp, Homo sapiens
gtagtagaattgaatcggatggcagtgggactgaacattttgtaacttttttttttcttttttaatgaacgtggaataggaatttgtcattcaagaagctttagaagaacatgacaaaaatggtgatggatttgttagtttggaagaatttcttggtgattacaggtgggatccaagtaagtcacctgggagaatgtgaaaagagaaaaggaattgaagaaagacattgaaagacagccttgctcattgaaagctctcttcaacaggaaatgtaatgaggatctgtgtctgatcctacttgtttcgttaactgtaatacaagttcaacaaatggatttatagcttatctgagaacgctgtcttgcttacttttacttccgtgtctagagtcaaacatttttctttcttttcaaacaaatctaattttattatcagtttaaatggggaaggaagtaaggtagatatttttaaacaaaatcctgtgctgttgcaggtggatcttaaaagagatagaaacataaaacactacaaatactggtgtaaacacagtatcagaagcttagtagaaggtga

SEQ ID NO: 435350 - DNA, 1873 bp, Homo sapiens
agcggaccgcattggtggaccggcccccagcccgtccatgggcgttgtggccgccaccgcaggttccgcctcccgttccctccgccctcaacgtacgtcgcaccgcctctctgtagccgcccgcggagcatcgcagccggcccgggcccccgccagcctccctcctcgcgtccctcggtgtcctccgcgggccggcgcgatgcggctgggcccgaggaccgcggcgttggggctgctgctgctgtgcgccgccgcggccggcgccggcaaggccgaggagctgcactacccgctgggcgagcgccgcagcgactacgaccgcgaggcgctgctgggcgtccaggaagatgtggatgaatatgttaaactcggccacgaagagcagcaaaaaagactgcaggcgatcataaagaaaatcgacttggactcagatggctttctcactgaaagtgaactcagttcatggattcagatgtcttttaagcattatgctatgcaagaagcaaaacaacagtttgttgaatatgataaaaacagtgatgatactgtgacttgggatgaatataacattcagatgtatgatcgtgtgattgactttgatgagaacactgctctggatgatgcagaagaggagtcctttaggaagcttcacttaaaggacaagaagcgatttgaaaaagctaaccaggattcaggtcccggtttgagtcttgaagaatttattgcttttgagcatcctgaagaagttgattatatgacggaatttgtcattcaagaagctttagaagaacatgacaaaaatggtgatggatttgttagtttggaagaatttcttggtgattacaggtgggatccaactgcaaatgaagatccagaatggatacttgttgagaaagacagattcgtgaatgattatgacaaagataacgatggcaggcttgatccccaagagctgttaccttgggtagtacctaataatcagggcattgcacaagaggaggcgcttcatctaattgatgaaatggatttgaatggtgacaaaagctctctgaagaagagattctggaaaacccggacttgtttctcaccagtgaagccacagattatggcagacagctccatgatgactatttctatcatgatgagctttaatctctgagcctgtctcagtagagtactggctccttttataatttgttaccagctttacttttgtgataaaatattgatgttgtattttacactcttaagtcttaaccacagtcagaattatcttaatgtagattataattttggtcttttaggaaaaaaaaacaaaaatctgatatttatttcaaaatgtattgaagcaacaaaatattaatattgtgccatatgacaacaaagtctttcctaaatactccatctgtttagtactgtattgtggaatatttgagttctatttccatacttgaaaacatggaggattttagagatgcctgaacaatattatttaagtagtatgtgaccgagctataaatttttgtttttgttctaagtagatttaatttgggaactgacaggacaatgtttttaggtttagcattttgtttaaaaacctttaaagaaacctttagaaggacttagacctcacatattaatgttgagaagttctgcttaattttaaaatggtttctataaagggttttattgtatgaaatagaactttatatttttgcatatgtatagatagtaattatatttaatgtataactatagcattatggtgagtggaatttgacattgtccaaacctttttcatttttgagtgattaaaaatgaaatgtcctttgtaaaaaaaaaagtcgacgcggccgcgaatttagtagtagta

SEQ ID NO: 435351 - DNA, 1855 bp, Homo sapiens
agcggaccgcattggtggaccggcccccagcccgtccatgggcgttgtggccgccaccgcaggttccgcctcccgttccctccgccctcaacgtacgtcgcaccgcctctctgtagccgcccgcggagcatcgcagccggcccgggcccccgccagcctccctcctcgcgtccctcggtgtcctccgcgggccggcgcgatgcggctgggcccgaggaccgcggcgttggggctgctgctgctgtgcgccgccgcggccggcgccggcaaggccgaggagctgcactacccgctgggcgagcgccgcagcgactacgaccgcgaggcgctgctgggcgtccaggaagatgtggatgaatatgttaaactcggccacgaagagcagcaaaaaagactgcaggcgatcataaagaaaatcgacttggactcagatggctttctcactgaaagtgaactcagttcatggattcagatgtcttttaagcattatgctatgcaagaagcaaaacaacagtttgttgaatatgataaaaacagtgatgatactgtgacttgggatgaatataacattcagatgtatgatcgtgtgattgactttgatgagaacactgctctggatgatgcagaagaggagtcctttaggaagcttcacttaaaggacaagaagcgatttgaaaaagctaaccaggattcaggtcccggtttgagtcttgaagaatttattgcttttgagcatcctgaagaagttgattatatgacggaatttgtcattcaagaagctttagaagaacatgacaaaaatggtgatggatttgttagtttggaagaatttcttggtgattacaggtgggatccaactgcaaatgaagatccagaatggatacttgttgagaaagacagattcgtgaatgattatgacaaagataacgatggcaggcttgatccccaagagctgttaccttgggtagtacctaataatcagggcattgcacaagaggaggcgcttcatctaattgatgaaatggatttgaatggtgacaaaagctctctgaagaagagattctggaaaacccggacttgtttctcaccagtgaagccacagattatggcagacagctccatgatgactatttctatcatgatgagctttaatctctgagcctgtctcagtagagtactggctccttttataatttgttaccagctttacttttgtgataaaatattgatgttgtattttacactcttaagtcttaaccacagtcagaattatcttaatgtagattataattttggtcttttaggaaaaaaaaacaaaaatctgatatttatttcaaaatgtattgaagcaacaaaatattaatattgtgccatatgacaacaaagtctttcctaaatactccatctgtttagtactgtattgtggaatatttgagttctatttccatacttgaaaacatggaggattttagagatgcctgaacaatattatttaagtagtatgtgaccgagctataaatttttgtttttgttctaagtagatttaatttgggaactgacaggacaatgtttttaggtttagcattttgtttaaaaacctttaaagaaacctttagaaggacttagacctcacatattaatgttgagaagttctgcttaattttaaaatggtttctataaagggttttattgtatgaaatagaactttatatttttgcatatgtatagatagtaattatatttaatgtataactatagcattatggtgagtggaatttgacattgtccaaacctttttcatttttgagtgattaaaaatgaaatgtcctttgtactttaaaaggaggaaaaaaaa

SEQ ID NO: 435352 - DNA, 1182 bp, Homo sapiens
agcggaccgcattggtggaccggcccccagcccgtccatgggcgttgtggccgccaccgcaggttccgcctcccgttccctccgccctcaacgtacgtcgcaccgcctctctgtagccgcccgcggagcatcgcagccggcccgggcccccgccagcctccctcctcgcgtccctcggtgtcctccgcgggccggcgcgatgcggctgggcccgaggaccgcggcgttggggctgctgctgctgtgcgccgccgcggccggcgccggcaaggccgaggagctgcactacccgctgggcgagcgccgcagcgactacgaccgcgaggcgctgctgggcgtccaggaagatgtggatgaatatgttaaactcggccacgaagagcagcaaaaaagactgcaggcgatcataaagaaaatcgacttggactcagatggctttctcactgaaagtgaactcagttcatggattcagatgtcttttaagcattatgctatgcaagaagcaaaacaacagtttgttgaatatgataaaaacagtgatgatactgtgacttgggatgaatataacattcagatgtatgatcgtgtgattgactttgatgagaacactgctctggatgatgcagaagaggagtcctttaggaagcttcacttaaaggacaagaagcgatttgaaaaagctaaccaggattcaggtcccggtttgagtcttgaagaatttattgcttttgagcatcctgaagaagttgattatatgacggaatttgtcattcaagaagctttagaagaacatgacaaaaatggtgatggatttgttagtttggaagaatttcttggtgattacaggtgggatccaagtaagtcacctgggagaatgtgaaaagagaaaaggaattgaagaaagacattgaaagacagccttgctcattgaaagctctcttcaacaggaaatgtaatgaggatctgtgtctgatcctacttgtttcgttaactgtaatacaagttcaacaaatggatttatagcttatctgagaacgctgtcttgcttacttttacttccgtgtctagagtcaaacatttttctttcttttcaaacaaatctaattttattatcagtttaaatggggaaggaagtaaggtagatatttttaaactgataataaaattagatttgtttgaaaa

SEQ ID NO: 435353 - DNA, 1492 bp, Homo sapiens
agtagtgttaagtacattcacagtgttgtgcagctaatccccagaactcttttcatcttggaaagctgaaactctgtacctgttaaacaacaccccattccctccttggtaaatgctttctaagtgtgctatttatttagaatcatattggccgcttgaactctgtaagccaccactaactctaagttggttaattctctgctaataactacagcatcaatgtggaggtttggggctccatcctcagagccagtctgcttagcttcacatttagctccagcacttcacggttgtgtaactttggcttcacttaaaggacaagaagcgatttgaaaaagctaaccaggattcaggtcccggtttgagtcttgaagaatttattgcttttgagcatcctgaagaagttgattatatgacggaatttgtcattcaagaagctttagaagaacatgacaaaaatggtgatggatttgttagtttggaagaatttcttggtgattacaggtgggatccaactgcaaatgaagatccagaatggatacttgttgagaaagacagattcgtgaatgattatgacaaagataacgatggcaggcttgatccccaagagctgttaccttgggtagtacctaataatcagggcattgcacaagaggaggcgcttcatctaattgatgaaatggatttgaatggtgacaaaagctctctgaagaagagattctggaaaacccggacttgtttctcaccagtgaagccacagattatggcagacagctccatgatgactatttctatcatgatgagctttaatctctgagcctgtctcagtagagtactggctccttttataatttgttaccagctttacttttgtgataaaatattgatgttgtattttacactcttaagtcttaaccacagtcagaattatcttaatgtagattataattttggtcttttaggaaaaaaaaacaaaaatctgatatttatttcaaaatgtattgaagcaacaaaatattaatattgtgccatatgacaacaaagtctttcctaaatactccatctgtttagtactgtattgtggaatatttgagttctatttccatacttgaaaacatggaggattttagagatgcctgaacaatattatttaagtagtatgtgaccgagctataaatttttgtttttgttctaagtagatttaatttgggaactgacaggacaatgtttttaggtttagcattttgtttaaaaacctttaaagaaacctttagaaggacttagacctcacatattaatgttgagaagttctgcttaattttaaaatggtttctataaagggttttattgtatgaaatagaactttatatttttgcatatgtatagatagtaattatatttaatgtataactatagcattatggtgagtggaatttgacattgtccaaacctttttcatttttgagtgattaaaaatgaaatgtcctttgta

SEQ ID NO: 435354 - DNA, 764 bp, Homo sapiens
  misc_feature (153)..(154): n is a, c, g, or t
ccctaagctgtattcccattgcccctagtcatccactccctaccatggtcggggcttccagcgtgcgcatggcccgctgcggggcagggtggccggcgcggcgccggggcgggctcccggagccgtgtgttaggcccgcggttcggatctctnngacacgcgggcccctgcgctaccgtggtgagactcacggccctgagcggatcggtaccctcagctttcccaaacgctccagaagttagtctttgacccacaggcttacaggaccatctcggctggcgcatcgccccctgcccctaattccttaggccttaccaccaagctttttccacacatgccatccagactgaggaagacccggaaacttaggggccacgtgagccacggccacggccgcataggcaagcaccggaagcaccccggcggccgcggtaatgctggtggtctgcatcaccaccggatcaacttcgacaaataccacccaggctactttgggaaagttggtatgaagcattaccacttaaagaggaaccagagcttctgcccaactgtcaaccttgacaaattgtggactttggtcagtgaacagacacgggtgaatgctgctaaaaacaagactggggctgctcccatcattgatgtggtgcgatctggctactacaaagttctgggaaagggaaagctcccaaagcaggctgtcaccgtgcaggccaaattcttcagcagaagagctgaggagaagattaagagtgttgggggggcct

SEQ ID NO: 435355 - DNA, 458 bp, Homo sapiens
agttttttttttcgtctgggctgccaacatgccatccagactgaggaagacccggaaacttaggggccacgtgagccacggccacggccgcataggcaagcaccggaagcaccccggcggccgcggtaatgctggtggtctgcatcaccaccggatcaacttcgacaaataccacccaggctactttgggaaagttggtatgaagcattaccacttaaagaggaaccagagcttctgcccaactgtcaaccttgacaaattgtggactttggtcagtgaacagacacgggtgaatgctgctaaaaacaagactggggctgctcccatcattgatgtggtgcgatctggctactacaaagttctgggaaagggaaagctcccaaagcaggctgtcaccgtgcaggccaaattcttcagcagaagagctgaggagaagattaagagtgttgggggggcct

SEQ ID NO: 435356 - DNA, 420 bp, Homo sapiens
gacatatcaggctacattgggaaagttggtatgaagcattaccacttaaagaggaaccagagcttctgcccaactgtcaaccttgacaaattgtggacttggtcggtgaacagacacgggcaacttcgacggaccattcaggctactttgggaaagttggtatgaagcattaccacttaaagaggaaccagagcttctgcccaactgtcaaccttgacaaattgtggactttggtcagtgaacagacacgggtgaatgctgctaaaaacaagactggggctgctcccatcattgatgtggtgcgatctggctactacaaagttctgggaaagggaaagctcccaaagcaggctgtcaccgtgcaggccaaattcttcagcagaagagctgaggagaagattaagagtgttgggggggcct

SEQ ID NO: 435357 - DNA, 2783 bp, Homo sapiens
caggcgcgttaagctggttgggacccgggaaggcctccctcttaaggtctttcccacacctctgcaccttgttacctgactttcggcttcaggatccgcagcgtgcacccgcgttccatctgtcttctgagactttgcccttctccaggaagagcactcaggagaccaggaaaatggccacagggctcctgagagccaaaaaagaggcgttcgtggcattcagggatgtggctgtgtacttcacccaggaggagtggaggttgttgagccctgctcagaggaccctgcacagggaggtgatgctggagacttataaccatctggtctcactggaaattccatcttctaaaccaaaactcattgctcagctggagcgaggggaagcgccctggagagaggagagaaaatgtccactggacctctgtccagaatcgaagccagaaattcaacttagtccctcctgccctctgattttctccagtcagcaagctctcagccaacatgtgtggctgagtcatctctctcagctgttttcaagtttatgggcaggaaatcctctccacctgggaaaacactatccagaagatcagaaacaacagcaggatccattctgctttagtggcaaagcagaatggattcaagagggagaagactccagactcctgtttgggagagtaagcaaaaatggcacttcaaaggcactttccagcccacctgaagaacaacagccagcacagtccaaggaagacaacacagtggtggatatagggtccagccctgaacggagggcagatctagaggaaacagacaaagtattgcatggtttagaagtctcaggatttggagaaatcaaatatgaagagtttgggccaggctttatcaaggagtcaaacctccttagcctccagaagacacaaactggggagacaccttacatgtacactgagtggggagacagctttggcagtatgtcagtcctcatcaaaaacccaaggacacactctgggggaaagccttatgtgtgcagggaatgtgggcgaggctttacgtggaagtcaaacctgatcacacatcagaggacacactcaggggagaaaccttatgtgtgcaaggattgtggacgaggctttacttggaagtcgaacctctttacacatcagcggacacactcagggctcaagccttatgtgtgcaaggaatgtgggcagagctttagcctgaagtcaaacctcattacccaccagagggcgcacactggggagaagccttatgtttgcagggaatgtgggcgtggctttcgccagcattcacacctggtcagacacaagaggacacattcaggagagaagccttacatttgcagggagtgtgagcaaggctttagccagaagtcacacctcatcagacacttaaggacacacacaggagagaagccttatgtatgcacagaatgtgggcgtcactttagctggaaatcaaacctcaaaacacaccagaggacacactcaggggttaaaccttatgtctgcctggagtgcgggcagtgctttagcctgaagtcaaaccttaacaaacaccagaggtcacacacgggggagaagccatttgtatgtacggagtgtgggcgaggctttacccggaaatcaaccctgagcacgcaccagaggacacactcaggggagaagccatttgtatgtgctgagtgtggacgaggctttaatgataagtccaccctcatttcacaccagaggacacattcaggggaaaagccttttatgtgcagggagtgtggcagaaggtttcggcagaagcctaacctgtttaggcacaagagggcacactcaggtgcctttgtgtgcagggagtgtgggcaaggcttttgtgctaagttaactctcattaaacaccagagagcacacgcaggggggaagcctcatgtgtgcagggagtgtgggcaaggctttagccggcagtcacacctcattagacaccagaggacacattcaggagagaagccttatatttgcagaaagtgtggacggggctttagtcggaagtccaaccttatcagacatcagaggacacactcaggatagaaactttatgtgtatagggaatgtggtacagcctttagccaggagtcatacttcatcagacaccagaggacacacacagtgctgtggctttttcagccattgctagataccaaagtggagacattctgtgtgtgattatgcatgagactgtactggtaagacttgtatctccatccacctgaaggagaattgctggctcattttcaggagccctgcccttcctcactgtggatggtgggttgtggaaacccggtcaggtaatgatagtggcaggaggcagtcaaatgcccaggcagataggggtgggtacctggtgaaacccaaccttaaagctgaagacagtcccggctaaatcctcatactgaattgagaacctgtcttcccatttggtgtgctttcctccgattgatcccaacccttcacctattttacgtatacctgccctttcctaattggtttttacactgctgtgcccaccttttgagtggtgcctttgcatacttacaaatcagtcaacgtgtattcccctattctgagcccataaaagacccagactcagctgcagtgaggagagaaatcaccctgctgtgggggttggggaccactccctgcatcccctctccactgagagctgttcttttgctcaataaaattcttttctacccatcctcacccttcaaatgtcag

SEQ ID NO: 435358 - DNA, 558 bp, Homo sapiens
tctgtctctactaaaaatacaaaaattagctgggcgtagtcttggacgcctgtaatcccagctactcgggaggctaaggcaggagaatcgcttgaaccctggaggcggaggttgcagtgagctgagatcgcaccactgcactccagcttgggtgaaagaaagactccgtttaaaaaaaaaaacaaaaaaacaaaagaaagtgtaatgcatgaagtgaaatgaaaaatagatgctgggaaggatgtctaactgggagatagcttgtgatgtaaatatgtaaatatattatgaatgaccagtgggcaaggcaaaattgcctacacagccctacctatggcccctctgaaaatgttctttcttcagcagaatcgaagccagaaattcaacttagtccctcctgccctctgattttctccagtcagcaagctctcagccaacatgtgtggctgagtcatctctctcagctgttttcaagtttatgggcaggaaatcctctccacctgggaaaacactatccaaaacaagaccacacgccaaacaagaagggtgctctagata

SEQ ID NO: 435359 - DNA, 615 bp, Homo sapiens
  misc_feature (58)..(58): n is a, c, g, or t
gcaggctgggtctgcagatggcgtccgagtgtacagtggccagtgtgattccgcagtnttgggctgttcggccaagcgcccaccggacgtgggacgctggagggtcagcagcgtggagtcctggccttcagcgtccgcggctgggaaatcggccatcgccacggcgggaactaggactggctgcgtcccggcccttccccatccgtccaccggactcgtgggcgcccgcactgactgtgatgtagtttcctgacctctgacacgtattgtctcaagattaaaggaatcaggagcttcttttgctgttcttctgttttggatgcattggaaggtccagatttggaacaagtctctctagagattgaacagagctgcgcctggaacccgccgcagggaggagacctgaagaccagaggaaacacagcaactggcaagcagatgaattaactcccccaagcttctagctgtgtttctactcagtgggagagatttggagtgaatcatgagggtcaaccacacagtgtctacaatgctccctacatgcatggttcacagacaaaccatgagttgttccggggctggaggaataacggttgtattaaatgtgttaaagta

SEQ ID NO: 435360 - DNA, 3336 bp, Homo sapiens
ctctacagtgtcagcctcatccaggctggttcccctcaaagccataggatgtctgccaatagcaactttgtttaattctcacaatggccccataaggtaagtactattataatatcgattttataggaaattgagacacagatattaagatatcaacgcaaagtcataggggagggaggagagaggggactgtaatttgaacacagtttgtctccagagtttgtgcttttagccactgagtagttgttaaactttagtgtgcatcagaattacttggaagccttgttcaaacattgctgggctccccccgcaatttctgattcagtagccctaggatggggactgagaatttttatttctaacaagttcccaggggatgctggtgctgcaggttcagggaacacacattgagccagtgcactaagccctgctgcctcttttgggtaatctgtgcccatgtttctgagcatcaggaaaagtgcttaattcctgtgactccatcttacaaatgacgaagtcttttgctagaatcctacggtaaggcttcttgtggcctgttggttaccattcatttttcatatatttatttttcagctggcaagcagatgaattaactcccccaagcttctagctgtgtttctactcagtgggagagatttggagtgaatcatgagggtcaaccacacagtgtctacaatgctccctacatgcatggttcacagacaaaccatgagttgttccggggctggaggaataacggcgttcgtggcattcagggatgtggctgtgtacttcacccaggaggagtggaggttgttgagccctgctcagaggaccctgcacagggaggtgatgctggagacttataaccatctggtctcactggaaattccatcttctaaaccaaaactcattgctcagctggagcgaggggaagcgccctggagagaggagagaaaatgtccactggacctctgtccagaatcgaagccagaaattcaacttagtccctcctgccctctgattttctccagtcagcaagctctcagccaacatgtgtggctgagtcatctctctcagctgttttcaagtttatgggcaggaaatcctctccacctgggaaaacactatccagaagatcagaaacaacagcaggatccattctgctttagtggcaaagcagaatggattcaagagggagaagactccagactcctgtttgggagagtaagcaaaaatggcacttcaaaggcactttccagcccacctgaagaacaacagccagcacagtccaaggaagacaacacagtggtggatatagggtccagccctgaacggagggcagatctagaggaaacagacaaagtattgcatggtttagaagtctcaggatttggagaaatcaaatatgaagagtttgggccaggctttatcaaggagtcaaacctccttagcctccagaagacacaaactggggagacaccttacatgtacactgagtggggagacagctttggcagtatgtcagtcctcatcaaaaacccaaggacacactctgggggaaagccttatgtgtgcagggaatgtgggcgaggctttacgtggaagtcaaacctgatcacacatcagaggacacactcaggggagaaaccttatgtgtgcaaggattgtggacgaggctttacttggaagtcgaacctctttacacatcagcggacacactcagggctcaagccttatgtgtgcaaggaatgtgggcagagctttagcctgaagtcaaacctcattacccaccagagggcgcacactggggagaagccttatgtttgcagggaatgtgggcgtggctttcgccagcattcacacctggtcagacacaagaggacacattcaggagagaagccttacatttgcagggagtgtgagcaaggctttagccagaagtcacacctcatcagacacttaaggacacacacaggagagaagccttatgtatgcacagaatgtgggcgtcactttagctggaaatcaaacctcaaaacacaccagaggacacactcaggggttaaaccttatgtctgcctggagtgcgggcagtgctttagcctgaagtcaaaccttaacaaacaccagaggtcacacacgggggagaagccatttgtatgtacggagtgtgggcgaggctttacccggaaatcaaccctgagcacgcaccagaggacacactcaggggagaagccatttgtatgtgctgagtgtggacgaggctttaatgataagtccaccctcatttcacaccagaggacacattcaggggaaaagccttttatgtgcagggagtgtggcagaaggtttcggcagaagcctaacctgtttaggcacaagagggcacactcaggtgcctttgtgtgcagggagtgtgggcaaggcttttgtgctaagttaactctcattaaacaccagagagcacacgcaggggggaagcctcatgtgtgcagggagtgtgggcaaggctttagccggcagtcacacctcattagacaccagaggacacattcaggagagaagccttatatttgcagaaagtgtggacggggctttagtcggaagtccaaccttatcagacatcagaggacacactcaggatagaaactttatgtgtatagggaatgtggtacagcctttagccaggagtcatacttcatcagacaccagaggacacacacagtgctgtggctttttcagccattgctagataccaaagtggagacattctgtgtgtgattatgcatgagactgtactggtaagacttgtatctccatccacctgaaggagaattgctggctcattttcaggagccctgcccttcctcactgtggatggtgggttgtggaaacccggtcaggtaatgatagtggcaggaggcagtcaaatgcccaggcagataggggtgggtacctggtgaaacccaaccttaaagctgaagacagtcccggctaaatcctcatactgaattgagaacctgtcttcccatttggtgtgctttcctccgattgatcccaacccttcacctattttacgtatacctgccctttcctaattggtttttacactgctgtgcccaccttttgagtggtgcctttgcatacttacaaatcagtcaacgtgtattcccctattctgagcccataaaagacccagactcagctgcagtgaggagagaaatcaccctgctgtgggggttggggaccactccctgcatcccctctccactgagagctgttcttttgctcaataaaattcttttctacccatcctcacccttcaaatgtcag

SEQ ID NO: 435361 - DNA, 2948 bp, Homo sapiens
caggcgcgttaagctggttgggacccgggaaggcctccctcttaaggtctttcccacacctctgcaccttgttacctgactttcggcttcaggatccgcagcgtgcacccgcgttccatctgtcttctgagactttgcccttctccaggaagagcactcaggagaccaggaaaatggccacagggctcctgagagccaaaaaagagctggcaagcagatgaattaactcccccaagcttctagctgtgtttctactcagtgggagagatttggagtgaatcatgagggtcaaccacacagtgtctacaatgctccctacatgcatggttcacagacaaaccatgagttgttccggggctggaggaataacggcgttcgtggcattcagggatgtggctgtgtacttcacccaggaggagtggaggttgttgagccctgctcagaggaccctgcacagggaggtgatgctggagacttataaccatctggtctcactggaaattccatcttctaaaccaaaactcattgctcagctggagcgaggggaagcgccctggagagaggagagaaaatgtccactggacctctgtccagaatcgaagccagaaattcaacttagtccctcctgccctctgattttctccagtcagcaagctctcagccaacatgtgtggctgagtcatctctctcagctgttttcaagtttatgggcaggaaatcctctccacctgggaaaacactatccagaagatcagaaacaacagcaggatccattctgctttagtggcaaagcagaatggattcaagagggagaagactccagactcctgtttgggagagtaagcaaaaatggcacttcaaaggcactttccagcccacctgaagaacaacagccagcacagtccaaggaagacaacacagtggtggatatagggtccagccctgaacggagggcagatctagaggaaacagacaaagtattgcatggtttagaagtctcaggatttggagaaatcaaatatgaagagtttgggccaggctttatcaaggagtcaaacctccttagcctccagaagacacaaactggggagacaccttacatgtacactgagtggggagacagctttggcagtatgtcagtcctcatcaaaaacccaaggacacactctgggggaaagccttatgtgtgcagggaatgtgggcgaggctttacgtggaagtcaaacctgatcacacatcagaggacacactcaggggagaaaccttatgtgtgcaaggattgtggacgaggctttacttggaagtcgaacctctttacacatcagcggacacactcagggctcaagccttatgtgtgcaaggaatgtgggcagagctttagcctgaagtcaaacctcattacccaccagagggcgcacactggggagaagccttatgtttgcagggaatgtgggcgtggctttcgccagcattcacacctggtcagacacaagaggacacattcaggagagaagccttacatttgcagggagtgtgagcaaggctttagccagaagtcacacctcatcagacacttaaggacacacacaggagagaagccttatgtatgcacagaatgtgggcgtcactttagctggaaatcaaacctcaaaacacaccagaggacacactcaggggttaaaccttatgtctgcctggagtgcgggcagtgctttagcctgaagtcaaaccttaacaaacaccagaggtcacacacgggggagaagccatttgtatgtacggagtgtgggcgaggctttacccggaaatcaaccctgagcacgcaccagaggacacactcaggggagaagccatttgtatgtgctgagtgtggacgaggctttaatgataagtccaccctcatttcacaccagaggacacattcaggggaaaagccttttatgtgcagggagtgtggcagaaggtttcggcagaagcctaacctgtttaggcacaagagggcacactcaggtgcctttgtgtgcagggagtgtgggcaaggcttttgtgctaagttaactctcattaaacaccagagagcacacgcaggggggaagcctcatgtgtgcagggagtgtgggcaaggctttagccggcagtcacacctcattagacaccagaggacacattcaggagagaagccttatatttgcagaaagtgtggacggggctttagtcggaagtccaaccttatcagacatcagaggacacactcaggatagaaactttatgtgtatagggaatgtggtacagcctttagccaggagtcatacttcatcagacaccagaggacacacacagtgctgtggctttttcagccattgctagataccaaagtggagacattctgtgtgtgattatgcatgagactgtactggtaagacttgtatctccatccacctgaaggagaattgctggctcattttcaggagccctgcccttcctcactgtggatggtgggttgtggaaacccggtcaggtaatgatagtggcaggaggcagtcaaatgcccaggcagataggggtgggtacctggtgaaacccaaccttaaagctgaagacagtcccggctaaatcctcatactgaattgagaacctgtcttcccatttggtgtgctttcctccgattgatcccaacccttcacctattttacgtatacctgccctttcctaattggtttttacactgctgtgcccaccttttgagtggtgcctttgcatacttacaaatcagtcaacgtgtattcccctattctgagcccataaaagacccagactcagctgcagtgaggagagaaatcaccctgctgtgggggttggggaccactccctgcatcccctctccactgagagctgttcttttgctcaataaaattcttttctacccatcctcacccttcaaatgtcag

SEQ ID NO: 435362 - DNA, 2886 bp, Homo sapiens
gagacagagttttgctcttgttgcccaggctggagtgcaatggcgcaatctcggcttaccgcaagtaactgggattacaggcatgcgccaccacacctgactaattttgtatttttagtagagacggggtttctccatattggtcaggctgatctcaaactctcgacctcaggtgatccgcccaccttggcctcccaaagtgctgggattacaggcatgaaccaccgggcctggccttgacctctcattctaaagtgtgggagggaaagacaggctcctgggtgagcagaggtgtgttttgtgttaaaggcgttcgtggcattcagggatgtggctgtgtacttcacccaggaggagtggaggttgttgagccctgctcagaggaccctgcacagggaggtgatgctggagacttataaccatctggtctcactggaaattccatcttctaaaccaaaactcattgctcagctggagcgaggggaagcgccctggagagaggagagaaaatgtccactggacctctgtccagaatcgaagccagaaattcaacttagtccctcctgccctctgattttctccagtcagcaagctctcagccaacatgtgtggctgagtcatctctctcagctgttttcaagtttatgggcaggaaatcctctccacctgggaaaacactatccagaagatcagaaacaacagcaggatccattctgctttagtggcaaagcagaatggattcaagagggagaagactccagactcctgtttgggagagtaagcaaaaatggcacttcaaaggcactttccagcccacctgaagaacaacagccagcacagtccaaggaagacaacacagtggtggatatagggtccagccctgaacggagggcagatctagaggaaacagacaaagtattgcatggtttagaagtctcaggatttggagaaatcaaatatgaagagtttgggccaggctttatcaaggagtcaaacctccttagcctccagaagacacaaactggggagacaccttacatgtacactgagtggggagacagctttggcagtatgtcagtcctcatcaaaaacccaaggacacactctgggggaaagccttatgtgtgcagggaatgtgggcgaggctttacgtggaagtcaaacctgatcacacatcagaggacacactcaggggagaaaccttatgtgtgcaaggattgtggacgaggctttacttggaagtcgaacctctttacacatcagcggacacactcagggctcaagccttatgtgtgcaaggaatgtgggcagagctttagcctgaagtcaaacctcattacccaccagagggcgcacactggggagaagccttatgtttgcagggaatgtgggcgtggctttcgccagcattcacacctggtcagacacaagaggacacattcaggagagaagccttacatttgcagggagtgtgagcaaggctttagccagaagtcacacctcatcagacacttaaggacacacacaggagagaagccttatgtatgcacagaatgtgggcgtcactttagctggaaatcaaacctcaaaacacaccagaggacacactcaggggttaaaccttatgtctgcctggagtgcgggcagtgctttagcctgaagtcaaaccttaacaaacaccagaggtcacacacgggggagaagccatttgtatgtacggagtgtgggcgaggctttacccggaaatcaaccctgagcacgcaccagaggacacactcaggggagaagccatttgtatgtgctgagtgtggacgaggctttaatgataagtccaccctcatttcacaccagaggacacattcaggggaaaagccttttatgtgcagggagtgtggcagaaggtttcggcagaagcctaacctgtttaggcacaagagggcacactcaggtgcctttgtgtgcagggagtgtgggcaaggcttttgtgctaagttaactctcattaaacaccagagagcacacgcaggggggaagcctcatgtgtgcagggagtgtgggcaaggctttagccggcagtcacacctcattagacaccagaggacacattcaggagagaagccttatatttgcagaaagtgtggacggggctttagtcggaagtccaaccttatcagacatcagaggacacactcaggatagaaactttatgtgtatagggaatgtggtacagcctttagccaggagtcatacttcatcagacaccagaggacacacacagtgctgtggctttttcagccattgctagataccaaagtggagacattctgtgtgtgattatgcatgagactgtactggtaagacttgtatctccatccacctgaaggagaattgctggctcattttcaggagccctgcccttcctcactgtggatggtgggttgtggaaacccggtcaggtaatgatagtggcaggaggcagtcaaatgcccaggcagataggggtgggtacctggtgaaacccaaccttaaagctgaagacagtcccggctaaatcctcatactgaattgagaacctgtcttcccatttggtgtgctttcctccgattgatcccaacccttcacctattttacgtatacctgccctttcctaattggtttttacactgctgtgcccaccttttgagtggtgcctttgcatacttacaaatcagtcaacgtgtattcccctattctgagcccataaaagacccagactcagctgcagtgaggagagaaatcaccctgctgtgggggttggggaccactccctgcatcccctctccactgagagctgttcttttgctcaataaaattcttttctacccatcctcacccttcaaatgtcag

SEQ ID NO: 435363 - DNA, 3120 bp, Homo sapiens
caggcgcgttaagctggttgggacccgggaaggcctccctcttaaggtctttcccacacctctgcaccttgttacctgactttcggcttcaggatccgcagcgtgcacccgcgttccgtgagtgccctataggcagtcagcatgcccctctgcgtgtccctgtgttacggggacgccggctgggagccgcagagctatctcagaactagggcgctctcctttgggcacctccaggccattttcctttcattcgagcccacagggttagagataaaccctcactccgttgcttggggacaagggcttcactccctgtcccgagcttgcggctgagcttgagggtggctgggtcatcctggccccccactggatgggaattggctgctctggtgatttctgtgacatcccagaccccaactgtggggctctggagcggactgcgcttcacttcgtggggagggtgtttccacctaggccactcttatttctcttcacatccccagatctgtcttctgagactttgcccttctccaggaagagcactcaggagaccaggaaaatggccacagggctcctgagagccaaaaaagagaaattccatcttctaaaccaaaactcattgctcagctggagcgaggggaagcgccctggagagaggagagaaaatgtccactggacctctgtccagggggaatggtttcagctttcgcccattcagtatgaagttggctgtaggtctgtcacagataactcttcttattttgagaatcgaagccagaaattcaacttagtccctcctgccctctgattttctccagtcagcaagctctcagccaacatgtgtggctgagtcatctctctcagctgttttcaagtttatgggcaggaaatcctctccacctgggaaaacactatccagaagatcagaaacaacagcaggatccattctgctttagtggcaaagcagaatggattcaagagggagaagactccagactcctgtttgggagagtaagcaaaaatggcacttcaaaggcactttccagcccacctgaagaacaacagccagcacagtccaaggaagacaacacagtggtggatatagggtccagccctgaacggagggcagatctagaggaaacagacaaagtattgcatggtttagaagtctcaggatttggagaaatcaaatatgaagagtttgggccaggctttatcaaggagtcaaacctccttagcctccagaagacacaaactggggagacaccttacatgtacactgagtggggagacagctttggcagtatgtcagtcctcatcaaaaacccaaggacacactctgggggaaagccttatgtgtgcagggaatgtgggcgaggctttacgtggaagtcaaacctgatcacacatcagaggacacactcaggggagaaaccttatgtgtgcaaggattgtggacgaggctttacttggaagtcgaacctctttacacatcagcggacacactcagggctcaagccttatgtgtgcaaggaatgtgggcagagctttagcctgaagtcaaacctcattacccaccagagggcgcacactggggagaagccttatgtttgcagggaatgtgggcgtggctttcgccagcattcacacctggtcagacacaagaggacacattcaggagagaagccttacatttgcagggagtgtgagcaaggctttagccagaagtcacacctcatcagacacttaaggacacacacaggagagaagccttatgtatgcacagaatgtgggcgtcactttagctggaaatcaaacctcaaaacacaccagaggacacactcaggggttaaaccttatgtctgcctggagtgcgggcagtgctttagcctgaagtcaaaccttaacaaacaccagaggtcacacacgggggagaagccatttgtatgtacggagtgtgggcgaggctttacccggaaatcaaccctgagcacgcaccagaggacacactcaggggagaagccatttgtatgtgctgagtgtggacgaggctttaatgataagtccaccctcatttcacaccagaggacacattcaggggaaaagccttttatgtgcagggagtgtggcagaaggtttcggcagaagcctaacctgtttaggcacaagagggcacactcaggtgcctttgtgtgcagggagtgtgggcaaggcttttgtgctaagttaactctcattaaacaccagagagcacacgcaggggggaagcctcatgtgtgcagggagtgtgggcaaggctttagccggcagtcacacctcattagacaccagaggacacattcaggagagaagccttatatttgcagaaagtgtggacggggctttagtcggaagtccaaccttatcagacatcagaggacacactcaggatagaaactttatgtgtatagggaatgtggtacagcctttagccaggagtcatacttcatcagacaccagaggacacacacagtgctgtggctttttcagccattgctagataccaaagtggagacattctgtgtgtgattatgcatgagactgtactggtaagacttgtatctccatccacctgaaggagaattgctggctcattttcaggagccctgcccttcctcactgtggatggtgggttgtggaaacccggtcaggtaatgatagtggcaggaggcagtcaaatgcccaggcagataggggtgggtacctggtgaaacccaaccttaaagctgaagacagtcccggctaaatcctcatactgaattgagaacctgtcttcccatttggtgtgctttcctccgattgatcccaacccttcacctattttacgtatacctgccctttcctaattggtttttacactgctgtgcccaccttttgagtggtgcctttgcatacttacaaatcagtcaacgtgtattcccctattctgagcccataaaagacccagactcagctgcagtgaggagagaaatcaccctgctgtgggggttggggaccactccctgcatcccctctccactgagagctgttcttttgctcaataaaattcttttctacccatcctcacccttcaaatgtcag

SEQ ID NO: 435364 - DNA, 2720 bp, Homo sapiens
tctgtctctactaaaaatacaaaaattagctgggcgtagtcttggacgcctgtaatcccagctactcgggaggctaaggcaggagaatcgcttgaaccctggaggcggaggttgcagtgagctgagatcgcaccactgcactccagcttgggtgaaagaaagactccgtttaaaaaaaaaaacaaaaaaacaaaagaaagtgtaatgcatgaagtgaaatgaaaaatagatgctgggaaggatgtctaactgggagatagcttgtgatgtaaatatgtaaatatattatgaatgaccagtgggcaaggcaaaattgcctacacagccctacctatggcccctctgaaaatgttctttcttcagcagaatcgaagccagaaattcaacttagtccctcctgccctctgattttctccagtcagcaagctctcagccaacatgtgtggctgagtcatctctctcagctgttttcaagtttatgggcaggaaatcctctccacctgggaaaacactatccagaagatcagaaacaacagcaggatccattctgctttagtggcaaagcagaatggattcaagagggagaagactccagactcctgtttgggagagtaagcaaaaatggcacttcaaaggcactttccagcccacctgaagaacaacagccagcacagtccaaggaagacaacacagtggtggatatagggtccagccctgaacggagggcagatctagaggaaacagacaaagtattgcatggtttagaagtctcaggatttggagaaatcaaatatgaagagtttgggccaggctttatcaaggagtcaaacctccttagcctccagaagacacaaactggggagacaccttacatgtacactgagtggggagacagctttggcagtatgtcagtcctcatcaaaaacccaaggacacactctgggggaaagccttatgtgtgcagggaatgtgggcgaggctttacgtggaagtcaaacctgatcacacatcagaggacacactcaggggagaaaccttatgtgtgcaaggattgtggacgaggctttacttggaagtcgaacctctttacacatcagcggacacactcagggctcaagccttatgtgtgcaaggaatgtgggcagagctttagcctgaagtcaaacctcattacccaccagagggcgcacactggggagaagccttatgtttgcagggaatgtgggcgtggctttcgccagcattcacacctggtcagacacaagaggacacattcaggagagaagccttacatttgcagggagtgtgagcaaggctttagccagaagtcacacctcatcagacacttaaggacacacacaggagagaagccttatgtatgcacagaatgtgggcgtcactttagctggaaatcaaacctcaaaacacaccagaggacacactcaggggttaaaccttatgtctgcctggagtgcgggcagtgctttagcctgaagtcaaaccttaacaaacaccagaggtcacacacgggggagaagccatttgtatgtacggagtgtgggcgaggctttacccggaaatcaaccctgagcacgcaccagaggacacactcaggggagaagccatttgtatgtgctgagtgtggacgaggctttaatgataagtccaccctcatttcacaccagaggacacattcaggggaaaagccttttatgtgcagggagtgtggcagaaggtttcggcagaagcctaacctgtttaggcacaagagggcacactcaggtgcctttgtgtgcagggagtgtgggcaaggcttttgtgctaagttaactctcattaaacaccagagagcacacgcaggggggaagcctcatgtgtgcagggagtgtgggcaaggctttagccggcagtcacacctcattagacaccagaggacacattcaggagagaagccttatatttgcagaaagtgtggacggggctttagtcggaagtccaaccttatcagacatcagaggacacactcaggatagaaactttatgtgtatagggaatgtggtacagcctttagccaggagtcatacttcatcagacaccagaggacacacacagtgctgtggctttttcagccattgctagataccaaagtggagacattctgtgtgtgattatgcatgagactgtactggtaagacttgtatctccatccacctgaaggagaattgctggctcattttcaggagccctgcccttcctcactgtggatggtgggttgtggaaacccggtcaggtaatgatagtggcaggaggcagtcaaatgcccaggcagataggggtgggtacctggtgaaacccaaccttaaagctgaagacagtcccggctaaatcctcatactgaattgagaacctgtcttcccatttggtgtgctttcctccgattgatcccaacccttcacctattttacgtatacctgccctttcctaattggtttttacactgctgtgcccaccttttgagtggtgcctttgcatacttacaaatcagtcaacgtgtattcccctattctgagcccataaaagacccagactcagctgcagtgaggagagaaatcaccctgctgtgggggttggggaccactccctgcatcccctctccactgagagctgttcttttgctcaataaaattcttttctacccatcctcacccttcaaatgtcag

SEQ ID NO: 435365 - DNA, 1742 bp, Homo sapiens
cacaccacctgagtctgtcctctggtgtgttttgaggtttgatttccagctaaagtgacgcccacagttctgtgcatacataaggcttctctcctgtgtgtgtccttaagtgtctgatgaggtgtgacttctggctcaagccttatgtgtgcaaggaatgtgggcagagctttagcctgaagtcaaacctcattacccaccagagggcgcacactggggagaagccttatgtttgcagggaatgtgggcgtggctttcgccagcattcacacctggtcagacacaagaggacacattcaggagagaagccttacatttgcagggagtgtgagcaaggctttagccagaagtcacacctcatcagacacttaaggacacacacaggagagaagccttatgtatgcacagaatgtgggcgtcactttagctggaaatcaaacctcaaaacacaccagaggacacactcaggggttaaaccttatgtctgcctggagtgcgggcagtgctttagcctgaagtcaaaccttaacaaacaccagaggtcacacacgggggagaagccatttgtatgtacggagtgtgggcgaggctttacccggaaatcaaccctgagcacgcaccagaggacacactcaggggagaagccatttgtatgtgctgagtgtggacgaggctttaatgataagtccaccctcatttcacaccagaggacacattcaggggaaaagccttttatgtgcagggagtgtggcagaaggtttcggcagaagcctaacctgtttaggcacaagagggcacactcaggtgcctttgtgtgcagggagtgtgggcaaggcttttgtgctaagttaactctcattaaacaccagagagcacacgcaggggggaagcctcatgtgtgcagggagtgtgggcaaggctttagccggcagtcacacctcattagacaccagaggacacattcaggagagaagccttatatttgcagaaagtgtggacggggctttagtcggaagtccaaccttatcagacatcagaggacacactcaggatagaaactttatgtgtatagggaatgtggtacagcctttagccaggagtcatacttcatcagacaccagaggacacacacagtgctgtggctttttcagccattgctagataccaaagtggagacattctgtgtgtgattatgcatgagactgtactggtaagacttgtatctccatccacctgaaggagaattgctggctcattttcaggagccctgcccttcctcactgtggatggtgggttgtggaaacccggtcaggtaatgatagtggcaggaggcagtcaaatgcccaggcagataggggtgggtacctggtgaaacccaaccttaaagctgaagacagtcccggctaaatcctcatactgaattgagaacctgtcttcccatttggtgtgctttcctccgattgatcccaacccttcacctattttacgtatacctgccctttcctaattggtttttacactgctgtgcccaccttttgagtggtgcctttgcatacttacaaatcagtcaacgtgtattcccctattctgagcccataaaagacccagactcagctgcagtgaggagagaaatcaccctgctgtgggggttggggaccactccctgcatcccctctccactgagagctgttcttttgctcaataaaattcttttctacccatcctcacccttcaaatgtcag

SEQ ID NO: 435366 - DNA, 2913 bp, Homo sapiens
  misc_feature (58)..(58): n is a, c, g, or t
gcaggctgggtctgcagatggcgtccgagtgtacagtggccagtgtgattccgcagtnttgggctgttcggccaagcgcccaccggacgtgggacgctggagggtcagcagcgtggagtcctggccttcagcgtccgcggctgggaaatcggccatcgccacggcgggaactaggactggctgcgtcccggcccttccccatccgtccaccggactcgtgggcgcccgcactgactgtgatgtagtttcctgacctctgacacgtattgtctcaagattaaaggaatcaggagcttcttttgctgttcttctgttttggatgcattggaaggtccagatttggaacaagtctctctagagattgaacagagctgcgcctggaacccgccgcagggaggagacctgaagaccagaggaaacacagcaagcgttcgtggcattcagggatgtggctgtgtacttcacccaggaggagtggaggttgttgagccctgctcagaggaccctgcacagggaggtgatgctggagacttataaccatctggtctcactggaaattccatcttctaaaccaaaactcattgctcagctggagcgaggggaagcgccctggagagaggagagaaaatgtccactggacctctgtccagaatcgaagccagaaattcaacttagtccctcctgccctctgattttctccagtcagcaagctctcagccaacatgtgtggctgagtcatctctctcagctgttttcaagtttatgggcaggaaatcctctccacctgggaaaacactatccagaagatcagaaacaacagcaggatccattctgctttagtggcaaagcagaatggattcaagagggagaagactccagactcctgtttgggagagtaagcaaaaatggcacttcaaaggcactttccagcccacctgaagaacaacagccagcacagtccaaggaagacaacacagtggtggatatagggtccagccctgaacggagggcagatctagaggaaacagacaaagtattgcatggtttagaagtctcaggatttggagaaatcaaatatgaagagtttgggccaggctttatcaaggagtcaaacctccttagcctccagaagacacaaactggggagacaccttacatgtacactgagtggggagacagctttggcagtatgtcagtcctcatcaaaaacccaaggacacactctgggggaaagccttatgtgtgcagggaatgtgggcgaggctttacgtggaagtcaaacctgatcacacatcagaggacacactcaggggagaaaccttatgtgtgcaaggattgtggacgaggctttacttggaagtcgaacctctttacacatcagcggacacactcagggctcaagccttatgtgtgcaaggaatgtgggcagagctttagcctgaagtcaaacctcattacccaccagagggcgcacactggggagaagccttatgtttgcagggaatgtgggcgtggctttcgccagcattcacacctggtcagacacaagaggacacattcaggagagaagccttacatttgcagggagtgtgagcaaggctttagccagaagtcacacctcatcagacacttaaggacacacacaggagagaagccttatgtatgcacagaatgtgggcgtcactttagctggaaatcaaacctcaaaacacaccagaggacacactcaggggttaaaccttatgtctgcctggagtgcgggcagtgctttagcctgaagtcaaaccttaacaaacaccagaggtcacacacgggggagaagccatttgtatgtacggagtgtgggcgaggctttacccggaaatcaaccctgagcacgcaccagaggacacactcaggggagaagccatttgtatgtgctgagtgtggacgaggctttaatgataagtccaccctcatttcacaccagaggacacattcaggggaaaagccttttatgtgcagggagtgtggcagaaggtttcggcagaagcctaacctgtttaggcacaagagggcacactcaggtgcctttgtgtgcagggagtgtgggcaaggcttttgtgctaagttaactctcattaaacaccagagagcacacgcaggggggaagcctcatgtgtgcagggagtgtgggcaaggctttagccggcagtcacacctcattagacaccagaggacacattcaggagagaagccttatatttgcagaaagtgtggacggggctttagtcggaagtccaaccttatcagacatcagaggacacactcaggatagaaactttatgtgtatagggaatgtggtacagcctttagccaggagtcatacttcatcagacaccagaggacacacacagtgctgtggctttttcagccattgctagataccaaagtggagacattctgtgtgtgattatgcatgagactgtactggtaagacttgtatctccatccacctgaaggagaattgctggctcattttcaggagccctgcccttcctcactgtggatggtgggttgtggaaacccggtcaggtaatgatagtggcaggaggcagtcaaatgcccaggcagataggggtgggtacctggtgaaacccaaccttaaagctgaagacagtcccggctaaatcctcatactgaattgagaacctgtcttcccatttggtgtgctttcctccgattgatcccaacccttcacctattttacgtatacctgccctttcctaattggtttttacactgctgtgcccaccttttgagtggtgcctttgcatacttacaaatcagtcaacgtgtattcccctattctgagcccataaaagaccacgacacagaccacgacacaatgcaccactgacacatggcacggac

SEQ ID NO: 435367 - DNA, 1263 bp, Homo sapiens
ctctacagtgtcagcctcatccaggctggttcccctcaaagccataggatgtctgccaatagcaactttgtttaattctcacaatggccccataaggtaagtactattataatatcgattttataggaaattgagacacagatattaagatatcaacgcaaagtcataggggagggaggagagaggggactgtaatttgaacacagtttgtctccagagtttgtgcttttagccactgagtagttgttaaactttagtgtgcatcagaattacttggaagccttgttcaaacattgctgggctccccccgcaatttctgattcagtagccctaggatggggactgagaatttttatttctaacaagttcccaggggatgctggtgctgcaggttcagggaacacacattgagccagtgcactaagccctgctgcctcttttgggtaatctgtgcccatgtttctgagcatcaggaaaagtgcttaattcctgtgactccatcttacaaatgacgaagtcttttgctagaatcctacggtaaggcttcttgtggcctgttggttaccattcatttttcatatatttatttttcagctggcaagcagatgaattaactcccccaagcttctagctgtgtttctactcagtgggagagatttggagtgaatcatgagggtcaaccacacagtgtctacaatgctccctacatgcatggttcacagacaaaccatgagttgttccggggctggaggaataacggcgttcgtggcattcagggatgtggctgtgtacttcacccaggaggagtggaggttgttgagccctgctcagaggaccctgcacagggaggtgatgctggagacttataaccatctggtctcactgggtaagaatggcctcccttggcacttaaaatctgccctacagagtattttccactcatcgtgaggaagggctacctgcagagcacctttcccttagagttgagcttgaaaacaatttacttttttcctctgggtaaatctggatttagtagaattgaaagcagacagattgatttattcatgttatggatgacactacatttccaggcctgtttcccaaggcttgtgctctctctttattttgcttcaaacccaggaaatttttcatacaccaagtgttcataatatgccatctttctgactggagtcacctttccttagtcaacccttctacttcagagagagaactattcataggtcttttttatcctctgggttt

SEQ ID NO: 435368 - DNA, 159 bp, Homo sapiens
cgccctggagagaggagagaaaatgtccactggacctctgtccaggtgagtgttgagtgtggggtagacgggataatccacagcttggcagataggaaggaggaggcatctctcagatactgggaagaagctcttcttcaggcctcctaagccaagaga

SEQ ID NO: 435369 - DNA, 779 bp, Homo sapiens
caggcgcgttaagctggttgggacccgggaaggcctccctcttaaggtctttcccacacctctgcaccttgttacctgactttcggcttcaggatccgcagcgtgcacccgcgttccatctgtcttctgagactttgcccttctccaggaagagcactcaggagaccaggaaaatggccacagggctcctgagagccaaaaaagaggcgttcgtggcattcagggatgtggctgtgtacttcacccaggaggagtggaggttgttgagccctgctcagaggaccctgcacagggaggtgatgctggagacttataaccatctggtctcactggaaattccatcttctaaaccaaaactcattgctcagctggagcgaggggaagcgccctggagagaggagagaaaatgtccactggacctctgtccagatggagccttgctctgttgccaggctggaatacagtggtgttatatcggctcactgcaacctctgcctcctgggttcaagcaattcccctgcctcagcctcctgagtagctgggactacaggtgcacaccaccacacctggctaattttttgtattttagtagagacggggtttcaccatgttggccaggatggtctcaatctcctgaccttgtgatccacccgcctcagcctcccaaagtgctgggattacaggcatgagccaccatgcctggcccttttcattgtttattaaccatttgcatatcttttttagtaaaatgcctattcaattctttctttattttaaaa

SEQ ID NO: 435370 - DNA, 3004 bp, Homo sapiens
  misc_feature (58)..(58): n is a, c, g, or t
gcaggctgggtctgcagatggcgtccgagtgtacagtggccagtgtgattccgcagtnttgggctgttcggccaagcgcccaccggacgtgggacgctggagggtcagcagcgtggagtcctggccttcagcgtccgcggctgggaaatcggccatcgccacggcgggaactaggactggctgcgtcccggcccttccccatccgtccaccggactcgtgggcgcccgcactgactgtgatgtagtttcctgacctctgacacgtattgtctcaagattaaaggaatcaggagcttcttttgctgttcttctgttttggatgcattggaaggtccagatttggaacaagtctctctagagattgaacagagctgcgcctggaacccgccgcagggaggagacctgaagaccagaggaaacacagcaagcgttcgtggcattcagggatgtggctgtgtacttcacccaggaggagtggaggttgttgagccctgctcagaggaccctgcacagggaggtgatgctggagacttataaccatctggtctcactggaaattccatcttctaaaccaaaactcattgctcagctggagcgaggggaagcgccctggagagaggagagaaaatgtccactggacctctgtccagaatcgaagccagaaattcaacttagtccctcctgccctctgattttctccagtcagcaagctctcagccaacatgtgtggctgagtcatctctctcagctgttttcaagtttatgggcaggaaatcctctccacctgggaaaacactatccagaagatcagaaacaacagcaggatccattctgctttagtggcaaagcagaatggattcaagagggagaagactccagactcctgtttgggagagtaagcaaaaatggcacttcaaaggcactttccagcccacctgaagaacaacagccagcacagtccaaggaagacaacacagtggtggatatagggtccagccctgaacggagggcagatctagaggaaacagacaaagtattgcatggtttagaagtctcaggatttggagaaatcaaatatgaagagtttgggccaggctttatcaaggagtcaaacctccttagcctccagaagacacaaactggggagacaccttacatgtacactgagtggggagacagctttggcagtatgtcagtcctcatcaaaaacccaaggacacactctgggggaaagccttatgtgtgcagggaatgtgggcgaggctttacgtggaagtcaaacctgatcacacatcagaggacacactcaggggagaaaccttatgtgtgcaaggattgtggacgaggctttacttggaagtcgaacctctttacacatcagcggacacactcagggctcaagccttatgtgtgcaaggaatgtgggcagagctttagcctgaagtcaaacctcattacccaccagagggcgcacactggggagaagccttatgtttgcagggaatgtgggcgtggctttcgccagcattcacacctggtcagacacaagaggacacattcaggagagaagccttacatttgcagggagtgtgagcaaggctttagccagaagtcacacctcatcagacacttaaggacacacacaggagagaagccttatgtatgcacagaatgtgggcgtcactttagctggaaatcaaacctcaaaacacaccagaggacacactcaggggttaaaccttatgtctgcctggagtgcgggcagtgctttagcctgaagtcaaaccttaacaaacaccagaggtcacacacgggggagaagccatttgtatgtacggagtgtgggcgaggctttacccggaaatcaaccctgagcacgcaccagaggacacactcaggggagaagccatttgtatgtgctgagtgtggacgaggctttaatgataagtccaccctcatttcacaccagaggacacattcaggggaaaagccttttatgtgcagggagtgtggcagaaggtttcggcagaagcctaacctgtttaggcacaagagggcacactcaggtgcctttgtgtgcagggagtgtgggcaaggcttttgtgctaagttaactctcattaaacaccagagagcacacgcaggggggaagcctcatgtgtgcagggagtgtgggcaaggctttagccggcagtcacacctcattagacaccagaggacacattcaggagagaagccttatatttgcagaaagtgtggacggggctttagtcggaagtccaaccttatcagacatcagaggacacactcaggatagaaactttatgtgtatagggaatgtggtacagcctttagccaggagtcatacttcatcagacaccagaggacacacacagtgctgtggctttttcagccattgctagataccaaagtggagacattctgtgtgtgattatgcatgagactgtactggtaagacttgtatctccatccacctgaaggagaattgctggctcattttcaggagccctgcccttcctcactgtggatggtgggttgtggaaacccggtcaggtaatgatagtggcaggaggcagtcaaatgcccaggcagataggggtgggtacctggtgaaacccaaccttaaagctgaagacagtcccggctaaatcctcatactgaattgagaacctgtcttcccatttggtgtgctttcctccgattgatcccaacccttcacctattttacgtatacctgccctttcctaattggtttttacactgctgtgcccaccttttgagtggtgcctttgcatacttacaaatcagtcaacgtgtattcccctattctgagcccataaaagacccagactcagctgcagtgaggagagaaatcaccctgctgtgggggttggggaccactccctgcatcccctctccactgagagctgttcttttgctcaataaaattcttttctacccatcctcacccttcaaatgtcag

SEQ ID NO: 435371 - DNA, 3107 bp, Homo sapiens
cacctctgacgagttccactgatcaacactgttgcgttaggggttgagtttccaacacatgaactttggggaacacattcaaaccacagcagtcctcatgtaaaccttccagaaaatctgtgtgcctggcactctggaatccctcttttccaccctttctctttttttttttttttgagatgaagtttcactcttgttgcccaggctggagtgcaatggagcgatatcggctcactgcaacctccacctcccaggttcaagcaattctcctgcctcagcctcccgagtagctgggattacaggcatgcgccaccacacctgggtaattttgtatttttagtagagacggggtttctccatgttggtcaggctggtctcgaatctcgacctcaggtgatccgcccaccttggcctcccaaagtgctgggattacaggcatgaaccaccgggcctggccttgacctctcattctaaagtgtgggagggaaagacaggctcctgggtgagcagaggtgtgttttgtgttaaaggcgttcgtggcattcagggatgtggctgtgtacttcacccaggaggagtggaggttgttgagccctgctcagaggaccctgcacagggaggtgatgctggagacttataaccatctggtctcactggaaattccatcttctaaaccaaaactcattgctcagctggagcgaggggaagcgccctggagagaggagagaaaatgtccactggacctctgtccagaatcgaagccagaaattcaacttagtccctcctgccctctgattttctccagtcagcaagctctcagccaacatgtgtggctgagtcatctctctcagctgttttcaagtttatgggcaggaaatcctctccacctgggaaaacactatccagaagatcagaaacaacagcaggatccattctgctttagtggcaaagcagaatggattcaagagggagaagactccagactcctgtttgggagagtaagcaaaaatggcacttcaaaggcactttccagcccacctgaagaacaacagccagcacagtccaaggaagacaacacagtggtggatatagggtccagccctgaacggagggcagatctagaggaaacagacaaagtattgcatggtttagaagtctcaggatttggagaaatcaaatatgaagagtttgggccaggctttatcaaggagtcaaacctccttagcctccagaagacacaaactggggagacaccttacatgtacactgagtggggagacagctttggcagtatgtcagtcctcatcaaaaacccaaggacacactctgggggaaagccttatgtgtgcagggaatgtgggcgaggctttacgtggaagtcaaacctgatcacacatcagaggacacactcaggggagaaaccttatgtgtgcaaggattgtggacgaggctttacttggaagtcgaacctctttacacatcagcggacacactcagggctcaagccttatgtgtgcaaggaatgtgggcagagctttagcctgaagtcaaacctcattacccaccagagggcgcacactggggagaagccttatgtttgcagggaatgtgggcgtggctttcgccagcattcacacctggtcagacacaagaggacacattcaggagagaagccttacatttgcagggagtgtgagcaaggctttagccagaagtcacacctcatcagacacttaaggacacacacaggagagaagccttatgtatgcacagaatgtgggcgtcactttagctggaaatcaaacctcaaaacacaccagaggacacactcaggggttaaaccttatgtctgcctggagtgcgggcagtgctttagcctgaagtcaaaccttaacaaacaccagaggtcacacacgggggagaagccatttgtatgtacggagtgtgggcgaggctttacccggaaatcaaccctgagcacgcaccagaggacacactcaggggagaagccatttgtatgtgctgagtgtggacgaggctttaatgataagtccaccctcatttcacaccagaggacacattcaggggaaaagccttttatgtgcagggagtgtggcagaaggtttcggcagaagcctaacctgtttaggcacaagagggcacactcaggtgcctttgtgtgcagggagtgtgggcaaggcttttgtgctaagttaactctcattaaacaccagagagcacacgcaggggggaagcctcatgtgtgcagggagtgtgggcaaggctttagccggcagtcacacctcattagacaccagaggacacattcaggagagaagccttatatttgcagaaagtgtggacggggctttagtcggaagtccaaccttatcagacatcagaggacacactcaggatagaaactttatgtgtatagggaatgtggtacagcctttagccaggagtcatacttcatcagacaccagaggacacacacagtgctgtggctttttcagccattgctagataccaaagtggagacattctgtgtgtgattatgcatgagactgtactggtaagacttgtatctccatccacctgaaggagaattgctggctcattttcaggagccctgcccttcctcactgtggatggtgggttgtggaaacccggtcaggtaatgatagtggcaggaggcagtcaaatgcccaggcagataggggtgggtacctggtgaaacccaaccttaaagctgaagacagtcccggctaaatcctcatactgaattgagaacctgtcttcccatttggtgtgctttcctccgattgatcccaacccttcacctattttacgtatacctgccctttcctaattggtttttacactgctgtgcccaccttttgagtggtgcctttgcatacttacaaatcagtcaacgtgtattcccctattctgagcccataaaagacccagactcagctgcagtgaggagagaaatcaccctgctgtgggggttggggaccactccctgcatcccctctccactgagagctgttcttttgctcaataaaattcttttctacccatcctcacccttcaaatgtcag

SEQ ID NO: 435372 - DNA, 3414 bp, Homo sapiens
ctctacagtgtcagcctcatccaggctggttcccctcaaagccataggatgtctgccaatagcaactttgtttaattctcacaatggccccataaggtaagtactattataatatcgattttataggaaattgagacacagatattaagatatcaacgcaaagtcataggggagggaggagagaggggactgtaatttgaacacagtttgtctccagagtttgtgcttttagccactgagtagttgttaaactttagtgtgcatcagaattacttggaagccttgttcaaacattgctgggctccccccgcaatttctgattcagtagccctaggatggggactgagaatttttatttctaacaagttcccaggggatgctggtgctgcaggttcagggaacacacattgagccagtgcactaagccctgctgcctcttttgggtaatctgtgcccatgtttctgagcatcaggaaaagtgcttaattcctgtgactccatcttacaaatgacgaagtcttttgctagaatcctacggtaaggcttcttgtggcctgttggttaccattcatttttcatatatttatttttcagctggcaagcagatgaattaactcccccaagcttctagctgtgtttctactcagtgggagagatttggagtgaatcatgagggtcaaccacacagtgtctacaatgctccctacatgcatggttcacagacaaaccatgagttgttccggggctggaggaataacggcgttcgtggcattcagggatgtggctgtgtacttcacccaggaggagtggaggttgttgagccctgctcagaggaccctgcacagggaggtgatgctggagacttataaccatctggtctcactggaaattccatcttctaaaccaaaactcattgctcagctggagcgaggggaagcgccctggagagaggagagaaaatgtccactggacctctgtccagggggaatggtttcagctttcgcccattcagtatgaagttggctgtaggtctgtcacagataactcttcttattttgagaatcgaagccagaaattcaacttagtccctcctgccctctgattttctccagtcagcaagctctcagccaacatgtgtggctgagtcatctctctcagctgttttcaagtttatgggcaggaaatcctctccacctgggaaaacactatccagaagatcagaaacaacagcaggatccattctgctttagtggcaaagcagaatggattcaagagggagaagactccagactcctgtttgggagagtaagcaaaaatggcacttcaaaggcactttccagcccacctgaagaacaacagccagcacagtccaaggaagacaacacagtggtggatatagggtccagccctgaacggagggcagatctagaggaaacagacaaagtattgcatggtttagaagtctcaggatttggagaaatcaaatatgaagagtttgggccaggctttatcaaggagtcaaacctccttagcctccagaagacacaaactggggagacaccttacatgtacactgagtggggagacagctttggcagtatgtcagtcctcatcaaaaacccaaggacacactctgggggaaagccttatgtgtgcagggaatgtgggcgaggctttacgtggaagtcaaacctgatcacacatcagaggacacactcaggggagaaaccttatgtgtgcaaggattgtggacgaggctttacttggaagtcgaacctctttacacatcagcggacacactcagggctcaagccttatgtgtgcaaggaatgtgggcagagctttagcctgaagtcaaacctcattacccaccagagggcgcacactggggagaagccttatgtttgcagggaatgtgggcgtggctttcgccagcattcacacctggtcagacacaagaggacacattcaggagagaagccttacatttgcagggagtgtgagcaaggctttagccagaagtcacacctcatcagacacttaaggacacacacaggagagaagccttatgtatgcacagaatgtgggcgtcactttagctggaaatcaaacctcaaaacacaccagaggacacactcaggggttaaaccttatgtctgcctggagtgcgggcagtgctttagcctgaagtcaaaccttaacaaacaccagaggtcacacacgggggagaagccatttgtatgtacggagtgtgggcgaggctttacccggaaatcaaccctgagcacgcaccagaggacacactcaggggagaagccatttgtatgtgctgagtgtggacgaggctttaatgataagtccaccctcatttcacaccagaggacacattcaggggaaaagccttttatgtgcagggagtgtggcagaaggtttcggcagaagcctaacctgtttaggcacaagagggcacactcaggtgcctttgtgtgcagggagtgtgggcaaggcttttgtgctaagttaactctcattaaacaccagagagcacacgcaggggggaagcctcatgtgtgcagggagtgtgggcaaggctttagccggcagtcacacctcattagacaccagaggacacattcaggagagaagccttatatttgcagaaagtgtggacggggctttagtcggaagtccaaccttatcagacatcagaggacacactcaggatagaaactttatgtgtatagggaatgtggtacagcctttagccaggagtcatacttcatcagacaccagaggacacacacagtgctgtggctttttcagccattgctagataccaaagtggagacattctgtgtgtgattatgcatgagactgtactggtaagacttgtatctccatccacctgaaggagaattgctggctcattttcaggagccctgcccttcctcactgtggatggtgggttgtggaaacccggtcaggtaatgatagtggcaggaggcagtcaaatgcccaggcagataggggtgggtacctggtgaaacccaaccttaaagctgaagacagtcccggctaaatcctcatactgaattgagaacctgtcttcccatttggtgtgctttcctccgattgatcccaacccttcacctattttacgtatacctgccctttcctaattggtttttacactgctgtgcccaccttttgagtggtgcctttgcatacttacaaatcagtcaacgtgtattcccctattctgagcccataaaagacccagactcagctgcagtgaggagagaaatcaccctgctgtgggggttggggaccactccctgcatcccctctccactgagagctgttcttttgctcaataaaattcttttctacccatcctcacccttcaaatgtcag

SEQ ID NO: 435373 - DNA, 2656 bp, Homo sapiens
caggcgcgttaagctggttgggacccgggaaggcctccctcttaaggtctttcccacacctctgcaccttgttacctgactttcggcttcaggatccgcagcgtgcacccgcgttccatctgtcttctgagactttgcccttctccaggaagagcactcaggagaccaggaaaatggccacagggctcctgagagccaaaaaagagaaattccatcttctaaaccaaaactcattgctcagctggagcgaggggaagcgccctggagagaggagagaaaatgtccactggacctctgtccagaatcgaagccagaaattcaacttagtccctcctgccctctgattttctccagtcagcaagctctcagccaacatgtgtggctgagtcatctctctcagctgttttcaagtttatgggcaggaaatcctctccacctgggaaaacactatccagaagatcagaaacaacagcaggatccattctgctttagtggcaaagcagaatggattcaagagggagaagactccagactcctgtttgggagagtaagcaaaaatggcacttcaaaggcactttccagcccacctgaagaacaacagccagcacagtccaaggaagacaacacagtggtggatatagggtccagccctgaacggagggcagatctagaggaaacagacaaagtattgcatggtttagaagtctcaggatttggagaaatcaaatatgaagagtttgggccaggctttatcaaggagtcaaacctccttagcctccagaagacacaaactggggagacaccttacatgtacactgagtggggagacagctttggcagtatgtcagtcctcatcaaaaacccaaggacacactctgggggaaagccttatgtgtgcagggaatgtgggcgaggctttacgtggaagtcaaacctgatcacacatcagaggacacactcaggggagaaaccttatgtgtgcaaggattgtggacgaggctttacttggaagtcgaacctctttacacatcagcggacacactcagggctcaagccttatgtgtgcaaggaatgtgggcagagctttagcctgaagtcaaacctcattacccaccagagggcgcacactggggagaagccttatgtttgcagggaatgtgggcgtggctttcgccagcattcacacctggtcagacacaagaggacacattcaggagagaagccttacatttgcagggagtgtgagcaaggctttagccagaagtcacacctcatcagacacttaaggacacacacaggagagaagccttatgtatgcacagaatgtgggcgtcactttagctggaaatcaaacctcaaaacacaccagaggacacactcaggggttaaaccttatgtctgcctggagtgcgggcagtgctttagcctgaagtcaaaccttaacaaacaccagaggtcacacacgggggagaagccatttgtatgtacggagtgtgggcgaggctttacccggaaatcaaccctgagcacgcaccagaggacacactcaggggagaagccatttgtatgtgctgagtgtggacgaggctttaatgataagtccaccctcatttcacaccagaggacacattcaggggaaaagccttttatgtgcagggagtgtggcagaaggtttcggcagaagcctaacctgtttaggcacaagagggcacactcaggtgcctttgtgtgcagggagtgtgggcaaggcttttgtgctaagttaactctcattaaacaccagagagcacacgcaggggggaagcctcatgtgtgcagggagtgtgggcaaggctttagccggcagtcacacctcattagacaccagaggacacattcaggagagaagccttatatttgcagaaagtgtggacggggctttagtcggaagtccaaccttatcagacatcagaggacacactcaggatagaaactttatgtgtatagggaatgtggtacagcctttagccaggagtcatacttcatcagacaccagaggacacacacagtgctgtggctttttcagccattgctagataccaaagtggagacattctgtgtgtgattatgcatgagactgtactggtaagacttgtatctccatccacctgaaggagaattgctggctcattttcaggagccctgcccttcctcactgtggatggtgggttgtggaaacccggtcaggtaatgatagtggcaggaggcagtcaaatgcccaggcagataggggtgggtacctggtgaaacccaaccttaaagctgaagacagtcccggctaaatcctcatactgaattgagaacctgtcttcccatttggtgtgctttcctccgattgatcccaacccttcacctattttacgtatacctgccctttcctaattggtttttacactgctgtgcccaccttttgagtggtgcctttgcatacttacaaatcagtcaacgtgtattcccctattctgagcccataaaagacccagactcagctgcagtgaggagagaaatcaccctgctgtgggggttggggaccactccctgcatcccctctccactgagagctgttcttttgctcaataaaattcttttctacccatcctcacccttcaaatgtcag

SEQ ID NO: 435374 - DNA, 2479 bp, Homo sapiens
tgagatgaagtctcactctgttgcctaggctggagtgcagtggcgcgatctcggctcactgcaacctccacctcctggtttcaagcagttctctgcctcagcctcccgattagctgggactacagaatcgaagccagaaattcaacttagtccctcctgccctctgattttctccagtcagcaagctctcagccaacatgtgtggctgagtcatctctctcagctgttttcaagtttatgggcaggaaatcctctccacctgggaaaacactatccagaagatcagaaacaacagcaggatccattctgctttagtggcaaagcagaatggattcaagagggagaagactccagactcctgtttgggagagtaagcaaaaatggcacttcaaaggcactttccagcccacctgaagaacaacagccagcacagtccaaggaagacaacacagtggtggatatagggtccagccctgaacggagggcagatctagaggaaacagacaaagtattgcatggtttagaagtctcaggatttggagaaatcaaatatgaagagtttgggccaggctttatcaaggagtcaaacctccttagcctccagaagacacaaactggggagacaccttacatgtacactgagtggggagacagctttggcagtatgtcagtcctcatcaaaaacccaaggacacactctgggggaaagccttatgtgtgcagggaatgtgggcgaggctttacgtggaagtcaaacctgatcacacatcagaggacacactcaggggagaaaccttatgtgtgcaaggattgtggacgaggctttacttggaagtcgaacctctttacacatcagcggacacactcagggctcaagccttatgtgtgcaaggaatgtgggcagagctttagcctgaagtcaaacctcattacccaccagagggcgcacactggggagaagccttatgtttgcagggaatgtgggcgtggctttcgccagcattcacacctggtcagacacaagaggacacattcaggagagaagccttacatttgcagggagtgtgagcaaggctttagccagaagtcacacctcatcagacacttaaggacacacacaggagagaagccttatgtatgcacagaatgtgggcgtcactttagctggaaatcaaacctcaaaacacaccagaggacacactcaggggttaaaccttatgtctgcctggagtgcgggcagtgctttagcctgaagtcaaaccttaacaaacaccagaggtcacacacgggggagaagccatttgtatgtacggagtgtgggcgaggctttacccggaaatcaaccctgagcacgcaccagaggacacactcaggggagaagccatttgtatgtgctgagtgtggacgaggctttaatgataagtccaccctcatttcacaccagaggacacattcaggggaaaagccttttatgtgcagggagtgtggcagaaggtttcggcagaagcctaacctgtttaggcacaagagggcacactcaggtgcctttgtgtgcagggagtgtgggcaaggcttttgtgctaagttaactctcattaaacaccagagagcacacgcaggggggaagcctcatgtgtgcagggagtgtgggcaaggctttagccggcagtcacacctcattagacaccagaggacacattcaggagagaagccttatatttgcagaaagtgtggacggggctttagtcggaagtccaaccttatcagacatcagaggacacactcaggatagaaactttatgtgtatagggaatgtggtacagcctttagccaggagtcatacttcatcagacaccagaggacacacacagtgctgtggctttttcagccattgctagataccaaagtggagacattctgtgtgtgattatgcatgagactgtactggtaagacttgtatctccatccacctgaaggagaattgctggctcattttcaggagccctgcccttcctcactgtggatggtgggttgtggaaacccggtcaggtaatgatagtggcaggaggcagtcaaatgcccaggcagataggggtgggtacctggtgaaacccaaccttaaagctgaagacagtcccggctaaatcctcatactgaattgagaacctgtcttcccatttggtgtgctttcctccgattgatcccaacccttcacctattttacgtatacctgccctttcctaattggtttttacactgctgtgcccaccttttgagtggtgcctttgcatacttacaaatcagtcaacgtgtattcccctattctgagcccataaaagacccagactcagctgcagtgaggagagaaatcaccctgctgtgggggttggggaccactccctgcatcccctctccactgagagctgttcttttgctcaataaaattcttttctacccatcctcacccttcaaatgtcag

SEQ ID NO: 435375 - DNA, 1416 bp, Homo sapiens
ctaaattaaggctattaacacttttcatgaaatataggatacaaacttgttttaactttttcatttgattttttaacagtgttaaatttttctgagtgttaagtacagaaattgtttccctttatgatttttccattgtttttatgcttaggaaggccttgcccatctcaagataagttaactttcacttagattttaaaaatactaactgccctttgagtttaatgttttttagaactgttattcttgaatcaatatgtaatttatttgggcatatgatactgaggatagttcgatttaagatctgcccaaatagcgagttatctcgatgctgtgtcaacagggacattgtcagtttctctgagagaaatctttgtgccccgcccttctgtgggagtgccacttattgtatccacttgggcacagcatggagaatgtcttaaatgcaccagataagtctgaaacagactgttgctttgcaccattgagtcaaaaataagcctactaaattataagtgacagaatgtgaaaagcagaattgtgggaatcatatactgtgcctctaaaaaatactttatcaatgactttgtcttacagttcccagggagacaggtgatttttttgttttctgattcccatcatttatgcttcttctgaacaatttgtggtgcatctgcatcaaagttaaatcagctgctatttaccttctgcaagtgctttatataagacatggaagaaaaaaattcagtgaccagagagagatagaaatgtacagggcagaattatttggagtcagctttttggaaagtattgctttgttggaggaaaaataaggcagctatcctgctggtctgggatgctttgcaacacaagtcatcttttgaatatcatagggttgtccttggtttcccatggagcaaatgaataaaatcagatggtaaattggtgtgaattattcatcatgtggtaatacaaggctgtaattcctacctctgacaattgcggcctgtgtcagttccattgtttgtgttattgtactttatgcaccctccagaattatctaccccctccccagtgtaaaccattggttggaacattctgcttcttagaaggcagcagttttgtcttctgcctcttttaacatattctgtctcttaggtctgaattctgaatagaaatcagaactttttcactcccttatgaagcatgttagtgggggatgcttaccttccttaatgaaacttgagacatgcagtcttctttgatttccatatatgattaataaatgttacattcataacaatttttctctcttattttcattaacagaaaaatagcaaaatgactgcagctcagaaggctttggctaaagttgacaagagtggaatgaaaagtattgataccttttttggggta

SEQ ID NO: 435376 - DNA, 1736 bp, Homo sapiens
ctaaattaaggctattaacacttttcatgaaatataggatacaaacttgttttaactttttcatttgattttttaacagtgttaaatttttctgagtgttaagtacagaaattgtttccctttatgatttttccattgtttttatgcttaggaaggccttgcccatctcaagataagttaactttcacttagattttaaaaatactaactgccctttgagtttaatgttttttagaactgttattcttgaatcaatatgtaatttatttgggcatatgatactgaggatagttcgatttaagatctgcccaaatagcgagttatctcgatgctgtgtcaacagggacattgtcagtttctctgagagaaatctttgtgccccgcccttctgtgggagtgccacttattgtatccacttgggcacagcatggagaatgtcttaaatgcaccagataagtctgaaacagactgttgctttgcaccattgagtcaaaaataagcctactaaattataagtgacagaatgtgaaaagcagaattgtgggaatcatatactgtgcctctaaaaaatactttatcaatgactttgtcttacagttcccagggagacaggtgatttttttgttttctgattcccatcatttatgcttcttctgaacaatttgtggtgcatctgcatcaaagttaaatcagctgctatttaccttctgcaagtgctttatataagacatggaagaaaaaaattcagtgaccagagagagatagaaatgtacagggcagaattatttggagtcagctttttggaaagtattgctttgttggaggaaaaataaggcagctatcctgctggtctgggatgctttgcaacacaagtcatcttttgaatatcatagggttgtccttggtttcccatggagcaaatgaataaaatcagatggtaaattggtgtgaattattcatcatgtggtaatacaaggctgtaattcctacctctgacaattgcggcctgtgtcagttccattgtttgtgttattgtactttatgcaccctccagaattatctaccccctccccagtgtaaaccattggttggaacattctgcttcttagaaggcagcagttttgtcttctgcctcttttaacatattctgtctcttaggtctgaattctgaatagaaatcagaactttttcactcccttatgaagcatgttagtgggggatgcttaccttccttaatgaaacttgagacatgcagtcttctttgatttccatatatgattaataaatgttacattcataacaatttttctctcttattttcattaacagaaaaatagcaaaatgactgcagctcagaaggctttggctaaagttgacaagagtggaatgaaaagtattgataccttttttggggtaaaaaataaaaaaaaaattggaaaggtttgaaactttgaaaataaaatctagcaaaaatatttgctttttacatgtttcagtttgtccttcctgactgttaatgactacctttggttgggggaaggaagaggccaatttcatgttctcttaaacatttctttgcatttggtttttgtgttcctgaacaaaatatgggaaagtgtctaacttcatggctatggccttttggagtctcatctgacataatgaaaagtaatcacttgaagagaattaacatatagcatcatgattttctcaataaactgatgtgtgacaatgtt

SEQ ID NO: 435377 - DNA, 1299 bp, Homo sapiens
agaccatggagggccgctgggtgcagccacagagcgcggggccccggcgaccccgccccgctccgcgtcactcggcgccctgcggcgcgcgatgagcacctaccactagcggagccgcgagggagaggccgcggccccttcccgttgcctgcggccaccggccggcattcagagcccctcgcctggcgctaaatttaaaaacgtaacacgagcagcaggctggtctcggaaacgaaacgaaattcggtccctgggcctcctcccgggcgctgccggtccctcagcgcgccgcgccacccggaacagacccttctcccgccattttcggcggggctgggagactgaggcccgcggcgctgagcctgcggcgccccggaagaggcgggcggcatggccgctggcgtggactgcggggacggggttggcgcccggcagcacgtgttcctggtttcagaatatttaaaagatgcttcaaagaagatgaaaaatgggctaatgtttgtaaaactggttaacccctgttcaggagaaggagccatttacttgttcaatatgtgtctacagcagctgtttgaagtaaaagttttcaaggaaaaacaccattcttggtttataaatcaatcagttcaatcaggaggtcttctccattttgccacacctgtggatcctctatttctgcttctccactacctcataaaggctgataaggaggggaagtttcagccccttgatcaagttgtggtggataacgtgtttccaaattgcatcttgttgctgaaacttcctggacttgagaagttacttcatcatgtgacagaggaaaaaggtaatccagaaatagacaacaagaaatattacaagtacagcaaagagaagacattaaagtggctggaaaaaaaggttaatcaaactgtggcagcattaaaaaccaataatgtgaatgtcagttcccgggtacagtcaactgcatttttctctggtgaccaagcttccactgacaaggaagaggattatattcgttatgcccatggtctgatatctgactacatccctaaagaattaagtgatgacttatctaaatacttaaagcttccagaaccttcagcctcattgccaaatcctccatcaaagaaaataaagttatcagatgagcctgtagaagcaaaagaagattacactaagtttaatactaaagatttgaagactgaaaagaaaaatagcaaaatgactgcagctcagaaggctttggctaaagttgacaagagtggaatgaaaagtattgataccttttttggggta

SEQ ID NO: 435378 - DNA, 3035 bp, Homo sapiens
  misc_feature (1239)..(1239): n is a, c, g, or t
agaccatggagggccgctgggtgcagccacagagcgcggggccccggcgaccccgccccgctccgcgtcactcggcgccctgcggcgcgcgatgagcacctaccactagcggagccgcgagggagaggccgcggccccttcccgttgcctgcggccaccggccggcattcagagcccctcgcctggcgctaaatttaaaaacgtaacacgagcagcaggctggtctcggaaacgaaacgaaattcggtccctgggcctcctcccgggcgctgccggtccctcagcgcgccgcgccacccggaacagacccttctcccgccattttcggcggggctgggagactgaggcccgcggcgctgagcctgcggcgccccggaagaggcgggcggcatggccgctggcgtggactgcggggacggggttggcgcccggcagcacgtgttcctggtttcagaatatttaaaagatgcttcaaagaagatgaaaaatgggctaatgtttgtaaaactggttaacccctgttcaggagaaggagccatttacttgttcaatatgtgtctacagcagctgtttgaagtaaaagttttcaaggaaaaacaccattcttggtttataaatcaatcagttcaatcaggaggtcttctccattttgccacacctgtggatcctctatttctgcttctccactacctcataaaggctgataaggaggggaagtttcagccccttgatcaagttgtggtggataacgtgtttccaaattgcatcttgttgctgaaacttcctggacttgagaagttacttcatcatgtgacagaggaaaaaggtaatccagaaatagacaacaagaaatattacaagtacagcaaagagaagacattaaagtggctggaaaaaaaggttaatcaaactgtggcagcattaaaaaccaataatgtgaatgtcagttcccgggtacagtcaactgcatttttctctggtgaccaagcttccactgacaaggaagaggattatattcgttatgcccatggtctgatatctgactacatccctaaagaattaagtgatgacttatctaaatacttaaagcttccagaaccttcagcctcattgccaaatcctccatcaaagctcctctgcagctggtatgtttatctcctagatccagagaatggagaagccaatcataaaccacacctgactgcaaattgcagcgttccttcagcccaggccagatcncagatgagttaaactctgctccaagacagggaaataaacatgtgcaccagcttgtcagtgaggtcatttcttcagccagcaaagtaacggatgccttgagaatgtaaaatggacatattgtggatgttacaaactttccttctcccttgcattgttttcttggccttcaaggtagctaaaatgctcataattttttatgtcattccctgtataaaggtggtggtggctccaaagacattgtccttagaaaaggacagaaaattgaaagtacagcagtgtttgtttgggcctatgttcagcatgttgtcaaaaaaaaatgcatgttttactctcttggagaatagcactgggcagaagtctgttgctgtaagatctaaggactgctctaggccagacccatgcgtctttcattccggtagttaatctctgacagtagctctagaggacctagagaggcacagttgtcttgctgaaactaagagggtaggttctcagcgtgcttcttatttttcttcatccaaaaatgaagcagatttttttctcccaaatatctatcttccttagtaacttagagatcattcatgaattgatctaaacctattcttgaaagctttaaccttggataccttttggagtaatatgtttcataactttattcttctctgctcctgatttctgttttcttattttaattttcagaatttaagttgtttgtgacttcatcatttatgatttagatcagagatcagcaaaccttttcttctaaagccagacagtaaatattttaggctccatgaagcagatggactctattgcagctactcaactctgctgttgtattgtgaaaacagccacagataatacataaacgaatgagcatggctgtgttccagtaaaacttcatttataaaagcaggcagccagctggatttggcccctgggccatcatttgccaagccctgattttgattttggcatcttgctcttcctaaaccccagccttgtcttctatattatttgagttgcttttcgaggtcttctactctgtgtctttctggggttccagtgtacacatgacaaactatactagacgatgtaccatcgtttaaacaagcgtagaacatatcttctgctagctttcctgtctgtatccaggatttgattgatttttacagtaatatagttgactgtttccaggaaatatattccagtagtcattaggtatctttgtatctatgttgtaatcgatagcgtggagcctgtcatctttaatatgttttatattattttcctttactatcatatgtctgcctttgttgaaactcagcttccaaccctcacttgctccagtcttttcaatttgtcactgtcagcaagcagagttgaatgcaaccagtgggtttggagatgttcccgagttccttcttgcaaatcatttgtaagaaggcctaacattatccctgtggtactctgcagtttgttctctttccagaactgtatccatttagtcatagcctttgttactgtctttctgagccacttctctgctgaaacaatctcccaaatccatagggatttggtcttttaaataacaaaaattttagtaaatgcttcaatcatctttttttccaatatattcaacagtgcactgggaataacatacaaactagttatatgtagaggctaccacaatcattttctttttttaaacacttgtaactggtatcttgttttgttgtgagctattaaaacacctgaacaagtcatttctccaattaaacattttatgtccatac

SEQ ID NO: 435379 - DNA, 1357 bp, Homo sapiens
agaccatggagggccgctgggtgcagccacagagcgcggggccccggcgaccccgccccgctccgcgtcactcggcgccctgcggcgcgcgatgagcacctaccactagcggagccgcgagggagaggccgcggccccttcccgttgcctgcggccaccggccggcattcagagcccctcgcctggcgctaaatttaaaaacgtaacacgagcagcaggctggtctcggaaacgaaacgaaattcggtccctgggcctcctcccgggcgctgccggtccctcagcgcgccgcgccacccggaacagacccttctcccgccattttcggcggggctgggagactgaggcccgcggcgctgagcctgcggcgccccggaagaggcgggcggcatggccgctggcgtggactgcggggacggggttggcgcccggcagcacgtgttcctggtttcagaatatttaaaagatgcttcaaagaagatgaaaaatgggctaatgtttgtaaaactggttaacccctgttcaggagaaggagccatttacttgttcaatatgtgtctacagcagctgtttgaagtaaaagttttcaaggaaaaacaccattcttggtttataaatcaatcagttcaatcaggaggtcttctccattttgccacacctgtggatcctctatttctgcttctccactacctcataaaggctgataaggaggggaagtttcagccccttgatcaagttgtggtggataacgtgtttccaaattgcatcttgttgctgaaacttcctggacttgagaagttacttcatcatgtgacagaggaaaaaggtaatccagaaatagacaacaagaaatattacaagtacagcaaagagaagacattaaagtggctggaaaaaaaggttaatcaaactgtggcagcattaaaaaccaataatgtgaatgtcagttcccgggtacagtcaactgcatttttctctggtgaccaagcttccactgacaaggaagaggattatattcgttatgcccatggtctgatatctgactacatccctaaagaattaagtgatgacttatctaaatacttaaagcttccagaaccttcagcctcattgccaaatcctccatcaaagaaaataaagttatcagatgagcctgtagaagcaaaagaagattacactaagtttaatactaaagatttgaagactgaaaaggtatgtgggttcaggtgtagtggtgtttcgttcatactcagtgcgtgatgtgcatgaatacatgaggaacagttgcacgcttgattgtgattacagttttgaccaggaagaattattaacttgcatttctgtgacttaataatta

SEQ ID NO: 435380 - DNA, 1867 bp, Homo sapiens
  misc_feature (1208)..(1208): n is a, c, g, or t
agaccatggagggccgctgggtgcagccacagagcgcggggccccggcgaccccgccccgctccgcgtcactcggcgccctgcggcgcgcgatgagcacctaccactagcggagccgcgagggagaggccgcggccccttcccgttgcctgcggccaccggccggcattcagagcccctcgcctggcgctaaatttaaaaacgtaacacgagcagcaggctggtctcggaaacgaaacgaaattcggtccctgggcctcctcccgggcgctgccggtccctcagcgcgccgcgccacccggaacagacccttctcccgccattttcggcggggctgggagactgaggcccgcggcgctgagcctgcggcgccccggaagaggcgggcggcatggccgctggcgtggactgcggggacggggttggcgcccggcagcacgtgttcctggtttcagaatatttaaaagatgcttcaaagaagatgaaaaatgggctaatgtttgtaaaactggttaacccctgttcaggagaaggagccatttacttgttcaatatgtgtctacagcagctgtttgaagtaaaagttttcaaggaaaaacaccattcttggtttataaatcaatcagttcaatcaggaggtcttctccattttgccacacctgtggatcctctatttctgcttctccactacctcataaaggctgataaggaggggaagtttcagccccttgatcaagttgtggtggataacgtgtttccaaattgcatcttgttgctgaaacttcctggacttgagaagttacttcatcatgtgacagaggaaaaaggtaatccagaaatagacaacaagaaatattacaagtacagcaaagagaagacattaaagtggctggaaaaaaaggttaatcaaactgtggcagcattaaaaaccaataatgtgaatgtcagttcccgggtacagtcaactgcatttttctctggtgaccaagcttccactgacaaggaagaggattatattcgttatgcccatggtctgatatctgactacatccctaaagaattaagtgatgacttatctaaatacttaaagcttccagaaccttcagcctcattgccaaatcctccatcaaagatccagagaatggagaagccaatcataaaccacacctgactgcaaattgcagcgttccttcagcccaggccagatcncagatgagttaaactctgctccaagacagggaaataaacatgtgcaccagcttgtcagtgaggtcatttcttcagccagcaaagtaacggatgccttgagaatgtaaaatggacatattgtggatgttacaaactttccttctcccttgcattgttttcttggccttcaagaaaataaagttatcagatgagcctgtagaagcaaaagaagattacactaagtttaatactaaagatttgaagactgaaaagaaaaatagcaaaatgactgcagctcagaaggctttggctaaagttgacaagagtggaatgaaaagtattgataccttttttggggtaaaaaataaaaaaaaaattggaaaggtttgaaactttgaaaataaaatctagcaaaaatatttgctttttacatgtttcagtttgtccttcctgactgttaatgactacctttggttgggggaaggaagaggccaatttcatgttctcttaaacatttctttgcatttggtttttgtgttcctgaacaaaatatgggaaagtgtctaacttcatggctatggccttttggagtctcatctgacataatgaaaagtaatcacttgaagagaattaacatatagcatcatgattttctcaataaactgatgtgtgacaatgtt

SEQ ID NO: 435381 - DNA, 1547 bp, Homo sapiens
  misc_feature (1208)..(1208): n is a, c, g, or t
agaccatggagggccgctgggtgcagccacagagcgcggggccccggcgaccccgccccgctccgcgtcactcggcgccctgcggcgcgcgatgagcacctaccactagcggagccgcgagggagaggccgcggccccttcccgttgcctgcggccaccggccggcattcagagcccctcgcctggcgctaaatttaaaaacgtaacacgagcagcaggctggtctcggaaacgaaacgaaattcggtccctgggcctcctcccgggcgctgccggtccctcagcgcgccgcgccacccggaacagacccttctcccgccattttcggcggggctgggagactgaggcccgcggcgctgagcctgcggcgccccggaagaggcgggcggcatggccgctggcgtggactgcggggacggggttggcgcccggcagcacgtgttcctggtttcagaatatttaaaagatgcttcaaagaagatgaaaaatgggctaatgtttgtaaaactggttaacccctgttcaggagaaggagccatttacttgttcaatatgtgtctacagcagctgtttgaagtaaaagttttcaaggaaaaacaccattcttggtttataaatcaatcagttcaatcaggaggtcttctccattttgccacacctgtggatcctctatttctgcttctccactacctcataaaggctgataaggaggggaagtttcagccccttgatcaagttgtggtggataacgtgtttccaaattgcatcttgttgctgaaacttcctggacttgagaagttacttcatcatgtgacagaggaaaaaggtaatccagaaatagacaacaagaaatattacaagtacagcaaagagaagacattaaagtggctggaaaaaaaggttaatcaaactgtggcagcattaaaaaccaataatgtgaatgtcagttcccgggtacagtcaactgcatttttctctggtgaccaagcttccactgacaaggaagaggattatattcgttatgcccatggtctgatatctgactacatccctaaagaattaagtgatgacttatctaaatacttaaagcttccagaaccttcagcctcattgccaaatcctccatcaaagatccagagaatggagaagccaatcataaaccacacctgactgcaaattgcagcgttccttcagcccaggccagatcncagatgagttaaactctgctccaagacagggaaataaacatgtgcaccagcttgtcagtgaggtcatttcttcagccagcaaagtaacggatgccttgagaatgtaaaatggacatattgtggatgttacaaactttccttctcccttgcattgttttcttggccttcaagaaaataaagttatcagatgagcctgtagaagcaaaagaagattacactaagtttaatactaaagatttgaagactgaaaagaaaaatagcaaaatgactgcagctcagaaggctttggctaaagttgacaagagtggaatgaaaagtattgataccttttttggggta

SEQ ID NO: 435382 - DNA, 1373 bp, Homo sapiens
agaccatggagggccgctgggtgcagccacagagcgcggggccccggcgaccccgccccgctccgcgtcactcggcgccctgcggcgcgcgatgagcacctaccactagcggagccgcgagggagaggccgcggccccttcccgttgcctgcggccaccggccggcattcagagcccctcgcctggcgctaaatttaaaaacgtaacacgagcagcaggctggtctcggaaacgaaacgaaattcggtccctgggcctcctcccgggcgctgccggtccctcagcgcgccgcgccacccggaacagacccttctcccgccattttcggcggggctgggagactgaggcccgcggcgctgagcctgcggcgccccggaagaggcgggcggcatggccgctggcgtggactgcggggacggggttggcgcccggcagcacgtgttcctggtttcagaatatttaaaagatgcttcaaagaagatgaaaaatgggctaatgtttgtaaaactggttaacccctgttcaggagaaggagccatttacttgttcaatatgtgtctacagcagctgtttgaagtaaaagttttcaaggaaaaacaccattcttggtttataaatcaatcagttcaatcaggaggtcttctccattttgccacacctgtggatcctctatttctgcttctccactacctcataaaggctgataaggaggggaagtttcagccccttgatcaagttgtggtggataacgtgtttccaaattgcatcttgttgctgaaacttcctggacttgagaagttacttcatcatgtgacagaggaaaaaggtaatccagaaatagacaacaagaaatattacaagtacagcaaagagaagacattaaagtggctggaaaaaaaggttaatcaaactgtggcagcattaaaaaccaataatgtgaatgtcagttcccgggtacagtcaactgcatttttctctggtgaccaagcttccactgacaaggaagaggattatattcgttatgcccatggtctgatatctgactacatccctaaagaattaagtgatgacttatctaaatacttaaagcttccagaggttgcagtgagtcgagatggtgccattgctctcgtttgggcaacaagagtgaaactcttgtctcaaaaaaaaaaaaaatgaggtttaagacagttttgtcattactggtgggatctggtcacacaagatagcattaaacgtgacatggcacataaaattggttaaaaaattttgttttttaattacgtaatgtaaaagcccaacaaacactttatgcaagattggaatgtatcttcaaattcagatttaataaacatgtaaagatcctctgtaaa

SEQ ID NO: 435383 - DNA, 405 bp, Homo sapiens
acttaataattaagaattgcatatgacaatgaaaatgttaagcaactaagacttattattagtcagagaaaaacaatatactacttatcaagagtgtgcctaaattttgctatgtattcatagagtgatagggtgggaaaggagggaggaagctctacaggtaattttttgtcaaccctgctgcccagaagcagaaattatgatgataaaaattaataatttcaccattcagcattcaccctggcaaatggcattttggtaacagtccttacttagttttatacatgcattataaatacatatgtggcctttaacattggcattataatactcagttctgggctttttatttaacattaaattgtgaaaatgttcacatatcattaaacattctttgaaaaaata

SEQ ID NO: 435384 - DNA, 602 bp, Homo sapiens
catcatgtgacagaggaaaaaggtatggtataacttaaaggcttatggctggtagaaaggatggaccttgcctaagaacgtggctgcttacagacacactgaatgtaaggcttattctgtgtccaccatagggaaaactatcattcagatttgctaacactgccagcactgttcctctattgctttggagtgtttagtctttggaactacaaccatggcagtctagggcctacgtccacagggcaggaatcacaaggtgtggcttcagtctcacttcttctttgaactagttctgtgacatcaggcaagtcactcagctgccttctgcctcagatgtctcattgtaaaattacgtaaaacctgtaccttaatagatggaagcatttatcgagcaccttccaaaaagcatatgttgcacattagtgctaagctctagatacttatgaataagacattgtccttttcttcactttgcgcccagtctgatgggggtcaatgacaagctgagcagtgaccgcacagtgtaacggaagtgaactctgaatttactggggatgcacaggacaggtttctaatctggcggggttgggtggggaatgtag

SEQ ID NO: 435385 - DNA, 410 bp, Homo sapiens
gagcctgtaaaaagtaagccctttgctgggtctgctgtcccattcgcctctgtagaggtctaaattatacatgttgggtttttttttaatggattgatgttgtgtcaaagtgacatttgacaccacttcactgctctaatgttgcagaaaataaagttatcagatgagcctgtagaagcaaaagaagattacactaagtttaatactaaagatttgaagactgaaaaggtatgtgggttcaggtgtagtggtgtttcgttcatactcagtgcgtgatgtgcatgaatacatgaggaacagttgcacgcttgattgtgattacagttttgaccaggaagaattattaacttgcatttctgtgacttaataattaagaattgcatatgacaatgaaaatgttaagcaactaa

SEQ ID NO: 435386 - DNA, 1619 bp, Homo sapiens
agaccatggagggccgctgggtgcagccacagagcgcggggccccggcgaccccgccccgctccgcgtcactcggcgccctgcggcgcgcgatgagcacctaccactagcggagccgcgagggagaggccgcggccccttcccgttgcctgcggccaccggccggcattcagagcccctcgcctggcgctaaatttaaaaacgtaacacgagcagcaggctggtctcggaaacgaaacgaaattcggtccctgggcctcctcccgggcgctgccggtccctcagcgcgccgcgccacccggaacagacccttctcccgccattttcggcggggctgggagactgaggcccgcggcgctgagcctgcggcgccccggaagaggcgggcggcatggccgctggcgtggactgcggggacggggttggcgcccggcagcacgtgttcctggtttcagaatatttaaaagatgcttcaaagaagatgaaaaatgggctaatgtttgtaaaactggttaacccctgttcaggagaaggagccatttacttgttcaatatgtgtctacagcagctgtttgaagtaaaagttttcaaggaaaaacaccattcttggtttataaatcaatcagttcaatcaggaggtcttctccattttgccacacctgtggatcctctatttctgcttctccactacctcataaaggctgataaggaggggaagtttcagccccttgatcaagttgtggtggataacgtgtttccaaattgcatcttgttgctgaaacttcctggacttgagaagttacttcatcatgtgacagaggaaaaaggtaatccagaaatagacaacaagaaatattacaagtacagcaaagagaagacattaaagtggctggaaaaaaaggttaatcaaactgtggcagcattaaaaaccaataatgtgaatgtcagttcccgggtacagtcaactgcatttttctctggtgaccaagcttccactgacaaggaagaggattatattcgttatgcccatggtctgatatctgactacatccctaaagaattaagtgatgacttatctaaatacttaaagcttccagaaccttcagcctcattgccaaatcctccatcaaagaaaataaagttatcagatgagcctgtagaagcaaaagaagattacactaagtttaatactaaagatttgaagactgaaaagaaaaatagcaaaatgactgcagctcagaaggctttggctaaagttgacaagagtggaatgaaaagtattgataccttttttggggtaaaaaataaaaaaaaaattggaaaggtttgaaactttgaaaataaaatctagcaaaaatatttgctttttacatgtttcagtttgtccttcctgactgttaatgactacctttggttgggggaaggaagaggccaatttcatgttctcttaaacatttctttgcatttggtttttgtgttcctgaacaaaatatgggaaagtgtctaacttcatggctatggccttttggagtctcatctgacataatgaaaagtaatcacttgaagagaattaacatatagcatcatgattttctcaataaactgatgtgtgacaatgtt

SEQ ID NO: 435387 - DNA, 1656 bp, Homo sapiens
agaccatggagggccgctgggtgcagccacagagcgcggggccccggcgaccccgccccgctccgcgtcactcggcgccctgcggcgcgcgatgagcacctaccactagcggagccgcgagggagaggccgcggccccttcccgttgcctgcggccaccggccggcattcagagcccctcgcctggcgctaaatttaaaaacgtaacacgagcagcaggctggtctcggaaacgaaacgaaattcggtccctgggcctcctcccgggcgctgccggtccctcagcgcgccgcgccacccggaacagacccttctcccgccattttcggcggggctgggagactgaggcccgcggcgctgagcctgcggcgccccggaagaggcgggcggcatggccgctggcgtggactgcggggacggggttggcgcccggcagcacgtgttcctggtttcagaatatttaaaagatgcttcaaagaagatgaaaaatgggctaatgtttgtaaaactggttaacccctgttcaggagaaggagccatttacttgttcaatatgtgtctacagcagctgtttgaagtaaaagttttcaaggaaaaacaccattcttggtttataaatcaatcagttcaatcaggaggtcttctccattttgccacacctgtggatcctctatttctgcttctccactacctcataaaggctgataaggaggggaagtttcagccccttgatcaagttgtggtggataacgtgtttccaaattgcatcttgttgctgaaacttcctggacttgagaagttacttcatcatgtgacagaggaaaaaggtaatccagaaatagacaacaagaaatattacaagtacagcaaagagaagacattaaagtggctggaaaaaaaggttaatcaaactgtggcagcattaaaaaccaataatgtgaatgtcagttcccgggtacagtcaactgcatttttctctggtgaccaagcttccactgacaaggaagaggattatattcgttatgcccatggtctgatatctgactacatccctaaagaattaagtgatgacttatctaaatacttaaagcttccagaaccttcagcctcattgccaaatcctccatcaaagatggcagcacaaagacagaaaaggggcaagtgatggtggtggctccacgcaaggcttggcggttttccctgcaacttcagacactcccagaggactcggactttttcttctgcacttttttggaaaatcgccaggtgccaaaaggtgcattttaaagcgctgactgtaaatgctttatttctttgattagtaccactagtctatgtgggcagcggcattcctccctggagcactcagctaggcggttccgtccaggagcttgaaagcatcccagcggtgcacctgttcagtctgaggacctcaagcttgggtcaggccagcatgttttaggtatggatgtggtgacttaaagtacttgattgtcttgatttcaccctgaaagctttggcaaaccaagtttcaacccttactttaaaaatctgacactgctttactccatatcaatttggaagcttctaattcataaatatacctaaacgttggcattttatctctccaggagttattaaacatttcttccttttt

SEQ ID NO: 435388 - DNA, 2807 bp, Homo sapiens
  misc_feature (1011)..(1011): n is a, c, g, or t
actataggtcggacagtcccgtgtttgaattcggcaaccgaagggggccaagcgccgccggtgccaattccggaacagacccttctcccgccattttcggcggggctgggagactgaggcccgcggcgctgagcctgcggcgccccggaagaggcgggcggcatggccgctggcgtggactgcggggacggggttggcgcccggcagcacgtgttcctggtttcagaatatttaaaagatgcttcaaagaagatgaaaaatgggctaatgtttgtaaaactggttaacccctgttcaggagaaggagccatttacttgttcaatatgtgtctacagcagctgtttgaagtaaaagttttcaaggaaaaacaccattcttggtttataaatcaatcagttcaatcaggaggtcttctccattttgccacacctgtggatcctctatttctgcttctccactacctcataaaggctgataaggaggggaagtttcagccccttgatcaagttgtggtggataacgtgtttccaaattgcatcttgttgctgaaacttcctggacttgagaagttacttcatcatgtgacagaggaaaaaggtaatccagaaatagacaacaagaaatattacaagtacagcaaagagaagacattaaagtggctggaaaaaaaggttaatcaaactgtggcagcattaaaaaccaataatgtgaatgtcagttcccgggtacagtcaactgcatttttctctggtgaccaagcttccactgacaaggaagaggattatattcgttatgcccatggtctgatatctgactacatccctaaagaattaagtgatgacttatctaaatacttaaagcttccagaaccttcagcctcattgccaaatcctccatcaaagctcctctgcagctggtatgtttatctcctagatccagagaatggagaagccaatcataaaccacacctgactgcaaattgcagcgttccttcagcccaggccagatcncagatgagttaaactctgctccaagacagggaaataaacatgtgcaccagcttgtcagtgaggtcatttcttcagccagcaaagtaacggatgccttgagaatgtaaaatggacatattgtggatgttacaaactttccttctcccttgcattgttttcttggccttcaaggtagctaaaatgctcataattttttatgtcattccctgtataaaggtggtggtggctccaaagacattgtccttagaaaaggacagaaaattgaaagtacagcagtgtttgtttgggcctatgttcagcatgttgtcaaaaaaaaatgcatgttttactctcttggagaatagcactgggcagaagtctgttgctgtaagatctaaggactgctctaggccagacccatgcgtctttcattccggtagttaatctctgacagtagctctagaggacctagagaggcacagttgtcttgctgaaactaagagggtaggttctcagcgtgcttcttatttttcttcatccaaaaatgaagcagatttttttctcccaaatatctatcttccttagtaacttagagatcattcatgaattgatctaaacctattcttgaaagctttaaccttggataccttttggagtaatatgtttcataactttattcttctctgctcctgatttctgttttcttattttaattttcagaatttaagttgtttgtgacttcatcatttatgatttagatcagagatcagcaaaccttttcttctaaagccagacagtaaatattttaggctccatgaagcagatggactctattgcagctactcaactctgctgttgtattgtgaaaacagccacagataatacataaacgaatgagcatggctgtgttccagtaaaacttcatttataaaagcaggcagccagctggatttggcccctgggccatcatttgccaagccctgattttgattttggcatcttgctcttcctaaaccccagccttgtcttctatattatttgagttgcttttcgaggtcttctactctgtgtctttctggggttccagtgtacacatgacaaactatactagacgatgtaccatcgtttaaacaagcgtagaacatatcttctgctagctttcctgtctgtatccaggatttgattgatttttacagtaatatagttgactgtttccaggaaatatattccagtagtcattaggtatctttgtatctatgttgtaatcgatagcgtggagcctgtcatctttaatatgttttatattattttcctttactatcatatgtctgcctttgttgaaactcagcttccaaccctcacttgctccagtcttttcaatttgtcactgtcagcaagcagagttgaatgcaaccagtgggtttggagatgttcccgagttccttcttgcaaatcatttgtaagaaggcctaacattatccctgtggtactctgcagtttgttctctttccagaactgtatccatttagtcatagcctttgttactgtctttctgagccacttctctgctgaaacaatctcccaaatccatagggatttggtcttttaaataacaaaaattttagtaaatgcttcaatcatctttttttccaatatattcaacagtgcactgggaataacatacaaactagttatatgtagaggctaccacaatcattttctttttttaaacacttgtaactggtatcttgttttgttgtgagctattaaaacacctgaacaagtcatttctccaattaaacattttatgtccatac

SEQ ID NO: 435389 - DNA, 2952 bp, Homo sapiens
  misc_feature (1156)..(1156): n is a, c, g, or t
agaccatggagggccgctgggtgcagccacagagcgcggggccccggcgaccccgccccgctccgcgtcactcggcgccctgcggcgcgcgatgagcacctaccactagcggagccgcgagggagaggccgcggccccttcccgttgcctgcggccaccggccggcattcagagcccctcgcctggcgctaaatttaaaaacgtaacacgagcagcaggtatctttgcctctagttttcagtttgtttggagaagctggctatctcagataaacaaatctggaacttggaagagatactgtgagatatgcagacttgggacgttggttttcataggctggtgaagacagaaccatttcccatttcagcaagaatatttaaaagatgcttcaaagaagatgaaaaatgggctaatgtttgtaaaactggttaacccctgttcaggagaaggagccatttacttgttcaatatgtgtctacagcagctgtttgaagtaaaagttttcaaggaaaaacaccattcttggtttataaatcaatcagttcaatcaggaggtcttctccattttgccacacctgtggatcctctatttctgcttctccactacctcataaaggctgataaggaggggaagtttcagccccttgatcaagttgtggtggataacgtgtttccaaattgcatcttgttgctgaaacttcctggacttgagaagttacttcatcatgtgacagaggaaaaaggtaatccagaaatagacaacaagaaatattacaagtacagcaaagagaagacattaaagtggctggaaaaaaaggttaatcaaactgtggcagcattaaaaaccaataatgtgaatgtcagttcccgggtacagtcaactgcatttttctctggtgaccaagcttccactgacaaggaagaggattatattcgttatgcccatggtctgatatctgactacatccctaaagaattaagtgatgacttatctaaatacttaaagcttccagaaccttcagcctcattgccaaatcctccatcaaagctcctctgcagctggtatgtttatctcctagatccagagaatggagaagccaatcataaaccacacctgactgcaaattgcagcgttccttcagcccaggccagatcncagatgagttaaactctgctccaagacagggaaataaacatgtgcaccagcttgtcagtgaggtcatttcttcagccagcaaagtaacggatgccttgagaatgtaaaatggacatattgtggatgttacaaactttccttctcccttgcattgttttcttggccttcaaggtagctaaaatgctcataattttttatgtcattccctgtataaaggtggtggtggctccaaagacattgtccttagaaaaggacagaaaattgaaagtacagcagtgtttgtttgggcctatgttcagcatgttgtcaaaaaaaaatgcatgttttactctcttggagaatagcactgggcagaagtctgttgctgtaagatctaaggactgctctaggccagacccatgcgtctttcattccggtagttaatctctgacagtagctctagaggacctagagaggcacagttgtcttgctgaaactaagagggtaggttctcagcgtgcttcttatttttcttcatccaaaaatgaagcagatttttttctcccaaatatctatcttccttagtaacttagagatcattcatgaattgatctaaacctattcttgaaagctttaaccttggataccttttggagtaatatgtttcataactttattcttctctgctcctgatttctgttttcttattttaattttcagaatttaagttgtttgtgacttcatcatttatgatttagatcagagatcagcaaaccttttcttctaaagccagacagtaaatattttaggctccatgaagcagatggactctattgcagctactcaactctgctgttgtattgtgaaaacagccacagataatacataaacgaatgagcatggctgtgttccagtaaaacttcatttataaaagcaggcagccagctggatttggcccctgggccatcatttgccaagccctgattttgattttggcatcttgctcttcctaaaccccagccttgtcttctatattatttgagttgcttttcgaggtcttctactctgtgtctttctggggttccagtgtacacatgacaaactatactagacgatgtaccatcgtttaaacaagcgtagaacatatcttctgctagctttcctgtctgtatccaggatttgattgatttttacagtaatatagttgactgtttccaggaaatatattccagtagtcattaggtatctttgtatctatgttgtaatcgatagcgtggagcctgtcatctttaatatgttttatattattttcctttactatcatatgtctgcctttgttgaaactcagcttccaaccctcacttgctccagtcttttcaatttgtcactgtcagcaagcagagttgaatgcaaccagtgggtttggagatgttcccgagttccttcttgcaaatcatttgtaagaaggcctaacattatccctgtggtactctgcagtttgttctctttccagaactgtatccatttagtcatagcctttgttactgtctttctgagccacttctctgctgaaacaatctcccaaatccatagggatttggtcttttaaataacaaaaattttagtaaatgcttcaatcatctttttttccaatatattcaacagtgcactgggaataacatacaaactagttatatgtagaggctaccacaatcattttctttttttaaacacttgtaactggtatcttgttttgttgtgagctattaaaacacctgaacaagtcatttctccaattaaacattttatgtccatac

SEQ ID NO: 435390 - DNA, 753 bp, Homo sapiens
  misc_feature (31)..(31): n is a, c, g, or t
  misc_feature (725)..(725): n is a, c, g, or t
  misc_feature (737)..(737): n is a, c, g, or t
  misc_feature (749)..(749): n is a, c, g, or t
gggggccagtgggcccaggggcatgtcaggntcggctccaacgtgtcaatatgctgttgattcccagagatgttgcgggaagagggaaagtggggaagaaaggggtggtactgaaggggaactcggcctcctcctgaaggccttcctaaggctgacccctgggtcaaaccaaaatccccataatggcaaaagacaactcaagaagcaaaaagcagggtcaaggagctcttgaaaaattgcatagtaggagaggccccaccccaacaggaaggctgggctgcagaacacggtcccaagagctgcatccaagtatcatcccaaaggacagcgtggagtcggcccccttcctgccgccccggggttcgggaccctcggaagaccactcacgcgcccgcacgagaacacgtgaacacacacgcacgcacacatgcacgcgcgcacatgcactccctttctctcgcagcctcacacaactgggataggtcggtactccctgcaggctcgtgccgaattcggcacgaggtttaacataaaggttattttctcctgatatagatcacataacagaatgcaccagtcatcagctattcagttggtaagcttccaggaaaaaggacaggcagaaagagtttgagacctgaatagctcccagatttcagtcttttcctgtttttgttaactttgggttaaaacacgtgccgaattcatgcagcccggaggatccncgagttatagancggaagccaccnggtg

SEQ ID NO: 435391 - DNA, 503 bp, Homo sapiens
aaaaacatcctctgaagcctctctaacccagggatcctcctcactcttcccctacccattccccccaccctccgttatactggggccagttatctagtagatactgccaattacccttggcagaggtgccctgctcactaatttcatttgaaggagagccctggaacctggttttaatgtctggcacacgccactccaggatctcccagtttgtgtttctacatctgcaggctgatgctgatttctaaccaccccatgtcaatcattttagtttgtgggcatcacctatgccctgaccgttgtgtggctcctggtgtttgcctgctctgctgtgcctgtgtacatttacttcaacacctggaccacctgcccgcgcaaggtgttttccaagccagagagttgtgcccggatagccagtgtcatgggctgaaggcagaatgtatgattttatacgatcgaactgagattgcttagatggattatggtcgtctaacatatggaca

SEQ ID NO: 435392 - DNA, 3033 bp, Homo sapiens
agcggagaaagcccttttcattgcaggagaagaggacaaagatactcagagagaaaaagtaaaagaccgaagaaggaggctggagagaccaggatccttccagctgaacaaagtcagccacaaagcagactagccagccggctacaattggagtcagagtcccaaagacatgggcttgttagagtgctgtgcaagatgtctggtaggggccccctttgcttccctggtggccactggattgtgtttctttggggtggcactgttctgtggctgtggacatgaagccctcactggcacagaaaagctaattgagacctatttctccaaaaactaccaagactatgagtatctcatcaatgtgatccatgccttccagtatgtcatctatggaactgcctctttcttcttcctttatggggccctcctgctggctgagggcttctacaccaccggcgcagtcaggcagatctttggcgactacaagaccaccatctgcggcaagggcctgagcgcaacggtaacagggggccagaaggggaggggttccagaggccaacatcaagctcattctttggagcgggtgtgtcattgtttgggaaaatggctaggacatcccgacaagtttgtgggcatcacctatgccctgaccgttgtgtggctcctggtgtttgcctgctctgctgtgcctgtgtacatttacttcaacacctggaccacctgccagtctattgccttccccagcaagacctctgccagtataggcagtctctgtgctgatgccagaatgtatggtgttctcccatggaatgctttccctggcaaggtttgtggctccaaccttctgtccatctgcaaaacagctgagttccaaatgaccttccacctgtttattgctgcatttgtgggggctgcagctacactggtttccctgctcaccttcatgattgctgccacttacaactttgccgtccttaaactcatgggccgaggcaccaagttctgatcccccgtagaaatccccctttctctaatagcgaggctctaaccacacagcctacaatgctgcgtctcccatcttaactctttgcctttgccaccaactggccctcttcttacttgatgagtgtaacaagaaaggagagtcttgcagtgattaaggtctctctttggactctcccctcttatgtacctcttttagtcattttgcttcatagctggttcctgctagaaatgggaaatgcctaagaagatgacttcccaactgcaagtcacaaaggaatggaggctctaattgaattttcaagcatctcctgaggatcagaaagtaatttcttctcaaagggtacttccactgatggaaacaaagtggaaggaaagatgctcaggtacagagaaggaatgtctttggtcctcttgccatctataggggccaaatatattctctttggtgtacaaaatggaattcattctggtctctctattaccactgaagatagaagaaaaaagaatgtcagaaaaacaataagagcgtttgcccaaatctgcctattgcagctgggagaagggggtcaaagcaaggatctttcacccacagaaagagagcactgaccccgatggcgatggactactgaagccctaactcagccaaccttacttacagcataagggagcgtagaatctgtgtagacgaagggggcatctggccttacacctcgttagggaagagaaacagggtgttgtcagcatcttctcactcccttctccttgataacagctaccatgacaaccctgtggtttccaaggagctgagaatagaaggaaactagcttacatgagaacagactggcctgaggagcagcagttgctggtggctaatggtgtaacctgagatggccctctggtagacacaggatagataactctttggatagcatgtctttttttctgttaattagttgtgtactctggcctctgtcatatcttcacaatggtgctcatttcatggggtattatccattcagtcatcgtaggtgatttgaaggtcttgatttgttttagaatgatgcacatttcatgtattccagtttgtttattacttatttggggttgcatcagaaatgtctggagaataattctttgattatgactgttttttaaactaggaaaattggacattaagcatcacaaatgatattaaaaattggctagttgaatctattgggattttctacaagtattctgcctttgcagaaacagatttggtgaatttgaatctcaatttgagtaatctgatcgttctttctagctaatggaaaatgattttacttagcaatgttatcttggtgtgttaagagttaggtttaacataaaggttattttctcctgatatagatcacataacagaatgcaccagtcatcagctattcagttggtaagcttccaggaaaaaggacaggcagaaagagtttgagacctgaatagctcccagatttcagtcttttcctgtttttgttaactttgggttaaaaaaaaaaaaagtctgattggttttaattgaaggaaagatttgtactacagttcttttgttgtaaagagttgtgttgttcttttcccccaaagtggtttcagcaatatttaaggagatgtaagagctttacaaaaagacacttgatacttgttttcaaaccagtatacaagataagcttccaggctgcatagaaggaggagagggaaaatgttttgtaagaaaccaatcaagataaaggacagtgaagtaatccgtaccttgtgttttgttttgatttaataacataacaaataaccaacccttccctgaaaacctcacatgcatacatacacatatatacacacacaaagagagttaatcaactgaaagtgtttccttcatttctgatatagaattgcaattttaacacacataaaggataaacttttagaaacttatcttacaaagtgtattttataaaattaaagaaaataaaattaagaatgttctcaatcaaaaaaaaaaaa

SEQ ID NO: 435393 - DNA, 3021 bp, Homo sapiens
  misc_feature (2978)..(2978): n is a, c, g, or t
  misc_feature (2993)..(2993): n is a, c, g, or t
agcggagaaagcccttttcattgcaggagaagaggacaaagatactcagagagaaaaagtaaaagaccgaagaaggaggctggagagaccaggatccttccagctgaacaaagtcagccacaaagcagactagccagccggctacaattggagtcagagtcccaaagacatgggcttgttagagtgctgtgcaagatgtctggtaggggccccctttgcttccctggtggccactggattgtgtttctttggggtggcactgttctgtggctgtggacatgaagccctcactggcacagaaaagctaattgagacctatttctccaaaaactaccaagactatgagtatctcatcaatgtgatccatgccttccagtatgtcatctatggaactgcctctttcttcttcctttatggggccctcctgctggctgagggcttctacaccaccggcgcagtcaggcagatctttggcgactacaagaccaccatctgcggcaagggcctgagcgcaacggtaacagggggccagaaggggaggggttccagaggccaacatcaagctcattctttggagcgggtgtgtcattgtttgggaaaatggctaggacatcccgacaagtttgtgggcatcacctatgccctgaccgttgtgtggctcctggtgtttgcctgctctgctgtgcctgtgtacatttacttcaacacctggaccacctgccagtctattgccttccccagcaagacctctgccagtataggcagtctctgtgctgatgccagaatgtatggtgttctcccatggaatgctttccctggcaaggtttgtggctccaaccttctgtccatctgcaaaacagctgagttccaaatgaccttccacctgtttattgctgcatttgtgggggctgcagctacactggtttccctgctcaccttcatgattgctgccacttacaactttgccgtccttaaactcatgggccgaggcaccaagttctgatcccccgtagaaatccccctttctctaatagcgaggctctaaccacacagcctacaatgctgcgtctcccatcttaactctttgcctttgccaccaactggccctcttcttacttgatgagtgtaacaagaaaggagagtcttgcagtgattaaggtctctctttggactctcccctcttatgtacctcttttagtcattttgcttcatagctggttcctgctagaaatgggaaatgcctaagaagatgacttcccaactgcaagtcacaaaggaatggaggctctaattgaattttcaagcatctcctgaggatcagaaagtaatttcttctcaaagggtacttccactgatggaaacaaagtggaaggaaagatgctcaggtacagagaaggaatgtctttggtcctcttgccatctataggggccaaatatattctctttggtgtacaaaatggaattcattctggtctctctattaccactgaagatagaagaaaaaagaatgtcagaaaaacaataagagcgtttgcccaaatctgcctattgcagctgggagaagggggtcaaagcaaggatctttcacccacagaaagagagcactgaccccgatggcgatggactactgaagccctaactcagccaaccttacttacagcataagggagcgtagaatctgtgtagacgaagggggcatctggccttacacctcgttagggaagagaaacagggtgttgtcagcatcttctcactcccttctccttgataacagctaccatgacaaccctgtggtttccaaggagctgagaatagaaggaaactagcttacatgagaacagactggcctgaggagcagcagttgctggtggctaatggtgtaacctgagatggccctctggtagacacaggatagataactctttggatagcatgtctttttttctgttaattagttgtgtactctggcctctgtcatatcttcacaatggtgctcatttcatggggtattatccattcagtcatcgtaggtgatttgaaggtcttgatttgttttagaatgatgcacatttcatgtattccagtttgtttattacttatttggggttgcatcagaaatgtctggagaataattctttgattatgactgttttttaaactaggaaaattggacattaagcatcacaaatgatattaaaaattggctagttgaatctattgggattttctacaagtattctgcctttgcagaaacagatttggtgaatttgaatctcaatttgagtaatctgatcgttctttctagctaatggaaaatgattttacttagcaatgttatcttggtgtgttaagagttaggtttaacataaaggttattttctcctgatatagatcacataacagaatgcaccagtcatcagctattcagttggtaagcttccaggaaaaaggacaggcagaaagagtttgagacctgaatagctcccagatttcagtcttttcctgtttttgttaactttgggttaaaaaaaaaaaaagtctgattggttttaattgaaggaaagatttgtactacagttcttttgttgtaaagagttgtgttgttcttttcccccaaagtggtttcagcaatatttaaggagatgtaagagctttacaaaaagacacttgatacttgttttcaaaccagtatacaagataagcttccaggctgcatagaaggaggagagggaaaatgttttgtaagaaaccaatcaagataaaggacagtgaagtaatccgtaccttgtgttttgttttgatttaataacataacaaataaccaacccttccctgaaaacctcacatgcatacatacacatatatacacacacaaagagagttaatcaactgaaagtgtttccttcatttctgatatagaattgcaattttaacacacataaggtaattatcagcagttttcaaacaaggtgtaattnttaacggcgccgggnaaaataaatacatcttttccccctcatc

SEQ ID NO: 435394 - DNA, 2974 bp, Homo sapiens
agcggagaaagcccttttcattgcaggagaagaggacaaagatactcagagagaaaaagtaaaagaccgaagaaggaggctggagagaccaggatccttccagctgaacaaagtcagccacaaagcagactagccagccggctacaattggagtcagagtcccaaagacatgggcttgttagagtgctgtgcaagatgtctggtaggggccccctttgcttccctggtggccactggattgtgtttctttggggtggcactgttctgtggctgtggacatgaagccctcactggcacagaaaagctaattgagacctatttctccaaaaactaccaagactatgagtatctcatcaatgtgatccatgccttccagtatgtcatctatggaactgcctctttcttcttcctttatggggccctcctgctggctgagggcttctacaccaccggcgcagtcaggcagatctttggcgactacaagaccaccatctgcggcaagggcctgagcgcaacggtaacagggggccagaaggggaggggttccagaggccaacatcaagctcattctttggagcgggtgtgtcattgtttgggaaaatggctaggacatcccgacaagtttgtgggcatcacctatgccctgaccgttgtgtggctcctggtgtttgcctgctctgctgtgcctgtgtacatttacttcaacacctggaccacctgccagtctattgccttccccagcaagacctctgccagtataggcagtctctgtgctgatgccagaatgtatggtgttctcccatggaatgctttccctggcaaggtttgtggctccaaccttctgtccatctgcaaaacagctgagttccaaatgaccttccacctgtttattgctgcatttgtgggggctgcagctacactggtttccctgctcaccttcatgattgctgccacttacaactttgccgtccttaaactcatgggccgaggcaccaagttctgatcccccgtagaaatccccctttctctaatagcgaggctctaaccacacagcctacaatgctgcgtctcccatcttaactctttgcctttgccaccaactggccctcttcttacttgatgagtgtaacaagaaaggagagtcttgcagtgattaaggtctctctttggactctcccctcttatgtacctcttttagtcattttgcttcatagctggttcctgctagaaatgggaaatgcctaagaagatgacttcccaactgcaagtcacaaaggaatggaggctctaattgaattttcaagcatctcctgaggatcagaaagtaatttcttctcaaagggtacttccactgatggaaacaaagtggaaggaaagatgctcaggtacagagaaggaatgtctttggtcctcttgccatctataggggccaaatatattctctttggtgtacaaaatggaattcattctggtctctctattaccactgaagatagaagaaaaaagaatgcaaagcaaggatctttcacccacagaaagagagcactgaccccgatggcgatggactactgaagccctaactcagccaaccttacttacagcataagggagcgtagaatctgtgtagacgaagggggcatctggccttacacctcgttagggaagagaaacagggtgttgtcagcatcttctcactcccttctccttgataacagctaccatgacaaccctgtggtttccaaggagctgagaatagaaggaaactagcttacatgagaacagactggcctgaggagcagcagttgctggtggctaatggtgtaacctgagatggccctctggtagacacaggatagataactctttggatagcatgtctttttttctgttaattagttgtgtactctggcctctgtcatatcttcacaatggtgctcatttcatggggtattatccattcagtcatcgtaggtgatttgaaggtcttgatttgttttagaatgatgcacatttcatgtattccagtttgtttattacttatttggggttgcatcagaaatgtctggagaataattctttgattatgactgttttttaaactaggaaaattggacattaagcatcacaaatgatattaaaaattggctagttgaatctattgggattttctacaagtattctgcctttgcagaaacagatttggtgaatttgaatctcaatttgagtaatctgatcgttctttctagctaatggaaaatgattttacttagcaatgttatcttggtgtgttaagagttaggtttaacataaaggttattttctcctgatatagatcacataacagaatgcaccagtcatcagctattcagttggtaagcttccaggaaaaaggacaggcagaaagagtttgagacctgaatagctcccagatttcagtcttttcctgtttttgttaactttgggttaaaaaaaaaaaaagtctgattggttttaattgaaggaaagatttgtactacagttcttttgttgtaaagagttgtgttgttcttttcccccaaagtggtttcagcaatatttaaggagatgtaagagctttacaaaaagacacttgatacttgttttcaaaccagtatacaagataagcttccaggctgcatagaaggaggagagggaaaatgttttgtaagaaaccaatcaagataaaggacagtgaagtaatccgtaccttgtgttttgttttgatttaataacataacaaataaccaacccttccctgaaaacctcacatgcatacatacacatatatacacacacaaagagagttaatcaactgaaagtgtttccttcatttctgatatagaattgcaattttaacacacataaaggataaacttttagaaacttatcttacaaagtgtattttataaaattaaagaaaataaaattaagaatgttctcaatcaaaaaaaaaaaa

SEQ ID NO: 435395 - DNA, 2928 bp, Homo sapiens
agcggagaaagcccttttcattgcaggagaagaggacaaagatactcagagagaaaaagtaaaagaccgaagaaggaggctggagagaccaggatccttccagctgaacaaagtcagccacaaagcagactagccagccggctacaattggagtcagagtcccaaagacatgggcttgttagagtgctgtgcaagatgtctggtaggggccccctttgcttccctggtggccactggattgtgtttctttggggtggcactgttctgtggctgtggacatgaagccctcactggcacagaaaagctaattgagacctatttctccaaaaactaccaagactatgagtatctcatcaatgtgatccatgccttccagtatgtcatctatggaactgcctctttcttcttcctttatggggccctcctgctggctgagggcttctacaccaccggcgcagtcaggcagatctttggcgactacaagaccaccatctgcggcaagggcctgagcgcaacgtttgtgggcatcacctatgccctgaccgttgtgtggctcctggtgtttgcctgctctgctgtgcctgtgtacatttacttcaacacctggaccacctgccagtctattgccttccccagcaagacctctgccagtataggcagtctctgtgctgatgccagaatgtatggtgttctcccatggaatgctttccctggcaaggtttgtggctccaaccttctgtccatctgcaaaacagctgagttccaaatgaccttccacctgtttattgctgcatttgtgggggctgcagctacactggtttccctgctcaccttcatgattgctgccacttacaactttgccgtccttaaactcatgggccgaggcaccaagttctgatcccccgtagaaatccccctttctctaatagcgaggctctaaccacacagcctacaatgctgcgtctcccatcttaactctttgcctttgccaccaactggccctcttcttacttgatgagtgtaacaagaaaggagagtcttgcagtgattaaggtctctctttggactctcccctcttatgtacctcttttagtcattttgcttcatagctggttcctgctagaaatgggaaatgcctaagaagatgacttcccaactgcaagtcacaaaggaatggaggctctaattgaattttcaagcatctcctgaggatcagaaagtaatttcttctcaaagggtacttccactgatggaaacaaagtggaaggaaagatgctcaggtacagagaaggaatgtctttggtcctcttgccatctataggggccaaatatattctctttggtgtacaaaatggaattcattctggtctctctattaccactgaagatagaagaaaaaagaatgtcagaaaaacaataagagcgtttgcccaaatctgcctattgcagctgggagaagggggtcaaagcaaggatctttcacccacagaaagagagcactgaccccgatggcgatggactactgaagccctaactcagccaaccttacttacagcataagggagcgtagaatctgtgtagacgaagggggcatctggccttacacctcgttagggaagagaaacagggtgttgtcagcatcttctcactcccttctccttgataacagctaccatgacaaccctgtggtttccaaggagctgagaatagaaggaaactagcttacatgagaacagactggcctgaggagcagcagttgctggtggctaatggtgtaacctgagatggccctctggtagacacaggatagataactctttggatagcatgtctttttttctgttaattagttgtgtactctggcctctgtcatatcttcacaatggtgctcatttcatggggtattatccattcagtcatcgtaggtgatttgaaggtcttgatttgttttagaatgatgcacatttcatgtattccagtttgtttattacttatttggggttgcatcagaaatgtctggagaataattctttgattatgactgttttttaaactaggaaaattggacattaagcatcacaaatgatattaaaaattggctagttgaatctattgggattttctacaagtattctgcctttgcagaaacagatttggtgaatttgaatctcaatttgagtaatctgatcgttctttctagctaatggaaaatgattttacttagcaatgttatcttggtgtgttaagagttaggtttaacataaaggttattttctcctgatatagatcacataacagaatgcaccagtcatcagctattcagttggtaagcttccaggaaaaaggacaggcagaaagagtttgagacctgaatagctcccagatttcagtcttttcctgtttttgttaactttgggttaaaaaaaaaaaaagtctgattggttttaattgaaggaaagatttgtactacagttcttttgttgtaaagagttgtgttgttcttttcccccaaagtggtttcagcaatatttaaggagatgtaagagctttacaaaaagacacttgatacttgttttcaaaccagtatacaagataagcttccaggctgcatagaaggaggagagggaaaatgttttgtaagaaaccaatcaagataaaggacagtgaagtaatccgtaccttgtgttttgttttgatttaataacataacaaataaccaacccttccctgaaaacctcacatgcatacatacacatatatacacacacaaagagagttaatcaactgaaagtgtttccttcatttctgatatagaattgcaattttaacacacataaaggataaacttttagaaacttatcttacaaagtgtattttataaaattaaagaaaataaaattaagaatgttctcaatcaaaaaaaaaaaa

SEQ ID NO: 435396 - DNA, 2974 bp, Homo sapiens
agcggagaaagcccttttcattgcaggagaagaggacaaagatactcagagagaaaaagtaaaagaccgaagaaggaggctggagagaccaggatccttccagctgaacaaagtcagccacaaagcagactagccagccggctacaattggagtcagagtcccaaagacatgggcttgttagagtgctgtgcaagatgtctggtaggggccccctttgcttccctggtggccactggattgtgtttctttggggtggcactgttctgtggctgtggacatgaagccctcactggcacagaaaagctaattgagacctatttctccaaaaactaccaagactatgagtatctcatcaatgtgatccatgccttccagtatgtcatctatggaactgcctctttcttcttcctttatggggccctcctgctggctgagggcttctacaccaccggcgcagtcaggcagatctttggcgactacaagaccaccatctgcggcaagggcctgagcgcaacggtaacagggggccagaaggggaggggttccagaggccaacatcaagctcattctttggagcgggtgtgtcattgtttgggaaaatggctaggacatcccgacaagtttgtgggcatcacctatgccctgaccgttgtgtggctcctggtgtttgcctgctctgctgtgcctgtgtacatttacttcaacacctggaccacctgccagtctattgccttccccagcaagacctctgccagtataggcagtctctgtgctgatgccagaatgtatggtgttctcccatggaatgctttccctggcaaggtttgtggctccaaccttctgtccatctgcaaaacagctgagttccaaatgaccttccacctgtttattgctgcatttgtgggggctgcagctacactggtttccctgctcaccttcatgattgctgccacttacaactttgccgtccttaaactcatgggccgaggcaccaagttctgatcccccgtagaaatccccctttctctaatagcgaggctctaaccacacagcctacaatgctgcgtctcccatcttaactctttgcctttgccaccaactggccctcttcttacttgatgagtgtaacaagaaaggagagtcttgcagtgattaaggtctctctttggactctcccctcttatgtacctcttttagtcattttgcttcatagctggttcctgctagaaatgggaaatgcctaagaagatgacttcccaactgcaagtcacaaaggaatggaggctctaattgaattttcaagcatctcctgaggatcagaaagtaatttcttctcaaagggtacttccactgatggaaacaaagtggaaggaaagatgctcaggtacagagaaggaatgtctttggtcctcttgccatctataggggccaaatatattctctttggtgtacaaaatggaattcattctggtctctctattaccactgaagatagaagaaaaaagaatgtcagaaaaacaataagagcgtttgcccaaatctgcctattgcagctgggagaagggggtcaaagcaaggatctttcacccacagaaagagagcactgaccccgatggcgatggactactgaagccctaactcagccaaccttacttacagcataagggagcgtagaatctgtgtagacgaagggggcatctggccttacacctcgttagggaagagaaacagggtgttgtcagcatcttctcactcccttctccttgataacagctaccatgacaaccctgtggtttccaaggagctgagaatagaaggaaactagcttacatgagaacagactggcctgaggagcagcagttgctggtggctaatggtgtaacctgagatggccctctggtagacacaggatagataactctttggatagcatgtctttttttctgttaattagttgtgtactctggcctctgtcatatcttcacaatggtgctcatttcatggggtattatccattcagtcatcgtaggtgatttgaaggtcttgatttgttttagaatgatgcacatttcatgtattccagtttgtttattacttatttggggttgcatcagaaatgtctggagaataattctttgattatgactgttttttaaactaggaaaattggacattaagcatcacaaatgatattaaaaattggctagttgaatctattgggattttctacaagtattctgcctttgcagaaacagatttggtgaatttgaatctcaatttgagtaatctgatcgttctttctagctaatggaaaatgattttacttagcaatgttatcttggtgtgttaagagttaggtttaacataaaggttattttctcctgatatagatcacataacagaatgcaccagtcatcagctattcagttggtaagcttccaggaaaaaggacaggcagaaagagtttgagacctgaatagctcccagatttcagtcttttcctgtttttgttaactttgggttaaaagtaaagagttgtgttgttcttttcccccaaagtggtttcagcaatatttaaggagatgtaagagctttacaaaaagacacttgatacttgttttcaaaccagtatacaagataagcttccaggctgcatagaaggaggagagggaaaatgttttgtaagaaaccaatcaagataaaggacagtgaagtaatccgtaccttgtgttttgttttgatttaataacataacaaataaccaacccttccctgaaaacctcacatgcatacatacacatatatacacacacaaagagagttaatcaactgaaagtgtttccttcatttctgatatagaattgcaattttaacacacataaaggataaacttttagaaacttatcttacaaagtgtattttataaaattaaagaaaataaaattaagaatgttctcaatcaaaaaaaaaaaa

SEQ ID NO: 435397 - DNA, 2978 bp, Homo sapiens
agcggagaaagcccttttcattgcaggagaagaggacaaagatactcagagagaaaaagtaaaagaccgaagaaggaggctggagagaccaggatccttccagctgaacaaagtcagccacaaagcagactagccagccggctacaattggagtcagagtcccaaagacatgggcttgttagagtgctgtgcaagatgtctggtaggggccccctttgcttccctggtggccactggattgtgtttctttggggtggcactgttctgtggctgtggacatgaagccctcactggcacagaaaagctaattgagacctatttctccaaaaactaccaagactatgagtatctcatcaatgtgatccatgccttccagtatgtcatctatggaactgcctctttcttcttcctttatggggccctcctgctggctgagggcttctacaccaccggcgcagtcaggcagatctttggcgactacaagaccaccatctgcggcaagggcctgagcgcaacggtaacagggggccagaaggggaggggttccagaggccaacatcaagctcattctttggagcgggtgtgtcattgtttgggaaaatggctaggacatcccgacaagtttgtgggcatcacctatgccctgaccgttgtgtggctcctggtgtttgcctgctctgctgtgcctgtgtacatttacttcaacacctggaccacctgccagtctattgccttccccagcaagacctctgccagtataggcagtctctgtgctgatgccagaatgtatggtgttctcccatggaatgctttccctggcaaggtttgtggctccaaccttctgtccatctgcaaaacagctgagttccaaatgaccttccacctgtttattgctgcatttgtgggggctgcagctacactggtttccctgctcaccttcatgattgctgccacttacaactttgccgtccttaaactcatgggccgaggcaccaagttctgatcccccgtagaaatccccctttctctaatagcgaggctctaaccacacagcctacaatgctgcgtctcccatcttaactctttgcctttgccaccaactggccctcttcttacttgatgagtgtaacaagaaaggagagtcttgcagtgattaaggtctctctttggactctcccctcttatgtacctcttttagtcattttgcttcatagctggttcctgctagaaatgggaaatgcctaagaagatgacttcccaactgcaagtcacaaaggaatggaggctctaattgaattttcaagcatctcctgaggatcagaaagtaatttcttctcaaagggtacttccactgatggaaacaaagtggaaggaaagatgctcaggtacagagaaggaatgtctttggtcctcttgccatctataggggccaaatatattctctttggtgtacaaaatggaattcattctggtctctctattaccactgaagatagaagaaaaaagaatgtcagaaaaacaataagagcgtttgcccaaatctgcctattgcagctgggagaagggggtcaaagcaaggatctttcacccacagaaagagagcactgaccccgatggcgatggactactgaagccctaactcagccaaccttacttacagcataagggagcgtagaatctgtgtagacgaagggggcatctggccttacacctcgttagggaagagaaacagggtgttgtcagcatcttctcactcccttctccttgataacagctaccatgacaaccctgtggtttccaaggagctgagaatagaaggaaactagcttacatgagaacagactggcctgaggagcagcagttgctggtggctaatggtgtaacctgagatggccctctggtagacacaggatagataactctttggatagcatgtctttttttctgttaattagttgtgtactctggcctctgtcatatcttcacaatggtgctcatttcatggggtattatccattcagtcatcgtaggtgatttgaaggtcttgatttgttttagaatgatgcacatttcatgtattccagtttgtttattacttatttggggttgcatcagaaatgtctggagaataattctttgattatgactgttttttaaactaggaaaattggacattaagcatcacaaatttgcagaaacagatttggtgaatttgaatctcaatttgagtaatctgatcgttctttctagctaatggaaaatgattttacttagcaatgttatcttggtgtgttaagagttaggtttaacataaaggttattttctcctgatatagatcacataacagaatgcaccagtcatcagctattcagttggtaagcttccaggaaaaaggacaggcagaaagagtttgagacctgaatagctcccagatttcagtcttttcctgtttttgttaactttgggttaaaaaaaaaaaaagtctgattggttttaattgaaggaaagatttgtactacagttcttttgttgtaaagagttgtgttgttcttttcccccaaagtggtttcagcaatatttaaggagatgtaagagctttacaaaaagacacttgatacttgttttcaaaccagtatacaagataagcttccaggctgcatagaaggaggagagggaaaatgttttgtaagaaaccaatcaagataaaggacagtgaagtaatccgtaccttgtgttttgttttgatttaataacataacaaataaccaacccttccctgaaaacctcacatgcatacatacacatatatacacacacaaagagagttaatcaactgaaagtgtttccttcatttctgatatagaattgcaattttaacacacataaaggataaacttttagaaacttatcttacaaagtgtattttataaaattaaagaaaataaaattaagaatgttctcaatcaaaaaaaaaaaa

SEQ ID NO: 435398 - DNA, 2693 bp, Homo sapiens
agcggagaaagcccttttcattgcaggagaagaggacaaagatactcagagagaaaaagtaaaagaccgaagaaggaggctggagagaccaggatccttccagctgaacaaagtcagccacaaagcagactagccagccggctacaattggagtcagagtcccaaagacatgggcttgttagagtgctgtgcaagatgtctggtaggggccccctttgcttccctggtggccactggattgtgtttctttggggtggcactgttctgtggctgtggacatgaagccctcactggcacagaaaagctaattgagacctatttctccaaaaactaccaagactatgagtatctcatcaatgtgatccatgccttccagtatgtcatctatggaactgcctctttcttcttcctttatggggccctcctgctggctgagggcttctacaccaccggcgcagtcaggcagatctttggcgactacaagaccaccatctgcggcaagggcctgagcgcaacggtaacagggggccagaaggggaggggttccagaggccaacatcaagctcattctttggagcgggtgtgtcattgtttgggaaaatggctaggacatcccgacaagtttgtgggcatcacctatgccctgaccgttgtgtggctcctggtgtttgcctgctctgctgtgcctgtgtacatttacttcaacacctggaccacctgccagtctattgccttccccagcaagacctctgccagtataggcagtctctgtgctgatgccagaatgtatggtgttctcccatggaatgctttccctggcaaggtttgtggctccaaccttctgtccatctgcaaaacagctgagttccaaatgaccttccacctgtttattgctgcatttgtgggggctgcagctacactggtttccctgctcaccttcatgattgctgccacttacaactttgccgtccttaaactcatgggccgaggcaccaagttctgatcccccgtagaaatccccctttctctaatagcgaggctctaaccacacagcctacaatgctgcgtctcccatcttaactctttgcctttgccaccaactggccctcttcttacttgatgagtgtaacaagaaaggagagtcttgcagtgattaaggtctctctttggactctcccctcttatgtacctcttttagtcattttgcttcatagctggttcctgctagaaatgggaaatgcctaagaagatgacttcccaactgcaagtcacaaaggaatggaggctctaattgaattttcaagcatctcctgaggatcagaaagtaatttcttctcaaagggtacttccactgatggaaacaaagtggaaggaaagatgctcaggtacagagaaggaatgtctttggtcctcttgccatctataggggccaaatatattctctttggtgtacaaaatggaattcattctggtctctctattaccactgaagatagaagaaaaaagaatgtcagaaaaacaataagagcgtttgcccaaatctgcctattgcagctgggagaagggggtcaaagcaaggatctttcacccacagaaagagagcactgaccccgatggcgatggactactgaagccctaactcagccaaccttacttacagcataagggagcgtagaatctgtgtagacgaagggggcatctggccttacacctcgttagggaagagaaacagggtgttgtcagcatcttctcactcccttctccttgataacagctaccatgacaaccctgtggtttccaaggagctgagaatagaaggaaactagcttacatgagaacagactggcctgaggagcagcagttgctggtggctaatggtgtaacctgagatggccctctggtagacacaggatagataactctttggatagcatgtctttttttctgttaattagttgtgtactctggcctctgtcatatcttcacaatggtgctcatttcatggggtattatccattcagtcatcgtaggtgatttgaaggtcttgatttgttttagaatgatgcacatttcatgtattccagtttgtttattacttatttggggttgcatcagaaatgtctggagaataattctttgattatgactgttttttaaactaggaaaattggacattaagcatcacaaatgatattaaaaattggctagttgaatctattgggattttctacaagtattctgcctttgcagaaacagatttggtgaatttgaatctcaatttgagtaatctgatcgttctttctagctaatggaaaatgattttacttagcaatgttatcttggtgtgttaagagttaggtttaacataaaggttattttctcctgatatagatcacataacagaatgcaccagtcatcagctattcagttggtaagcttccaggaaaaaggacaggcagaaagagtttgagacctgaatagctcccagatttcagtcttttcctgtttttgttaactttgggttaaaaccgaattcggcacgagtctcaacacagataccaccactttctttttcccattatagacatggtgaatccacacagcatacttcatctctgagctatgatgtgattcctcaacacattaccctaaccagccagcagttacagatttcagagtgatgcagttctgtt

SEQ ID NO: 435399 - DNA, 2886 bp, Homo sapiens
agcggagaaagcccttttcattgcaggagaagaggacaaagatactcagagagaaaaagtaaaagaccgaagaaggaggctggagagaccaggatccttccagctgaacaaagtcagccacaaagcagactagccagccggctacaattggagtcagagtcccaaagacatgggcttgttagagtgctgtgcaagatgtctggtaggggccccctttgcttccctggtggccactggattgtgtttctttggggtggcactgttctgtggctgtggacatgaagccctcactggcacagaaaagctaattgagacctatttctccaaaaactaccaagactatgagtatctcatcaatgtgatccatgccttccagtatgtcatctatggaactgcctctttcttcttcctttatggggccctcctgctggctgagggcttctacaccaccggcgcagtcaggcagatctttggcgactacaagaccaccatctgcggcaagggcctgagcgcaacgtttgtgggcatcacctatgccctgaccgttgtgtggctcctggtgtttgcctgctctgctgtgcctgtgtacatttacttcaacacctggaccacctgccagtctattgccttccccagcaagacctctgccagtataggcagtctctgtgctgatgccagaatgtatggtgttctcccatggaatgctttccctggcaaggtttgtggctccaaccttctgtccatctgcaaaacagctgaggctgcagctacactggtttccctgctcaccttcatgattgctgccacttacaactttgccgtccttaaactcatgggccgaggcaccaagttctgatcccccgtagaaatccccctttctctaatagcgaggctctaaccacacagcctacaatgctgcgtctcccatcttaactctttgcctttgccaccaactggccctcttcttacttgatgagtgtaacaagaaaggagagtcttgcagtgattaaggtctctctttggactctcccctcttatgtacctcttttagtcattttgcttcatagctggttcctgctagaaatgggaaatgcctaagaagatgacttcccaactgcaagtcacaaaggaatggaggctctaattgaattttcaagcatctcctgaggatcagaaagtaatttcttctcaaagggtacttccactgatggaaacaaagtggaaggaaagatgctcaggtacagagaaggaatgtctttggtcctcttgccatctataggggccaaatatattctctttggtgtacaaaatggaattcattctggtctctctattaccactgaagatagaagaaaaaagaatgtcagaaaaacaataagagcgtttgcccaaatctgcctattgcagctgggagaagggggtcaaagcaaggatctttcacccacagaaagagagcactgaccccgatggcgatggactactgaagccctaactcagccaaccttacttacagcataagggagcgtagaatctgtgtagacgaagggggcatctggccttacacctcgttagggaagagaaacagggtgttgtcagcatcttctcactcccttctccttgataacagctaccatgacaaccctgtggtttccaaggagctgagaatagaaggaaactagcttacatgagaacagactggcctgaggagcagcagttgctggtggctaatggtgtaacctgagatggccctctggtagacacaggatagataactctttggatagcatgtctttttttctgttaattagttgtgtactctggcctctgtcatatcttcacaatggtgctcatttcatggggtattatccattcagtcatcgtaggtgatttgaaggtcttgatttgttttagaatgatgcacatttcatgtattccagtttgtttattacttatttggggttgcatcagaaatgtctggagaataattctttgattatgactgttttttaaactaggaaaattggacattaagcatcacaaatgatattaaaaattggctagttgaatctattgggattttctacaagtattctgcctttgcagaaacagatttggtgaatttgaatctcaatttgagtaatctgatcgttctttctagctaatggaaaatgattttacttagcaatgttatcttggtgtgttaagagttaggtttaacataaaggttattttctcctgatatagatcacataacagaatgcaccagtcatcagctattcagttggtaagcttccaggaaaaaggacaggcagaaagagtttgagacctgaatagctcccagatttcagtcttttcctgtttttgttaactttgggttaaaaaaaaaaaaagtctgattggttttaattgaaggaaagatttgtactacagttcttttgttgtaaagagttgtgttgttcttttcccccaaagtggtttcagcaatatttaaggagatgtaagagctttacaaaaagacacttgatacttgttttcaaaccagtatacaagataagcttccaggctgcatagaaggaggagagggaaaatgttttgtaagaaaccaatcaagataaaggacagtgaagtaatccgtaccttgtgttttgttttgatttaataacataacaaataaccaacccttccctgaaaacctcacatgcatacatacacatatatacacacacaaagagagttaatcaactgaaagtgtttccttcatttctgatatagaattgcaattttaacacacataaaggataaacttttagaaacttatcttacaaagtgtattttataaaattaaagaaaataaaattaagaatgttctcaatcaaaaaaaaaaaa

SEQ ID NO: 435400 - DNA, 3253 bp, Homo sapiens
agcggagtcttctatgccaggctaggaaagctgccttccaaaatttggtctgggaagacattatcctgggaatgagaagcaaagcctcagctctagaagcccaaataatagcagatgaccccaggctttcactggcacccagtacaggcagcaggctgccaccaagaaggctggcagtgccctcttgaggaatcccttggcagtgccaggagcctagctggactcaagaatattttgccaagggcacccagcagaaccaatggaagcagaatcacagaaataggagaagaggacaaagatactcagagagaaaaagtaaaagaccgaagaaggaggctggagagaccaggatccttccagctgaacaaagtcagccacaaagcagactagccagccggctacaattggagtcagagtcccaaagacatgggcttgttagagtgctgtgcaagatgtctggtaggggccccctttgcttccctggtggccactgtggacatgaagccctcactggcacagaaaagctaattgagacctatttctccaaaaactaccaagactatgagtatctcatcaatgtgatccatgccttccagtatgtcatctatggaactgcctctttcttcttcctttatggggccctcctgctggctgagggcttctacaccaccggcgcagtcaggcagatctttggcgactacaagaccaccatctgcggcaagggcctgagcgcaacggtaacagggggccagaaggggaggggttccagaggccaacatcaagctcattctttggagcgggtgtgtcattgtttgggaaaatggctaggacatcccgacaagtttgtgggcatcacctatgccctgaccgttgtgtggctcctggtgtttgcctgctctgctgtgcctgtgtacatttacttcaacacctggaccacctgccagtctattgccttccccagcaagacctctgccagtataggcagtctctgtgctgatgccagaatgtatggtgttctcccatggaatgctttccctggcaaggtttgtggctccaaccttctgtccatctgcaaaacagctgagttccaaatgaccttccacctgtttattgctgcatttgtgggggctgcagctacactggtttccctgctcaccttcatgattgctgccacttacaactttgccgtccttaaactcatgggccgaggcaccaagttctgatcccccgtagaaatccccctttctctaatagcgaggctctaaccacacagcctacaatgctgcgtctcccatcttaactctttgcctttgccaccaactggccctcttcttacttgatgagtgtaacaagaaaggagagtcttgcagtgattaaggtctctctttggactctcccctcttatgtacctcttttagtcattttgcttcatagctggttcctgctagaaatgggaaatgcctaagaagatgacttcccaactgcaagtcacaaaggaatggaggctctaattgaattttcaagcatctcctgaggatcagaaagtaatttcttctcaaagggtacttccactgatggaaacaaagtggaaggaaagatgctcaggtacagagaaggaatgtctttggtcctcttgccatctataggggccaaatatattctctttggtgtacaaaatggaattcattctggtctctctattaccactgaagatagaagaaaaaagaatgtcagaaaaacaataagagcgtttgcccaaatctgcctattgcagctgggagaagggggtcaaagcaaggatctttcacccacagaaagagagcactgaccccgatggcgatggactactgaagccctaactcagccaaccttacttacagcataagggagcgtagaatctgtgtagacgaagggggcatctggccttacacctcgttagggaagagaaacagggtgttgtcagcatcttctcactcccttctccttgataacagctaccatgacaaccctgtggtttccaaggagctgagaatagaaggaaactagcttacatgagaacagactggcctgaggagcagcagttgctggtggctaatggtgtaacctgagatggccctctggtagacacaggatagataactctttggatagcatgtctttttttctgttaattagttgtgtactctggcctctgtcatatcttcacaatggtgctcatttcatggggtattatccattcagtcatcgtaggtgatttgaaggtcttgatttgttttagaatgatgcacatttcatgtattccagtttgtttattacttatttggggttgcatcagaaatgtctggagaataattctttgattatgactgttttttaaactaggaaaattggacattaagcatcacaaatgatattaaaaattggctagttgaatctattgggattttctacaagtattctgcctttgcagaaacagatttggtgaatttgaatctcaatttgagtaatctgatcgttctttctagctaatggaaaatgattttacttagcaatgttatcttggtgtgttaagagttaggtttaacataaaggttattttctcctgatatagatcacataacagaatgcaccagtcatcagctattcagttggtaagcttccaggaaaaaggacaggcagaaagagtttgagacctgaatagctcccagatttcagtcttttcctgtttttgttaactttgggttaaaaaaaaaaaaagtctgattggttttaattgaaggaaagatttgtactacagttcttttgttgtaaagagttgtgttgttcttttcccccaaagtggtttcagcaatatttaaggagatgtaagagctttacaaaaagacacttgatacttgttttcaaaccagtatacaagataagcttccaggctgcatagaaggaggagagggaaaatgttttgtaagaaaccaatcaagataaaggacagtgaagtaatccgtaccttgtgttttgttttgatttaataacataacaaataaccaacccttccctgaaaacctcacatgcatacatacacatatatacacacacaaagagagttaatcaactgaaagtgtttccttcatttctgatatagaattgcaattttaacacacataaaggataaacttttagaaacttatcttacaaagtgtattttataaaattaaagaaaataaaattaagaatgttctcaatcaaaaaaaaaaaa

SEQ ID NO: 435401 - DNA, 2979 bp, Homo sapiens
agcggagaaagcccttttcattgcaggagaagaggacaaagatactcagagagaaaaagtaaaagaccgaagaaggaggctggagagaccaggatccttccagctgaacaaagtcagccacaaagcagactagccagccggctacaattggagtcagagtcccaaagacatgggcttgttagagtgctgtgcaagatgtctggtaggggccccctttgcttccctggtggccactggattgtgtttctttggggtggcactgttctgtggctgtggacatgaagccctcactggcacagaaaagctaattgagacctatttctccatcatctatggaactgcctctttcttcttcctttatggggccctcctgctggctgagggcttctacaccaccggcgcagtcaggcagatctttggcgactacaagaccaccatctgcggcaagggcctgagcgcaacggtaacagggggccagaaggggaggggttccagaggccaacatcaagctcattctttggagcgggtgtgtcattgtttgggaaaatggctaggacatcccgacaagtttgtgggcatcacctatgccctgaccgttgtgtggctcctggtgtttgcctgctctgctgtgcctgtgtacatttacttcaacacctggaccacctgccagtctattgccttccccagcaagacctctgccagtataggcagtctctgtgctgatgccagaatgtatggtgttctcccatggaatgctttccctggcaaggtttgtggctccaaccttctgtccatctgcaaaacagctgagttccaaatgaccttccacctgtttattgctgcatttgtgggggctgcagctacactggtttccctgctcaccttcatgattgctgccacttacaactttgccgtccttaaactcatgggccgaggcaccaagttctgatcccccgtagaaatccccctttctctaatagcgaggctctaaccacacagcctacaatgctgcgtctcccatcttaactctttgcctttgccaccaactggccctcttcttacttgatgagtgtaacaagaaaggagagtcttgcagtgattaaggtctctctttggactctcccctcttatgtacctcttttagtcattttgcttcatagctggttcctgctagaaatgggaaatgcctaagaagatgacttcccaactgcaagtcacaaaggaatggaggctctaattgaattttcaagcatctcctgaggatcagaaagtaatttcttctcaaagggtacttccactgatggaaacaaagtggaaggaaagatgctcaggtacagagaaggaatgtctttggtcctcttgccatctataggggccaaatatattctctttggtgtacaaaatggaattcattctggtctctctattaccactgaagatagaagaaaaaagaatgtcagaaaaacaataagagcgtttgcccaaatctgcctattgcagctgggagaagggggtcaaagcaaggatctttcacccacagaaagagagcactgaccccgatggcgatggactactgaagccctaactcagccaaccttacttacagcataagggagcgtagaatctgtgtagacgaagggggcatctggccttacacctcgttagggaagagaaacagggtgttgtcagcatcttctcactcccttctccttgataacagctaccatgacaaccctgtggtttccaaggagctgagaatagaaggaaactagcttacatgagaacagactggcctgaggagcagcagttgctggtggctaatggtgtaacctgagatggccctctggtagacacaggatagataactctttggatagcatgtctttttttctgttaattagttgtgtactctggcctctgtcatatcttcacaatggtgctcatttcatggggtattatccattcagtcatcgtaggtgatttgaaggtcttgatttgttttagaatgatgcacatttcatgtattccagtttgtttattacttatttggggttgcatcagaaatgtctggagaataattctttgattatgactgttttttaaactaggaaaattggacattaagcatcacaaatgatattaaaaattggctagttgaatctattgggattttctacaagtattctgcctttgcagaaacagatttggtgaatttgaatctcaatttgagtaatctgatcgttctttctagctaatggaaaatgattttacttagcaatgttatcttggtgtgttaagagttaggtttaacataaaggttattttctcctgatatagatcacataacagaatgcaccagtcatcagctattcagttggtaagcttccaggaaaaaggacaggcagaaagagtttgagacctgaatagctcccagatttcagtcttttcctgtttttgttaactttgggttaaaaaaaaaaaaagtctgattggttttaattgaaggaaagatttgtactacagttcttttgttgtaaagagttgtgttgttcttttcccccaaagtggtttcagcaatatttaaggagatgtaagagctttacaaaaagacacttgatacttgttttcaaaccagtatacaagataagcttccaggctgcatagaaggaggagagggaaaatgttttgtaagaaaccaatcaagataaaggacagtgaagtaatccgtaccttgtgttttgttttgatttaataacataacaaataaccaacccttccctgaaaacctcacatgcatacatacacatatatacacacacaaagagagttaatcaactgaaagtgtttccttcatttctgatatagaattgcaattttaacacacataaaggataaacttttagaaacttatcttacaaagtgtattttataaaattaaagaaaataaaattaagaatgttctcaatcaaaaaaaaaaaa

SEQ ID NO: 435402 - DNA, 3107 bp, Homo sapiens
agcggagtcttctatgccaggctaggaaagctgccttccaaaatttggtctgggaagacattatcctgggaatgagaagcaaagcctcagctctagaagcccaaataatagcagatgaccccaggctttcactggcacccagtacaggcagcaggctgccaccaagaaggctggcagtgccctcttgaggaatcccttggcagtgccaggagcctagctggactcaagaatattttgccaagggcacccagcagaaccaatggaagcagaatcacagaaataggagaagaggacaaagatactcagagagaaaaagtaaaagaccgaagaaggaggctggagagctgtggacatgaagccctcactggcacagaaaagctaattgagacctatttctccaaaaactaccaagactatgagtatctcatcaatgtgatccatgccttccagtatgtcatctatggaactgcctctttcttcttcctttatggggccctcctgctggctgagggcttctacaccaccggcgcagtcaggcagatctttggcgactacaagaccaccatctgcggcaagggcctgagcgcaacggtaacagggggccagaaggggaggggttccagaggccaacatcaagctcattctttggagcgggtgtgtcattgtttgggaaaatggctaggacatcccgacaagtttgtgggcatcacctatgccctgaccgttgtgtggctcctggtgtttgcctgctctgctgtgcctgtgtacatttacttcaacacctggaccacctgccagtctattgccttccccagcaagacctctgccagtataggcagtctctgtgctgatgccagaatgtatggtgttctcccatggaatgctttccctggcaaggtttgtggctccaaccttctgtccatctgcaaaacagctgagttccaaatgaccttccacctgtttattgctgcatttgtgggggctgcagctacactggtttccctgctcaccttcatgattgctgccacttacaactttgccgtccttaaactcatgggccgaggcaccaagttctgatcccccgtagaaatccccctttctctaatagcgaggctctaaccacacagcctacaatgctgcgtctcccatcttaactctttgcctttgccaccaactggccctcttcttacttgatgagtgtaacaagaaaggagagtcttgcagtgattaaggtctctctttggactctcccctcttatgtacctcttttagtcattttgcttcatagctggttcctgctagaaatgggaaatgcctaagaagatgacttcccaactgcaagtcacaaaggaatggaggctctaattgaattttcaagcatctcctgaggatcagaaagtaatttcttctcaaagggtacttccactgatggaaacaaagtggaaggaaagatgctcaggtacagagaaggaatgtctttggtcctcttgccatctataggggccaaatatattctctttggtgtacaaaatggaattcattctggtctctctattaccactgaagatagaagaaaaaagaatgtcagaaaaacaataagagcgtttgcccaaatctgcctattgcagctgggagaagggggtcaaagcaaggatctttcacccacagaaagagagcactgaccccgatggcgatggactactgaagccctaactcagccaaccttacttacagcataagggagcgtagaatctgtgtagacgaagggggcatctggccttacacctcgttagggaagagaaacagggtgttgtcagcatcttctcactcccttctccttgataacagctaccatgacaaccctgtggtttccaaggagctgagaatagaaggaaactagcttacatgagaacagactggcctgaggagcagcagttgctggtggctaatggtgtaacctgagatggccctctggtagacacaggatagataactctttggatagcatgtctttttttctgttaattagttgtgtactctggcctctgtcatatcttcacaatggtgctcatttcatggggtattatccattcagtcatcgtaggtgatttgaaggtcttgatttgttttagaatgatgcacatttcatgtattccagtttgtttattacttatttggggttgcatcagaaatgtctggagaataattctttgattatgactgttttttaaactaggaaaattggacattaagcatcacaaatgatattaaaaattggctagttgaatctattgggattttctacaagtattctgcctttgcagaaacagatttggtgaatttgaatctcaatttgagtaatctgatcgttctttctagctaatggaaaatgattttacttagcaatgttatcttggtgtgttaagagttaggtttaacataaaggttattttctcctgatatagatcacataacagaatgcaccagtcatcagctattcagttggtaagcttccaggaaaaaggacaggcagaaagagtttgagacctgaatagctcccagatttcagtcttttcctgtttttgttaactttgggttaaaaaaaaaaaaagtctgattggttttaattgaaggaaagatttgtactacagttcttttgttgtaaagagttgtgttgttcttttcccccaaagtggtttcagcaatatttaaggagatgtaagagctttacaaaaagacacttgatacttgttttcaaaccagtatacaagataagcttccaggctgcatagaaggaggagagggaaaatgttttgtaagaaaccaatcaagataaaggacagtgaagtaatccgtaccttgtgttttgttttgatttaataacataacaaataaccaacccttccctgaaaacctcacatgcatacatacacatatatacacacacaaagagagttaatcaactgaaagtgtttccttcatttctgatatagaattgcaattttaacacacataaaggataaacttttagaaacttatcttacaaagtgtattttataaaattaaagaaaataaaattaagaatgttctcaatcaaaaaaaaaaaa

SEQ ID NO: 435403 - DNA, 2874 bp, Homo sapiens
agcggagaaagcccttttcattgcaggagaagaggacaaagatactcagagagaaaaagtaaaagaccgaagaaggaggctggagagaccaggatccttccagctgaacaaagtcagccacaaagcagactagccagccggctacaattggagtcagagtcccaaagacatgggcttgttagagtgctgtgcaagatgtctggtaggggccccctttgcttccctggtggccactggattgtgtttctttggggtggcactgttctgtggctgtggacatgaagccctcactggcacagaaaagctaattgagacctatttctccatcatctatggaactgcctctttcttcttcctttatggggccctcctgctggctgagggcttctacaccaccggcgcagtcaggcagatctttggcgactacaagaccaccatctgcggcaagggcctgagcgcaacgtttgtgggcatcacctatgccctgaccgttgtgtggctcctggtgtttgcctgctctgctgtgcctgtgtacatttacttcaacacctggaccacctgccagtctattgccttccccagcaagacctctgccagtataggcagtctctgtgctgatgccagaatgtatggtgttctcccatggaatgctttccctggcaaggtttgtggctccaaccttctgtccatctgcaaaacagctgagttccaaatgaccttccacctgtttattgctgcatttgtgggggctgcagctacactggtttccctgctcaccttcatgattgctgccacttacaactttgccgtccttaaactcatgggccgaggcaccaagttctgatcccccgtagaaatccccctttctctaatagcgaggctctaaccacacagcctacaatgctgcgtctcccatcttaactctttgcctttgccaccaactggccctcttcttacttgatgagtgtaacaagaaaggagagtcttgcagtgattaaggtctctctttggactctcccctcttatgtacctcttttagtcattttgcttcatagctggttcctgctagaaatgggaaatgcctaagaagatgacttcccaactgcaagtcacaaaggaatggaggctctaattgaattttcaagcatctcctgaggatcagaaagtaatttcttctcaaagggtacttccactgatggaaacaaagtggaaggaaagatgctcaggtacagagaaggaatgtctttggtcctcttgccatctataggggccaaatatattctctttggtgtacaaaatggaattcattctggtctctctattaccactgaagatagaagaaaaaagaatgtcagaaaaacaataagagcgtttgcccaaatctgcctattgcagctgggagaagggggtcaaagcaaggatctttcacccacagaaagagagcactgaccccgatggcgatggactactgaagccctaactcagccaaccttacttacagcataagggagcgtagaatctgtgtagacgaagggggcatctggccttacacctcgttagggaagagaaacagggtgttgtcagcatcttctcactcccttctccttgataacagctaccatgacaaccctgtggtttccaaggagctgagaatagaaggaaactagcttacatgagaacagactggcctgaggagcagcagttgctggtggctaatggtgtaacctgagatggccctctggtagacacaggatagataactctttggatagcatgtctttttttctgttaattagttgtgtactctggcctctgtcatatcttcacaatggtgctcatttcatggggtattatccattcagtcatcgtaggtgatttgaaggtcttgatttgttttagaatgatgcacatttcatgtattccagtttgtttattacttatttggggttgcatcagaaatgtctggagaataattctttgattatgactgttttttaaactaggaaaattggacattaagcatcacaaatgatattaaaaattggctagttgaatctattgggattttctacaagtattctgcctttgcagaaacagatttggtgaatttgaatctcaatttgagtaatctgatcgttctttctagctaatggaaaatgattttacttagcaatgttatcttggtgtgttaagagttaggtttaacataaaggttattttctcctgatatagatcacataacagaatgcaccagtcatcagctattcagttggtaagcttccaggaaaaaggacaggcagaaagagtttgagacctgaatagctcccagatttcagtcttttcctgtttttgttaactttgggttaaaaaaaaaaaaagtctgattggttttaattgaaggaaagatttgtactacagttcttttgttgtaaagagttgtgttgttcttttcccccaaagtggtttcagcaatatttaaggagatgtaagagctttacaaaaagacacttgatacttgttttcaaaccagtatacaagataagcttccaggctgcatagaaggaggagagggaaaatgttttgtaagaaaccaatcaagataaaggacagtgaagtaatccgtaccttgtgttttgttttgatttaataacataacaaataaccaacccttccctgaaaacctcacatgcatacatacacatatatacacacacaaagagagttaatcaactgaaagtgtttccttcatttctgatatagaattgcaattttaacacacataaaggataaacttttagaaacttatcttacaaagtgtattttataaaattaaagaaaataaaattaagaatgttctcaatcaaaaaaaaaaaa

SEQ ID NO: 435404 - DNA, 2583 bp, Homo sapiens
actggtgatgctagaggtgatgtttttggtaaacaggcggggtaagatttgccgagttccttttactttttctcgtgccgaattcggcacgaggtttaacagccaacatcaagctcattctttggagcgggtgtgtcattgtttgggaaaatggctaggacatcccgacaagtttgtgggcatcacctatgccctgaccgttgtgtggctcctggtgtttgcctgctctgctgtgcctgtgtacatttacttcaacacctggaccacctgccagtctattgccttccccagcaagacctctgccagtataggcagtctctgtgctgatgccagaatgtatggtgttctcccatggaatgctttccctggcaaggtttgtggctccaaccttctgtccatctgcaaaacagctgagttccaaatgaccttccacctgtttattgctgcatttgtgggggctgcagctacactggtttccctgctcaccttcatgattgctgccacttacaactttgccgtccttaaactcatgggccgaggcaccaagttctgatcccccgtagaaatccccctttctctaatagcgaggctctaaccacacagcctacaatgctgcgtctcccatcttaactctttgcctttgccaccaactggccctcttcttacttgatgagtgtaacaagaaaggagagtcttgcagtgattaaggtctctctttggactctcccctcttatgtacctcttttagtcattttgcttcatagctggttcctgctagaaatgggaaatgcctaagaagatgacttcccaactgcaagtcacaaaggaatggaggctctaattgaattttcaagcatctcctgaggatcagaaagtaatttcttctcaaagggtacttccactgatggaaacaaagtggaaggaaagatgctcaggtacagagaaggaatgtctttggtcctcttgccatctataggggccaaatatattctctttggtgtacaaaatggaattcattctggtctctctattaccactgaagatagaagaaaaaagaatgtcagaaaaacaataagagcgtttgcccaaatctgcctattgcagctgggagaagggggtcaaagcaaggatctttcacccacagaaagagagcactgaccccgatggcgatggactactgaagccctaactcagccaaccttacttacagcataagggagcgtagaatctgtgtagacgaagggggcatctggccttacacctcgttagggaagagaaacagggtgttgtcagcatcttctcactcccttctccttgataacagctaccatgacaaccctgtggtttccaaggagctgagaatagaaggaaactagcttacatgagaacagactggcctgaggagcagcagttgctggtggctaatggtgtaacctgagatggccctctggtagacacaggatagataactctttggatagcatgtctttttttctgttaattagttgtgtactctggcctctgtcatatcttcacaatggtgctcatttcatggggtattatccattcagtcatcgtaggtgatttgaaggtcttgatttgttttagaatgatgcacatttcatgtattccagtttgtttattacttatttggggttgcatcagaaatgtctggagaataattctttgattatgactgttttttaaactaggaaaattggacattaagcatcacaaatgatattaaaaattggctagttgaatctattgggattttctacaagtattctgcctttgcagaaacagatttggtgaatttgaatctcaatttgagtaatctgatcgttctttctagctaatggaaaatgattttacttagcaatgttatcttggtgtgttaagagttaggtttaacataaaggttattttctcctgatatagatcacataacagaatgcaccagtcatcagctattcagttggtaagcttccaggaaaaaggacaggcagaaagagtttgagacctgaatagctcccagatttcagtcttttcctgtttttgttaactttgggttaaaaaaaaaaaaagtctgattggttttaattgaaggaaagatttgtactacagttcttttgttgtaaagagttgtgttgttcttttcccccaaagtggtttcagcaatatttaaggagatgtaagagctttacaaaaagacacttgatacttgttttcaaaccagtatacaagataagcttccaggctgcatagaaggaggagagggaaaatgttttgtaagaaaccaatcaagataaaggacagtgaagtaatccgtaccttgtgttttgttttgatttaataacataacaaataaccaacccttccctgaaaacctcacatgcatacatacacatatatacacacacaaagagagttaatcaactgaaagtgtttccttcatttctgatatagaattgcaattttaacacacataaaggataaacttttagaaacttatcttacaaagtgtattttataaaattaaagaaaataaaattaagaatgttctcaatcaaaaaaaaaaaa

SEQ ID NO: 435405 - DNA, 2682 bp, Homo sapiens
aaaaacatcctctgaagcctctctaacccagggatcctcctcactcttcccctacccattccccccaccctccgttatactggggccagttatctagtagatactgccaattacccttggcagaggtgccctgctcactaatttcatttgaaggagagccctggaacctggttttaatgtctggcacacgccactccaggatctcccagtttgtgtttctacatctgcaggctgatgctgatttctaaccaccccatgtcaatcattttagtttgtgggcatcacctatgccctgaccgttgtgtggctcctggtgtttgcctgctctgctgtgcctgtgtacatttacttcaacacctggaccacctgccagtctattgccttccccagcaagacctctgccagtataggcagtctctgtgctgatgccagaatgtatggtgttctcccatggaatgctttccctggcaaggtttgtggctccaaccttctgtccatctgcaaaacagctgagttccaaatgaccttccacctgtttattgctgcatttgtgggggctgcagctacactggtttccctgctcaccttcatgattgctgccacttacaactttgccgtccttaaactcatgggccgaggcaccaagttctgatcccccgtagaaatccccctttctctaatagcgaggctctaaccacacagcctacaatgctgcgtctcccatcttaactctttgcctttgccaccaactggccctcttcttacttgatgagtgtaacaagaaaggagagtcttgcagtgattaaggtctctctttggactctcccctcttatgtacctcttttagtcattttgcttcatagctggttcctgctagaaatgggaaatgcctaagaagatgacttcccaactgcaagtcacaaaggaatggaggctctaattgaattttcaagcatctcctgaggatcagaaagtaatttcttctcaaagggtacttccactgatggaaacaaagtggaaggaaagatgctcaggtacagagaaggaatgtctttggtcctcttgccatctataggggccaaatatattctctttggtgtacaaaatggaattcattctggtctctctattaccactgaagatagaagaaaaaagaatgtcagaaaaacaataagagcgtttgcccaaatctgcctattgcagctgggagaagggggtcaaagcaaggatctttcacccacagaaagagagcactgaccccgatggcgatggactactgaagccctaactcagccaaccttacttacagcataagggagcgtagaatctgtgtagacgaagggggcatctggccttacacctcgttagggaagagaaacagggtgttgtcagcatcttctcactcccttctccttgataacagctaccatgacaaccctgtggtttccaaggagctgagaatagaaggaaactagcttacatgagaacagactggcctgaggagcagcagttgctggtggctaatggtgtaacctgagatggccctctggtagacacaggatagataactctttggatagcatgtctttttttctgttaattagttgtgtactctggcctctgtcatatcttcacaatggtgctcatttcatggggtattatccattcagtcatcgtaggtgatttgaaggtcttgatttgttttagaatgatgcacatttcatgtattccagtttgtttattacttatttggggttgcatcagaaatgtctggagaataattctttgattatgactgttttttaaactaggaaaattggacattaagcatcacaaatgatattaaaaattggctagttgaatctattgggattttctacaagtattctgcctttgcagaaacagatttggtgaatttgaatctcaatttgagtaatctgatcgttctttctagctaatggaaaatgattttacttagcaatgttatcttggtgtgttaagagttaggtttaacataaaggttattttctcctgatatagatcacataacagaatgcaccagtcatcagctattcagttggtaagcttccaggaaaaaggacaggcagaaagagtttgagacctgaatagctcccagatttcagtcttttcctgtttttgttaactttgggttaaaaaaaaaaaaagtctgattggttttaattgaaggaaagatttgtactacagttcttttgttgtaaagagttgtgttgttcttttcccccaaagtggtttcagcaatatttaaggagatgtaagagctttacaaaaagacacttgatacttgttttcaaaccagtatacaagataagcttccaggctgcatagaaggaggagagggaaaatgttttgtaagaaaccaatcaagataaaggacagtgaagtaatccgtaccttgtgttttgttttgatttaataacataacaaataaccaacccttccctgaaaacctcacatgcatacatacacatatatacacacacaaagagagttaatcaactgaaagtgtttccttcatttctgatatagaattgcaattttaacacacataaaggataaacttttagaaacttatcttacaaagtgtattttataaaattaaagaaaataaaattaagaatgttctcaatcaaaaaaaaaaaa

SEQ ID NO: 435406 - DNA, 2095 bp, Homo sapiens
tcccccggctgaggaattcggcacgagtaatgagacctatttctccaaaaactaccaagttctgatcccccgtagaaatccccctttctctaatagcgaggctctaaccacacagcctacaatgctgcgtctcccatcttaactctttgcctttgccaccaactggccctcttcttacttgatgagtgtaacaagaaaggagagtcttgcagtgattaaggtctctctttggactctcccctcttatgtacctcttttagtcattttgcttcatagctggttcctgctagaaatgggaaatgcctaagaagatgacttcccaactgcaagtcacaaaggaatggaggctctaattgaattttcaagcatctcctgaggatcagaaagtaatttcttctcaaagggtacttccactgatggaaacaaagtggaaggaaagatgctcaggtacagagaaggaatgtctttggtcctcttgccatctataggggccaaatatattctctttggtgtacaaaatggaattcattctggtctctctattaccactgaagatagaagaaaaaagaatgtcagaaaaacaataagagcgtttgcccaaatctgcctattgcagctgggagaagggggtcaaagcaaggatctttcacccacagaaagagagcactgaccccgatggcgatggactactgaagccctaactcagccaaccttacttacagcataagggagcgtagaatctgtgtagacgaagggggcatctggccttacacctcgttagggaagagaaacagggtgttgtcagcatcttctcactcccttctccttgataacagctaccatgacaaccctgtggtttccaaggagctgagaatagaaggaaactagcttacatgagaacagactggcctgaggagcagcagttgctggtggctaatggtgtaacctgagatggccctctggtagacacaggatagataactctttggatagcatgtctttttttctgttaattagttgtgtactctggcctctgtcatatcttcacaatggtgctcatttcatggggtattatccattcagtcatcgtaggtgatttgaaggtcttgatttgttttagaatgatgcacatttcatgtattccagtttgtttattacttatttggggttgcatcagaaatgtctggagaataattctttgattatgactgttttttaaactaggaaaattggacattaagcatcacaaatgatattaaaaattggctagttgaatctattgggattttctacaagtattctgcctttgcagaaacagatttggtgaatttgaatctcaatttgagtaatctgatcgttctttctagctaatggaaaatgattttacttagcaatgttatcttggtgtgttaagagttaggtttaacataaaggttattttctcctgatatagatcacataacagaatgcaccagtcatcagctattcagttggtaagcttccaggaaaaaggacaggcagaaagagtttgagacctgaatagctcccagatttcagtcttttcctgtttttgttaactttgggttaaaaaaaaaaaaagtctgattggttttaattgaaggaaagatttgtactacagttcttttgttgtaaagagttgtgttgttcttttcccccaaagtggtttcagcaatatttaaggagatgtaagagctttacaaaaagacacttgatacttgttttcaaaccagtatacaagataagcttccaggctgcatagaaggaggagagggaaaatgttttgtaagaaaccaatcaagataaaggacagtgaagtaatccgtaccttgtgttttgttttgatttaataacataacaaataaccaacccttccctgaaaacctcacatgcatacatacacatatatacacacacaaagagagttaatcaactgaaagtgtttccttcatttctgatatagaattgcaattttaacacacataaaggataaacttttagaaacttatcttacaaagtgtattttataaaattaaagaaaataaaattaagaatgttctcaatcaaaaaaaaaaaa

SEQ ID NO: 435407 - DNA, 1906 bp, Homo sapiens
agcggagaaagcccttttcattgcaggagaagaggacaaagatactcagagagaaaaagtaaaagaccgaagaaggaggctggagagaccaggatccttccagctgaacaaagtcagccacaaagcagactagccagccggctacaattggagtcagagtcccaaagacatgggcttgttagagtgctgtgcaagatgtctggtaggggccccctttgcttccctggtggccactggattgtgtttctttggggtggcactgttctgtggctgtggacatgaagccctcactggcacagaaaagctaattgagacctatttctccaaaaactaccaagactatgagtatctcatcaatgtgatccatgccttccagtatgtcatctatggaactgcctctttcttcttcctttatggggccctcctgctggctgagggcttctacaccaccggcgcagtcaggcagatctttggcgactacaagaccaccatctgcggcaagggcctgagcgcaacggtaacagggggccagaaggggaggggttccagaggccaacatcaagctcattctttggagcgggtgtgtcattgtttgggaaaatggctaggacatcccgacaagtttgtgggcatcacctatgccctgaccgttgtgtggctcctggtgtttgcctgctctgctgtgcctgtgtacatttacttcaacacctggaccacctgccagtctattgccttccccagcaagacctctgccagtataggcagtctctgtgctgatgccagaatgtatggtgttctcccatggaatgctttccctggcaaggtttgtggctccaaccttctgtccatctgcaaaacagctgaggctcatttcatggggtattatccattcagtcatcgtaggtgatttgaaggtcttgatttgttttagaatgatgcacatttcatgtattccagtttgtttattacttatttggggttgcatcagaaatgtctggagaataattctttgattatgactgttttttaaactaggaaaattggacattaagcatcacaaatgatattaaaaattggctagttgaatctattgggattttctacaagtattctgcctttgcagaaacagatttggtgaatttgaatctcaatttgagtaatctgatcgttctttctagctaatggaaaatgattttacttagcaatgttatcttggtgtgttaagagttaggtttaacataaaggttattttctcctgatatagatcacataacagaatgcaccagtcatcagctattcagttggtaagcttccaggaaaaaggacaggcagaaagagtttgagacctgaatagctcccagatttcagtcttttcctgtttttgttaactttgggttaaaaaaaaaaaaagtctgattggttttaattgaaggaaagatttgtactacagttcttttgttgtaaagagttgtgttgttcttttcccccaaagtggtttcagcaatatttaaggagatgtaagagctttacaaaaagacacttgatacttgttttcaaaccagtatacaagataagcttccaggctgcatagaaggaggagagggaaaatgttttgtaagaaaccaatcaagataaaggacagtgaagtaatccgtaccttgtgttttgttttgatttaataacataacaaataaccaacccttccctgaaaacctcacatgcatacatacacatatatacacacacaaagagagttaatcaactgaaagtgtttccttcatttctgatatagaattgcaattttaacacacataaaggataaacttttagaaacttatcttacaaagtgtattttataaaattaaagaaaataaaattaagaatgttctcaatcaaaaaaaaaaaa

SEQ ID NO: 435408 - DNA, 1763 bp, Homo sapiens
  misc_feature (1750)..(1750): n is a, c, g, or t
agcggagaaagcccttttcattgcaggagaagaggacaaagatactcagagagaaaaagtaaaagaccgaagaaggaggctggagagaccaggatccttccagctgaacaaagtcagccacaaagcagactagccagccggctacaattggagtcagagtcccaaagacatgggcttgttagagtgctgtgcaagatgtctggtaggggccccctttgcttccctggtggccactggattgtgtttctttggggtggcactgttctgtggctgtggacatgaagccctcactggcacagaaaagctaattgagacctatttctccaaaaactaccaagactatgagtatctcatcaatgtgatccatgccttccagtatgtcatctatggaactgcctctttcttcttcctttatggggccctcctgctggctgagggcttctacaccaccggcgcagtcaggcagatctttggcgactacaagaccaccatctgcggcaagggcctgagcgcaacggtaacagggggccagaaggggaggggttccagaggccaacatcaagctcattctttggagcgggtgtgtcattgtttgggaaaatggctaggacatcccgacaagtttgtgggcatcacctatgccctgaccgttgtgtggctcctggtgtttgcctgctctgctgtgcctgtgtacatttacttcaacacctggaccacctgccagtctattgccttccccagcaagacctctgccagtataggcagtctctgtgctgatgccagaatgtatggtgttctcccatggaatgctttccctggcaaggtttgtggctccaaccttctgtccatctgcaaaacagctgagttccaaatgaccttccacctgtttattgctgcatttgtgggggctgcagctacactggtttccctgctcaccttcatgattgctgccacttacaactttgccgtccttaaactcatgggccgaggcaccaagttctgatcccccgtagaaatccccctttctctaatagcgaggctctaaccacacagcctacaatgctgcgtctcccatcttaactctttgcctttgccaccaactggccctcttcttacttgatgagtgtaacaagaaaggagagtcttgcagtgattaaggtctctctttggactctcccctcttatgtacctcttttagtcattttgcttcatagctggttcctgctagaaatgggaaatgcctaagaagatgacttcccaactgcaagtcacaaaggaatggaggctctaattgaattttcaagcatctcctgaggatcagaaagtaatttcttctcaaagggtacttccactgatggaaacaaagtggaaggaaagatgctcaggtacagagaaggaatgtctttggtcctcttgccatctataggggccaaatatattctctttggtgtacaaaatggaattcattctggtctctctattaccactgaagatagaagaaaaaagaatgtcagaaaaacaataagagcgtttgcccaaatctgcctattgcagctgggagaagggggtcaaagcaaggatctttcacccacagaaagagagcactgaccccgatggcgatggactactgaagccctaactcagccaaccttacttacagcataagggagcgtagaatctgtgtagacgaagggggcatctggccctcgtaggaagagacacccttgggtttcaaaggactgagaatganggaacttactaca

SEQ ID NO: 435409 - DNA, 1387 bp, Homo sapiens
  misc_feature (15)..(15): n is a, c, g, or t
gtgaacctgctaatnacagaaacttaatgtagacctgttctggggtctactattgttttagaatgaaggaattgtattatgtgtgtgtatatataatttgtaaataaaaagtatggtagaagtcggttctaccatgacaaccctgtggtttccaaggagctgagaatagaaggaaactagcttacatgagaacagactggcctgaggagcagcagttgctggtggctaatggtgtaacctgagatggccctctggtagacacaggatagataactctttggatagcatgtctttttttctgttaattagttgtgtactctggcctctgtcatatcttcacaatggtgctcatttcatggggtattatccattcagtcatcgtaggtgatttgaaggtcttgatttgttttagaatgatgcacatttcatgtattccagtttgtttattacttatttggggttgcatcagaaatgtctggagaataattctttgattatgactgttttttaaactaggaaaattggacattaagcatcacaaatgatattaaaaattggctagttgaatctattgggattttctacaagtattctgcctttgcagaaacagatttggtgaatttgaatctcaatttgagtaatctgatcgttctttctagctaatggaaaatgattttacttagcaatgttatcttggtgtgttaagagttaggtttaacataaaggttattttctcctgatatagatcacataacagaatgcaccagtcatcagctattcagttggtaagcttccaggaaaaaggacaggcagaaagagtttgagacctgaatagctcccagatttcagtcttttcctgtttttgttaactttgggttaaaaaaaaaaaaagtctgattggttttaattgaaggaaagatttgtactacagttcttttgttgtaaagagttgtgttgttcttttcccccaaagtggtttcagcaatatttaaggagatgtaagagctttacaaaaagacacttgatacttgttttcaaaccagtatacaagataagcttccaggctgcatagaaggaggagagggaaaatgttttgtaagaaaccaatcaagataaaggacagtgaagtaatccgtaccttgtgttttgttttgatttaataacataacaaataaccaacccttccctgaaaacctcacatgcatacatacacatatatacacacacaaagagagttaatcaactgaaagtgtttccttcatttctgatatagaattgcaattttaacacacataaaggataaacttttagaaacttatcttacaaagtgtattttataaaattaaagaaaataaaattaagaatgttctcaatcaaaaaaaaaaaa

SEQ ID NO: 435410 - DNA, 1187 bp, Homo sapiens
  misc_feature (22)..(22): n is a, c, g, or t
  misc_feature (30)..(30): n is a, c, g, or t
agtaccctcgcgaacgtgttanccaaagantatctaacctgagatggccctctggtagacacaggatagataactctttggatagcatgtctttttttctgttaattagttgtgtactctggcctctgtcatatcttcacaatggtgctcatttcatggggtattatccattcagtcatcgtaggtgatttgaaggtcttgatttgttttagaatgatgcacatttcatgtattccagtttgtttattacttatttggggttgcatcagaaatgtctggagaataattctttgattatgactgttttttaaactaggaaaattggacattaagcatcacaaatgatattaaaaattggctagttgaatctattgggattttctacaagtattctgcctttgcagaaacagatttggtgaatttgaatctcaatttgagtaatctgatcgttctttctagctaatggaaaatgattttacttagcaatgttatcttggtgtgttaagagttaggtttaacataaaggttattttctcctgatatagatcacataacagaatgcaccagtcatcagctattcagttggtaagcttccaggaaaaaggacaggcagaaagagtttgagacctgaatagctcccagatttcagtcttttcctgtttttgttaactttgggttaaaaaaaaaaaaagtctgattggttttaattgaaggaaagatttgtactacagttcttttgttgtaaagagttgtgttgttcttttcccccaaagtggtttcagcaatatttaaggagatgtaagagctttacaaaaagacacttgatacttgttttcaaaccagtatacaagataagcttccaggctgcatagaaggaggagagggaaaatgttttgtaagaaaccaatcaagataaaggacagtgaagtaatccgtaccttgtgttttgttttgatttaataacataacaaataaccaacccttccctgaaaacctcacatgcatacatacacatatatacacacacaaagagagttaatcaactgaaagtgtttccttcatttctgatatagaattgcaattttaacacacataaaggataaacttttagaaacttatcttacaaagtgtattttataaaattaaagaaaataaaattaagaatgttctcaatcaaaaaaaaaaaa

SEQ ID NO: 435411 - DNA, 1225 bp, Homo sapiens
taacagagaaggagctattatatgaaaaaaaagatatattttaagggtctctctctatagaaaagaggtgaaattctccctttattaacgaacagaacttgtttaaattaataaagattctattaaaggtgttaaaacagtttgggcaagggactagagccttgatacaagaaaactttggaaactgtttttggtaatatggacttgctggaatattcaagggccattatggattacatcagcacgagtaatgagtctattgttaaataagcattcatgattcagttgttatcctattgaggtgcacaaatgtctggagaataattctttgattatgactgttttttaaactaggaaaattggacattaagcatcacaaatgatattaaaaattggctagttgaatctattgggattttctacaagtattctgcctttgcagaaacagatttggtgaatttgaatctcaatttgagtaatctgatcgttctttctagctaatggaaaatgattttacttagcaatgttatcttggtgtgttaagagttaggtttaacataaaggttattttctcctgatatagatcacataacagaatgcaccagtcatcagctattcagttggtaagcttccaggaaaaaggacaggcagaaagagtttgagacctgaatagctcccagatttcagtcttttcctgtttttgttaactttgggttaaaaaaaaaaaaagtctgattggttttaattgaaggaaagatttgtactacagttcttttgttgtaaagagttgtgttgttcttttcccccaaagtggtttcagcaatatttaaggagatgtaagagctttacaaaaagacacttgatacttgttttcaaaccagtatacaagataagcttccaggctgcatagaaggaggagagggaaaatgttttgtaagaaaccaatcaagataaaggacagtgaagtaatccgtaccttgtgttttgttttgatttaataacataacaaataaccaacccttccctgaaaacctcacatgcatacatacacatatatacacacacaaagagagttaatcaactgaaagtgtttccttcatttctgatatagaattgcaattttaacacacataaaggataaacttttagaaacttatcttacaaagtgtattttataaaattaaagaaaataaaattaagaatgttctcaatcaaaaaaaaaaaa

SEQ ID NO: 435412 - DNA, 823 bp, Homo sapiens
  misc_feature (17)..(18): n is a, c, g, or t
tagaggatcccccgacnncccatctgccaaccagttgcagaaacagatttggtgaatttgaatctcaatttgagtaatctgatcgttctttctagctaatggaaaatgattttacttagcaatgttatcttggtgtgttaagagttaggtttaacataaaggttattttctcctgatatagatcacataacagaatgcaccagtcatcagctattcagttggtaagcttccaggaaaaaggacaggcagaaagagtttgagacctgaatagctcccagatttcagtcttttcctgtttttgttaactttgggttaaaaaaaaaaaaagtctgattggttttaattgaaggaaagatttgtactacagttcttttgttgtaaagagttgtgttgttcttttcccccaaagtggtttcagcaatatttaaggagatgtaagagctttacaaaaagacacttgatacttgttttcaaaccagtatacaagataagcttccaggctgcatagaaggaggagagggaaaatgttttgtaagaaaccaatcaagataaaggacagtgaagtaatccgtaccttgtgttttgttttgatttaataacataacaaataaccaacccttccctgaaaacctcacatgcatacatacacatatatacacacacaaagagagttaatcaactgaaagtgtttccttcatttctgatatagaattgcaattttaacacacataaaggataaacttttagaaacttatcttacaaagtgtattttataaaattaaagaaaataaaattaagaatgttctcaatcaaaaaaaaaaaa

SEQ ID NO: 435413 - DNA, 1197 bp, Homo sapiens
  misc_feature (31)..(31): n is a, c, g, or t
gggggccagtgggcccaggggcatgtcaggntcggctccaacgtgtcaatatgctgttgattcccagagatgttgcgggaagagggaaagtggggaagaaaggggtggtactgaaggggaactcggcctcctcctgaaggccttcctaaggctgacccctgggtcaaaccaaaatccccataatggcaaaagacaactcaagaagcaaaaagcagggtcaaggagctcttgaaaaattgcatagtaggagaggccccaccccaacaggaaggctgggctgcagaacacggtcccaagagctgcatccaagtatcatcccaaaggacagcgtggagtcggcccccttcctgccgccccggggttcgggaccctcggaagaccactcacgcgcccgcacgagaacacgtgaacacacacgcacgcacacatgcacgcgcgcacatgcactccctttctctcgcagcctcacacaactgggataggtcggtactccctgcaggctcgtgccgaattcggcacgaggtttaacataaaggttattttctcctgatatagatcacataacagaatgcaccagtcatcagctattcagttggtaagcttccaggaaaaaggacaggcagaaagagtttgagacctgaatagctcccagatttcagtcttttcctgtttttgttaactttgggttaaaaaaaaaaaaagtctgattggttttaattgaaggaaagatttgtactacagttcttttgttgtaaagagttgtgttgttcttttcccccaaagtggtttcagcaatatttaaggagatgtaagagctttacaaaaagacacttgatacttgttttcaaaccagtatacaagataagcttccaggctgcatagaaggaggagagggaaaatgttttgtaagaaaccaatcaagataaaggacagtgaagtaatccgtaccttgtgttttgttttgatttaataacataacaaataaccaacccttccctgaaaacctcacatgcatacatacacatatatacacacacaaagagagttaatcaactgaaagtgtttccttcatttctgatatagaattgcaattttaacacacataaaggataaacttttagaaacttatcttacaaagtgtattttataaaattaaagaaaataaaattaagaatgttctcaatcaaaaaaaaaaaa

SEQ ID NO: 435414 - DNA, 853 bp, Homo sapiens
agcggagaaagcccttttcattgcaggagaagaggacaaagatactcagagagaaaaagtaaaagaccgaagaaggaggctggagagaccaggatccttccagctgaacaaagtcagccacaaagcagactagccagccggctacaattggagtcagagtcccaaagacatgggcttgttagagtgctgtgcaagatgtctggtaggggccccctttgcttccctggtggccactggattgtgtttctttggggtggcactgttctgtggctgtggacatgaagccctcactggcacagaaaagctaattgagacctatttctccaaaaactaccaagactatgagtatctcatcaatgtgatccatgccttccagtatgtcatctatggaactgcctctttcttcttcctttatggggccctcctgctggctgagggcttctacaccaccggcgcagtcaggcagatctttggcgactacaagaccaccatctgcggcaagggcctgagcgcaacggtaacagggggccagaaggggaggggttccagaggccaacatcaagctcattctttggagcgggtgtgtcattgtttgggaaaatggctaggacatcccgacaaggtgatcatcctcaggattttgtggcaataacaaggggtgggggaaaattgggcgcgagtctgtggcctcgtccccacccaaggctgggtcctctctaggggcctggcatttgagtgaggaagcgatggctgcagccgaacgagaaggtcaggaagaacgtggtgcccagctggcttagcctcacctttcaaaggttccctaagcaaatttcttctcaaaacagaaagcatg

SEQ ID NO: 435415 - DNA, 3290 bp, Homo sapiens
agcggagtcttctatgccaggctaggaaagctgccttccaaaatttggtctgggaagacattatcctgggaatgagaagcaaagcctcagctctagaagcccaaataatagcagatgaccccaggctttcactggcacccagtacaggcagcaggctgccaccaagaaggctggcagtgccctcttgaggaatcccttggcagtgccaggagcctagctggactcaagaatattttgccaagggcacccagcagaaccaatggaagcagaatcacagaaataggagaagaggacaaagatactcagagagaaaaagtaaaagaccgaagaaggaggctggagagaccaggatccttccagctgaacaaagtcagccacaaagcagactagccagccggctacaattggagtcagagtcccaaagacatgggcttgttagagtgctgtgcaagatgtctggtaggggccccctttgcttccctggtggccactggattgtgtttctttggggtggcactgttctgtggctgtggacatgaagccctcactggcacagaaaagctaattgagacctatttctccaaaaactaccaagactatgagtatctcatcaatgtgatccatgccttccagtatgtcatctatggaactgcctctttcttcttcctttatggggccctcctgctggctgagggcttctacaccaccggcgcagtcaggcagatctttggcgactacaagaccaccatctgcggcaagggcctgagcgcaacggtaacagggggccagaaggggaggggttccagaggccaacatcaagctcattctttggagcgggtgtgtcattgtttgggaaaatggctaggacatcccgacaagtttgtgggcatcacctatgccctgaccgttgtgtggctcctggtgtttgcctgctctgctgtgcctgtgtacatttacttcaacacctggaccacctgccagtctattgccttccccagcaagacctctgccagtataggcagtctctgtgctgatgccagaatgtatggtgttctcccatggaatgctttccctggcaaggtttgtggctccaaccttctgtccatctgcaaaacagctgagttccaaatgaccttccacctgtttattgctgcatttgtgggggctgcagctacactggtttccctgctcaccttcatgattgctgccacttacaactttgccgtccttaaactcatgggccgaggcaccaagttctgatcccccgtagaaatccccctttctctaatagcgaggctctaaccacacagcctacaatgctgcgtctcccatcttaactctttgcctttgccaccaactggccctcttcttacttgatgagtgtaacaagaaaggagagtcttgcagtgattaaggtctctctttggactctcccctcttatgtacctcttttagtcattttgcttcatagctggttcctgctagaaatgggaaatgcctaagaagatgacttcccaactgcaagtcacaaaggaatggaggctctaattgaattttcaagcatctcctgaggatcagaaagtaatttcttctcaaagggtacttccactgatggaaacaaagtggaaggaaagatgctcaggtacagagaaggaatgtctttggtcctcttgccatctataggggccaaatatattctctttggtgtacaaaatggaattcattctggtctctctattaccactgaagatagaagaaaaaagaatgtcagaaaaacaataagagcgtttgcccaaatctgcctattgcagctgggagaagggggtcaaagcaaggatctttcacccacagaaagagagcactgaccccgatggcgatggactactgaagccctaactcagccaaccttacttacagcataagggagcgtagaatctgtgtagacgaagggggcatctggccttacacctcgttagggaagagaaacagggtgttgtcagcatcttctcactcccttctccttgataacagctaccatgacaaccctgtggtttccaaggagctgagaatagaaggaaactagcttacatgagaacagactggcctgaggagcagcagttgctggtggctaatggtgtaacctgagatggccctctggtagacacaggatagataactctttggatagcatgtctttttttctgttaattagttgtgtactctggcctctgtcatatcttcacaatggtgctcatttcatggggtattatccattcagtcatcgtaggtgatttgaaggtcttgatttgttttagaatgatgcacatttcatgtattccagtttgtttattacttatttggggttgcatcagaaatgtctggagaataattctttgattatgactgttttttaaactaggaaaattggacattaagcatcacaaatgatattaaaaattggctagttgaatctattgggattttctacaagtattctgcctttgcagaaacagatttggtgaatttgaatctcaatttgagtaatctgatcgttctttctagctaatggaaaatgattttacttagcaatgttatcttggtgtgttaagagttaggtttaacataaaggttattttctcctgatatagatcacataacagaatgcaccagtcatcagctattcagttggtaagcttccaggaaaaaggacaggcagaaagagtttgagacctgaatagctcccagatttcagtcttttcctgtttttgttaactttgggttaaaaaaaaaaaaagtctgattggttttaattgaaggaaagatttgtactacagttcttttgttgtaaagagttgtgttgttcttttcccccaaagtggtttcagcaatatttaaggagatgtaagagctttacaaaaagacacttgatacttgttttcaaaccagtatacaagataagcttccaggctgcatagaaggaggagagggaaaatgttttgtaagaaaccaatcaagataaaggacagtgaagtaatccgtaccttgtgttttgttttgatttaataacataacaaataaccaacccttccctgaaaacctcacatgcatacatacacatatatacacacacaaagagagttaatcaactgaaagtgtttccttcatttctgatatagaattgcaattttaacacacataaaggataaacttttagaaacttatcttacaaagtgtattttataaaattaaagaaaataaaattaagaatgttctcaatcaaaaaaaaaaaa

SEQ ID NO: 435416 - DNA, 2976 bp, Homo sapiens
agcggagaaagcccttttcattgcaggagaagaggacaaagatactcagagagaaaaagtaaaagaccgaagaaggaggctggagagaccaggatccttccagctgaacaaagtcagccacaaagcagactagccagccggctacaattggagtcagagtcccaaagacatgggcttgttagagtgctgtgcaagatgtctggtaggggccccctttgcttccctggtggccactggattgtgtttctttggggtggcactgttctgtggctgtggacatgaagccctcactggcacagaaaagctaattgagacctatttctccaaaaactaccaagactatgagtatctcatcaatgtgatccatgccttccagtatgtcatctatggaactgcctctttcttcttcctttatggggccctcctgctggctgagggcttctacaccaccggcgcagtcaggcagatctttggcgactacaagaccaccatctgcggcaagggcctgagcgcaacggtaacagggggccagaaggggaggggttccagaggccaacatcaagctcattctttggagcgggtgtgtcattgtttgggaaaatggctaggacatcccgacaagtttgtgggcatcacctatgccctgaccgttgtgtggctcctggtgtttgcctgctctgctgtgcctgtgtacatttacttcaacacctggaccacctgccagtctattgccttccccagcaagacctctgccagtataggcagtctctgtgctgatgccagaatgtatggtgttctcccatggaatgctttccctggcaaggtttgtggctccaaccttctgtccatctgcaaaacagctgagttccaaatgaccttccacctgtttattgctgcatttgtgggggctgcagctacactggtttccctgctcaccttcatgattgctgccacttacaactttgccgtccttaaactcatgggccgaggcaccaagttctgatcccccgtagaaatccccctttctctaatagcgaggctctaaccacacagcctacaatgctgcgtctcccatcttaactctttgcctttgccaccaactggccctcttcttacttgatgagtgtaacaagaaaggagagtcttgcagtgattaaggtctctctttggactctcccctcttatgtacctcttttagtcattttgcttcatagctggttcctgctagaaatgggaaatgcctaagaagatgacttcccaactgcaagtcacaaaggaatggaggctctaattgaattttcaagcatctcctgaggatcagaaagtaatttcttctcaaagggtacttccactgatggaaacaaagtggaaggaaagatgctcaggtacagagaaggaatgtctttggtcctcttgccatctataggggccaaatatattctctttggtgtactcagaaaaacaataagagcgtttgcccaaatctgcctattgcagctgggagaagggggtcaaagcaaggatctttcacccacagaaagagagcactgaccccgatggcgatggactactgaagccctaactcagccaaccttacttacagcataagggagcgtagaatctgtgtagacgaagggggcatctggccttacacctcgttagggaagagaaacagggtgttgtcagcatcttctcactcccttctccttgataacagctaccatgacaaccctgtggtttccaaggagctgagaatagaaggaaactagcttacatgagaacagactggcctgaggagcagcagttgctggtggctaatggtgtaacctgagatggccctctggtagacacaggatagataactctttggatagcatgtctttttttctgttaattagttgtgtactctggcctctgtcatatcttcacaatggtgctcatttcatggggtattatccattcagtcatcgtaggtgatttgaaggtcttgatttgttttagaatgatgcacatttcatgtattccagtttgtttattacttatttggggttgcatcagaaatgtctggagaataattctttgattatgactgttttttaaactaggaaaattggacattaagcatcacaaatgatattaaaaattggctagttgaatctattgggattttctacaagtattctgcctttgcagaaacagatttggtgaatttgaatctcaatttgagtaatctgatcgttctttctagctaatggaaaatgattttacttagcaatgttatcttggtgtgttaagagttaggtttaacataaaggttattttctcctgatatagatcacataacagaatgcaccagtcatcagctattcagttggtaagcttccaggaaaaaggacaggcagaaagagtttgagacctgaatagctcccagatttcagtcttttcctgtttttgttaactttgggttaaaaaaaaaaaaagtctgattggttttaattgaaggaaagatttgtactacagttcttttgttgtaaagagttgtgttgttcttttcccccaaagtggtttcagcaatatttaaggagatgtaagagctttacaaaaagacacttgatacttgttttcaaaccagtatacaagataagcttccaggctgcatagaaggaggagagggaaaatgttttgtaagaaaccaatcaagataaaggacagtgaagtaatccgtaccttgtgttttgttttgatttaataacataacaaataaccaacccttccctgaaaacctcacatgcatacatacacatatatacacacacaaagagagttaatcaactgaaagtgtttccttcatttctgatatagaattgcaattttaacacacataaaggataaacttttagaaacttatcttacaaagtgtattttataaaattaaagaaaataaaattaagaatgttctcaatcaaaaaaaaaaaa

SEQ ID NO: 435417 - DNA, 2979 bp, Homo sapiens
agcggagaaagcccttttcattgcaggagaagaggacaaagatactcagagagaaaaagtaaaagaccgaagaaggaggctggagagaccaggatccttccagctgaacaaagtcagccacaaagcagactagccagccggctacaattggagtcagagtcccaaagacatgggcttgttagagtgctgtgcaagatgtctggtaggggccccctttgcttccctggtggccactggattgtgtttctttggggtggcactgttctgtggctgtggacatgaagccctcactggcacagaaaagctaattgagacctatttctccaaaaactaccaagactatgagtatctcatcaatgtgatccatgccttccagtatgtcatctatggaactgcctctttcttcttcctttatggggccctcctgctggctgagggcttctacaccaccggcgcagtcaggcagatctttggcgactacaagaccaccatctgcggcaagggcctgagcgcaacggtaacagggggccagaaggggaggggttccagaggccaacatcaagctcattctttggagcgggtgtgtcattgtttgggaaaatggctaggacatcccgacaagtttgtgggcatcacctatgccctgaccgttgtgtggctcctggtgtttgcctgctctgctgtgcctgtgtacatttacttcaacacctggaccacctgccagtctattgccttccccagcaagacctctgccagtataggcagtctctgtgctgatgccagaatgtatggtgttctcccatggaatgctttccctggcaaggtttgtggctccaaccttctgtccatctgcaaaacagctgagttccaaatgaccttccacctgtttattgctgcatttgtgggggctgcagctacactggtttccctgctcaccttcatgattgctgccacttacaactttgccgtccttaaactcatgggccgaggcaccaagttctgatcccccgtagaaatccccctttctctaatagcgaggctctaaccacacagcctacaatgctgcgtctcccatcttaactctttgcctttgccaccaactggccctcttcttacttgatgagtgtaacaagaaaggagagtcttgcagtgattaaggtctctctttggactctcccctcttatgtacctcttttagtcattttgcttcatagctggttcctgctagaaatgggaaatgcctaagaagatgacttcccaactgcaagtcacaaaggaatggaggctctaattgaattttcaagcatctcctgaggatcagaaagtaatttcttctcaaagggtacttccactgatggaaacaaagtggaaggaaagatgctcaggtacagagaaggaatgtctttggtcctcttgccatctataggggccaaatatattctctttggtgtacaaaatggaattcattctggtctctctattaccactgaagatagaagaaaaaagaatgtcagaaaaacaataagagcgtttgcccaaatctgcctattgcagctgggagaagggggtcaaagcaaggatctttcacccacagaaagagagcactgaccccgatggcgatggactactgaagccctaactcagccaaccttacttacagcataagggagcgtagaatctgtgtagacgaagggggcatctggccttacacctcgttagggaagagaaacagggtgttgtcagcatcttctcactcccttctccttgataacagctaccatgacaaccctgtggtttccaaggagctgagaatagaaggaaactagcttacatgagaacagactggcctgaggagcagcagttgctggtggctaatggtgtaacctgagatggccctctggtagacacaggatagataactctttggatagcatgtctttttttctgttaattagttgtgtactctggcctctgtcatatcttcacaatggtgctcatttcatggggtattatccattcagtcatcgtaggtgatttgaaggtcttgatttgttttagaatgatgcacatttcatgtattccagtttgtttattacttatttggggttgcatcagaaatgtctggagaataattctttgattatgactgttttttaaactaggaaaattggacattaagcatcacaaatgatattaaaaattggctagttgaatctattgggattttctacaagtattctgcctttgcagaaacagatttggtgaatttgaatctcaatttgagtaatctgatcgttctttctagctaatggtaaaggttattttctcctgatatagatcacataacagaatgcaccagtcatcagctattcagttggtaagcttccaggaaaaaggacaggcagaaagagtttgagacctgaatagctcccagatttcagtcttttcctgtttttgttaactttgggttaaaaaaaaaaaaagtctgattggttttaattgaaggaaagatttgtactacagttcttttgttgtaaagagttgtgttgttcttttcccccaaagtggtttcagcaatatttaaggagatgtaagagctttacaaaaagacacttgatacttgttttcaaaccagtatacaagataagcttccaggctgcatagaaggaggagagggaaaatgttttgtaagaaaccaatcaagataaaggacagtgaagtaatccgtaccttgtgttttgttttgatttaataacataacaaataaccaacccttccctgaaaacctcacatgcatacatacacatatatacacacacaaagagagttaatcaactgaaagtgtttccttcatttctgatatagaattgcaattttaacacacataaaggataaacttttagaaacttatcttacaaagtgtattttataaaattaaagaaaataaaattaagaatgttctcaatcaaaaaaaaaaaa

SEQ ID NO: 435418 - DNA, 1845 bp, Homo sapiens
gaaactcaaccgaaagcctgcagagagcagaacatggaaggagacttctcggtgtgcaggaactgtaaaagacatgtagtctctgccaacttcaccctccatgaggcttactgcctgcggttcctggtcctgtgtccggagtgtgaggagcctgtccccaaggaaaccatggaggagcactgcaagcttgagcaccagcaggttgggtgtacgatgtgtcagcagagcatgcagaagtcctcgctggagtttcataaggccaatgagtgccaggagcgccctgttgagtgtaagttctgcaaactggacatgcagctcagcaagctggagctccacgagtcctactgtggcagccggacagagctctgccaaggctgtggccagttcatcatgcaccgcatgctcgcccagcacagagatgtctgtcgcagtgaacaggcccagctcgggaaaggggaaagaatttcagctcctgaaagggaaatctactgtcattattgcaaccaaatgattccagaaaataagtatttccaccatatgggtaaatgttgtccagactcagagtttaagaaacactttcctgttggaaatccagaaattcttccttcatctcttccaagtcaagctgctgaaaatcaaacttccacgatggagaaagatgttcgtccaaagacaagaagtataaacagatttcctcttcattctgaaagttcatcaaagaaagcaccaagaagcaaaaacaaaaccttggatccacttttgatgtcagagcccaagcccaggaccagctcccctagaggagataaagcagcctatgacattctgaggagatgttctcagtgtggcatcctgcttcccctgccgatcctaaatcaacatcaggagaaatgccggtggttagcttcatcaaaaggaaaacaagtgagaaatttcagctagatttggaaaaggaaaggtactacaaattcaaaagatttcacttttaacactggcattcctgcctacttgctgtggtggtcttgtgaaaggtgatgggttttattcgttgggctttaaaagaaaaggtttggcagaactaaaaacaaaactcacgtatcatctcaatagatacagaaaaggcttttgataaaattcaacttgacttcatgttaaaaaccctcaacaaaccaggcgtcgaaggaacatacctcaaaataataagagccatctatgacaaaaccacagccaacatcatactgaatgagcaaaagctggagcattactcttgagaagtagaacaaggcacttcagtcctattcaacatagtactggaagtcctcgccacagcaatcaggcaagagaaagaaataaaaggcaaccaaaaagaaaggaagtcgaagtatctctgtttgcagacgatatgattctatatctagaaaaccccatgatcttggcccaaaagctcctagatctgataaacaacttcagctaactttcaggagacaaaatcaatatacaaaatatggtagcatttttatacaccaacgacatccaagctgagagccaaatcaagaatgcaatcctattcacaattgccacaaaaagaataaaatacctaggaatacagctaaccagggagatgaaagatctctacaacaaaaattacaaaacactgctgaaagaaatcagagatgacacaaatggaaaaacattccatacttatggataggaagaatcaatattgttaaaatggccatactacccaaagcaatttatagattcaatgctattcctatcaaactaccaataacattcttcacagaatcagaaaaaaaaagcattaaaatttatttgaaaccaaaaaag

SEQ ID NO: 435419 - DNA, 2553 bp, Homo sapiens
gaaactcaaccgaaagcctgcagagagcagaacatggaaggagacttctcggtgtgcaggaactggtaagaaagtgctttctccagcggcagacccgggctggcgagggagagacgtagacgacatagggctgtttctgaagggagcagaaagtggttcctgcataagaacacttaggaggacaagcagctggagaccgtgggccccaaggtaaaagacatgtagtctctgccaacttcaccctccatgaggcttactgcctgcggttcctggtcctgtgtccggagtgtgaggagcctgtccccaaggaaaccatggaggagcactgcaagcttgagcaccagcaggcttatggatctggcataggcaagaggttctggtttcaggaaagactggctgttctcttgagatctgtaaagagaggatgtgaaaaaggaaggtcctggaaggcagtcagatggagccctgtttcccgcctttccatgtccattcctcctggggcccctgatctgtctctctggagatactcaagctcaggcagccgttgccaactcagactggtctgacaaacacttcttgaacactgggcggggtgctagagagacactgaggtagccacatcggatccctgccctctgggagttcacagacccaaacccggaacactgtgagccaaagtggatgtggggcaggccctgggtgctgggtggacccacatctggtgtgtgtgtgtgtgtgtgtgtgtgtgtttaggttgggtgtacgatgtgtcagcagagcatgcagaagtcctcgctggagtttcataaggccaatgagtgccaggagcgccctgttgagtgtaagttctgcaaactggacatgcagctcagcaagctggagctccacgagtcctactgtggcagccggacagagctctgccaaggctgtggccagttcatcatgcaccgcatgctcgcccagcacagagatgtctgtcgcagtgaacaggcccagctcgggaaagaaaccagtcctgatccaggaaaatgtctctccattacggttgctgctgccctgagtgcacatctgtggccataaaggaaatgatgtgggtgattcggccaagagttgcctgtgtggtcaaggatgccggcagcgcaggaaagtcaagaccaggcaggggaaagaatttcagctcctgaaagggaaatctactgtcattattgcaaccaaatgattccagaaaataagtatttccaccatatgggtaaatgttgtccagactcagagtttaagaaacactttcctgttggaaatccagaaattcttccttcatctcttccaagtcaagctgctgaaaatcaaacttccacgatggagaaagatgttcgtccaaagacaagaagtataaacagatttcctcttcattctgaaagttcatcaaagaaagcaccaagaagcaaaaacaaaaccttggatccacttttgatgtcagagcccaagcccaggaccagctcccctagaggagataaagcagcctatgacattctgaggagatgttctcagtgtggcatcctgcttcccctgccgatcctaaatcaacatcaggagaaatgccggtggttagcttcatcaaaaggaaaacaagtgagaaatttcagctagatttggaaaaggaaaggtactacaaattcaaaagatttcacttttaacactggcattcctgcctacttgctgtggtggtcttgtgaaaggtgatgggttttattcgttgggctttaaaagaaaaggtttggcagaactaaaaacaaaactcacgtatcatctcaatagatacagaaaaggcttttgataaaattcaacttgacttcatgttaaaaaccctcaacaaaccaggcgtcgaaggaacatacctcaaaataataagagccatctatgacaaaaccacagccaacatcatactgaatgagcaaaagctggagcattactcttgagaagtagaacaaggcacttcagtcctattcaacatagtactggaagtcctcgccacagcaatcaggcaagagaaagaaataaaaggcaaccaaaaagaaaggaagtcgaagtatctctgtttgcagacgatatgattctatatctagaaaaccccatgatcttggcccaaaagctcctagatctgataaacaacttcagctaactttcaggagacaaaatcaatatacaaaatatggtagcatttttatacaccaacgacatccaagctgagagccaaatcaagaatgcaatcctattcacaattgccacaaaaagaataaaatacctaggaatacagctaaccagggagatgaaagatctctacaacaaaaattacaaaacactgctgaaagaaatcagagatgacacaaatggaaaaacattccatacttatggataggaagaatcaatattgttaaaatggccatactacccaaagcaatttatagattcaatgctattcctatcaaactaccaataacattcttcacagaatcagaaaaaaaaagcattaaaatttatttgaaaccaaaaaag

SEQ ID NO: 435420 - DNA, 2353 bp, Homo sapiens
gaaactcaaccgaaagcctgcagagagcagaacatggaaggagacttctcggtgtgcaggaactgtaaaagacatgtagtctctgccaacttcaccctccatgaggcttactgcctgcggttcctggtcctgtgtccggagtgtgaggagcctgtccccaaggaaaccatggaggagcactgcaagcttgagcaccagcaggcttatggatctggcataggcaagaggttctggtttcaggaaagactggctgttctcttgagatctgtaaagagaggatgtgagtccattcctcctggggcccctgatctgtctctctggagatactcaagctcaggcagccgttgccaactcagactggtctgacaaacacttcttgaacactgggcggggtgctagagagacactgaggtagccacatcggatccctgccctctgggagttcacagacccaaacccggaacactgtgagccaaagtggatgtggggcaggccctgggtgctgggtggacccacatctggtgtgtgtgtgtgtgtgtgtgtgtgtgtttaggttgggtgtacgatgtgtcagcagagcatgcagaagtcctcgctggagtttcataaggccaatgagtgccaggagcgccctgttgagtgtaagttctgcaaactggacatgcagctcagcaagctggagctccacgagtcctactgtggcagccggacagagctctgccaaggctgtggccagttcatcatgcaccgcatgctcgcccagcacagagatgtctgtcgcagtgaacaggcccagctcgggaaagaaaccagtcctgatccaggaaaatgtctctccattacggttgctgctgccctgagtgcacatctgtggccataaaggaaatgatgtgggtgattcggccaagagttgcctgtgtggtcaaggatgccggcagcgcaggaaagtcaagaccaggcaggggaaagaatttcagctcctgaaagggaaatctactgtcattattgcaaccaaatgattccagaaaataagtatttccaccatatgggtaaatgttgtccagactcagagtttaagaaacactttcctgttggaaatccagaaattcttccttcatctcttccaagtcaagctgctgaaaatcaaacttccacgatggagaaagatgttcgtccaaagacaagaagtataaacagatttcctcttcattctgaaagttcatcaaagaaagcaccaagaagcaaaaacaaaaccttggatccacttttgatgtcagagcccaagcccaggaccagctcccctagaggagataaagcagcctatgacattctgaggagatgttctcagtgtggcatcctgcttcccctgccgatcctaaatcaacatcaggagaaatgccggtggttagcttcatcaaaaggaaaacaagtgagaaatttcagctagatttggaaaaggaaaggtactacaaattcaaaagatttcacttttaacactggcattcctgcctacttgctgtggtggtcttgtgaaaggtgatgggttttattcgttgggctttaaaagaaaaggtttggcagaactaaaaacaaaactcacgtatcatctcaatagatacagaaaaggcttttgataaaattcaacttgacttcatgttaaaaaccctcaacaaaccaggcgtcgaaggaacatacctcaaaataataagagccatctatgacaaaaccacagccaacatcatactgaatgagcaaaagctggagcattactcttgagaagtagaacaaggcacttcagtcctattcaacatagtactggaagtcctcgccacagcaatcaggcaagagaaagaaataaaaggcaaccaaaaagaaaggaagtcgaagtatctctgtttgcagacgatatgattctatatctagaaaaccccatgatcttggcccaaaagctcctagatctgataaacaacttcagctaactttcaggagacaaaatcaatatacaaaatatggtagcatttttatacaccaacgacatccaagctgagagccaaatcaagaatgcaatcctattcacaattgccacaaaaagaataaaatacctaggaatacagctaaccagggagatgaaagatctctacaacaaaaattacaaaacactgctgaaagaaatcagagatgacacaaatggaaaaacattccatacttatggataggaagaatcaatattgttaaaatggccatactacccaaagcaatttatagattcaatgctattcctatcaaactaccaataacattcttcacagaatcagaaaaaaaaagcattaaaatttatttgaaaccaaaaaag

SEQ ID NO: 435421 - DNA, 2499 bp, Homo sapiens
gaaactcaaccgaaagcctgcagagagcagaacatggaaggagacttctcggtgtgcaggaactggtaagaaagtgctttctccagcggcagacccgggctggcgagggagagacgtagacgacatagggctgtttctgaagggagcagaaagtggttcctgcataagaacacttaggaggacaagcagctggagaccgtgggccccaaggtaaaagacatgtagtctctgccaacttcaccctccatgaggcttactgcctgcggttcctggtcctgtgtccggagtgtgaggagcctgtccccaaggaaaccatggaggagcactgcaagcttgagcaccagcaggcttatggatctggcataggcaagaggttctggtttcaggaaagactggctgttctcttgagatctgtaaagagaggatgtgaaaaaggaaggtcctggaaggcagtcagatggagccctgtttcccgcctttccatgtccattcctcctggggcccctgatctgtctctctggagatactcaagctcaggcagccgttgccaactcagactggtctgacaaacacttcttgaacactgggcggggtgctagagagacactgaggtagccacatcggatccctgccctctgggagttcacagacccaaacccggaacactgtgagccaaagtggatgtggggcaggccctgggtgctgggtggacccacatctggtgtgtgtgtgtgtgtgtgtgtgtgtgtttaggttgggtgtacgatgtgtcagcagagcatgcagaagtcctcgctggagtttcataaggccaatgagtgccaggagcgccctgttgagtgtaagttctgcaaactggacatgcagctcagcaagctggagctccacgagtcctactgtggcagccggacagagctctgccaaggctgtggccagttcatcatgcaccgcatgctcgcccagcacagagatgtctgtcgcagtgaacaggcccagctcgggaaagaaaccagtcctgatccaggaaaatgtctctccattacggttgctgctgccctgagtgcacatctgtggccataaaggaaatgatgtgggtgattcggccaagagttgcctgtgtggtcaaggatgccggcagcgcaggaaagtcaagaccaggcaggggaaagaatttcagctcctgaaagggaaatctactgtcattattgcaaccaaatgattccagaaaataagtatttccaccatatgggtaaatgttgtccagactcagagtttaagaaacactttcctgttggaaatccagaaattcttccttcatctcttccaagtcaagctgctgaaaatcaaacttccacgatggagaaagatgttcgtccaaagacaagaagtataaacagatttcctcttcattctgaaagttcatcaaagaaagcaccaagaagcaaaaacaaaaccttggatccacttttgatgtcagagcccaagcccaggaccagctcccctagaggagataaagcagcctatgacattctgaggagatgttctcagtgtggcatcctgcttcccctgccgatcctaaatcaacatcaggagaaatgccggtggttagcttcatcaaaaggaaaacaagtgagaaatttcagctagatttggaaaaggaaaggtactacaaattcaaaagatttcacttttaacactggcattcctgcctacttgctgtggtggtcttgtgaaaggtgatgggttttattcgttgggctttaaaagaaaaggtttggcagaactaaaaacaaaactcacgtatcatctcaatagatacagaaaaggcttttgataaaattcaacttgacttcatgttaaaaaccctcaacaaaccaggcgtcgaaggaacatacctccaaaagctggagcattactcttgagaagtagaacaaggcacttcagtcctattcaacatagtactggaagtcctcgccacagcaatcaggcaagagaaagaaataaaaggcaaccaaaaagaaaggaagtcgaagtatctctgtttgcagacgatatgattctatatctagaaaaccccatgatcttggcccaaaagctcctagatctgataaacaacttcagctaactttcaggagacaaaatcaatatacaaaatatggtagcatttttatacaccaacgacatccaagctgagagccaaatcaagaatgcaatcctattcacaattgccacaaaaagaataaaatacctaggaatacagctaaccagggagatgaaagatctctacaacaaaaattacaaaacactgctgaaagaaatcagagatgacacaaatggaaaaacattccatacttatggataggaagaatcaatattgttaaaatggccatactacccaaagcaatttatagattcaatgctattcctatcaaactaccaataacattcttcacagaatcagaaaaaaaaagcattaaaatttatttgaaaccaaaaaag

SEQ ID NO: 435422 - DNA, 2197 bp, Homo sapiens
ggctttttccattatcaacaatggccagaagggagttagcaatggctcctggcctgggggcctatgtattggctccctggtaccattttatgttcacttgaatcactcacctctttatgagggtgtatttactgtcacacaaccatcagtgtgacagatcctttggtgtctttgctagttgttttggtaacatggtaacatgggagagagcctaaaactccccagacagtaaccttctcctgataaacaatccacccaagggcaaaactggccaatggaaacctggaaattgtgagagtcatgtatatttccttcatcccagcatggctggacgtcaacagaatcaaacacagtcttcaacacaacttcagtgcaacacaacacaacacaacacaacacagcttcaacactgtcaacaaaaatgtgttcaaccaacacctggtctgatcacagagtctgaaaactggtgcaatgaaagagcacagtcagaatggagggggttggcatccgtggctacagctccattcatctccttagaaaccagtcctgatccaggaaaatgtctctccattacggttgctgctgccctgagtgcacatctgtggccataaaggaaatgatgtgggtgattcggccaagagttgcctgtgtggtcaaggatgccggcagcgcaggaaagtcaagaccaggcaggtccggggggcagttcgtgctcatgagcacaggccatgtatgcagttgtgggagagctgggctagccgttgacaaggacaatcatttgtggtgttgtttctctgcttattcaggggaaagaatttcagctcctgaaagggaaatctactgtcattattgcaaccaaatgattccagaaaataagtatttccaccatatgggtaaatgttgtccagactcagagtttaagaaacactttcctgttggaaatccagaaattcttccttcatctcttccaagtcaagctgctgaaaatcaaacttccacgatggagaaagatgttcgtccaaagacaagaagtataaacagatttcctcttcattctgaaagttcatcaaagaaagcaccaagaagcaaaaacaaaaccttggatccacttttgatgtcagagcccaagcccaggaccagctcccctagaggagataaagcagcctatgacattctgaggagatgttctcagtgtggcatcctgcttcccctgccgatcctaaatcaacatcaggagaaatgccggtggttagcttcatcaaaaggaaaacaagtgagaaatttcagctagatttggaaaaggaaaggtactacaaattcaaaagatttcacttttaacactggcattcctgcctacttgctgtggtggtcttgtgaaaggtgatgggttttattcgttgggctttaaaagaaaaggtttggcagaactaaaaacaaaactcacgtatcatctcaatagatacagaaaaggcttttgataaaattcaacttgacttcatgttaaaaaccctcaacaaaccaggcgtcgaaggaacatacctcaaaataataagagccatctatgacaaaaccacagccaacatcatactgaatgagcaaaagctggagcattactcttgagaagtagaacaaggcacttcagtcctattcaacatagtactggaagtcctcgccacagcaatcaggcaagagaaagaaataaaaggcaaccaaaaagaaaggaagtcgaagtatctctgtttgcagacgatatgattctatatctagaaaaccccatgatcttggcccaaaagctcctagatctgataaacaacttcagctaactttcaggagacaaaatcaatatacaaaatatggtagcatttttatacaccaacgacatccaagctgagagccaaatcaagaatgcaatcctattcacaattgccacaaaaagaataaaatacctaggaatacagctaaccagggagatgaaagatctctacaacaaaaattacaaaacactgctgaaagaaatcagagatgacacaaatggaaaaacattccatacttatggataggaagaatcaatattgttaaaatggccatactacccaaagcaatttatagattcaatgctattcctatcaaactaccaataacattcttcacagaatcagaaaaaaaaagcattaaaatttatttgaaaccaaaaaag

SEQ ID NO: 435423 - DNA, 1788 bp, Homo sapiens
gaaactcaaccgaaagcctgcagagagcagaacatggaaggagacttctcggtgtgcaggaactgtaaaagacatgtagtctctgccaacttcaccctccatgaggcttactgcctgcggttcctggtcctgtgtccggagtgtgaggagcctgtccccaaggaaaccatggaggagcactgcaagcttgagcaccagcaggccaatgagtgccaggagcgccctgttgagtgtaagttctgcaaactggacatgcagctcagcaagctggagctccacgagtcctactgtggcagccggacagagctctgccaaggctgtggccagttcatcatgcaccgcatgctcgcccagcacagagatgtctgtcgcagtgaacaggcccagctcgggaaaggggaaagaatttcagctcctgaaagggaaatctactgtcattattgcaaccaaatgattccagaaaataagtatttccaccatatgggtaaatgttgtccagactcagagtttaagaaacactttcctgttggaaatccagaaattcttccttcatctcttccaagtcaagctgctgaaaatcaaacttccacgatggagaaagatgttcgtccaaagacaagaagtataaacagatttcctcttcattctgaaagttcatcaaagaaagcaccaagaagcaaaaacaaaaccttggatccacttttgatgtcagagcccaagcccaggaccagctcccctagaggagataaagcagcctatgacattctgaggagatgttctcagtgtggcatcctgcttcccctgccgatcctaaatcaacatcaggagaaatgccggtggttagcttcatcaaaaggaaaacaagtgagaaatttcagctagatttggaaaaggaaaggtactacaaattcaaaagatttcacttttaacactggcattcctgcctacttgctgtggtggtcttgtgaaaggtgatgggttttattcgttgggctttaaaagaaaaggtttggcagaactaaaaacaaaactcacgtatcatctcaatagatacagaaaaggcttttgataaaattcaacttgacttcatgttaaaaaccctcaacaaaccaggcgtcgaaggaacatacctcaaaataataagagccatctatgacaaaaccacagccaacatcatactgaatgagcaaaagctggagcattactcttgagaagtagaacaaggcacttcagtcctattcaacatagtactggaagtcctcgccacagcaatcaggcaagagaaagaaataaaaggcaaccaaaaagaaaggaagtcgaagtatctctgtttgcagacgatatgattctatatctagaaaaccccatgatcttggcccaaaagctcctagatctgataaacaacttcagctaactttcaggagacaaaatcaatatacaaaatatggtagcatttttatacaccaacgacatccaagctgagagccaaatcaagaatgcaatcctattcacaattgccacaaaaagaataaaatacctaggaatacagctaaccagggagatgaaagatctctacaacaaaaattacaaaacactgctgaaagaaatcagagatgacacaaatggaaaaacattccatacttatggataggaagaatcaatattgttaaaatggccatactacccaaagcaatttatagattcaatgctattcctatcaaactaccaataacattcttcacagaatcagaaaaaaaaagcattaaaatttatttgaaaccaaaaaag

SEQ ID NO: 435424 - DNA, 1592 bp, Homo sapiens
gaaactcaaccgaaagcctgcagagagcagaacatggaaggagacttctcggtgtgcaggaactgtaaaagacatgtagtctctgccaacttcaccctccatgaggcttactgcctgcggttcctggtcctgtgtccggagtgtgaggagcctgtccccaaggaaaccatggaggagcactgcaagcttgagcaccagcaggggaaagaatttcagctcctgaaagggaaatctactgtcattattgcaaccaaatgattccagaaaataagtatttccaccatatgggtaaatgttgtccagactcagagtttaagaaacactttcctgttggaaatccagaaattcttccttcatctcttccaagtcaagctgctgaaaatcaaacttccacgatggagaaagatgttcgtccaaagacaagaagtataaacagatttcctcttcattctgaaagttcatcaaagaaagcaccaagaagcaaaaacaaaaccttggatccacttttgatgtcagagcccaagcccaggaccagctcccctagaggagataaagcagcctatgacattctgaggagatgttctcagtgtggcatcctgcttcccctgccgatcctaaatcaacatcaggagaaatgccggtggttagcttcatcaaaaggaaaacaagtgagaaatttcagctagatttggaaaaggaaaggtactacaaattcaaaagatttcacttttaacactggcattcctgcctacttgctgtggtggtcttgtgaaaggtgatgggttttattcgttgggctttaaaagaaaaggtttggcagaactaaaaacaaaactcacgtatcatctcaatagatacagaaaaggcttttgataaaattcaacttgacttcatgttaaaaaccctcaacaaaccaggcgtcgaaggaacatacctcaaaataataagagccatctatgacaaaaccacagccaacatcatactgaatgagcaaaagctggagcattactcttgagaagtagaacaaggcacttcagtcctattcaacatagtactggaagtcctcgccacagcaatcaggcaagagaaagaaataaaaggcaaccaaaaagaaaggaagtcgaagtatctctgtttgcagacgatatgattctatatctagaaaaccccatgatcttggcccaaaagctcctagatctgataaacaacttcagctaactttcaggagacaaaatcaatatacaaaatatggtagcatttttatacaccaacgacatccaagctgagagccaaatcaagaatgcaatcctattcacaattgccacaaaaagaataaaatacctaggaatacagctaaccagggagatgaaagatctctacaacaaaaattacaaaacactgctgaaagaaatcagagatgacacaaatggaaaaacattccatacttatggataggaagaatcaatattgttaaaatggccatactacccaaagcaatttatagattcaatgctattcctatcaaactaccaataacattcttcacagaatcagaaaaaaaaagcattaaaatttatttgaaaccaaaaaag

SEQ ID NO: 435425 - DNA, 1925 bp, Homo sapiens
gatgggactttcctgtcatccaagcccctagttacaaagttgaccctacatctcccataagcagtgtcaactcctgtgcttaaccagtccatttgtgctgctataacaggatgccacagacagagtaataataaagaacacaaatttatttcgaacagttctgaagactgggaagttcaagatcaaggcaccaccatttggtgtctggtgagggccttcttgctgcctcctagcatggtagaaagcaaaagagtagaaggctgtagccaaatacttcatgaatcctcttttataaggaccctaatctcattaaaaagggaggacctttcatgatctaatcacccccgaaggccccacctcttaataccatcacattggcagcacctgaattttggaggagacacattcaaaccatagcaaccagtcagaccttcattcctggaatgcaaaattttctttctttcctgcaaagccagctattaaattgaatgtctgtcacattttatacaccatataaaagtgtttacagtgggaatttcttgtgttatctagtctactgtattttctgaccattaaagctgaagtcattttaaaatttgatatattattcacaattgcagggtaaatgttgtccagactcagagtttaagaaacactttcctgttggaaatccagaaattcttccttcatctcttccaagtcaagctgctgaaaatcaaacttccacgatggagaaagatgttcgtccaaagacaagaagtataaacagatttcctcttcattctgaaagttcatcaaagaaagcaccaagaagcaaaaacaaaaccttggatccacttttgatgtcagagcccaagcccaggaccagctcccctagaggagataaagcagcctatgacattctgaggagatgttctcagtgtggcatcctgcttcccctgccgatcctaaatcaacatcaggagaaatgccggtggttagcttcatcaaaaggaaaacaagtgagaaatttcagctagatttggaaaaggaaaggtactacaaattcaaaagatttcacttttaacactggcattcctgcctacttgctgtggtggtcttgtgaaaggtgatgggttttattcgttgggctttaaaagaaaaggtttggcagaactaaaaacaaaactcacgtatcatctcaatagatacagaaaaggcttttgataaaattcaacttgacttcatgttaaaaaccctcaacaaaccaggcgtcgaaggaacatacctcaaaataataagagccatctatgacaaaaccacagccaacatcatactgaatgagcaaaagctggagcattactcttgagaagtagaacaaggcacttcagtcctattcaacatagtactggaagtcctcgccacagcaatcaggcaagagaaagaaataaaaggcaaccaaaaagaaaggaagtcgaagtatctctgtttgcagacgatatgattctatatctagaaaaccccatgatcttggcccaaaagctcctagatctgataaacaacttcagctaactttcaggagacaaaatcaatatacaaaatatggtagcatttttatacaccaacgacatccaagctgagagccaaatcaagaatgcaatcctattcacaattgccacaaaaagaataaaatacctaggaatacagctaaccagggagatgaaagatctctacaacaaaaattacaaaacactgctgaaagaaatcagagatgacacaaatggaaaaacattccatacttatggataggaagaatcaatattgttaaaatggccatactacccaaagcaatttatagattcaatgctattcctatcaaactaccaataacattcttcacagaatcagaaaaaaaaagcattaaaatttatttgaaaccaaaaaag

SEQ ID NO: 435426 - DNA, 1247 bp, Homo sapiens
gaaactcaaccgaaagcctgcagagagcagaacatggaaggagacttctcggtgtgcaggaactgtaaaagacatgtagtctctgccaacttcaccctccatgaggcttactgcctgcggttcctggtcctgtgtccggagtgtgaggagcctgtccccaaggaaaccatggaggagcactgcaagcttgagcaccagcaggcttatggatctggcataggcaagaggttctggtttcaggaaagactggctgttctcttgagatctgtaaagagaggatgtgagtccattcctcctggggcccctgatctgtctctctggagatactcaagctcaggcagccgttgccaactcagactggtctgacaaacacttcttgaacactgggcggggtgctagagagacactgaggtagccacatcggatccctgccctctgggagttcacagacccaaacccggaacactgtgagccaaagtggatgtggggcaggccctgggtgctgggtggacccacatctggtgtgtgtgtgtgtgtgtgtgtgtgtgtttaggttgggtgtacgatgtgtcagcagagcatgcagaagtcctcgctggagtttcataaggtaagagccccatgtgatttctcctttacagccaaatagaccaacctgagaaaaggagaggaaggggaaacgggaggccagtaatagagatttccacctgaccactcttttcaccccattaggcttggagagcagtggagaactagcccaccgcataacacaggttctcctgtcccccagatactgatcagaagggttttccatggtccatgagtccatcagagctcagatcccccgaaggcagtcccgcactctggcccttctcatctgctttctcgtattggccctaattccctagggagatgggcacaagtccttgatctgcctacagtcaaagaggccagtgatcggccaggcgcagtggcacacgcctgtaatcccagcactttgggaggccaaggcgggtggatcacgaggtcaggagttcgagaccagcctgaccaacatggtgaaaccccgtctctactaaaagtacaaaaattagctgggcgtggtggcacacgcctgtggtcccagccacttgggaggctgaggcaggagaattgcttgaacccgggaggcggaggttgcagtgagccaagatcaagccactgcactccagcctgggcaacacaatgagactctgtctcaaaaaaaa

SEQ ID NO: 435427 - DNA, 580 bp, Homo sapiens
ccatatcaaactttttttatatccatttcttaggagaaatgccggtggttagcttcatcaaaaggaaaacaagtgagaaatttcagctagatttggaaaaggaaaggtactacaaattcaaaagatttcacttttaacactggcattcctgcctacttgctgtggtggtcttgtgaaaggtgatgggttttattcgttgggctttaaaagaaaaggtttggcagaactaaaaacaaaactcacgtatcatctcaatagatacagaaaaggcttttgataaaattcaacttgacttcatgttaaaaaccctcaacaaaccaggcgtcgaaggaacatacctcaaaataataagagccatctatgacaaaaccacagccaacatcatactgaatgagcaaaagctggagcattactcttgagaagtagaacaaggcacttcagtcctattcaacatagtactggaagtcctcgccacagcaatcaggcaagagaaagaaataaaaggcaaccaaaaagaaaggaagtcgaagtatctctgtttgcagacgatatgattctatatctagaaaaccccatgatc

SEQ ID NO: 435428 - DNA, 304 bp, Homo sapiens
cccatggaaaggaaatgttaatcctgcctttttcatgctaatctgagtctacctccagttttcctatttccaatcctttccctacaggcttatggatctggcataggcaagaggttctggtttcaggaaagactggctgttctcttgagatctgtaaagagaggatgtgaaaaaggaaggtcctggaaggcagtcagatggagccctgtttcccgcctttccatgtccattcctcctggggcccctgatctgtctctctggagatactcaagctcaggcagccgttgccaactcagactggtct

SEQ ID NO: 435429 - DNA, 5864 bp, Homo sapiens
  misc_feature (2)..(3): n is a, c, g, or t
  misc_feature (5246)..(5246): n is a, c, g, or t
cnncggcaggtctcgctctcggcaccctcccggcgcccgcgttctcctggccctgcccggcatcccgatggccgccgctgggccccggcgctccgtgcgcggagccgtctgcctgcatctgctgctgaccctcgtgatcttcagtcgtgatggtgaagcctgcaaaaaggtgatacttaatgtaccttctaaactagaggcagacaaaataattggcagagttaatttggaagagtgcttcaggtctgcagacctcatccggtcaagtgatcctgatttcagagttctaaatgatgggtcagtgtacacagccagggctgttgcgctgtctgataagaaaagatcatttaccatatggctttctgacaaaaggaaacagacacagaaagaggttactgtgctgctagaacatcagaagaaggtatcgaagacaagacacactagagaaactgttctcaggcgtgccaagaggagatgggcacctattccttgctctatgcaagagaattccttgggccctttcccattgtttcttcaacaagttgaatctgatgcagcacagaactatactgtcttctactcaataagtggacgtggagttgataaagaacctttaaatttgttttatatagaaagagacactggaaatctattttgcactcggcctgtggatcgtgaagaatatgatgtttttgatttgattgcttatgcgtcaactgcagatggatattcagcagatctgcccctcccactacccatcagggtagaggatgaaaatgacaaccaccctgttttcacagaagcaatttataattttgaagttttggaaagtagtagacctggtactacagtgggggtggtttgtgccacagacagagatgaaccggacacaatgcatacgcgcctgaaatacagcattttgcagcagacaccaaggtcacctgggctcttttctgtgcatcccagcacaggcgtaatcaccacagtctctcattatttggacagagaggttgtagacaagtactcattgataatgaaagtacaagacatggatggccagttttttggattgataggcacatcaacttgtatcataacagtaacagattcaaatgataatgcacccactttcagacaaaatgcttatgaagcatttgtagaggaaaatgcattcaatgtggaaatcttacgaatacctatagaagataaggatttaattaacactgccaattggagagtcaattttaccattttaaagggaaatgaaaatggacatttcaaaatcagcacagacaaagaaactaatgaaggtgttctttctgttgtaaagccactgaattatgaagaaaaccgtcaagtgaacctggaaattggagtaaacaatgaagcgccatttgctagagatattcccagagtgacagccttgaacagagccttggttacagttcatgtgagggatctggatgaggggcctgaatgcactcctgcagcccaatatgtgcggattaaagaaaacttagcagtggggtcaaagatcaacggctataaggcatatgaccccgaaaatagaaatggcaatggtttaaggtacaaaaaattgcatgatcctaaaggttggatcaccattgatgaaatttcagggtcaatcataacttccaaaatcctggatagggaggttgaaactcccaaaaatgagttgtataatattacagtcctggcaatagacaaagatgatagatcatgtactggaacacttgctgtgaacattgaagatgtaaatgataatccaccagaaatacttcaagaatatgtagtcatttgcaaaccaaaaatggggtataccgacattttagctgttgatcctgatgaacctgtccatggagctccattttatttcagtttgcccaatacttctccagaaatcagtagactgtggagcctcaccaaagttaatgatacagctgcccgtctttcatatcagaaaaatgctggatttcaagaatataccattcctattactgtaaaagacagggccggccaagctgcaacaaaattattgagagttaatctgtgtgaatgtactcatccaactcagtgtcgtgcgacttcaaggagtacaggagtaatacttggaaaatgggcaatccttgcaatattactgggtatagcactgctcttttctgtattgctaactttagtatgtggagtttttggtgcaactaaagggaaacgttttcctgaagatttagcacagcaaaacttaattatatcaaacacagaagcacctggagacgatagagtgtgctctgccaatggatttatgacccaaactaccaacaactctagccaaggtttttgtggtactatgggatcaggaatgaaaaatggagggcaggaaaccattgaaatgatgaaaggaggaaaccagaccttggaatcctgccggggggctgggcatcatcataccctggactcctgcaggggaggacacacggaggtggacaactgcagatacacttactcggagtggcacagttttactcaaccccgtctcggtgaaaaattgcatcgatgtaatcagaatgaagaccgcatgccatcccaagattatgtcctcacttataactatgagggaagaggatctccagctggttctgtgggctgctgcagtgaaaagcaggaagaagatggccttgactttttaaataatttggaacccaaatttattacattagcagaagcatgcacaaagagataatgtcacagtgctacaattaggtctttgtcagacattctggaggtttccaaaaataatattgtaaagttcaatttcaacatgtatgtatatgatgatttttttctcaattttgaattatgctactcaccaatttatatttttaaagcaagttgttgcttatcttttccaaaaagtgaaaaatgttaaaacagacaactggtaaatctcaaactccagcactggaattaaggtctctaaagcatctgctcttttttttttttacggatattttagtaataaatatgctggataaatattagtccaacaatagctaagttatgctaatatcacattattatgtattcactttaagtgatagtttaaaaaataaacaagaaatattgagtatcactatgtgaagaaagttttggaaaagaaacaatgaagactgaattaaattaaaaatgttgcagctcataaagaattgggactcacccctactgcactaccaaattcatttgactttggaggcaaaatgtgttgaagtgccctatgaagtagcaattttctataggaatatagttggaaataaatgtgtgtgtgtatattattattaatcaatgcaatatttaaaatgaaatgagaacaaagaggaaaatggtaaaaacttgaaatgaggctggggtatagtttgtcctacaatagaaaaaagagagagcttcctaggcctgggctcttaaatgctgcattataactgagtctatgaggaaatagttcctgtccaatttgtgtaatttgtttaaaattgtaaataaattaaacttttctggtttctgtgggaaggaaatagggaatccaatggaacagtagctttgctttgcagtctgtttcaagatttctgcatccacaagttagtagcaaactggggaatactcgctgcagctggggttccctgctttttggtagcaagggtccagagatgaggtgtttttttcggggagctaataacaaaaacattttaaaacttacctttactgaagttaaatcctctattgctgtttctattctctcttatagtgaccaacatctttttaatttagatccaaataaccatgtcctcctagagtttagaggctagagggagctgaggggaggatcttactgaaagcaccctggggagattgattgtccttaaacctaagccccacaaacttgacacctgatcaggtctgggagctacaaaatttcatttttctcctcactgcccttcttctgagtggcattggcctgaatcaaggaaagccaggccttgtgggcccccttctttcggctttctgctaaagcaacacctccagcagagattcccttaagtgactccaggttttccaccatccttcagcgtgaattaatttttaatcagtttgctttctccagagaaattttaaaataatagaagaaatagaaattttgaatgtataaaagaaaaagatcaagttgtcattttagaacagagggaactttgggagaaagcagcccaagtaggttatttgtacagtcagagggcaacaggaagatgcaggccttcaagggcaaggagaggccacaaggaatatgggtgggagtaaaagcaacatcgtctgcttcatactttttcctaggcttggcactgccttttcctttctcaggccaatggcaactgccatttgagtccggtgagggatcagccaacctcttctctatggctcaccttatttggagtgagaaatcaaggagacagagctgactgcatgatgagtctgaaggcatttgcaggatgagcctgaactggttgtgcagaacaaacaaggcattcatgggaattgttgtattccttctgcagccctccttctgggcactaagaaggtctatgaattaaatgcctatctaaaattctgatttattcctacattttctgttttctaatttgaccctaaaatctatgtgttttagacttagactttttattgccccccccccctttttttttgagacggagtctcgctctgacgcacaggctggagtgcagtggctccgatctctgctcactgaaagctccgcctcccgggttcatgccattctcctgcctcagcctcctgagtagctgggactacaggcgcccaccaccacgcccggctaattttttgtatttttaatagagacggggtttcactgtgttagccaggatggtctcgatctcctgacctcgtgatccgcctgcctcggcctcccaaagtgctgggattacaggcatgacccaccgctcccggccttgttttccgtttaaagtcgtcttcttttaatgtaatcattttgaacatgtgtgaaagttgatcatacgaattggatcaatcttgaaatactcaaccaaaagacagtcgagaagccagggggagaaagaactcagggcacaaaatattggtctgagaatggaattctctgtaagcctagttgctgaaatttcctgctgtanccagaagccagttttatctaacggctactgaaacacccactgtgttttgctcactccctcactcaccgatcaaaacctgctacctccccaagactttactagtgccgataaactttctcaaagagcaaccagtatcacttccctgtttataaaacctctaaccatctctttgttctttgaacatgctgaaaaccacctggtctgcatgtatgcccgaatttgtaattcttttctctcaaatgaaaatttaattttagggattcatttctatattttcacatatgtagtattattatttccttatatgtgtaaggtgaaatttatggtatttgagtgtgcaagaaaatatatttttaaagctttcatttttcccccagtgaatgatttagaattttttatgtaaatatacagaatgttttttcttacttttataaggaagcagctgtctaaaatgcagtggggtttgttttgcaatgttttaaacagagttttagtattgctattaaaagaagttactttgcttttaaagaaacttggctgcttaaaataagcaaaaattggatgcgtaaagtaatatttacagatgtggggagatgtaataaaacaatattaacttgg

SEQ ID NO: 435430 - DNA, 5909 bp, Homo sapiens
  misc_feature (2)..(3): n is a, c, g, or t
  misc_feature (5291)..(5291): n is a, c, g, or t
cnncggcaggtctcgctctcggcaccctcccggcgcccgcgttctcctggccctgcccggcatcccgatggccgccgctgggccccggcgctccgtgcgcggagccgtctgcctgcatctgctgctgaccctcgtgatcttcagtcgtgatggtgaagcctgcaaaaaggtgatacttaatgtaccttctaaactagaggcagacaaaataattggcagagttaatttggaagagtgcttcaggtctgcagacctcatccggtcaagtgatcctgatttcagagttctaaatgatgggtcagtgtacacagccagggctgttgcgctgtctgataagaaaagatcatttaccatatggctttctgacaaaaggaaacagacacagaaagaggttactgtgctgctagaacatcagaagaaggtatcgaagacaagacacactagagaaactgttctcaggcgtgccaagaggagatgggcacctattccttgctctatgcaagagaattccttgggccctttcccattgtttcttcaacaagttgaatctgatgcagcacagaactatactgtcttctactcaataagtggacgtggagttgataaagaacctttaaatttgttttatatagaaagagacactggaaatctattttgcactcggcctgtggatcgtgaagaatatgatgtttttgatttgattgcttatgcgtcaactgcagatggatattcagcagatctgcccctcccactacccatcagggtagaggatgaaaatgacaaccaccctgttttcacagaagcaatttataattttgaagttttggaaagtagtagacctggtactacagtgggggtggtttgtgccacagacagagatgaaccggacacaatgcatacgcgcctgaaatacagcattttgcagcagacaccaaggtcacctgggctcttttctgtgcatcccagcacaggcgtaatcaccacagtctctcattatttggacagagaggttgtagacaagtactcattgataatgaaagtacaagacatggatggccagttttttggattgataggcacatcaacttgtatcataacagtaacagattcaaatgataatgcacccactttcagacaaaatgcttatgaagcatttgtagaggaaaatgcattcaatgtggaaatcttacgaatacctatagaagataaggatttaattaacactgccaattggagagtcaattttaccattttaaagggaaatgaaaatggacatttcaaaatcagcacagacaaagaaactaatgaaggtgttctttctgttgtaaagccactgaattatgaagaaaaccgtcaagtgaacctggaaattggagtaaacaatgaagcgccatttgctagagatattcccagagtgacagccttgaacagagccttggttacagttcatgtgagggatctggatgaggggcctgaatgcactcctgcagcccaatatgtgcggattaaagaaaacttagcagtggggtcaaagatcaacggctataaggcatatgaccccgaaaatagaaatggcaatggtttaaggtacaaaaaattgcatgatcctaaaggttggatcaccattgatgaaatttcagggtcaatcataacttccaaaatcctggatagggaggttgaaactcccaaaaatgagttgtataatattacagtcctggcaatagacaaagatgatagatcatgtactggaacacttgctgtgaacattgaagatgtaaatgataatccaccagaaatacttcaagaatatgtagtcatttgcaaaccaaaaatggggtataccgacattttagctgttgatcctgatgaacctgtccatggagctccattttatttcagtttgcccaatacttctccagaaatcagtagactgtggagcctcaccaaagttaatgatacagctgcccgtctttcatatcagaaaaatgctggatttcaagaatataccattcctattactgtaaaagacagggccggccaagctgcaacaaaattattgagagttaatctgtgtgaatgtactcatccaactcagtgtcgtgcgacttcaaggagtacaggagtaatacttggaaaatgggcaatccttgcaatattactgggtatagcactgctcttttctgtattgctaactttagtatgtggagtttttggtgcaactaaagggaaacgttttcctgaagatttagcacagcaaaacttaattatatcaaacacagaagcacctggagacgatagagtgtgctctgccaatggatttatgacccaaactaccaacaactctagccaaggtttttgtggtactatgggatcaggaatgaaaaatggagggcaggaaaccattgaaatgatgaaaggaggaaaccagaccttggaatcctgccggggggctgggcatcatcataccctggactcctgcaggggaggacacacggaggtggacaactgcagatacacttactcggagtggcacagttttactcaaccccgtctcggtgaagaatccatctagaggacacactgtgttaaaaattaaacataaaagaaattgcatcgatgtaatcagaatgaagaccgcatgccatcccaagattatgtcctcacttataactatgagggaagaggatctccagctggttctgtgggctgctgcagtgaaaagcaggaagaagatggccttgactttttaaataatttggaacccaaatttattacattagcagaagcatgcacaaagagataatgtcacagtgctacaattaggtctttgtcagacattctggaggtttccaaaaataatattgtaaagttcaatttcaacatgtatgtatatgatgatttttttctcaattttgaattatgctactcaccaatttatatttttaaagcaagttgttgcttatcttttccaaaaagtgaaaaatgttaaaacagacaactggtaaatctcaaactccagcactggaattaaggtctctaaagcatctgctcttttttttttttacggatattttagtaataaatatgctggataaatattagtccaacaatagctaagttatgctaatatcacattattatgtattcactttaagtgatagtttaaaaaataaacaagaaatattgagtatcactatgtgaagaaagttttggaaaagaaacaatgaagactgaattaaattaaaaatgttgcagctcataaagaattgggactcacccctactgcactaccaaattcatttgactttggaggcaaaatgtgttgaagtgccctatgaagtagcaattttctataggaatatagttggaaataaatgtgtgtgtgtatattattattaatcaatgcaatatttaaaatgaaatgagaacaaagaggaaaatggtaaaaacttgaaatgaggctggggtatagtttgtcctacaatagaaaaaagagagagcttcctaggcctgggctcttaaatgctgcattataactgagtctatgaggaaatagttcctgtccaatttgtgtaatttgtttaaaattgtaaataaattaaacttttctggtttctgtgggaaggaaatagggaatccaatggaacagtagctttgctttgcagtctgtttcaagatttctgcatccacaagttagtagcaaactggggaatactcgctgcagctggggttccctgctttttggtagcaagggtccagagatgaggtgtttttttcggggagctaataacaaaaacattttaaaacttacctttactgaagttaaatcctctattgctgtttctattctctcttatagtgaccaacatctttttaatttagatccaaataaccatgtcctcctagagtttagaggctagagggagctgaggggaggatcttactgaaagcaccctggggagattgattgtccttaaacctaagccccacaaacttgacacctgatcaggtctgggagctacaaaatttcatttttctcctcactgcccttcttctgagtggcattggcctgaatcaaggaaagccaggccttgtgggcccccttctttcggctttctgctaaagcaacacctccagcagagattcccttaagtgactccaggttttccaccatccttcagcgtgaattaatttttaatcagtttgctttctccagagaaattttaaaataatagaagaaatagaaattttgaatgtataaaagaaaaagatcaagttgtcattttagaacagagggaactttgggagaaagcagcccaagtaggttatttgtacagtcagagggcaacaggaagatgcaggccttcaagggcaaggagaggccacaaggaatatgggtgggagtaaaagcaacatcgtctgcttcatactttttcctaggcttggcactgccttttcctttctcaggccaatggcaactgccatttgagtccggtgagggatcagccaacctcttctctatggctcaccttatttggagtgagaaatcaaggagacagagctgactgcatgatgagtctgaaggcatttgcaggatgagcctgaactggttgtgcagaacaaacaaggcattcatgggaattgttgtattccttctgcagccctccttctgggcactaagaaggtctatgaattaaatgcctatctaaaattctgatttattcctacattttctgttttctaatttgaccctaaaatctatgtgttttagacttagactttttattgccccccccccctttttttttgagacggagtctcgctctgacgcacaggctggagtgcagtggctccgatctctgctcactgaaagctccgcctcccgggttcatgccattctcctgcctcagcctcctgagtagctgggactacaggcgcccaccaccacgcccggctaattttttgtatttttaatagagacggggtttcactgtgttagccaggatggtctcgatctcctgacctcgtgatccgcctgcctcggcctcccaaagtgctgggattacaggcatgacccaccgctcccggccttgttttccgtttaaagtcgtcttcttttaatgtaatcattttgaacatgtgtgaaagttgatcatacgaattggatcaatcttgaaatactcaaccaaaagacagtcgagaagccagggggagaaagaactcagggcacaaaatattggtctgagaatggaattctctgtaagcctagttgctgaaatttcctgctgtanccagaagccagttttatctaacggctactgaaacacccactgtgttttgctcactccctcactcaccgatcaaaacctgctacctccccaagactttactagtgccgataaactttctcaaagagcaaccagtatcacttccctgtttataaaacctctaaccatctctttgttctttgaacatgctgaaaaccacctggtctgcatgtatgcccgaatttgtaattcttttctctcaaatgaaaatttaattttagggattcatttctatattttcacatatgtagtattattatttccttatatgtgtaaggtgaaatttatggtatttgagtgtgcaagaaaatatatttttaaagctttcatttttcccccagtgaatgatttagaattttttatgtaaatatacagaatgttttttcttacttttataaggaagcagctgtctaaaatgcagtggggtttgttttgcaatgttttaaacagagttttagtattgctattaaaagaagttactttgcttttaaagaaacttggctgcttaaaataagcaaaaattggatgcgtaaagtaatatttacagatgtggggagatgtaataaaacaatattaacttgg

SEQ ID NO: 435431 - DNA, 3330 bp, Homo sapiens
  misc_feature (2)..(3): n is a, c, g, or t
cnncggcaggtctcgctctcggcaccctcccggcgcccgcgttctcctggccctgcccggcatcccgatggccgccgctgggccccggcgctccgtgcgcggagccgtctgcctgcatctgctgctgaccctcgtgatcttcagtcgtgatggtgaagcctgcaaaaaggtgatacttaatgtaccttctaaactagaggcagacaaaataattggcagagttaatttggaagagtgcttcaggtctgcagacctcatccggtcaagtgatcctgatttcagagttctaaatgatgggtcagtgtacacagccagggctgttgcgctgtctgataagaaaagatcatttaccatatggctttctgacaaaaggaaacagacacagaaagaggttactgtgctgctagaacatcagaagaaggtatcgaagacaagacacactagagaaactgttctcaggcgtgccaagaggagatgggcacctattccttgctctatgcaagagaattccttgggccctttcccattgtttcttcaacaagttgaatctgatgcagcacagaactatactgtcttctactcaataagtggacgtggagttgataaagaacctttaaatttgttttatatagaaagagacactggaaatctattttgcactcggcctgtggatcgtgaagaatatgatgtttttgatttgattgcttatgcgtcaactgcagatggatattcagcagatctgcccctcccactacccatcagggtagaggatgaaaatgacaaccaccctgttttcacagaagcaatttataattttgaagttttggaaagtagtagacctggtactacagtgggggtggtttgtgccacagacagagatgaaccggacacaatgcatacgcgcctgaaatacagcattttgcagcagacaccaaggtcacctgggctcttttctgtgcatcccagcacaggcgtaatcaccacagtctctcattatttggacagagaggttgtagacaagtactcattgataatgaaagtacaagacatggatggccagttttttggattgataggcacatcaacttgtatcataacagtaacagattcaaatgataatgcacccactttcagacaaaatgcttatgaagcatttgtagaggaaaatgcattcaatgtggaaatcttacgaatacctatagaagataaggatttaattaacactgccaattggagagtcaattttaccattttaaagggaaatgaaaatggacatttcaaaatcagcacagacaaagaaactaatgaaggtgttctttctgttgtaaagccactgaattatgaagaaaaccgtcaagtgaacctggaaattggagtaaacaatgaagcgccatttgctagagatattcccagagtgacagccttgaacagagccttggttacagttcatgtgagggatctggatgaggggcctgaatgcactcctgcagcccaatatgtgcggattaaagaaaacttagcagtggggtcaaagatcaacggctataaggcatatgaccccgaaaatagaaatggcaatggtttaaggtacaaaaaattgcatgatcctaaaggttggatcaccattgatgaaatttcagggtcaatcataacttccaaaatcctggatagggaggttgaaactcccaaaaatgagttgtataatattacagtcctggcaatagacaaagatgatagatcatgtactggaacacttgctgtgaacattgaagatgtaaatgataatccaccagaaatacttcaagaatatgtagtcatttgcaaaccaaaaatggggtataccgacattttagctgttgatcctgatgaacctgtccatggagctccattttatttcagtttgcccaatacttctccagaaatcagtagactgtggagcctcaccaaagttaatgatacagctgcccgtctttcatatcagaaaaatgctggatttcaagaatataccattcctattactgtaaaagacagggccggccaagctgcaacaaaattattgagagttaatctgtgtgaatgtactcatccaactcagtgtcgtgcgacttcaaggagtacaggagtaatacttggaaaatgggcaatccttgcaatattactgggtatagcactgctcttttctgtattgctaactttagtatgtggagtttttggtgcaactaaagggaaacgttttcctgaagatttagcacagcaaaacttaattatatcaaacacagaagcacctggagacgatagagtgtgctctgccaatggatttatgacccaaactaccaacaactctagccaaggtttttgtggtactatgggatcaggaatgaaaaatggagggcaggaaaccattgaaatgatgaaaggaggaaaccagaccttggaatcctgccggggggctgggcatcatcataccctggactcctgcaggggaggacacacggaggtggacaactgcagatacacttactcggagtggcacagttttactcaaccccgtctcggtgaaaaattgcatcgatgtaatcagaatgaagaccgcatgccatcccaagattatgtcctcacttataactatgagggaagaggatctccagctggttctgtgggctgctgcagtgaaaagcaggaagaagatggccttgactttttaaataatttggaacccaaatttattacattagcagaagcatgcacaaagagataatgtcacagtgctacaattaggtctttgtcagacattctggaggtttccaaaaataatattgtaaagttcaatttcaacatgtatgtatatgatgatttttttctcaattttgaattatgctactcaccaatttatatttttaaagcaagttgttgcttatcttttccaaaaagtgaaaaatgttaaaacagacaactggtaaatctcaaactccagcactggaattaaggtctctaaagcatctgctcttttttttttttacggatattttagtaataaatatgctggataaatattagtccaacaatagctaagttatgctaatatcacattattatgtattcactttaagtgatagtttaaaaaataaacaagaaatattgagtatcactatgtgaagaaagttttggaaaagaaacaatgaagactgaattaaattaaaaatgttgcagctcataaagaattgggactcacccctactgcactaccaaattcatttgactttggaggcaaaatgtgttgaagtgccctatgaagtagcaattttctataggaatatagttggaaataaa

SEQ ID NO: 435432 - DNA, 888 bp, Homo sapiens
aaactataatgcaattcattttttaaaaaattttactgaaaaattgcatcgatgtaatcagaatgaagaccgcatgccatcccaagattatgtcctcacttataactatgagggaagaggatctccagctggttctgtgggctgctgcagtgaaaagcaggaagaagatggccttgactttttaaataatttggaacccaaatttattacattagcagaagcatgcacaaagagataatgtcacagtgctacaattaggtctttgtcagacattctggaggtttccaaaaataatattgtaaagttcaatttcaacatgtatgtatatgatgatttttttctcaattttgaattatgctactcaccaatttatatttttaaagcaagttgttgcttatcttttccaaaaagtgaaaaatgttaaaacagacaactggtaaatctcaaactccagcactggaattaaggtctctaaagcatctgctcttttttttttttacggatattttagtaataaatatgctggataaatattagtccaacaatagctaagttatgctaatatcacattattatgtattcactttaagtgatagtttaaaaaataaacaagaaatattgagtatcactatgtgaagaaagttttggaaaagaaacaatgaagactgaattaaattaaaaatgttgcagctcataaagaattgggactcacccctactgcactaccaaattcatttgactttggaggcaaaatgtgttgaagtgccctatgaagtagcaattttctataggaatatagttggaaataaaaaaaaaaaaaaaatgggctctttgggctcaaggggggaactctggggccgttccctttaggagggtatattgacctcg

SEQ ID NO: 435433 - DNA, 1305 bp, Homo sapiens
  misc_feature (31)..(31): n is a, c, g, or t
  misc_feature (45)..(46): n is a, c, g, or t
catcaaccctaaatgtattatgtgaattttntacaatacaaaccnnaaatacagaaatgccatatatgaatactgtctaaaatgcagtggggtttgttttgcaatgttttaaacagagttttagtattgctattaaaagaagttactttgcttttaaagaaacttggctgcttaaaataagcaaaaattggatgcgtaaagtaatatttacagatgtggggagatgtaataaaacaatattaacttggtttcttgtttttgctgtatttagagattaaataattctaagatgatcactttgcaaaattatgcttatggctggcatggaaatagaaataattatgtctttgttgtattaatggggaatattttggacaatgtttcattatcaaattgtcgacatcattaatatatattgtaatgttgggaagagatcactattttgaagcacagctttacagatgagtatctatgatacatatgtataataaattttgattgggtattaaaagtattagaaggtggttataattgcagagtattccatgaatagtacactgacacaggggttttactttgaggaccagtgtagtcaagggaaaacatgagttaaaaagaaaagcaggcaatattgcagtcttgattctgccacttacaggatagataacgcctgaactttaatgacaagatgatccaaccataaaggtgctctgtgcttcacagtgaatcttttccccatgcaggagtgtgctcccctacaaacgttaagactgatcatttcaaaaatctattagctatatcaaaagccttacattttaatataggttgaaccaaaatttcaattccagtaacttctattgtaaccattatttttgtgtatgtcttcaagaatgttcattggatttttgtttgtaatagtaaaataccggatacatttcacgtgtccttcagtattgatttggttgaatattgggtcataatggttgagaagcatggacactagagccagaatgcttggatatgaatcctggatctgtcacttacttctgtgtgacctttgaaaggctacttatttcctctcttagctttctcattaaaatcaatgaacaatgccagcctcatggggttgttgaatgattaaatgagttactatacctaaagtacatagaacactgcctgcacatagtaaaagaattataagtgtgaggtagttggtaaaattatgtagttggatatactaccgaacaatatctcatctctttttagggaaataaagtttgtgcatatatataatcccgaaacatg

SEQ ID NO: 435434 - DNA, 6921 bp, Homo sapiens
  misc_feature (2)..(3): n is a, c, g, or t
  misc_feature (5246)..(5246): n is a, c, g, or t
cnncggcaggtctcgctctcggcaccctcccggcgcccgcgttctcctggccctgcccggcatcccgatggccgccgctgggccccggcgctccgtgcgcggagccgtctgcctgcatctgctgctgaccctcgtgatcttcagtcgtgatggtgaagcctgcaaaaaggtgatacttaatgtaccttctaaactagaggcagacaaaataattggcagagttaatttggaagagtgcttcaggtctgcagacctcatccggtcaagtgatcctgatttcagagttctaaatgatgggtcagtgtacacagccagggctgttgcgctgtctgataagaaaagatcatttaccatatggctttctgacaaaaggaaacagacacagaaagaggttactgtgctgctagaacatcagaagaaggtatcgaagacaagacacactagagaaactgttctcaggcgtgccaagaggagatgggcacctattccttgctctatgcaagagaattccttgggccctttcccattgtttcttcaacaagttgaatctgatgcagcacagaactatactgtcttctactcaataagtggacgtggagttgataaagaacctttaaatttgttttatatagaaagagacactggaaatctattttgcactcggcctgtggatcgtgaagaatatgatgtttttgatttgattgcttatgcgtcaactgcagatggatattcagcagatctgcccctcccactacccatcagggtagaggatgaaaatgacaaccaccctgttttcacagaagcaatttataattttgaagttttggaaagtagtagacctggtactacagtgggggtggtttgtgccacagacagagatgaaccggacacaatgcatacgcgcctgaaatacagcattttgcagcagacaccaaggtcacctgggctcttttctgtgcatcccagcacaggcgtaatcaccacagtctctcattatttggacagagaggttgtagacaagtactcattgataatgaaagtacaagacatggatggccagttttttggattgataggcacatcaacttgtatcataacagtaacagattcaaatgataatgcacccactttcagacaaaatgcttatgaagcatttgtagaggaaaatgcattcaatgtggaaatcttacgaatacctatagaagataaggatttaattaacactgccaattggagagtcaattttaccattttaaagggaaatgaaaatggacatttcaaaatcagcacagacaaagaaactaatgaaggtgttctttctgttgtaaagccactgaattatgaagaaaaccgtcaagtgaacctggaaattggagtaaacaatgaagcgccatttgctagagatattcccagagtgacagccttgaacagagccttggttacagttcatgtgagggatctggatgaggggcctgaatgcactcctgcagcccaatatgtgcggattaaagaaaacttagcagtggggtcaaagatcaacggctataaggcatatgaccccgaaaatagaaatggcaatggtttaaggtacaaaaaattgcatgatcctaaaggttggatcaccattgatgaaatttcagggtcaatcataacttccaaaatcctggatagggaggttgaaactcccaaaaatgagttgtataatattacagtcctggcaatagacaaagatgatagatcatgtactggaacacttgctgtgaacattgaagatgtaaatgataatccaccagaaatacttcaagaatatgtagtcatttgcaaaccaaaaatggggtataccgacattttagctgttgatcctgatgaacctgtccatggagctccattttatttcagtttgcccaatacttctccagaaatcagtagactgtggagcctcaccaaagttaatgatacagctgcccgtctttcatatcagaaaaatgctggatttcaagaatataccattcctattactgtaaaagacagggccggccaagctgcaacaaaattattgagagttaatctgtgtgaatgtactcatccaactcagtgtcgtgcgacttcaaggagtacaggagtaatacttggaaaatgggcaatccttgcaatattactgggtatagcactgctcttttctgtattgctaactttagtatgtggagtttttggtgcaactaaagggaaacgttttcctgaagatttagcacagcaaaacttaattatatcaaacacagaagcacctggagacgatagagtgtgctctgccaatggatttatgacccaaactaccaacaactctagccaaggtttttgtggtactatgggatcaggaatgaaaaatggagggcaggaaaccattgaaatgatgaaaggaggaaaccagaccttggaatcctgccggggggctgggcatcatcataccctggactcctgcaggggaggacacacggaggtggacaactgcagatacacttactcggagtggcacagttttactcaaccccgtctcggtgaaaaattgcatcgatgtaatcagaatgaagaccgcatgccatcccaagattatgtcctcacttataactatgagggaagaggatctccagctggttctgtgggctgctgcagtgaaaagcaggaagaagatggccttgactttttaaataatttggaacccaaatttattacattagcagaagcatgcacaaagagataatgtcacagtgctacaattaggtctttgtcagacattctggaggtttccaaaaataatattgtaaagttcaatttcaacatgtatgtatatgatgatttttttctcaattttgaattatgctactcaccaatttatatttttaaagcaagttgttgcttatcttttccaaaaagtgaaaaatgttaaaacagacaactggtaaatctcaaactccagcactggaattaaggtctctaaagcatctgctcttttttttttttacggatattttagtaataaatatgctggataaatattagtccaacaatagctaagttatgctaatatcacattattatgtattcactttaagtgatagtttaaaaaataaacaagaaatattgagtatcactatgtgaagaaagttttggaaaagaaacaatgaagactgaattaaattaaaaatgttgcagctcataaagaattgggactcacccctactgcactaccaaattcatttgactttggaggcaaaatgtgttgaagtgccctatgaagtagcaattttctataggaatatagttggaaataaatgtgtgtgtgtatattattattaatcaatgcaatatttaaaatgaaatgagaacaaagaggaaaatggtaaaaacttgaaatgaggctggggtatagtttgtcctacaatagaaaaaagagagagcttcctaggcctgggctcttaaatgctgcattataactgagtctatgaggaaatagttcctgtccaatttgtgtaatttgtttaaaattgtaaataaattaaacttttctggtttctgtgggaaggaaatagggaatccaatggaacagtagctttgctttgcagtctgtttcaagatttctgcatccacaagttagtagcaaactggggaatactcgctgcagctggggttccctgctttttggtagcaagggtccagagatgaggtgtttttttcggggagctaataacaaaaacattttaaaacttacctttactgaagttaaatcctctattgctgtttctattctctcttatagtgaccaacatctttttaatttagatccaaataaccatgtcctcctagagtttagaggctagagggagctgaggggaggatcttactgaaagcaccctggggagattgattgtccttaaacctaagccccacaaacttgacacctgatcaggtctgggagctacaaaatttcatttttctcctcactgcccttcttctgagtggcattggcctgaatcaaggaaagccaggccttgtgggcccccttctttcggctttctgctaaagcaacacctccagcagagattcccttaagtgactccaggttttccaccatccttcagcgtgaattaatttttaatcagtttgctttctccagagaaattttaaaataatagaagaaatagaaattttgaatgtataaaagaaaaagatcaagttgtcattttagaacagagggaactttgggagaaagcagcccaagtaggttatttgtacagtcagagggcaacaggaagatgcaggccttcaagggcaaggagaggccacaaggaatatgggtgggagtaaaagcaacatcgtctgcttcatactttttcctaggcttggcactgccttttcctttctcaggccaatggcaactgccatttgagtccggtgagggatcagccaacctcttctctatggctcaccttatttggagtgagaaatcaaggagacagagctgactgcatgatgagtctgaaggcatttgcaggatgagcctgaactggttgtgcagaacaaacaaggcattcatgggaattgttgtattccttctgcagccctccttctgggcactaagaaggtctatgaattaaatgcctatctaaaattctgatttattcctacattttctgttttctaatttgaccctaaaatctatgtgttttagacttagactttttattgccccccccccctttttttttgagacggagtctcgctctgacgcacaggctggagtgcagtggctccgatctctgctcactgaaagctccgcctcccgggttcatgccattctcctgcctcagcctcctgagtagctgggactacaggcgcccaccaccacgcccggctaattttttgtatttttaatagagacggggtttcactgtgttagccaggatggtctcgatctcctgacctcgtgatccgcctgcctcggcctcccaaagtgctgggattacaggcatgacccaccgctcccggccttgttttccgtttaaagtcgtcttcttttaatgtaatcattttgaacatgtgtgaaagttgatcatacgaattggatcaatcttgaaatactcaaccaaaagacagtcgagaagccagggggagaaagaactcagggcacaaaatattggtctgagaatggaattctctgtaagcctagttgctgaaatttcctgctgtanccagaagccagttttatctaacggctactgaaacacccactgtgttttgctcactccctcactcaccgatcaaaacctgctacctccccaagactttactagtgccgataaactttctcaaagagcaaccagtatcacttccctgtttataaaacctctaaccatctctttgttctttgaacatgctgaaaaccacctggtctgcatgtatgcccgaatttgtaattcttttctctcaaatgaaaatttaattttagggattcatttctatattttcacatatgtagtattattatttccttatatgtgtaaggtgaaatttatggtatttgagtgtgcaagaaaatatatttttaaagctttcatttttcccccagtgaatgatttagaattttttatgtaaatatacagaatgttttttcttacttttataaggaagcagctgtctaaaatgcagtggggtttgttttgcaatgttttaaacagagttttagtattgctattaaaagaagttactttgcttttaaagaaacttggctgcttaaaataagcaaaaattggatgcgtaaagtaatatttacagatgtggggagatgtaataaaacaatattaacttggtttcttgtttttgctgtatttagagattaaataattctaagatgatcactttgcaaaattatgcttatggctggcatggaaatagaaataattatgtctttgttgtattaatggggaatattttggacaatgtttcattatcaaattgtcgacatcattaatatatattgtaatgttgggaagagatcactattttgaagcacagctttacagatgagtatctatgatacatatgtataataaattttgattgggtattaaaagtattagaaggtggttataattgcagagtattccatgaatagtacactgacacaggggttttactttgaggaccagtgtagtcaagggaaaacatgagttaaaaagaaaagcaggcaatattgcagtcttgattctgccacttacaggatagataacgcctgaactttaatgacaagatgatccaaccataaaggtgctctgtgcttcacagtgaatcttttccccatgcaggagtgtgctcccctacaaacgttaagactgatcatttcaaaaatctattagctatatcaaaagccttacattttaatataggttgaaccaaaatttcaattccagtaacttctattgtaaccattatttttgtgtatgtcttcaagaatgttcattggatttttgtttgtaatagtaaaataccggatacatttcacgtgtccttcagtattgatttggttgaatattgggtcataatggttgagaagcatggacactagagccagaatgcttggatatgaatcctggatctgtcacttacttctgtgtgacctttgaaaggctacttatttcctctcttagctttctcattaaaatcaatgaacaatgccagcctcatggggttgttgaatgattaaatgagttactatacctaaagtacatagaacactgcctgcacatagtaaaagaattataagtgtgaggtagttggtaaaattatgtagttggatatactaccgaacaatatctcatctctttttagggaaataaagtttgtgcatatatataatcccgaaacatg

SEQ ID NO: 435435 - DNA, 4459 bp, Homo sapiens
  misc_feature (2784)..(2784): n is a, c, g, or t
gtaaaataataacgcacatacatcattatattattctattcaacagtagctaggaatccatctagaggacacactgtgttaaaaattaaacataaaagaaattgcatcgatgtaatcagaatgaagaccgcatgccatcccaagattatgtcctcacttataactatgagggaagaggatctccagctggttctgtgggctgctgcagtgaaaagcaggaagaagatggccttgactttttaaataatttggaacccaaatttattacattagcagaagcatgcacaaagagataatgtcacagtgctacaattaggtctttgtcagacattctggaggtttccaaaaataatattgtaaagttcaatttcaacatgtatgtatatgatgatttttttctcaattttgaattatgctactcaccaatttatatttttaaagcaagttgttgcttatcttttccaaaaagtgaaaaatgttaaaacagacaactggtaaatctcaaactccagcactggaattaaggtctctaaagcatctgctcttttttttttttacggatattttagtaataaatatgctggataaatattagtccaacaatagctaagttatgctaatatcacattattatgtattcactttaagtgatagtttaaaaaataaacaagaaatattgagtatcactatgtgaagaaagttttggaaaagaaacaatgaagactgaattaaattaaaaatgttgcagctcataaagaattgggactcacccctactgcactaccaaattcatttgactttggaggcaaaatgtgttgaagtgccctatgaagtagcaattttctataggaatatagttggaaataaatgtgtgtgtgtatattattattaatcaatgcaatatttaaaatgaaatgagaacaaagaggaaaatggtaaaaacttgaaatgaggctggggtatagtttgtcctacaatagaaaaaagagagagcttcctaggcctgggctcttaaatgctgcattataactgagtctatgaggaaatagttcctgtccaatttgtgtaatttgtttaaaattgtaaataaattaaacttttctggtttctgtgggaaggaaatagggaatccaatggaacagtagctttgctttgcagtctgtttcaagatttctgcatccacaagttagtagcaaactggggaatactcgctgcagctggggttccctgctttttggtagcaagggtccagagatgaggtgtttttttcggggagctaataacaaaaacattttaaaacttacctttactgaagttaaatcctctattgctgtttctattctctcttatagtgaccaacatctttttaatttagatccaaataaccatgtcctcctagagtttagaggctagagggagctgaggggaggatcttactgaaagcaccctggggagattgattgtccttaaacctaagccccacaaacttgacacctgatcaggtctgggagctacaaaatttcatttttctcctcactgcccttcttctgagtggcattggcctgaatcaaggaaagccaggccttgtgggcccccttctttcggctttctgctaaagcaacacctccagcagagattcccttaagtgactccaggttttccaccatccttcagcgtgaattaatttttaatcagtttgctttctccagagaaattttaaaataatagaagaaatagaaattttgaatgtataaaagaaaaagatcaagttgtcattttagaacagagggaactttgggagaaagcagcccaagtaggttatttgtacagtcagagggcaacaggaagatgcaggccttcaagggcaaggagaggccacaaggaatatgggtgggagtaaaagcaacatcgtctgcttcatactttttcctaggcttggcactgccttttcctttctcaggccaatggcaactgccatttgagtccggtgagggatcagccaacctcttctctatggctcaccttatttggagtgagaaatcaaggagacagagctgactgcatgatgagtctgaaggcatttgcaggatgagcctgaactggttgtgcagaacaaacaaggcattcatgggaattgttgtattccttctgcagccctccttctgggcactaagaaggtctatgaattaaatgcctatctaaaattctgatttattcctacattttctgttttctaatttgaccctaaaatctatgtgttttagacttagactttttattgccccccccccctttttttttgagacggagtctcgctctgacgcacaggctggagtgcagtggctccgatctctgctcactgaaagctccgcctcccgggttcatgccattctcctgcctcagcctcctgagtagctgggactacaggcgcccaccaccacgcccggctaattttttgtatttttaatagagacggggtttcactgtgttagccaggatggtctcgatctcctgacctcgtgatccgcctgcctcggcctcccaaagtgctgggattacaggcatgacccaccgctcccggccttgttttccgtttaaagtcgtcttcttttaatgtaatcattttgaacatgtgtgaaagttgatcatacgaattggatcaatcttgaaatactcaaccaaaagacagtcgagaagccagggggagaaagaactcagggcacaaaatattggtctgagaatggaattctctgtaagcctagttgctgaaatttcctgctgtanccagaagccagttttatctaacggctactgaaacacccactgtgttttgctcactccctcactcaccgatcaaaacctgctacctccccaagactttactagtgccgataaactttctcaaagagcaaccagtatcacttccctgtttataaaacctctaaccatctctttgttctttgaacatgctgaaaaccacctggtctgcatgtatgcccgaatttgtaattcttttctctcaaatgaaaatttaattttagggattcatttctatattttcacatatgtagtattattatttccttatatgtgtaaggtgaaatttatggtatttgagtgtgcaagaaaatatatttttaaagctttcatttttcccccagtgaatgatttagaattttttatgtaaatatacagaatgttttttcttacttttataaggaagcagctgtctaaaatgcagtggggtttgttttgcaatgttttaaacagagttttagtattgctattaaaagaagttactttgcttttaaagaaacttggctgcttaaaataagcaaaaattggatgcgtaaagtaatatttacagatgtggggagatgtaataaaacaatattaacttggtttcttgtttttgctgtatttagagattaaataattctaagatgatcactttgcaaaattatgcttatggctggcatggaaatagaaataattatgtctttgttgtattaatggggaatattttggacaatgtttcattatcaaattgtcgacatcattaatatatattgtaatgttgggaagagatcactattttgaagcacagctttacagatgagtatctatgatacatatgtataataaattttgattgggtattaaaagtattagaaggtggttataattgcagagtattccatgaatagtacactgacacaggggttttactttgaggaccagtgtagtcaagggaaaacatgagttaaaaagaaaagcaggcaatattgcagtcttgattctgccacttacaggatagataacgcctgaactttaatgacaagatgatccaaccataaaggtgctctgtgcttcacagtgaatcttttccccatgcaggagtgtgctcccctacaaacgttaagactgatcatttcaaaaatctattagctatatcaaaagccttacattttaatataggttgaaccaaaatttcaattccagtaacttctattgtaaccattatttttgtgtatgtcttcaagaatgttcattggatttttgtttgtaatagtaaaataccggatacatttcacgtgtccttcagtattgatttggttgaatattgggtcataatggttgagaagcatggacactagagccagaatgcttggatatgaatcctggatctgtcacttacttctgtgtgacctttgaaaggctacttatttcctctcttagctttctcattaaaatcaatgaacaatgccagcctcatggggttgttgaatgattaaatgagttactatacctaaagtacatagaacactgcctgcacatagtaaaagaattataagtgtgaggtagttggtaaaattatgtagttggatatactaccgaacaatatctcatctctttttagggaaataaagtttgtgcatatatataatcccgaaacatg

SEQ ID NO: 435436 - DNA, 4444 bp, Homo sapiens
  misc_feature (2769)..(2769): n is a, c, g, or t
gtgatatagaccaatcatttgcattttctgtgtgcttggaatccatctagaggacacactgtgttaaaaattaaacataaaagaaattgcatcgatgtaatcagaatgaagaccgcatgccatcccaagattatgtcctcacttataactatgagggaagaggatctccagctggttctgtgggctgctgcagtgaaaagcaggaagaagatggccttgactttttaaataatttggaacccaaatttattacattagcagaagcatgcacaaagagataatgtcacagtgctacaattaggtctttgtcagacattctggaggtttccaaaaataatattgtaaagttcaatttcaacatgtatgtatatgatgatttttttctcaattttgaattatgctactcaccaatttatatttttaaagcaagttgttgcttatcttttccaaaaagtgaaaaatgttaaaacagacaactggtaaatctcaaactccagcactggaattaaggtctctaaagcatctgctcttttttttttttacggatattttagtaataaatatgctggataaatattagtccaacaatagctaagttatgctaatatcacattattatgtattcactttaagtgatagtttaaaaaataaacaagaaatattgagtatcactatgtgaagaaagttttggaaaagaaacaatgaagactgaattaaattaaaaatgttgcagctcataaagaattgggactcacccctactgcactaccaaattcatttgactttggaggcaaaatgtgttgaagtgccctatgaagtagcaattttctataggaatatagttggaaataaatgtgtgtgtgtatattattattaatcaatgcaatatttaaaatgaaatgagaacaaagaggaaaatggtaaaaacttgaaatgaggctggggtatagtttgtcctacaatagaaaaaagagagagcttcctaggcctgggctcttaaatgctgcattataactgagtctatgaggaaatagttcctgtccaatttgtgtaatttgtttaaaattgtaaataaattaaacttttctggtttctgtgggaaggaaatagggaatccaatggaacagtagctttgctttgcagtctgtttcaagatttctgcatccacaagttagtagcaaactggggaatactcgctgcagctggggttccctgctttttggtagcaagggtccagagatgaggtgtttttttcggggagctaataacaaaaacattttaaaacttacctttactgaagttaaatcctctattgctgtttctattctctcttatagtgaccaacatctttttaatttagatccaaataaccatgtcctcctagagtttagaggctagagggagctgaggggaggatcttactgaaagcaccctggggagattgattgtccttaaacctaagccccacaaacttgacacctgatcaggtctgggagctacaaaatttcatttttctcctcactgcccttcttctgagtggcattggcctgaatcaaggaaagccaggccttgtgggcccccttctttcggctttctgctaaagcaacacctccagcagagattcccttaagtgactccaggttttccaccatccttcagcgtgaattaatttttaatcagtttgctttctccagagaaattttaaaataatagaagaaatagaaattttgaatgtataaaagaaaaagatcaagttgtcattttagaacagagggaactttgggagaaagcagcccaagtaggttatttgtacagtcagagggcaacaggaagatgcaggccttcaagggcaaggagaggccacaaggaatatgggtgggagtaaaagcaacatcgtctgcttcatactttttcctaggcttggcactgccttttcctttctcaggccaatggcaactgccatttgagtccggtgagggatcagccaacctcttctctatggctcaccttatttggagtgagaaatcaaggagacagagctgactgcatgatgagtctgaaggcatttgcaggatgagcctgaactggttgtgcagaacaaacaaggcattcatgggaattgttgtattccttctgcagccctccttctgggcactaagaaggtctatgaattaaatgcctatctaaaattctgatttattcctacattttctgttttctaatttgaccctaaaatctatgtgttttagacttagactttttattgccccccccccctttttttttgagacggagtctcgctctgacgcacaggctggagtgcagtggctccgatctctgctcactgaaagctccgcctcccgggttcatgccattctcctgcctcagcctcctgagtagctgggactacaggcgcccaccaccacgcccggctaattttttgtatttttaatagagacggggtttcactgtgttagccaggatggtctcgatctcctgacctcgtgatccgcctgcctcggcctcccaaagtgctgggattacaggcatgacccaccgctcccggccttgttttccgtttaaagtcgtcttcttttaatgtaatcattttgaacatgtgtgaaagttgatcatacgaattggatcaatcttgaaatactcaaccaaaagacagtcgagaagccagggggagaaagaactcagggcacaaaatattggtctgagaatggaattctctgtaagcctagttgctgaaatttcctgctgtanccagaagccagttttatctaacggctactgaaacacccactgtgttttgctcactccctcactcaccgatcaaaacctgctacctccccaagactttactagtgccgataaactttctcaaagagcaaccagtatcacttccctgtttataaaacctctaaccatctctttgttctttgaacatgctgaaaaccacctggtctgcatgtatgcccgaatttgtaattcttttctctcaaatgaaaatttaattttagggattcatttctatattttcacatatgtagtattattatttccttatatgtgtaaggtgaaatttatggtatttgagtgtgcaagaaaatatatttttaaagctttcatttttcccccagtgaatgatttagaattttttatgtaaatatacagaatgttttttcttacttttataaggaagcagctgtctaaaatgcagtggggtttgttttgcaatgttttaaacagagttttagtattgctattaaaagaagttactttgcttttaaagaaacttggctgcttaaaataagcaaaaattggatgcgtaaagtaatatttacagatgtggggagatgtaataaaacaatattaacttggtttcttgtttttgctgtatttagagattaaataattctaagatgatcactttgcaaaattatgcttatggctggcatggaaatagaaataattatgtctttgttgtattaatggggaatattttggacaatgtttcattatcaaattgtcgacatcattaatatatattgtaatgttgggaagagatcactattttgaagcacagctttacagatgagtatctatgatacatatgtataataaattttgattgggtattaaaagtattagaaggtggttataattgcagagtattccatgaatagtacactgacacaggggttttactttgaggaccagtgtagtcaagggaaaacatgagttaaaaagaaaagcaggcaatattgcagtcttgattctgccacttacaggatagataacgcctgaactttaatgacaagatgatccaaccataaaggtgctctgtgcttcacagtgaatcttttccccatgcaggagtgtgctcccctacaaacgttaagactgatcatttcaaaaatctattagctatatcaaaagccttacattttaatataggttgaaccaaaatttcaattccagtaacttctattgtaaccattatttttgtgtatgtcttcaagaatgttcattggatttttgtttgtaatagtaaaataccggatacatttcacgtgtccttcagtattgatttggttgaatattgggtcataatggttgagaagcatggacactagagccagaatgcttggatatgaatcctggatctgtcacttacttctgtgtgacctttgaaaggctacttatttcctctcttagctttctcattaaaatcaatgaacaatgccagcctcatggggttgttgaatgattaaatgagttactatacctaaagtacatagaacactgcctgcacatagtaaaagaattataagtgtgaggtagttggtaaaattatgtagttggatatactaccgaacaatatctcatctctttttagggaaataaagtttgtgcatatatataatcccgaaacatg

SEQ ID NO: 435437 - DNA, 4976 bp, Homo sapiens
  misc_feature (3301)..(3301): n is a, c, g, or t
gcaacacaagcgactggactatgaacagtgcaaagtctggcgtcgcgatccggataatataccattcctattactgtaaaagacagggccggccaagctgcaacaaaattattgagagttaatctgtgtgaatgtactcatccaactcagtgtcgtgcgacttcaaggagtacaggagtaatacttggaaaatgggcaatccttgcaatattactgggtatagcactgctcttttctgtattgctaactttagtatgtggagtttttggtgcaactaaagggaaacgttttcctgaagatttagcacagcaaaacttaattatatcaaacacagaagcacctggagacgatagagtgtgctctgccaatggatttatgacccaaactaccaacaactctagccaaggtttttgtggtactatgggatcaggaatgaaaaatggagggcaggaaaccattgaaatgatgaaaggaggaaaccagaccttggaatcctgccggggggctgggcatcatcataccctggactcctgcaggggaggacacacggaggtggacaactgcagatacacttactcggagtggcacagttttactcaaccccgtctcggtgaaaaattgcatcgatgtaatcagaatgaagaccgcatgccatcccaagattatgtcctcacttataactatgagggaagaggatctccagctggttctgtgggctgctgcagtgaaaagcaggaagaagatggccttgactttttaaataatttggaacccaaatttattacattagcagaagcatgcacaaagagataatgtcacagtgctacaattaggtctttgtcagacattctggaggtttccaaaaataatattgtaaagttcaatttcaacatgtatgtatatgatgatttttttctcaattttgaattatgctactcaccaatttatatttttaaagcaagttgttgcttatcttttccaaaaagtgaaaaatgttaaaacagacaactggtaaatctcaaactccagcactggaattaaggtctctaaagcatctgctcttttttttttttacggatattttagtaataaatatgctggataaatattagtccaacaatagctaagttatgctaatatcacattattatgtattcactttaagtgatagtttaaaaaataaacaagaaatattgagtatcactatgtgaagaaagttttggaaaagaaacaatgaagactgaattaaattaaaaatgttgcagctcataaagaattgggactcacccctactgcactaccaaattcatttgactttggaggcaaaatgtgttgaagtgccctatgaagtagcaattttctataggaatatagttggaaataaatgtgtgtgtgtatattattattaatcaatgcaatatttaaaatgaaatgagaacaaagaggaaaatggtaaaaacttgaaatgaggctggggtatagtttgtcctacaatagaaaaaagagagagcttcctaggcctgggctcttaaatgctgcattataactgagtctatgaggaaatagttcctgtccaatttgtgtaatttgtttaaaattgtaaataaattaaacttttctggtttctgtgggaaggaaatagggaatccaatggaacagtagctttgctttgcagtctgtttcaagatttctgcatccacaagttagtagcaaactggggaatactcgctgcagctggggttccctgctttttggtagcaagggtccagagatgaggtgtttttttcggggagctaataacaaaaacattttaaaacttacctttactgaagttaaatcctctattgctgtttctattctctcttatagtgaccaacatctttttaatttagatccaaataaccatgtcctcctagagtttagaggctagagggagctgaggggaggatcttactgaaagcaccctggggagattgattgtccttaaacctaagccccacaaacttgacacctgatcaggtctgggagctacaaaatttcatttttctcctcactgcccttcttctgagtggcattggcctgaatcaaggaaagccaggccttgtgggcccccttctttcggctttctgctaaagcaacacctccagcagagattcccttaagtgactccaggttttccaccatccttcagcgtgaattaatttttaatcagtttgctttctccagagaaattttaaaataatagaagaaatagaaattttgaatgtataaaagaaaaagatcaagttgtcattttagaacagagggaactttgggagaaagcagcccaagtaggttatttgtacagtcagagggcaacaggaagatgcaggccttcaagggcaaggagaggccacaaggaatatgggtgggagtaaaagcaacatcgtctgcttcatactttttcctaggcttggcactgccttttcctttctcaggccaatggcaactgccatttgagtccggtgagggatcagccaacctcttctctatggctcaccttatttggagtgagaaatcaaggagacagagctgactgcatgatgagtctgaaggcatttgcaggatgagcctgaactggttgtgcagaacaaacaaggcattcatgggaattgttgtattccttctgcagccctccttctgggcactaagaaggtctatgaattaaatgcctatctaaaattctgatttattcctacattttctgttttctaatttgaccctaaaatctatgtgttttagacttagactttttattgccccccccccctttttttttgagacggagtctcgctctgacgcacaggctggagtgcagtggctccgatctctgctcactgaaagctccgcctcccgggttcatgccattctcctgcctcagcctcctgagtagctgggactacaggcgcccaccaccacgcccggctaattttttgtatttttaatagagacggggtttcactgtgttagccaggatggtctcgatctcctgacctcgtgatccgcctgcctcggcctcccaaagtgctgggattacaggcatgacccaccgctcccggccttgttttccgtttaaagtcgtcttcttttaatgtaatcattttgaacatgtgtgaaagttgatcatacgaattggatcaatcttgaaatactcaaccaaaagacagtcgagaagccagggggagaaagaactcagggcacaaaatattggtctgagaatggaattctctgtaagcctagttgctgaaatttcctgctgtanccagaagccagttttatctaacggctactgaaacacccactgtgttttgctcactccctcactcaccgatcaaaacctgctacctccccaagactttactagtgccgataaactttctcaaagagcaaccagtatcacttccctgtttataaaacctctaaccatctctttgttctttgaacatgctgaaaaccacctggtctgcatgtatgcccgaatttgtaattcttttctctcaaatgaaaatttaattttagggattcatttctatattttcacatatgtagtattattatttccttatatgtgtaaggtgaaatttatggtatttgagtgtgcaagaaaatatatttttaaagctttcatttttcccccagtgaatgatttagaattttttatgtaaatatacagaatgttttttcttacttttataaggaagcagctgtctaaaatgcagtggggtttgttttgcaatgttttaaacagagttttagtattgctattaaaagaagttactttgcttttaaagaaacttggctgcttaaaataagcaaaaattggatgcgtaaagtaatatttacagatgtggggagatgtaataaaacaatattaacttggtttcttgtttttgctgtatttagagattaaataattctaagatgatcactttgcaaaattatgcttatggctggcatggaaatagaaataattatgtctttgttgtattaatggggaatattttggacaatgtttcattatcaaattgtcgacatcattaatatatattgtaatgttgggaagagatcactattttgaagcacagctttacagatgagtatctatgatacatatgtataataaattttgattgggtattaaaagtattagaaggtggttataattgcagagtattccatgaatagtacactgacacaggggttttactttgaggaccagtgtagtcaagggaaaacatgagttaaaaagaaaagcaggcaatattgcagtcttgattctgccacttacaggatagataacgcctgaactttaatgacaagatgatccaaccataaaggtgctctgtgcttcacagtgaatcttttccccatgcaggagtgtgctcccctacaaacgttaagactgatcatttcaaaaatctattagctatatcaaaagccttacattttaatataggttgaaccaaaatttcaattccagtaacttctattgtaaccattatttttgtgtatgtcttcaagaatgttcattggatttttgtttgtaatagtaaaataccggatacatttcacgtgtccttcagtattgatttggttgaatattgggtcataatggttgagaagcatggacactagagccagaatgcttggatatgaatcctggatctgtcacttacttctgtgtgacctttgaaaggctacttatttcctctcttagctttctcattaaaatcaatgaacaatgccagcctcatggggttgttgaatgattaaatgagttactatacctaaagtacatagaacactgcctgcacatagtaaaagaattataagtgtgaggtagttggtaaaattatgtagttggatatactaccgaacaatatctcatctctttttagggaaataaagtttgtgcatatatataatcccgaaacatg

SEQ ID NO: 435438 - DNA, 868 bp, Homo sapiens
gtaaaataataacgcacatacatcattatattattctattcaacagtagctaggaatccatctagaggacacactgtgttaaaaattaaacataaaagaaattgcatcgatgtaatcagaatgaagaccgcatgccatcccaagattatgtcctcacttataactatgagggaagaggatctccagctggttctgtgggctgctgcagtgaaaagcaggaagaagatggccttgactttttaaataatttggaacccaaatttattacattagcagaagcatgcacaaagagataatgtcacagtgctacaattaggtctttgtcagacattctggaggtttccaaaaataatattgtaaagttcaatttcaacatgtatgtatatgatgatttttttctcaattttgaattatgctactcaccaatttatatttttaaagcaagttgttgcttatcttttccaaaaagtgaaaaatgttaaaacagacaactggtaaatctcaaactccagcactggaattaaggtctctaaagcatctgctcttttttttttttacggatattttagtaataaatatgctggataaatattagtccaacaatagctaagttatgctaatatcacattattatgtattcactttaagtgatagtttaaaaaataaacaagaaatattgagtatcactatgtgaagaaagttttggaaaagaaacaatgaagactgaattaaattaaaaatgttgcagctcataaagaattgggactcacccctactgcactaccaaattcatttgactttggaggcaaaatgtgttgaagtgccctatgaagtagcaattttctataggaatatagttggaaataaa

SEQ ID NO: 435439 - DNA, 4457 bp, Homo sapiens
  misc_feature (2782)..(2782): n is a, c, g, or t
cagacgccccccgtcctcgcgccctcccgccccccgcaccaccccccaattagggataaactaccggcaacacttggttaaaaattaccacataaaaaattgcatcgatgtaatcagaatgaagaccgcatgccatcccaagattatgtcctcacttataactatgagggaagaggatctccagctggttctgtgggctgctgcagtgaaaagcaggaagaagatggccttgactttttaaataatttggaacccaaatttattacattagcagaagcatgcacaaagagataatgtcacagtgctacaattaggtctttgtcagacattctggaggtttccaaaaataatattgtaaagttcaatttcaacatgtatgtatatgatgatttttttctcaattttgaattatgctactcaccaatttatatttttaaagcaagttgttgcttatcttttccaaaaagtgaaaaatgttaaaacagacaactggtaaatctcaaactccagcactggaattaaggtctctaaagcatctgctcttttttttttttacggatattttagtaataaatatgctggataaatattagtccaacaatagctaagttatgctaatatcacattattatgtattcactttaagtgatagtttaaaaaataaacaagaaatattgagtatcactatgtgaagaaagttttggaaaagaaacaatgaagactgaattaaattaaaaatgttgcagctcataaagaattgggactcacccctactgcactaccaaattcatttgactttggaggcaaaatgtgttgaagtgccctatgaagtagcaattttctataggaatatagttggaaataaatgtgtgtgtgtatattattattaatcaatgcaatatttaaaatgaaatgagaacaaagaggaaaatggtaaaaacttgaaatgaggctggggtatagtttgtcctacaatagaaaaaagagagagcttcctaggcctgggctcttaaatgctgcattataactgagtctatgaggaaatagttcctgtccaatttgtgtaatttgtttaaaattgtaaataaattaaacttttctggtttctgtgggaaggaaatagggaatccaatggaacagtagctttgctttgcagtctgtttcaagatttctgcatccacaagttagtagcaaactggggaatactcgctgcagctggggttccctgctttttggtagcaagggtccagagatgaggtgtttttttcggggagctaataacaaaaacattttaaaacttacctttactgaagttaaatcctctattgctgtttctattctctcttatagtgaccaacatctttttaatttagatccaaataaccatgtcctcctagagtttagaggctagagggagctgaggggaggatcttactgaaagcaccctggggagattgattgtccttaaacctaagccccacaaacttgacacctgatcaggtctgggagctacaaaatttcatttttctcctcactgcccttcttctgagtggcattggcctgaatcaaggaaagccaggccttgtgggcccccttctttcggctttctgctaaagcaacacctccagcagagattcccttaagtgactccaggttttccaccatccttcagcgtgaattaatttttaatcagtttgctttctccagagaaattttaaaataatagaagaaatagaaattttgaatgtataaaagaaaaagatcaagttgtcattttagaacagagggaactttgggagaaagcagcccaagtaggttatttgtacagtcagagggcaacaggaagatgcaggccttcaagggcaaggagaggccacaaggaatatgggtgggagtaaaagcaacatcgtctgcttcatactttttcctaggcttggcactgccttttcctttctcaggccaatggcaactgccatttgagtccggtgagggatcagccaacctcttctctatggctcaccttatttggagtgagaaatcaaggagacagagctgactgcatgatgagtctgaaggcatttgcaggatgagcctgaactggttgtgcagaacaaacaaggcattcatgggaattgttgtattccttctgcagccctccttctgggcactaagaaggtctatgaattaaatgcctatctaaaattctgatttattcctacattttctgttttctaatttgaccctaaaatctatgtgttttagacttagactttttattgccccccccccctttttttttgagacggagtctcgctctgacgcacaggctggagtgcagtggctccgatctctgctcactgaaagctccgcctcccgggttcatgccattctcctgcctcagcctcctgagtagctgggactacaggcgcccaccaccacgcccggctaattttttgtatttttaatagagacggggtttcactgtgttagccaggatggtctcgatctcctgacctcgtgatccgcctgcctcggcctcccaaagtgctgggattacaggcatgacccaccgctcccggccttgttttccgtttaaagtcgtcttcttttaatgtaatcattttgaacatgtgtgaaagttgatcatacgaattggatcaatcttgaaatactcaaccaaaagacagtcgagaagccagggggagaaagaactcagggcacaaaatattggtctgagaatggaattctctgtaagcctagttgctgaaatttcctgctgtanccagaagccagttttatctaacggctactgaaacacccactgtgttttgctcactccctcactcaccgatcaaaacctgctacctccccaagactttactagtgccgataaactttctcaaagagcaaccagtatcacttccctgtttataaaacctctaaccatctctttgttctttgaacatgctgaaaaccacctggtctgcatgtatgcccgaatttgtaattcttttctctcaaatgaaaatttaattttagggattcatttctatattttcacatatgtagtattattatttccttatatgtgtaaggtgaaatttatggtatttgagtgtgcaagaaaatatatttttaaagctttcatttttcccccagtgaatgatttagaattttttatgtaaatatacagaatgttttttcttacttttataaggaagcagctgtctaaaatgcagtggggtttgttttgcaatgttttaaacagagttttagtattgctattaaaagaagttactttgcttttaaagaaacttggctgcttaaaataagcaaaaattggatgcgtaaagtaatatttacagatgtggggagatgtaataaaacaatattaacttggtttcttgtttttgctgtatttagagattaaataattctaagatgatcactttgcaaaattatgcttatggctggcatggaaatagaaataattatgtctttgttgtattaatggggaatattttggacaatgtttcattatcaaattgtcgacatcattaatatatattgtaatgttgggaagagatcactattttgaagcacagctttacagatgagtatctatgatacatatgtataataaattttgattgggtattaaaagtattagaaggtggttataattgcagagtattccatgaatagtacactgacacaggggttttactttgaggaccagtgtagtcaagggaaaacatgagttaaaaagaaaagcaggcaatattgcagtcttgattctgccacttacaggatagataacgcctgaactttaatgacaagatgatccaaccataaaggtgctctgtgcttcacagtgaatcttttccccatgcaggagtgtgctcccctacaaacgttaagactgatcatttcaaaaatctattagctatatcaaaagccttacattttaatataggttgaaccaaaatttcaattccagtaacttctattgtaaccattatttttgtgtatgtcttcaagaatgttcattggatttttgtttgtaatagtaaaataccggatacatttcacgtgtccttcagtattgatttggttgaatattgggtcataatggttgagaagcatggacactagagccagaatgcttggatatgaatcctggatctgtcacttacttctgtgtgacctttgaaaggctacttatttcctctcttagctttctcattaaaatcaatgaacaatgccagcctcatggggttgttgaatgattaaatgagttactatacctaaagtacatagaacactgcctgcacatagtaaaagaattataagtgtgaggtagttggtaaaattatgtagttggatatactaccgaacaatatctcatctctttttagggaaataaagtttgtgcatatatataatcccgaaacatg

SEQ ID NO: 435440 - DNA, 4437 bp, Homo sapiens
  misc_feature (2762)..(2762): n is a, c, g, or t
aaagtagaaggcgaccaagagcaaaggggccctcgctccgcgtcgcgagctcagatatgacgtgggatgtatgagcaaattgcatcgatgtaatcagaatgaagaccgcatgccatcccaagattatgtcctcacttataactatgagggaagaggatctccagctggttctgtgggctgctgcagtgaaaagcaggaagaagatggccttgactttttaaataatttggaacccaaatttattacattagcagaagcatgcacaaagagataatgtcacagtgctacaattaggtctttgtcagacattctggaggtttccaaaaataatattgtaaagttcaatttcaacatgtatgtatatgatgatttttttctcaattttgaattatgctactcaccaatttatatttttaaagcaagttgttgcttatcttttccaaaaagtgaaaaatgttaaaacagacaactggtaaatctcaaactccagcactggaattaaggtctctaaagcatctgctcttttttttttttacggatattttagtaataaatatgctggataaatattagtccaacaatagctaagttatgctaatatcacattattatgtattcactttaagtgatagtttaaaaaataaacaagaaatattgagtatcactatgtgaagaaagttttggaaaagaaacaatgaagactgaattaaattaaaaatgttgcagctcataaagaattgggactcacccctactgcactaccaaattcatttgactttggaggcaaaatgtgttgaagtgccctatgaagtagcaattttctataggaatatagttggaaataaatgtgtgtgtgtatattattattaatcaatgcaatatttaaaatgaaatgagaacaaagaggaaaatggtaaaaacttgaaatgaggctggggtatagtttgtcctacaatagaaaaaagagagagcttcctaggcctgggctcttaaatgctgcattataactgagtctatgaggaaatagttcctgtccaatttgtgtaatttgtttaaaattgtaaataaattaaacttttctggtttctgtgggaaggaaatagggaatccaatggaacagtagctttgctttgcagtctgtttcaagatttctgcatccacaagttagtagcaaactggggaatactcgctgcagctggggttccctgctttttggtagcaagggtccagagatgaggtgtttttttcggggagctaataacaaaaacattttaaaacttacctttactgaagttaaatcctctattgctgtttctattctctcttatagtgaccaacatctttttaatttagatccaaataaccatgtcctcctagagtttagaggctagagggagctgaggggaggatcttactgaaagcaccctggggagattgattgtccttaaacctaagccccacaaacttgacacctgatcaggtctgggagctacaaaatttcatttttctcctcactgcccttcttctgagtggcattggcctgaatcaaggaaagccaggccttgtgggcccccttctttcggctttctgctaaagcaacacctccagcagagattcccttaagtgactccaggttttccaccatccttcagcgtgaattaatttttaatcagtttgctttctccagagaaattttaaaataatagaagaaatagaaattttgaatgtataaaagaaaaagatcaagttgtcattttagaacagagggaactttgggagaaagcagcccaagtaggttatttgtacagtcagagggcaacaggaagatgcaggccttcaagggcaaggagaggccacaaggaatatgggtgggagtaaaagcaacatcgtctgcttcatactttttcctaggcttggcactgccttttcctttctcaggccaatggcaactgccatttgagtccggtgagggatcagccaacctcttctctatggctcaccttatttggagtgagaaatcaaggagacagagctgactgcatgatgagtctgaaggcatttgcaggatgagcctgaactggttgtgcagaacaaacaaggcattcatgggaattgttgtattccttctgcagccctccttctgggcactaagaaggtctatgaattaaatgcctatctaaaattctgatttattcctacattttctgttttctaatttgaccctaaaatctatgtgttttagacttagactttttattgccccccccccctttttttttgagacggagtctcgctctgacgcacaggctggagtgcagtggctccgatctctgctcactgaaagctccgcctcccgggttcatgccattctcctgcctcagcctcctgagtagctgggactacaggcgcccaccaccacgcccggctaattttttgtatttttaatagagacggggtttcactgtgttagccaggatggtctcgatctcctgacctcgtgatccgcctgcctcggcctcccaaagtgctgggattacaggcatgacccaccgctcccggccttgttttccgtttaaagtcgtcttcttttaatgtaatcattttgaacatgtgtgaaagttgatcatacgaattggatcaatcttgaaatactcaaccaaaagacagtcgagaagccagggggagaaagaactcagggcacaaaatattggtctgagaatggaattctctgtaagcctagttgctgaaatttcctgctgtanccagaagccagttttatctaacggctactgaaacacccactgtgttttgctcactccctcactcaccgatcaaaacctgctacctccccaagactttactagtgccgataaactttctcaaagagcaaccagtatcacttccctgtttataaaacctctaaccatctctttgttctttgaacatgctgaaaaccacctggtctgcatgtatgcccgaatttgtaattcttttctctcaaatgaaaatttaattttagggattcatttctatattttcacatatgtagtattattatttccttatatgtgtaaggtgaaatttatggtatttgagtgtgcaagaaaatatatttttaaagctttcatttttcccccagtgaatgatttagaattttttatgtaaatatacagaatgttttttcttacttttataaggaagcagctgtctaaaatgcagtggggtttgttttgcaatgttttaaacagagttttagtattgctattaaaagaagttactttgcttttaaagaaacttggctgcttaaaataagcaaaaattggatgcgtaaagtaatatttacagatgtggggagatgtaataaaacaatattaacttggtttcttgtttttgctgtatttagagattaaataattctaagatgatcactttgcaaaattatgcttatggctggcatggaaatagaaataattatgtctttgttgtattaatggggaatattttggacaatgtttcattatcaaattgtcgacatcattaatatatattgtaatgttgggaagagatcactattttgaagcacagctttacagatgagtatctatgatacatatgtataataaattttgattgggtattaaaagtattagaaggtggttataattgcagagtattccatgaatagtacactgacacaggggttttactttgaggaccagtgtagtcaagggaaaacatgagttaaaaagaaaagcaggcaatattgcagtcttgattctgccacttacaggatagataacgcctgaactttaatgacaagatgatccaaccataaaggtgctctgtgcttcacagtgaatcttttccccatgcaggagtgtgctcccctacaaacgttaagactgatcatttcaaaaatctattagctatatcaaaagccttacattttaatataggttgaaccaaaatttcaattccagtaacttctattgtaaccattatttttgtgtatgtcttcaagaatgttcattggatttttgtttgtaatagtaaaataccggatacatttcacgtgtccttcagtattgatttggttgaatattgggtcataatggttgagaagcatggacactagagccagaatgcttggatatgaatcctggatctgtcacttacttctgtgtgacctttgaaaggctacttatttcctctcttagctttctcattaaaatcaatgaacaatgccagcctcatggggttgttgaatgattaaatgagttactatacctaaagtacatagaacactgcctgcacatagtaaaagaattataagtgtgaggtagttggtaaaattatgtagttggatatactaccgaacaatatctcatctctttttagggaaataaagtttgtgcatatatataatcccgaaacatg

SEQ ID NO: 435441 - DNA, 4430 bp, Homo sapiens
  misc_feature (47)..(47): n is a, c, g, or t
  misc_feature (57)..(57): n is a, c, g, or t
  misc_feature (2755)..(2755): n is a, c, g, or t
attattcttcctcttatttggagcgtaaacaaaaagagcacgcctgntaggtgaacncggatgtatcataaattgcatcgatgtaatcagaatgaagaccgcatgccatcccaagattatgtcctcacttataactatgagggaagaggatctccagctggttctgtgggctgctgcagtgaaaagcaggaagaagatggccttgactttttaaataatttggaacccaaatttattacattagcagaagcatgcacaaagagataatgtcacagtgctacaattaggtctttgtcagacattctggaggtttccaaaaataatattgtaaagttcaatttcaacatgtatgtatatgatgatttttttctcaattttgaattatgctactcaccaatttatatttttaaagcaagttgttgcttatcttttccaaaaagtgaaaaatgttaaaacagacaactggtaaatctcaaactccagcactggaattaaggtctctaaagcatctgctcttttttttttttacggatattttagtaataaatatgctggataaatattagtccaacaatagctaagttatgctaatatcacattattatgtattcactttaagtgatagtttaaaaaataaacaagaaatattgagtatcactatgtgaagaaagttttggaaaagaaacaatgaagactgaattaaattaaaaatgttgcagctcataaagaattgggactcacccctactgcactaccaaattcatttgactttggaggcaaaatgtgttgaagtgccctatgaagtagcaattttctataggaatatagttggaaataaatgtgtgtgtgtatattattattaatcaatgcaatatttaaaatgaaatgagaacaaagaggaaaatggtaaaaacttgaaatgaggctggggtatagtttgtcctacaatagaaaaaagagagagcttcctaggcctgggctcttaaatgctgcattataactgagtctatgaggaaatagttcctgtccaatttgtgtaatttgtttaaaattgtaaataaattaaacttttctggtttctgtgggaaggaaatagggaatccaatggaacagtagctttgctttgcagtctgtttcaagatttctgcatccacaagttagtagcaaactggggaatactcgctgcagctggggttccctgctttttggtagcaagggtccagagatgaggtgtttttttcggggagctaataacaaaaacattttaaaacttacctttactgaagttaaatcctctattgctgtttctattctctcttatagtgaccaacatctttttaatttagatccaaataaccatgtcctcctagagtttagaggctagagggagctgaggggaggatcttactgaaagcaccctggggagattgattgtccttaaacctaagccccacaaacttgacacctgatcaggtctgggagctacaaaatttcatttttctcctcactgcccttcttctgagtggcattggcctgaatcaaggaaagccaggccttgtgggcccccttctttcggctttctgctaaagcaacacctccagcagagattcccttaagtgactccaggttttccaccatccttcagcgtgaattaatttttaatcagtttgctttctccagagaaattttaaaataatagaagaaatagaaattttgaatgtataaaagaaaaagatcaagttgtcattttagaacagagggaactttgggagaaagcagcccaagtaggttatttgtacagtcagagggcaacaggaagatgcaggccttcaagggcaaggagaggccacaaggaatatgggtgggagtaaaagcaacatcgtctgcttcatactttttcctaggcttggcactgccttttcctttctcaggccaatggcaactgccatttgagtccggtgagggatcagccaacctcttctctatggctcaccttatttggagtgagaaatcaaggagacagagctgactgcatgatgagtctgaaggcatttgcaggatgagcctgaactggttgtgcagaacaaacaaggcattcatgggaattgttgtattccttctgcagccctccttctgggcactaagaaggtctatgaattaaatgcctatctaaaattctgatttattcctacattttctgttttctaatttgaccctaaaatctatgtgttttagacttagactttttattgccccccccccctttttttttgagacggagtctcgctctgacgcacaggctggagtgcagtggctccgatctctgctcactgaaagctccgcctcccgggttcatgccattctcctgcctcagcctcctgagtagctgggactacaggcgcccaccaccacgcccggctaattttttgtatttttaatagagacggggtttcactgtgttagccaggatggtctcgatctcctgacctcgtgatccgcctgcctcggcctcccaaagtgctgggattacaggcatgacccaccgctcccggccttgttttccgtttaaagtcgtcttcttttaatgtaatcattttgaacatgtgtgaaagttgatcatacgaattggatcaatcttgaaatactcaaccaaaagacagtcgagaagccagggggagaaagaactcagggcacaaaatattggtctgagaatggaattctctgtaagcctagttgctgaaatttcctgctgtanccagaagccagttttatctaacggctactgaaacacccactgtgttttgctcactccctcactcaccgatcaaaacctgctacctccccaagactttactagtgccgataaactttctcaaagagcaaccagtatcacttccctgtttataaaacctctaaccatctctttgttctttgaacatgctgaaaaccacctggtctgcatgtatgcccgaatttgtaattcttttctctcaaatgaaaatttaattttagggattcatttctatattttcacatatgtagtattattatttccttatatgtgtaaggtgaaatttatggtatttgagtgtgcaagaaaatatatttttaaagctttcatttttcccccagtgaatgatttagaattttttatgtaaatatacagaatgttttttcttacttttataaggaagcagctgtctaaaatgcagtggggtttgttttgcaatgttttaaacagagttttagtattgctattaaaagaagttactttgcttttaaagaaacttggctgcttaaaataagcaaaaattggatgcgtaaagtaatatttacagatgtggggagatgtaataaaacaatattaacttggtttcttgtttttgctgtatttagagattaaataattctaagatgatcactttgcaaaattatgcttatggctggcatggaaatagaaataattatgtctttgttgtattaatggggaatattttggacaatgtttcattatcaaattgtcgacatcattaatatatattgtaatgttgggaagagatcactattttgaagcacagctttacagatgagtatctatgatacatatgtataataaattttgattgggtattaaaagtattagaaggtggttataattgcagagtattccatgaatagtacactgacacaggggttttactttgaggaccagtgtagtcaagggaaaacatgagttaaaaagaaaagcaggcaatattgcagtcttgattctgccacttacaggatagataacgcctgaactttaatgacaagatgatccaaccataaaggtgctctgtgcttcacagtgaatcttttccccatgcaggagtgtgctcccctacaaacgttaagactgatcatttcaaaaatctattagctatatcaaaagccttacattttaatataggttgaaccaaaatttcaattccagtaacttctattgtaaccattatttttgtgtatgtcttcaagaatgttcattggatttttgtttgtaatagtaaaataccggatacatttcacgtgtccttcagtattgatttggttgaatattgggtcataatggttgagaagcatggacactagagccagaatgcttggatatgaatcctggatctgtcacttacttctgtgtgacctttgaaaggctacttatttcctctcttagctttctcattaaaatcaatgaacaatgccagcctcatggggttgttgaatgattaaatgagttactatacctaaagtacatagaacactgcctgcacatagtaaaagaattataagtgtgaggtagttggtaaaattatgtagttggatatactaccgaacaatatctcatctctttttagggaaataaagtttgtgcatatatataatcccgaaacatg

SEQ ID NO: 435442 - DNA, 4401 bp, Homo sapiens
  misc_feature (2726)..(2726): n is a, c, g, or t
aaactataatgcaattcattttttaaaaaattttactgaaaaattgcatcgatgtaatcagaatgaagaccgcatgccatcccaagattatgtcctcacttataactatgagggaagaggatctccagctggttctgtgggctgctgcagtgaaaagcaggaagaagatggccttgactttttaaataatttggaacccaaatttattacattagcagaagcatgcacaaagagataatgtcacagtgctacaattaggtctttgtcagacattctggaggtttccaaaaataatattgtaaagttcaatttcaacatgtatgtatatgatgatttttttctcaattttgaattatgctactcaccaatttatatttttaaagcaagttgttgcttatcttttccaaaaagtgaaaaatgttaaaacagacaactggtaaatctcaaactccagcactggaattaaggtctctaaagcatctgctcttttttttttttacggatattttagtaataaatatgctggataaatattagtccaacaatagctaagttatgctaatatcacattattatgtattcactttaagtgatagtttaaaaaataaacaagaaatattgagtatcactatgtgaagaaagttttggaaaagaaacaatgaagactgaattaaattaaaaatgttgcagctcataaagaattgggactcacccctactgcactaccaaattcatttgactttggaggcaaaatgtgttgaagtgccctatgaagtagcaattttctataggaatatagttggaaataaatgtgtgtgtgtatattattattaatcaatgcaatatttaaaatgaaatgagaacaaagaggaaaatggtaaaaacttgaaatgaggctggggtatagtttgtcctacaatagaaaaaagagagagcttcctaggcctgggctcttaaatgctgcattataactgagtctatgaggaaatagttcctgtccaatttgtgtaatttgtttaaaattgtaaataaattaaacttttctggtttctgtgggaaggaaatagggaatccaatggaacagtagctttgctttgcagtctgtttcaagatttctgcatccacaagttagtagcaaactggggaatactcgctgcagctggggttccctgctttttggtagcaagggtccagagatgaggtgtttttttcggggagctaataacaaaaacattttaaaacttacctttactgaagttaaatcctctattgctgtttctattctctcttatagtgaccaacatctttttaatttagatccaaataaccatgtcctcctagagtttagaggctagagggagctgaggggaggatcttactgaaagcaccctggggagattgattgtccttaaacctaagccccacaaacttgacacctgatcaggtctgggagctacaaaatttcatttttctcctcactgcccttcttctgagtggcattggcctgaatcaaggaaagccaggccttgtgggcccccttctttcggctttctgctaaagcaacacctccagcagagattcccttaagtgactccaggttttccaccatccttcagcgtgaattaatttttaatcagtttgctttctccagagaaattttaaaataatagaagaaatagaaattttgaatgtataaaagaaaaagatcaagttgtcattttagaacagagggaactttgggagaaagcagcccaagtaggttatttgtacagtcagagggcaacaggaagatgcaggccttcaagggcaaggagaggccacaaggaatatgggtgggagtaaaagcaacatcgtctgcttcatactttttcctaggcttggcactgccttttcctttctcaggccaatggcaactgccatttgagtccggtgagggatcagccaacctcttctctatggctcaccttatttggagtgagaaatcaaggagacagagctgactgcatgatgagtctgaaggcatttgcaggatgagcctgaactggttgtgcagaacaaacaaggcattcatgggaattgttgtattccttctgcagccctccttctgggcactaagaaggtctatgaattaaatgcctatctaaaattctgatttattcctacattttctgttttctaatttgaccctaaaatctatgtgttttagacttagactttttattgccccccccccctttttttttgagacggagtctcgctctgacgcacaggctggagtgcagtggctccgatctctgctcactgaaagctccgcctcccgggttcatgccattctcctgcctcagcctcctgagtagctgggactacaggcgcccaccaccacgcccggctaattttttgtatttttaatagagacggggtttcactgtgttagccaggatggtctcgatctcctgacctcgtgatccgcctgcctcggcctcccaaagtgctgggattacaggcatgacccaccgctcccggccttgttttccgtttaaagtcgtcttcttttaatgtaatcattttgaacatgtgtgaaagttgatcatacgaattggatcaatcttgaaatactcaaccaaaagacagtcgagaagccagggggagaaagaactcagggcacaaaatattggtctgagaatggaattctctgtaagcctagttgctgaaatttcctgctgtanccagaagccagttttatctaacggctactgaaacacccactgtgttttgctcactccctcactcaccgatcaaaacctgctacctccccaagactttactagtgccgataaactttctcaaagagcaaccagtatcacttccctgtttataaaacctctaaccatctctttgttctttgaacatgctgaaaaccacctggtctgcatgtatgcccgaatttgtaattcttttctctcaaatgaaaatttaattttagggattcatttctatattttcacatatgtagtattattatttccttatatgtgtaaggtgaaatttatggtatttgagtgtgcaagaaaatatatttttaaagctttcatttttcccccagtgaatgatttagaattttttatgtaaatatacagaatgttttttcttacttttataaggaagcagctgtctaaaatgcagtggggtttgttttgcaatgttttaaacagagttttagtattgctattaaaagaagttactttgcttttaaagaaacttggctgcttaaaataagcaaaaattggatgcgtaaagtaatatttacagatgtggggagatgtaataaaacaatattaacttggtttcttgtttttgctgtatttagagattaaataattctaagatgatcactttgcaaaattatgcttatggctggcatggaaatagaaataattatgtctttgttgtattaatggggaatattttggacaatgtttcattatcaaattgtcgacatcattaatatatattgtaatgttgggaagagatcactattttgaagcacagctttacagatgagtatctatgatacatatgtataataaattttgattgggtattaaaagtattagaaggtggttataattgcagagtattccatgaatagtacactgacacaggggttttactttgaggaccagtgtagtcaagggaaaacatgagttaaaaagaaaagcaggcaatattgcagtcttgattctgccacttacaggatagataacgcctgaactttaatgacaagatgatccaaccataaaggtgctctgtgcttcacagtgaatcttttccccatgcaggagtgtgctcccctacaaacgttaagactgatcatttcaaaaatctattagctatatcaaaagccttacattttaatataggttgaaccaaaatttcaattccagtaacttctattgtaaccattatttttgtgtatgtcttcaagaatgttcattggatttttgtttgtaatagtaaaataccggatacatttcacgtgtccttcagtattgatttggttgaatattgggtcataatggttgagaagcatggacactagagccagaatgcttggatatgaatcctggatctgtcacttacttctgtgtgacctttgaaaggctacttatttcctctcttagctttctcattaaaatcaatgaacaatgccagcctcatggggttgttgaatgattaaatgagttactatacctaaagtacatagaacactgcctgcacatagtaaaagaattataagtgtgaggtagttggtaaaattatgtagttggatatactaccgaacaatatctcatctctttttagggaaataaagtttgtgcatatatataatcccgaaacatg

SEQ ID NO: 435443 - DNA, 2649 bp, Homo sapiens
  misc_feature (6)..(6): n is a, c, g, or t
  misc_feature (12)..(12): n is a, c, g, or t
  misc_feature (42)..(42): n is a, c, g, or t
  misc_feature (47)..(47): n is a, c, g, or t
  misc_feature (49)..(49): n is a, c, g, or t
  misc_feature (974)..(974): n is a, c, g, or t
acgcantatggngagactgatgaaccccggtgcggtgtttanaaaanangcagtgtacggccgattccggatgaatatgggtgggagtaaaagcaacatcgtctgcttcatactttttcctaggcttggcactgccttttcctttctcaggccaatggcaactgccatttgagtccggtgagggatcagccaacctcttctctatggctcaccttatttggagtgagaaatcaaggagacagagctgactgcatgatgagtctgaaggcatttgcaggatgagcctgaactggttgtgcagaacaaacaaggcattcatgggaattgttgtattccttctgcagccctccttctgggcactaagaaggtctatgaattaaatgcctatctaaaattctgatttattcctacattttctgttttctaatttgaccctaaaatctatgtgttttagacttagactttttattgccccccccccctttttttttgagacggagtctcgctctgacgcacaggctggagtgcagtggctccgatctctgctcactgaaagctccgcctcccgggttcatgccattctcctgcctcagcctcctgagtagctgggactacaggcgcccaccaccacgcccggctaattttttgtatttttaatagagacggggtttcactgtgttagccaggatggtctcgatctcctgacctcgtgatccgcctgcctcggcctcccaaagtgctgggattacaggcatgacccaccgctcccggccttgttttccgtttaaagtcgtcttcttttaatgtaatcattttgaacatgtgtgaaagttgatcatacgaattggatcaatcttgaaatactcaaccaaaagacagtcgagaagccagggggagaaagaactcagggcacaaaatattggtctgagaatggaattctctgtaagcctagttgctgaaatttcctgctgtanccagaagccagttttatctaacggctactgaaacacccactgtgttttgctcactccctcactcaccgatcaaaacctgctacctccccaagactttactagtgccgataaactttctcaaagagcaaccagtatcacttccctgtttataaaacctctaaccatctctttgttctttgaacatgctgaaaaccacctggtctgcatgtatgcccgaatttgtaattcttttctctcaaatgaaaatttaattttagggattcatttctatattttcacatatgtagtattattatttccttatatgtgtaaggtgaaatttatggtatttgagtgtgcaagaaaatatatttttaaagctttcatttttcccccagtgaatgatttagaattttttatgtaaatatacagaatgttttttcttacttttataaggaagcagctgtctaaaatgcagtggggtttgttttgcaatgttttaaacagagttttagtattgctattaaaagaagttactttgcttttaaagaaacttggctgcttaaaataagcaaaaattggatgcgtaaagtaatatttacagatgtggggagatgtaataaaacaatattaacttggtttcttgtttttgctgtatttagagattaaataattctaagatgatcactttgcaaaattatgcttatggctggcatggaaatagaaataattatgtctttgttgtattaatggggaatattttggacaatgtttcattatcaaattgtcgacatcattaatatatattgtaatgttgggaagagatcactattttgaagcacagctttacagatgagtatctatgatacatatgtataataaattttgattgggtattaaaagtattagaaggtggttataattgcagagtattccatgaatagtacactgacacaggggttttactttgaggaccagtgtagtcaagggaaaacatgagttaaaaagaaaagcaggcaatattgcagtcttgattctgccacttacaggatagataacgcctgaactttaatgacaagatgatccaaccataaaggtgctctgtgcttcacagtgaatcttttccccatgcaggagtgtgctcccctacaaacgttaagactgatcatttcaaaaatctattagctatatcaaaagccttacattttaatataggttgaaccaaaatttcaattccagtaacttctattgtaaccattatttttgtgtatgtcttcaagaatgttcattggatttttgtttgtaatagtaaaataccggatacatttcacgtgtccttcagtattgatttggttgaatattgggtcataatggttgagaagcatggacactagagccagaatgcttggatatgaatcctggatctgtcacttacttctgtgtgacctttgaaaggctacttatttcctctcttagctttctcattaaaatcaatgaacaatgccagcctcatggggttgttgaatgattaaatgagttactatacctaaagtacatagaacactgcctgcacatagtaaaagaattataagtgtgaggtagttggtaaaattatgtagttggatatactaccgaacaatatctcatctctttttagggaaataaagtttgtgcatatatataatcccgaaacatg

SEQ ID NO: 435444 - DNA, 1463 bp, Homo sapiens
  misc_feature (1398)..(1398): n is a, c, g, or t
  misc_feature (1400)..(1400): n is a, c, g, or t
  misc_feature (1402)..(1402): n is a, c, g, or t
  misc_feature (1404)..(1404): n is a, c, g, or t
  misc_feature (1420)..(1420): n is a, c, g, or t
  misc_feature (1426)..(1426): n is a, c, g, or t
gcaacacaagcgactggactatgaacagtgcaaagtctggcgtcgcgatccggataatataccattcctattactgtaaaagacagggccggccaagctgcaacaaaattattgagagttaatctgtgtgaatgtactcatccaactcagtgtcgtgcgacttcaaggagtacaggagtaatacttggaaaatgggcaatccttgcaatattactgggtatagcactgctcttttctgtattgctaactttagtatgtggagtttttggtgcaactaaagggaaacgttttcctgaagatttagcacagcaaaacttaattatatcaaacacagaagcacctggagacgatagagtgtgctctgccaatggatttatgacccaaactaccaacaactctagccaaggtttttgtggtactatgggatcaggaatgaaaaatggagggcaggaaaccattgaaatgatgaaaggaggaaaccagaccttggaatcctgccggggggctgggcatcatcataccctggactcctgcaggggaggacacacggaggtggacaactgcagatacacttactcggagtggcacagttttactcaaccccgtctcggtgaaaaattgcatcgatgtaatcagaatgaagaccgcatgccatcccaagattatgtcctcacttataactatgagggaagaggatctccagctggttctgtgggctgctgcagtgaaaagcaggaagaagatggccttgactttttaaataatttggaacccaaatttattacattagcagaagcatgcacaaagagataatgtcacagtgctacaattaggtctttgtcagacattctggaggtttccaaaaataatattgtaaagttcaatttcaacatgtatgtatatgatgatttttttctcaattttgaattatgctactcaccaatttatatttttaaagcaagttgttgcttatcttttccaaaaagtgaaaaatgttaaaacagacaactggtaaatctcaaactccagcactggaattaaggtctctaaagcatctgctcttttttttttttacggatattttagtaataaatatgctggataaatattagtccaacaatagctaagttatgctaatatcacattattatgtattcactttaagtgatagtttaaaaaataaacaagaaatattgagtatcactatgtgaagaaagttttggaaaagaaacaatgaagactgaattaaattaaaaatgttgcagctcataaagaattgggactcacccctactgcactaccaaattcatttgactttggaggcaaaatgtgttgaagtgccctatgaagtagcaattttctataggaatatagttggaaataaaaaaaaaaaaaggncntntnggctaagggggacttncggccnttcctgtgggggggaatctaagcctggtaaggagtgt

SEQ ID NO: 435445 - DNA, 1476 bp, Homo sapiens
  misc_feature (1451)..(1451): n is a, c, g, or t
  misc_feature (1456)..(1456): n is a, c, g, or t
  misc_feature (1459)..(1460): n is a, c, g, or t
gcaacacaagcgactggactatgaacagtgcaaagtctggcgtcgcgatccggataatataccattcctattactgtaaaagacagggccggccaagctgcaacaaaattattgagagttaatctgtgtgaatgtactcatccaactcagtgtcgtgcgacttcaaggagtacaggagtaatacttggaaaatgggcaatccttgcaatattactgggtatagcactgctcttttctgtattgctaactttagtatgtggagtttttggtgcaactaaagggaaacgttttcctgaagatttagcacagcaaaacttaattatatcaaacacagaagcacctggagacgatagagtgtgctctgccaatggatttatgacccaaactaccaacaactctagccaaggtttttgtggtactatgggatcaggaatgaaaaatggagggcaggaaaccattgaaatgatgaaaggaggaaaccagaccttggaatcctgccggggggctgggcatcatcataccctggactcctgcaggggaggacacacggaggtggacaactgcagatacacttactcggagtggcacagttttactcaaccccgtctcggtgaaaaattgcatcgatgtaatcagaatgaagaccgcatgccatcccaagattatgtcctcacttataactatgagggaagaggatctccagctggttctgtgggctgctgcagtgaaaagcaggaagaagatggccttgactttttaaataatttggaacccaaatttattacattagcagaagcatgcacaaagagataatgtcacagtgctacaattaggtctttgtcagacattctggaggtttccaaaaataatattgtaaagttcaatttcaacatgtatgtatatgatgatttttttctcaattttgaattatgctactcaccaatttatatttttaaagcaagttgttgcttatcttttccaaaaagtgaaaaatgttaaaacagacaactggtaaatctcaaactccagcactggaattaaggtctctaaagcatctgctcttttttttttttacggatattttagtaataaatatgctggataaatattagtccaacaatagctaagttatgctaatatcacattattatgtattcactttaagtgatagtttaaaaaataaacaagaaatattgagtatcactatgtgaagaaagttttggaaaagaaacaatgaagactgaattaaattaaaaatgttgcagctcataaagaattgggactcacccctactgcactaccaaattcatttgactttggaggcaaaatgtgttgaagtgccctatgaagtagcaattttctataggaatatagttggaaataaaaagaaaaaattggcctcttggcctcagcggtggagctttgcggccgttcctttatggaggttattnatganccnnctacttacccttgtct

SEQ ID NO: 435446 - DNA, 1450 bp, Homo sapiens
gcaacacaagcgactggactatgaacagtgcaaagtctggcgtcgcgatccggataatataccattcctattactgtaaaagacagggccggccaagctgcaacaaaattattgagagttaatctgtgtgaatgtactcatccaactcagtgtcgtgcgacttcaaggagtacaggagtaatacttggaaaatgggcaatccttgcaatattactgggtatagcactgctcttttctgtattgctaactttagtatgtggagtttttggtgcaactaaagggaaacgttttcctgaagatttagcacagcaaaacttaattatatcaaacacagaagcacctggagacgatagagtgtgctctgccaatggatttatgacccaaactaccaacaactctagccaaggtttttgtggtactatgggatcaggaatgaaaaatggagggcaggaaaccattgaaatgatgaaaggaggaaaccagaccttggaatcctgccggggggctgggcatcatcataccctggactcctgcaggggaggacacacggaggtggacaactgcagatacacttactcggagtggcacagttttactcaaccccgtctcggtgaaaaattgcatcgatgtaatcagaatgaagaccgcatgccatcccaagattatgtcctcacttataactatgagggaagaggatctccagctggttctgtgggctgctgcagtgaaaagcaggaagaagatggccttgactttttaaataatttggaacccaaatttattacattagcagaagcatgcacaaagagataatgtcacagtgctacaattaggtctttgtcagacattctggaggtttccaaaaataatattgtaaagttcaatttcaacatgtatgtatatgatgatttttttctcaattttgaattatgctactcaccaatttatatttttaaagcaagttgttgcttatcttttccaaaaagtgaaaaatgttaaaacagacaactggtaaatctcaaactccagcactggaattaaggtctctaaagcatctgctcttttttttttttacggatattttagtaataaatatgctggataaatattagtccaacaatagctaagttatgctaatatcacattattatgtattcactttaagtgatagtttaaaaaataaacaagaaatattgagtatcactatgtgaagaaagttttggaaaagaaacaatgaagactgaattaaattaaaaatgttgcagctcataaagaattgggactcacccctactgcactaccaaattcatttgactttggaggcaaaatgtgttgaagtgccctatgaagtagcaattttttgtgagtttcgggggaataaaaaaaagataattgaccctcggcccgataagtgacctcttaggcctttccttaactaggtaaatataat

SEQ ID NO: 435447 - DNA, 1274 bp, Homo sapiens
gcaacacaagcgactggactatgaacagtgcaaagtctggcgtcgcgatccggataatataccattcctattactgtaaaagacagggccggccaagctgcaacaaaattattgagagttaatctgtgtgaatgtactcatccaactcagtgtcgtgcgacttcaaggagtacaggagtaatacttggaaaatgggcaatccttgcaatattactgggtatagcactgctcttttctgtattgctaactttagtatgtggagtttttggtgcaactaaagggaaacgttttcctgaagatttagcacagcaaaacttaattatatcaaacacagaagcacctggagacgatagagtgtgctctgccaatggatttatgacccaaactaccaacaactctagccaaggtttttgtggtactatgggatcaggaatgaaaaatggagggcaggaaaccattgaaatgatgaaaggaggaaaccagaccttggaatcctgccggggggctgggcatcatcataccctggactcctgcaggggaggacacacggaggtggacaactgcagatacacttactcggagtggcacagttttactcaaccccgtctcggtgaaaaattgcatcgatgtaatcagaatgaagaccgcatgccatcccaagattatgtcctcacttataactatgagggaagaggatctccagctggttctgtgggctgctgcagtgaaaagcaggaagaagatggccttgactttttaaataatttggaacccaaatttattacattagcagaagcatgcacaaagagataatgtcacagtgctacaattaggtctttgtcagacattctggaggtttccaaaaataatattgtaaagttcaatttcaacatgtatgtatatgatgatttttttctcaattttgaattatgctactcaccaatttatatttttaaagcaagttgttgcttatcttttccaaaaagtgaaaaatgttaaaacagacaactggtaaatctcaaactccagcactggaattaaggtctctaaagcatctgctcttttttttttttacggatattttagtaataaatatgctggataaatattagtccaacaatagctaagttatgctaatatcacattattatgtattcactttaagtgatagtttaaaaaataaacaagaaatattgagtatcactatgtgaagaaagttttggaaaagaaacaatgaagactgaattaaattaaaaatgttgcagctcataaag

SEQ ID NO: 435448 - DNA, 682 bp, Homo sapiens
gtaaaataataacgcacatacatcattatattattctattcaacagtagctaggaatccatctagaggacacactgtgttaaaaattaaacataaaagaaattgcatcgatgtaatcagaatgaagaccgcatgccatcccaagattatgtcctcacttataactatgagggaagaggatctccagctggttctgtgggctgctgcagtgaaaagcaggaagaagatggccttgactttttaaataatttggaacccaaatttattacattagcagaagcatgcacaaagagataatgtcacagtgctacaattaggtctttgtcagacattctggaggtttccaaaaataatattgtaaagttcaatttcaacatgtatgtatatgatgatttttttctcaattttgaattatgctactcaccaatttatatttttaaagcaagttgttgcttatcttttccaaaaagtgaaaaatgttaaaacagacaactggtaaatctcaaactccagcactggaattaaggtctctaaagcatctgctcttttttttttttacggatattttagtaataaatatgctggataaatattagtccaacaatagctaagttatgctaatatcacattattatgtattcactttaagtgatagtttaaaaaataaacaagaaatattgagt

SEQ ID NO: 435449 - DNA, 1025 bp, Homo sapiens
cgcggctgagggatccctgggagccgcggtgcattgtgggagaacgaaagatggcggcgcccgtaaggcggacgctgttaggggtggcggggggttggcggcggttcgagaggctctgggccggcagtctaagctctcgcagcctggctcttgcagccgcaccctcaagcaacggatccccatggcgcttgttgggcgcgttgtgcctgcagcggccacctgtagtctccaagccgttgaccccattgcaggaagagatggcgtctctactgcagcagattgagatagagagaagcctgtattcagaccacgagcttcgtgctctggatgaaaaccagcgactggcaaagaagaaagctgaccttcatgatgaagaagatgaacaggatatattgctggcgcaagatttggaagatatgtgggagcagaaatttctacagttcaaacttggagctcgcataacagaagctgatgaaaagaatgaccgaacatccctgaacaggaagctagacaggaaccttgtcctgttagtcagagagaagtttggagaccaggatgtttggatactgccccaggcagagtggcagcctggggagacccttcgaggaacagctgaacgaaccctggccacactctcagaaaacaacatggaagccaagttcctaggaaatgcaccctgtgggcactacacattcaagttcccccaggcaatgcggacagagagtaacctcggagccaaggtgttcttcttcaaagcactgctattaactggagacttttcccaggctgggaataagggccatcatgtgtgggtcactaaggatgagctgggtgactatttgaaaccaaaatacctggcccaagttaggaggtttgtttcagacctctgatgggccgagctgcctgtggacggtgctcagacaagtctgggattagagcctcaaggacattgtgtgattgcctcacatttgcaggtaatatcaagcagcaaactaaattctgagaaataaacgagtctattactg

SEQ ID NO: 435450 - DNA, 790 bp, Homo sapiens
gtgctctcgaggatctcggtgttcctttgtctctactgcagcgattgagatagagagaagcctgtattcagaccacgagcttcgtgctctggatgaaaaccagcgactggcaaagaagaaagctgaccttcatgatgaagaagatgaacaggatatattgctggcgcaagatttggaagatatgtgggagcagaaatttctacagttcaaacttggagctcgcataacagaagctgatgaaaagaatgaccgaacatccctgaacaggaagctagacaggaaccttgtcctgttagtcagagagaagtttggagaccaggatgtttggatactgccccaggcagagtggcagcctggggagacccttcgaggaacagctgaacgaaccctggccacactctcagaaaacaacatggaagccaagttcctaggaaatgcaccctgtgggcactacacattcaagttcccccaggcaatgcggacagagagtaacctcggagccaaggtgttcttcttcaaagcactgctattaactggagacttttcccaggctgggaataagggccatcatgtgtgggtcactaaggatgagctgggtgactatttgaaaccaaaatacctggcccaagttaggaggtttgtttcagacctctgatgggccgagctgcctgtggacggtgctcagacaagtctgggattagagcctcaaggacattgtgtgattgcctcacatttgcaggtaatatcaagcagcaaactaaattctgagaaataaacgagtctattactg

SEQ ID NO: 435451 - DNA, 463 bp, Homo sapiens
ataattttgggagccagagtaaacagatggctgtatccttaccttccaattgtgatttttctttcctccctcttcagaaaacaacatggaagccaagttcctaggaaatgcaccctgtgggcactacacattcaagttcccccaggcaatgcggacagagagtaacctcggagccaaggtgttcttcttcaaagcactgctattaactggagacttttcccaggctgggaataagggccatcatgtgtgggtcactaaggatgagctgggtgactatttgaaaccaaaatacctggcccaagttaggaggtttgtttcagacctctgatgggccgagctgcctgtggacggtgctcagacaagtctgggattagagcctcaaggacattgtgtgattgcctcacatttgcaggtaatatcaagcagcaaactaaattctgagaaataaacgagtctattactg

SEQ ID NO: 435452 - DNA, 667 bp, Homo sapiens
gtgctctcgaggatctcggtgttcctttgtctctactgcagcgattgagatagagagaagcctgtattcagaccacgagcttcgtgctctggatgaaaaccagcgactggcaaagaagaaagctgaccttcatgatgaagaagatgaacaggatatattgctggcgcaagatttggaagatatgtgggagcagaaatttctacagttcaaacttggagctcgcataacagaagctgatgaaaagaatgaccgaacatccctgaacaggaagctagacaggaaccttgtcctgttagtcagagagaagtttggagaccaggatgtttggatactgccccaggcagagtggcagcctggggagacccttcgaggaacagctgaacgaaccctggccacactctcagaaaacaacatggaagccaagttcctaggaaatgcaccctgtgggcactacacattcaagttcccccaggcaatgcggacagagagtaacctcggagccaaggtgttcttcttcaaagcactgctattaactggagacttttcccaggctgggacaaagggaaacaccggtgtctccctttgtctcctccccttcaccaaatctgtggctttacctccaaaatttctgtctccattgccacttctccgtcggctacccctgtca

SEQ ID NO: 435453 - DNA, 1027 bp, Homo sapiens
cgcggctgagggatccctgggagccgcggtgcattgtgggagaacgaaagatggcggcgcccgtaaggcggacgctgttaggggtggcggggggttggcggcggttcgagaggctctgggccggcagtctaagctctcgcagcctggctcttgcagccgcaccctcaagcaacggatccccatggcgcttgttgggcgcgttgtgcctgcagcggccacctgtagtctccaagccgttgaccccattgcaggaagagatggcgtctctactgcagcagattgagatagagagaagcctgtattcagaccacgagcttcgtgctctggatgaaaaccagcgactggcaaagaagaaagctgaccttcatgatgaagaagatgaacaggatatattgctggcgcaagatttggaagatatgtgggagcagaaatttctacagttcaaacttggagctcgcataacagaagctgatgaaaagaatgaccgaacatccctgaacaggaagctagacaggaaccttgtcctgttagtcagagagaagtttggagaccaggatgtttggatactgccccaggcagagtggcagcctggggagacccttcgaggaacagctgaacgaaccctggccacactctcagaaaacaacatggaagccaagttcctaggaaatgcaccctgtgggcactacacattcaagttcccccaggcaatgcggacagagagtaacctcggagccaaggtgttcttcttcaaagcactgctattaactggagacttttcccaggctgggaataagggccatcatgtgtgggtcactaaggatgagctgggtgactatttgaaaccaaaatacctggcccaagttaggaggtttgtttcagacctctgatgggccgagctgcctgtggacggtgctcagacaagtctgggattagagcctcaaggacattgtgtgattgcctcacatttgcaggtaatatcaagcagcaaactaaattctgccgtcgattcgagggatcctctaga

SEQ ID NO: 435454 - DNA, 1030 bp, Homo sapiens
cgcggctgagggatccctgggagccgcggtgcattgtgggagaacgaaagatggcggcgcccgtaaggcggacgctgttaggggtggcggggggttggcggcggttcgagaggctctgggccggcagtctaagctctcgcagcctggctcttgcagccgcaccctcaagcaacggatccccatggcgcttgttgggcgcgttgtgcctgcagcggccacctgtagtctccaagccgttgaccccattgcaggaagagatggcgtctctactgcagcagattgagatagagagaagcctgtattcagaccacgagcttcgtgctctggatgaaaaccagcgactggcaaagaagaaagctgaccttcatgatgaagaagatgaacaggatatattgctggcgcaagatttggaagatatgtgggagcagaaatttctacagttcaaacttggagctcgcataacagaagctgatgaaaagaatgaccgaacatccctgaacaggaagctagacaggaaccttgtcctgttagtcagagagaagtttggagaccaggatgtttggatactgccccaggcagagtggcagcctggggagacccttcgaggaacagctgaacgaaccctggccacactctcagaaaacaacatggaagccaagttcctaggaaatgcaccctgtgggcactacacattcaagttcccccaggcaatgcggacagagagtaacctcggagccaaggtgttcttcttcaaagcactgctattaactggagacttttcccaggctgggaataagggccatcatgtgtgggtcactaaggatgagctgggtgactatttgaaaccaaaatacctggcccaagttaggaggtttgtttcagacctctgatgggccgagctgcctgtggacggtgctcagacaagtctgggattagagcctcaaggacattgtgtgattgcctcacatttgcaggtaatatcaagcagcaaactaaattctgctcgtgccgaatcctgcagcccggggga

SEQ ID NO: 435455 - DNA, 1735 bp, Homo sapiens
cgcggctgagggatccctgggagccgcggtgcattgtgggagaacgaaagatggcggcgcccgtaaggcggacgctgttaggggtggcggggggttggcggcggttcgagaggctctgggccggcagtctaagctctcgcagcctggctcttgcagccgcaccctcaagcaacggatccccatggcgcttgttgggcgcgttgtgcctgcagcggccacctgtagtctccaagccgttgaccccattgcaggaagagatggcgtctctactgcagcagattgagatagagagaagcctgtattcagaccacgagcttcgtgctctggatgaaaaccagcgactggcaaagaagaaagctgaccttcatgatgaagaagatgaacaggatatattgctggcgcaagatttggaagatatgtgggagcagaaatttctacagttcaaacttggagctcgcataacaggttgtgatccttttaggccagccagaaggaagggaaaaggggtatttggattcccaaataaaagacagttgcttggcccctgctttgtgttttaagtaacaaataatttcatattcttttctttgttgctcacatctaccataatacgacttaaaaagtctgtcttattttcgggtgagaggtaagggtattggaatagccttttctctcagttaaactttgtgaatgttatctgtgtttaactccaagtttgagactgagagtggggcaaatgaagcctttttccactaattcctgtgttttatgtgaaatccctcttaaagcgggagattgagttctgttttccttgtttcacagatgaagactgaagaacagagaaagtaggggctagttaagtcagtaatagtatcaaaaccaatgaagtagttgtgtttgaattagtatgatcattgtttcttttttgaagactcaaaatatggtttgctgttcaaagaagcttacctcttgatttcttaccttttagtttcctcaagattgtgagactcttccctggaagaggtcagagttagagagatgggtcgaggtgtaatttggttctaagctctttgagggcaaggattgtggatcttaaaggaagattgtaaaactccaggtttcttggttctggcagatcacagtcttcttacctcctctgaccccctttgctgtagaagctgatgaaaagaatgaccgaacatccctgaacaggaagctagacaggaaccttgtcctgttagtcagagagaagtttggagaccaggatgtttggatactgccccaggcagagtggcagcctggggagacccttcgaggaacagctgaacgaaccctggccacactctcagaaaacaacatggaagccaagttcctaggaaatgcaccctgtgggcactacacattcaagttcccccaggcaatgcggacagagagtaacctcggagccaaggtgttcttcttcaaagcactgctattaactggagacttttcccaggctgggaataagggccatcatgtgtgggtcactaaggatgagctgggtgactatttgaaaccaaaatacctggcccaagttaggaggtttgtttcagacctctgatgggccgagctgcctgtggacggtgctcagacaagtctgggattagagcctcaaggacattgtgtgattgcctcacatttgcaggtaatatcaagcagcaaactaaattctgagaaataaacgagtctattactg

SEQ ID NO: 435456 - DNA, 1681 bp, Homo sapiens
cgcggctgagggatccctgggagccgcggtgcattgtgggagaacgaaagatggcggcgcccgtaaggcggacgctgttaggggtggcggggggttggcggcggttcgagaggctctgggccggcagtctaagctctcgcagcctggctcttgcagccgcaccctcaagcaacggatccccatggcgcttgttgggcgcgttgtgcctgcagcggccacctgtagtctccaagccgttgaccccattgcaggaagagatggcgtctctactgcagcagattgagatagagagaagcctgtattcagaccacgagcttcgtgctctggatgaggatatattgctggcgcaagatttggaagatatgtgggagcagaaatttctacagttcaaacttggagctcgcataacaggttgtgatccttttaggccagccagaaggaagggaaaaggggtatttggattcccaaataaaagacagttgcttggcccctgctttgtgttttaagtaacaaataatttcatattcttttctttgttgctcacatctaccataatacgacttaaaaagtctgtcttattttcgggtgagaggtaagggtattggaatagccttttctctcagttaaactttgtgaatgttatctgtgtttaactccaagtttgagactgagagtggggcaaatgaagcctttttccactaattcctgtgttttatgtgaaatccctcttaaagcgggagattgagttctgttttccttgtttcacagatgaagactgaagaacagagaaagtaggggctagttaagtcagtaatagtatcaaaaccaatgaagtagttgtgtttgaattagtatgatcattgtttcttttttgaagactcaaaatatggtttgctgttcaaagaagcttacctcttgatttcttaccttttagtttcctcaagattgtgagactcttccctggaagaggtcagagttagagagatgggtcgaggtgtaatttggttctaagctctttgagggcaaggattgtggatcttaaaggaagattgtaaaactccaggtttcttggttctggcagatcacagtcttcttacctcctctgaccccctttgctgtagaagctgatgaaaagaatgaccgaacatccctgaacaggaagctagacaggaaccttgtcctgttagtcagagagaagtttggagaccaggatgtttggatactgccccaggcagagtggcagcctggggagacccttcgaggaacagctgaacgaaccctggccacactctcagaaaacaacatggaagccaagttcctaggaaatgcaccctgtgggcactacacattcaagttcccccaggcaatgcggacagagagtaacctcggagccaaggtgttcttcttcaaagcactgctattaactggagacttttcccaggctgggaataagggccatcatgtgtgggtcactaaggatgagctgggtgactatttgaaaccaaaatacctggcccaagttaggaggtttgtttcagacctctgatgggccgagctgcctgtggacggtgctcagacaagtctgggattagagcctcaaggacattgtgtgattgcctcacatttgcaggtaatatcaagcagcaaactaaattctgagaaataaacgagtctattactg

SEQ ID NO: 435457 - DNA, 838 bp, Homo sapiens
cgcggctgagggatccctgggagccgcggtgcattgtgggagaacgaaagatggcggcgcccgtaaggcggacgctgttaggggtggcggggggttggcggcggttcgagaggctctgggccggcagtctaagctctcgcagcctggctcttgcagccgcaccctcaagcaacggatccccatggcgcttgttgggcgcgttgtgcctgcagcggccacctgtagtctccaagccgttgaccccattgcaggaagagatggcgtctctactgcagcagaagctgatgaaaagaatgaccgaacatccctgaacaggaagctagacaggaaccttgtcctgttagtcagagagaagtttggagaccaggatgtttggatactgccccaggcagagtggcagcctggggagacccttcgaggaacagctgaacgaaccctggccacactctcagaaaacaacatggaagccaagttcctaggaaatgcaccctgtgggcactacacattcaagttcccccaggcaatgcggacagagagtaacctcggagccaaggtgttcttcttcaaagcactgctattaactggagacttttcccaggctgggaataagggccatcatgtgtgggtcactaaggatgagctgggtgactatttgaaaccaaaatacctggcccaagttaggaggtttgtttcagacctctgatgggccgagctgcctgtggacggtgctcagacaagtctgggattagagcctcaaggacattgtgtgattgcctcacatttgcaggtaatatcaagcagcaaactaaattctgagaaataaacgagtctattactg

SEQ ID NO: 435458 - DNA, 981 bp, Homo sapiens
cgcggctgagggatccctgggagccgcggtgcattgtgggagaacgaaagatggcggcgcccgtaaggcggacgctgttaggggtggcggggggttggcggcggttcgagaggctctgggccggcagtctaagctctcgcagcctggctcttgcagccgcaccctcaagcaacggatccccatggcgcttgttgggcgcgttgtgcctgcagcggccacctgtagtctccaagccgttgaccccattgcaggaagagatggcgtctctactgcagcagattgagatagagagaagcctgtattcagaccacgagcttcgtgctctggatgaaaaccagcgactggcaaagaagaaagctgaccttcatgatgaagaagatgaacaggatatattgctggcgcaagatttggaagatatgtgggagcagaaatttctacagttcaaacttggagctcgcataacagaagctgatgaaaagaatgaccgaacatccctgaacaggaagctagacaggaaccttgtcctgttagtcagagagaagtttggagaccaggatgtttggatactgccccaggcagagtggcagcctggggagacccttcgaggaacagctgaacgaaccctggccacactctcagaaaacaacatggaagccaagttcctaggaaatgcaccctgtgggcactacacattcaagttcccccaggcaatgcggacagagagtaacctcggagccaaggtgttcttcttcaaagcactgctattaactggagacttttcccaggctgggaataagggccatcatgtgtgggtcactaaggatgagctgggtgactatttgaaaccaaaatacctggcccaagttaggaggtttgtttcagacctctgatgggccgagctgcctgtggacggtgctcagacaaagggaaacaccgtgctccgaggtactctctgtccgcattgcctagggatcctctaag

SEQ ID NO: 435459 - DNA, 5650 bp, Homo sapiens
gacaaagagaactaatgctttgtgctgattcatatttgaatcgaggcattgggaaccctgtatgccttgtttgtggaaagaaccagtgacaccatcactgagcttcctaaaagttcgaagaagttagaggactatacactttcttttgaacttttataataaatatttgctctggtttttggaacccagggctgttagaggggtgagtgacaagtcttacaagtggccttattccaactccagaaattgcccaacggaactttgagattatatgcaatcgaaagtgacaggaaacatgccaactcaatccctcttaatgtacatggatgggccagaagtgattggcagctctcttggcagtccgatggagatggaggatgccttgtcaatgaaagggaccgctgttgttccattccgagctacacaagaaaaaaatgtcatccaaatcgaggggtatatgcccttggattgcatgttctgcagccagaccttcacacattcagaagaccttaataaacatgtcttaatgcaacaccggcctaccctctgtgaaccagcagttcttcgggttgaagcagagtatctcagtccgcttgataaaagtcaagtgcgaacagaacctcccaaggaaaagaattgcaaggaaaatgaatttagctgtgaggtatgtgggcagacatttagagtcgcttttgatgttgagatccacatgagaacacacaaagattctttcacttacgggtgtaacatgtgcggaagaagattcaaggagccttggtttcttaaaaatcacatgcggacacataatggcaaatcgggggccagaagcaaactgcagcaaggcttggagagtagtccagcaacgatcaacgaggtcgtccaggtgcacgcggccgagagcatctcctctccttacaaaatctgcatggtttgtggcttcctatttccaaataaagaaagtctaattgagcaccgcaaggtgcacaccaaaaaaactgctttcggtaccagcagcgcgcagacagactctccacaaggaggaatgccgtcctcgagggaggacttcctgcagttgttcaacttgagaccaaaatctcaccctgaaacggggaagaagcctgtcagatgcatccctcagctcgatccgttcaccaccttccaggcttggcagctggctaccaaaggaaaagttgccatttgccaagaagtgaaggaatcggggcaagaagggagcaccgacaacgacgattcgagttccgagaaggagcttggagaaacaaataagggcagttgtgcaggcctctcgcaagagaaagagaagtgcaaacactcccacggcgaagcgccctccgtggacgcggatcccaagttacccagtagcaaggagaagcccactcactgctccgagtgcggcaaagctttcagaacctaccaccagctggtcttgcactccagggtccacaagaaggaccggagggccggcgcggagtcgcccaccatgtctgtggacgggaggcagccggggacgtgttctcctgacctcgccgcccctctggatgaaaatggagccgtggatcgaggggaaggtggttctgaagacggatctgaggatgggcttcccgaaggaatccatctggataaaaatgatgatggaggaaaaataaaacatcttacatcttcaagagagtgtagttattgtggaaagtttttccgttcaaattattacctcaatattcatctcagaacgcatacaggtgaaaaaccatacaaatgtgaattttgtgaatatgctgcagcccagaagacatctctgaggtatcacttggagagacatcacaaggaaaaacaaaccgatgttgctgctgaagtcaagaacgatggtaaaaatcaggacactgaagatgcactattaaccgctgacagtgcgcaaaccaaaaatttgaaaagattttttgatggtgccaaagatgttacaggcagtccacctgcaaagcagcttaaggagatgccttctgtttttcagaatgttctgggcagcgctgtcctctcaccagcacacaaagatactcaggatttccataaaaatgcagctgatgacagtgctgataaagtgaataaaaaccctacccctgcttacctggacctgttaaaaaagagatcagcagttgaaactcaggcaaataacctcatctgtagaaccaaggcggatgttactcctcctccggatggcagtaccacccataaccttgaagttagccccaaagagaagcaaacggagaccgcagctgactgcagatacaggccaagtgtggattgtcacgaaaaacctttaaatttatccgtgggggctcttcacaattgcccggcaatttctttgagtaaaagtttgattccaagtatcacctgtccattttgtaccttcaagacattttatccagaagttttaatgatgcaccagagactggagcataaatacaatcctgacgttcataaaaactgtcgaaacaagtccttgcttagaagtcgacgtaccggatgcccgccagcgttgctgggaaaagatgtgcctcccctctctagtttctgtaaacccaagcccaagtctgctttcccggcgcagtccaaatccctgccatctgcgaaggggaagcagagccctcctgggccaggcaaggcccctctgacttcagggatagactctagcactttagccccaagtaacctgaagtcccacagaccacagcagaatgtgggggtccaaggggccgccaccaggcaacagcaatctgagatgtttcctaaaaccagtgtttcccctgcaccggataagacaaaaagacccgagacaaaattgaaacctcttccagtagctccttctcagcccaccctcggcagcagtaacatcaatggttccatcgactaccccgccaagaacgacagcccgtgggcacctccgggaagagactatttctgtaatcggagtgccagcaatactgcagcagaatttggtgagccccttccaaaaagactgaagtccagcgtggttgcccttgacgttgaccagcccggggccaattacagaagaggctatgaccttcccaagtaccatatggtcagaggcatcacatcactgttaccgcaggactgtgtgtatccgtcgcaggcgctgcctcccaaaccaaggttcctgagctccagcgaggtcgattctccaaatgtgctgactgttcagaagccctatggtggctccgggccactttacacttgtgtgcctgctggtagtccagcatccagctcgacgttagaaggaaaaaggcctgtgtcatatcaacacttatctaacagcatggcacaaaagagaaactatgagaattttattgggaatgcacattatcgaccaaatgacaaaaaaacttgattcactaattagggggaaaaaaggtcttggtggatgtcagtgcttactccccatgaaattaaattttacttcatcctttgagaagcgaatggtgaaagctactgaaataagctgtgattgtactgtacataaaacatatgaggaatctgcaaggaacactacagttgtgtaaagttgttctgttaacttttgtaccaaatagcaatacaaactagttggaacagttggaacttacatacatggggactggaaatctctattttgtccctgaataatatttttcttagaattgaccaaataagaagtggaatttttgcatacttgagcgctgctgaaaagaaatcatttgggttgggtggggcgggatgggggaaaagtatataatgcttgcacctcaggtaaaaatctgtaaatatctaagttgtaaacctgcttgttcaaatactgtgtgtattccttttctctaatgcagctcatcacttggagcagtttctgctattgtgctctttcatttaaaatgtatgtttttttttttttaaactgtcaatgattttgtattatgttgaatccacccaaatctattgttgtcttaaaattgttaatggaagtattgaccctctatgatatgtgctgcagatatcgaggtcagccattcggaagctggcagcattttatcgcaactttgagcatctcagatggggaaggcaccttcttcctcgcctctccagattgtcctggaacctccaggatccttgactgagggcgttgggatggcttgtaggatttttaagagagtgtgtctacagacaagcattttctctgtagagcagccacacgttgtataaacataaactgtatgtgcagttatttaaatttgtttctatcaaattaatcatttttgttggacgattcagtggcgggggggttttgcctaaattagtatataaaaacaaaaatgctaaattatatctgtgaattgcaggtattggggaacagttttaagggaaattttggggggaacattttaggtttgtatttggtagtcttaatgtatctggcatttgggtgaactgtggacatactagagttgattatagacacattgattttgaataaggaactgctggccgagcccgctgggagtctagaaagagaaaatctgtttctagacctcagttattttcccatttttggttgttttgaagcagtaacatttttctcagtgcacatgcaatttgggttttagagaagatggccaccagctggcttcctagatattttaaacttttgttctttaatatgctgtccatggctgagtttattagtacatgggcttagtgaccacaaaatattttattaagaaactgtttcaaaaataaatttgcactgttcatttttctggcctcgctgttctccatagagcaagggtaatcctagaaaaaattttttttttttaaattatgcaacgtaagatgtcctccttgatagaagtcttagctcctgtgttacaagggagaactcatttgagatcagtctgttggcattgcaatgaagtgctttgtatcaggaaagtgtacactattgaccttttttcctgttcacaagctgagccatatgtacataatctagattttgttttcatagttttgcacttttatagcctatttttgaagattaacacatttgcaagatgattgactcaatctttgcctaatccaatgagtgttacagagagcttgctgtgactagaaccataaatcttaaagggggtatgtgataatagagggctggaatttaaacctgtatttaaaaaaaagaatcaccaaatctatttgaaaacaagtcgatttgtattatgctggaattttttgggctttcagatttctctttttaaccacatttctgaatgtataaaaataccaattattttcctacagccctttgtacttcaaaatatgtttttgtgtccatcagtattaactattggtatactactggttttatatttttttttctttgagacaacagtacatataatagaggtacaattcgttggatttttgtttatgtatttatttcattccagtttgatttattttaattgttgatacttaagttgtcgaacagtagacattacttgttttatttatgatatatttcagcttaaagttatgttattatatgtggaagtgtaaatatagatttggtgttttgcaatcttgaaaaatagtg

SEQ ID NO: 435460 - DNA, 273 bp, Homo sapiens
acttttacatagtttggttcatgatgcatatacgtttcaagtattttgtgatgtcatttttttccggctttttaattctttctagtgacagcccagacaattttaatgttagtgacatcaacccaattctgtgctaacaagtgtcataaaaacaattcagctgtaactgaaaacacttggcatgcgactgtgtgacttaggcgttgattacattatcagtgtcagaaattttgaaaattgacttctaaaaacctatacacatcttacctaatt

SEQ ID NO: 435461 - DNA, 5517 bp, Homo sapiens
gacaaagagaactaatgctttgtgctgattcatatttgaatcgaggcattgggaaccctgtatgccttgtttgtggaaagaaccagtgacaccatcactgagcttcctaaaagttcgaagaagttagaggactatacactttcttttgaacttttataataaatatttgctctggtttttggaacccagggctgttagaggggtgagtgacaagtcttacaagtggccttattccaactccagaaattgcccaacggaactttgagattatatgcaatcgaaagtgacaggaaacatgccaactcaatccctcttaatgtacatggatgggccagaagtgattggcagctctcttggcagtccgatggagatggaggatgccttgtcaatgaaagggaccgctgttgttccattccgagctacacaagaaaaaaatgtcatccaaatcgaggggtatatgcccttggattgcatgttctgcagccagaccttcacacattcagaagaccttaataaacatgtcttaatgcaacaccggcctaccctctgtgaaccagcagttcttcgggttgaagcagagtatctcagtccgcttgataaaagtcaagtgcgaacagaacctcccaaggaaaagaattgcaaggaaaatgaatttagctgtgaggtatgtgggcagacatttagagtcgcttttgatgttgagatccacatgagaacacacaaagattctttcacttacgggtgtaacatgtgcggaagaagattcaaggagccttggtttcttaaaaatcacatgcggacacataatggcaaatcgggggccagaagcaaactgcagcaaggcttggagagtagtccagcaacgatcaacgaggtcgtccaggtgcacgcggccgagagcatctcctctccttacaaaatctgcatggtttgtggcttcctatttccaaataaagaaagtctaattgagcaccgcaaggtgcacaccaaaaaaactgctttcggtaccagcagcgcgcagacagactctccacaaggaggaatgccgtcctcgagggaggacttcctgcagttgttcaacttgagaccaaaatctcaccctgaaacggggaagaagcctgtcagatgcatccctcagctcgatccgttcaccaccttccaggcttggcagctggctaccaaaggaaaagttgccatttgccaagaagtgaaggaatcggggcaagaagggagcaccgacaacgacgattcgagttccgagaaggagcttggagaaacaaataagggcagttgtgcaggcctctcgcaagagaaagagaagtgcaaacactcccacggcgaagcgccctccgtggacgcggatcccaagttacccagtagcaaggagaagcccactcactgctccgagtgcggcaaagctttcagaacctaccaccagctggtcttgcactccagggtccacaagaaggaccggagggccggcgcggagtcgcccaccatgtctgtggacgggaggcagccggggacgtgttctcctgacctcgccgcccctctggatgaaaatggagccgtggatcgaggggaaggtggttctgaagacggatctgaggatgggcttcccgaaggaatccatctggataaaaatgatgatggaggaaaaataaaacatcttacatcttcaagagagtgtagttattgtggaaagtttttccgttcaaattattacctcaatattcatctcagaacgcatacaggtgaaaaaccatacaaatgtgaattttgtgaatatgctgcagcccagaagacatctctgaggtatcacttggagagacatcacaaggaaaaacaaaccgatgttgctgctgaagtcaagaacgatggtaaaaatcaggacactgaagatgcactattaaccgctgacagtgcgcaaaccaaaaatttgaaaagattttttgatggtgccaaagatgttacaggcagtccacctgcaaagcagcttaaggagatgccttctgtttttcagaatgttctgggcagcgctgtcctctcaccagcacacaaagatactcaggatttccataaaaatgcagctgatgacagtgctgataaagtgaataaaaaccctacccctgcttacctggacctgttaaaaaagagatcagcagttgaaactcaggcaaataacctcatctgtagaaccaaggcggatgttactcctcctccggatggcagtaccacccataaccttgaagttagccccaaagagaagcaaacggagaccgcagctgactgcagatacaggccaagtgtggattgtcacgaaaaacctttaaatttatccgtgggggctcttcacaattgcccggcaatttctttgagtaaaagtttgattccaagtatcacctgtccattttgtaccttcaagacattttatccagaagttttaatgatgcaccagagactggagcataaatacaatcctgacgttcataaaaactgtcgaaacaagtccttgcttagaagtcgacgtaccggatgcccgccagcgttgctgggaaaagatgtgcctcccctctctagtttctgtaaacccaagcccaagtctgctttcccggcgcagtccaaatccctgccatctgcgaaggggaagcagagccctcctgggccaggcaaggcccctctgacttcagggatagactctagcactttagccccaagtaacctgaagtcccacagaccacagcagaatgtgggggtccaaggggccgccaccaggcaacagcaatctgagatgtttcctaaaaccagtgtttcccctgcaccggataagacaaaaagacccgagacaaaattgaaacctcttccagtagctccttctcagcccaccctcggcagcagtaacatcaatggttccatcgactaccccgccaagaacgacagcccgtgggcacctccgggaagagactatttctgtaatcggagtgccagcaatactgcagcagaatttggtgagccccttccaaaaagactgaagtccagcgtggttgcccttgacgttgaccagcccggggccaattacagaagaggctatgaccttcccaagtaccatatggtcagaggcatcacatcactgttaccgcaggactgtgtgtatccgtcgcaggcgctgcctcccaaaccaaggttcctgagctccagcgaggtcgattctccaaatgtgctgactgttcagaagccctatggtggctccgggccactttacacttgtgtgcctgctggtagtccagcatccagctcgacgttagaaggtcttggtggatgtcagtgcttactccccatgaaattaaattttacttcatcctttgagaagcgaatggtgaaagctactgaaataagctgtgattgtactgtacataaaacatatgaggaatctgcaaggaacactacagttgtgtaaagttgttctgttaacttttgtaccaaatagcaatacaaactagttggaacagttggaacttacatacatggggactggaaatctctattttgtccctgaataatatttttcttagaattgaccaaataagaagtggaatttttgcatacttgagcgctgctgaaaagaaatcatttgggttgggtggggcgggatgggggaaaagtatataatgcttgcacctcaggtaaaaatctgtaaatatctaagttgtaaacctgcttgttcaaatactgtgtgtattccttttctctaatgcagctcatcacttggagcagtttctgctattgtgctctttcatttaaaatgtatgtttttttttttttaaactgtcaatgattttgtattatgttgaatccacccaaatctattgttgtcttaaaattgttaatggaagtattgaccctctatgatatgtgctgcagatatcgaggtcagccattcggaagctggcagcattttatcgcaactttgagcatctcagatggggaaggcaccttcttcctcgcctctccagattgtcctggaacctccaggatccttgactgagggcgttgggatggcttgtaggatttttaagagagtgtgtctacagacaagcattttctctgtagagcagccacacgttgtataaacataaactgtatgtgcagttatttaaatttgtttctatcaaattaatcatttttgttggacgattcagtggcgggggggttttgcctaaattagtatataaaaacaaaaatgctaaattatatctgtgaattgcaggtattggggaacagttttaagggaaattttggggggaacattttaggtttgtatttggtagtcttaatgtatctggcatttgggtgaactgtggacatactagagttgattatagacacattgattttgaataaggaactgctggccgagcccgctgggagtctagaaagagaaaatctgtttctagacctcagttattttcccatttttggttgttttgaagcagtaacatttttctcagtgcacatgcaatttgggttttagagaagatggccaccagctggcttcctagatattttaaacttttgttctttaatatgctgtccatggctgagtttattagtacatgggcttagtgaccacaaaatattttattaagaaactgtttcaaaaataaatttgcactgttcatttttctggcctcgctgttctccatagagcaagggtaatcctagaaaaaattttttttttttaaattatgcaacgtaagatgtcctccttgatagaagtcttagctcctgtgttacaagggagaactcatttgagatcagtctgttggcattgcaatgaagtgctttgtatcaggaaagtgtacactattgaccttttttcctgttcacaagctgagccatatgtacataatctagattttgttttcatagttttgcacttttatagcctatttttgaagattaacacatttgcaagatgattgactcaatctttgcctaatccaatgagtgttacagagagcttgctgtgactagaaccataaatcttaaagggggtatgtgataatagagggctggaatttaaacctgtatttaaaaaaaagaatcaccaaatctatttgaaaacaagtcgatttgtattatgctggaattttttgggctttcagatttctctttttaaccacatttctgaatgtataaaaataccaattattttcctacagccctttgtacttcaaaatatgtttttgtgtccatcagtattaactattggtatactactggttttatatttttttttctttgagacaacagtacatataatagaggtacaattcgttggatttttgtttatgtatttatttcattccagtttgatttattttaattgttgatacttaagttgtcgaacagtagacattacttgttttatttatgatatatttcagcttaaagttatgttattatatgtggaagtgtaaatatagatttggtgttttgcaatcttgaaaaatagtg

SEQ ID NO: 435462 - DNA, 2550 bp, Homo sapiens
gctgatccgcttagcataagggatatgcgtctgctgggtatttggttccaacacattagtttaagctaacaggggcacgttgtggtaatactcatgggtagcaaatttcggcttcacaagaaaataaaacctgcaacaaaaaagtagaaaggaaggccctcaaatgatttctctccctttctctgggtctctcggctttgcctctctctctgtgtatatggcattctgtcctccctcagaacccctactttctctgtgtcagcacgcacaagccaagatagatgtcataaagttaatgaaacttaagcggatcaggctgatccgcttaagggggaaaaaaggtcttggtggatgtcagtgcttactccccatgaaattaaattttacttcatcctttgagaagcgaatggtgaaagctactgaaataagctgtgattgtactgtacataaaacatatgaggaatctgcaaggaacactacagttgtgtaaagttgttctgttaacttttgtaccaaatagcaatacaaactagttggaacagttggaacttacatacatggggactggaaatctctattttgtccctgaataatatttttcttagaattgaccaaataagaagtggaatttttgcatacttgagcgctgctgaaaagaaatcatttgggttgggtggggcgggatgggggaaaagtatataatgcttgcacctcaggtaaaaatctgtaaatatctaagttgtaaacctgcttgttcaaatactgtgtgtattccttttctctaatgcagctcatcacttggagcagtttctgctattgtgctctttcatttaaaatgtatgtttttttttttttaaactgtcaatgattttgtattatgttgaatccacccaaatctattgttgtcttaaaattgttaatggaagtattgaccctctatgatatgtgctgcagatatcgaggtcagccattcggaagctggcagcattttatcgcaactttgagcatctcagatggggaaggcaccttcttcctcgcctctccagattgtcctggaacctccaggatccttgactgagggcgttgggatggcttgtaggatttttaagagagtgtgtctacagacaagcattttctctgtagagcagccacacgttgtataaacataaactgtatgtgcagttatttaaatttgtttctatcaaattaatcatttttgttggacgattcagtggcgggggggttttgcctaaattagtatataaaaacaaaaatgctaaattatatctgtgaattgcaggtattggggaacagttttaagggaaattttggggggaacattttaggtttgtatttggtagtcttaatgtatctggcatttgggtgaactgtggacatactagagttgattatagacacattgattttgaataaggaactgctggccgagcccgctgggagtctagaaagagaaaatctgtttctagacctcagttattttcccatttttggttgttttgaagcagtaacatttttctcagtgcacatgcaatttgggttttagagaagatggccaccagctggcttcctagatattttaaacttttgttctttaatatgctgtccatggctgagtttattagtacatgggcttagtgaccacaaaatattttattaagaaactgtttcaaaaataaatttgcactgttcatttttctggcctcgctgttctccatagagcaagggtaatcctagaaaaaattttttttttttaaattatgcaacgtaagatgtcctccttgatagaagtcttagctcctgtgttacaagggagaactcatttgagatcagtctgttggcattgcaatgaagtgctttgtatcaggaaagtgtacactattgaccttttttcctgttcacaagctgagccatatgtacataatctagattttgttttcatagttttgcacttttatagcctatttttgaagattaacacatttgcaagatgattgactcaatctttgcctaatccaatgagtgttacagagagcttgctgtgactagaaccataaatcttaaagggggtatgtgataatagagggctggaatttaaacctgtatttaaaaaaaagaatcaccaaatctatttgaaaacaagtcgatttgtattatgctggaattttttgggctttcagatttctctttttaaccacatttctgaatgtataaaaataccaattattttcctacagccctttgtacttcaaaatatgtttttgtgtccatcagtattaactattggtatactactggttttatatttttttttctttgagacaacagtacatataatagaggtacaattcgttggatttttgtttatgtatttatttcattccagtttgatttattttaattgttgatacttaagttgtcgaacagtagacattacttgttttatttatgatatatttcagcttaaagttatgttattatatgtggaagtgtaaatatagatttggtgttttgcaatcttgaaaaatagtg

SEQ ID NO: 435463 - DNA, 5620 bp, Homo sapiens
gacaaagagaactaatgctttgtgctgattcatatttgaatcgaggcattgggaaccctgtatgccttgtttgtggaaagaaccagtgacaccatcactgagcttcctaaaagttcgaagaagttagaggactatacactttcttttgaacttttataataaatatttgctctggtttttggaacccagggctgttagaggggtgagtgacaagtcttacaagtggccttattccaactccagaaattgcccaacggaactttgagattatatgcaatcgaaagtgacaggaaacatgccaactcaatccctcttaatgtacatggatgggccagaagtgattggcagctctcttggcagtccgatggagatggaggatgccttgtcaatgaaagggaccgctgttgttccattccgagctacacaagaaaaaaatgtcatccaaatcgaggggtatatgcccttggattgcatgttctgcagccagaccttcacacattcagaagaccttaataaacatgtcttaatgcaacaccggcctaccctctgtgaaccagcagttcttcgggttgaagcagagtatctcagtccgcttgataaaagtcaagtgcgaacagaacctcccaaggaaaagaattgcaaggaaaatgaatttagctgtgaggtatgtgggcagacatttagagtcgcttttgatgttgagatccacatgagaacacacaaagattctttcacttacgggtgtaacatgtgcggaagaagattcaaggagccttggtttcttaaaaatcacatgcggacacataatggcaaatcgggggccagaagcaaactgcagcaaggcttggagagtagtccagcaacgatcaacgaggtcgtccaggtgcacgcggccgagagcatctcctctccttacaaaatctgcatggtttgtggcttcctatttccaaataaagaaagtctaattgagcaccgcaaggtgcacaccaaaaaaactgctttcggtaccagcagcgcgcagacagactctccacaaggaggaatgccgtcctcgagggaggacttcctgcagttgttcaacttgagaccaaaatctcaccctgaaacggggaagaagcctgtcagatgcatccctcagctcgatccgttcaccaccttccaggcttggcagctggctaccaaaggaaaagttgccatttgccaagaagtgaaggaatcggggcaagaagggagcaccgacaacgacgattcgagttccgagaaggagcttggagaaacaaataagggcagttgtgcaggcctctcgcaagagaaagagaagtgcaaacactcccacggcgaagcgccctccgtggacgcggatcccaagttacccagtagcaaggagaagcccactcactgctccgagtgcggcaaagctttcagaacctaccaccagctggtcttgcactccagggtccacaagaaggaccggagggccggcgcggagtcgcccaccatgtctgtggacgggaggcagccggggacgtgttctcctgacctcgccgcccctctggatgaaaatggagccgtggatcgaggggaaggtggttctgaagacggatctgaggatgggcttcccgaaggaatccatctggataaaaatgatgatggaggaaaaataaaacatcttacatcttcaagagagtgtagttattgtggaaagtttttccgttcaaattattacctcaatattcatctcagaacgcatacaggtgaaaaaccatacaaatgtgaattttgtgaatatgctgcagcccagaagacatctctgaggtatcacttggagagacatcacaaggaaaaacaaaccgatgttgctgctgaagtcaagaacgatggtaaaaatcaggacactgaagatgcactattaaccgctgacagtgcgcaaaccaaaaatttgaaaagattttttgatggtgccaaagatgttacaggcagtccacctgcaaagcagcttaaggagatgccttctgtttttcagaatgttctgggcagcgctgtcctctcaccagcacacaaagatactcaggatttccataaaaatgcagctgatgacagtgctgataaagtgaataaaaaccctacccctgcttacctggacctgttaaaaaagagatcagcagttgaaactcaggcaaataacctcatctgtagaaccaaggcggatgttactcctcctccggatggcagtaccacccataaccttgaagttagccccaaagagaagcaaacggagaccgcagctgactgcagatacaggccaagtgtggattgtcacgaaaaacctttaaatttatccgtgggggctcttcacaattgcccggcaatttctttgagtaaaagtttgattccaagtatcacctgtccattttgtaccttcaagacattttatccagaagttttaatgatgcaccagagactggagcataaatacaatcctgacgttcataaaaactgtcgaaacaagtccttgcttagaagtcgacgtaccggatgcccgccagcgttgctgggaaaagatgtgcctcccctctctagtttctgtaaacccaagcccaagtctgctttcccggcgcagtccaaatccctgccatctgcgaaggggaagcagagccctcctgggccaggcaaggcccctctgacttcagggatagactctagcactttagccccaagtaacctgaagtcccacagaccacagcagaatgtgggggtccaaggggccgccaccaggcaacagcaatctgagatgtttcctaaaaccagtgtttcccctgcaccggataagacaaaaagacccgagacaaaattgaaacctcttccagtagctccttctcagcccaccctcggcagcagtaacatcaatggttccatcgactaccccgccaagaacgacagcccgtgggcacctccgggaagagactatttctgtaatcggagtgccagcaatactgcagcagaatttggtgagccccttccaaaaagactgaagtccagcgtggttgcccttgacgttgaccagcccggggccaattacagaagaggctatgaccttcccaagtaccatatggtcagaggcatcacatcactgttaccgcaggactgtgtgtatccgtcgcaggcgctgcctcccaaaccaaggttcctgagctccagcgaggtcgattctccaaatgtgctgactgttcagaagccctatggtggctccgggccactttacacttgtgtgcctgctggtagtccagcatccagctcgacgttagaaggaaaaaggcctgtgtcatatcaacacttatctaacagcatggcacaaaagagaaactatgagaattttattgggaatgcacattatcgaccaaatgacaaaaaaacttgattcactaattagggggaaaaaaggtcttggtggatgtcagtgcttactccccatgaaattaaattttacttcatcctttgagaagcgaatggtgaaagctactgaaataagctgtgattgtactgtacataaaacatatgaggaatctgcaaggaacactacagttgtgtaaagttgttctgttaacttttgtaccaaatagcaatacaaactagttggaacagttggaacttacatacatggggactggaaatctctattttgtccctgaataatatttttcttagaattgaccaaataagaagtggaatttttgcatacttgagcgctgctgaaaagaaatcatttgggttgggtggggcgggatgggggaaaagtatataatgcttgcacctcaggtaaaaatctgtaaatatctaagttgtaaacctgcttgttcaaatactgtgtgtattccttttctctaatgcagctcatcacttggagcagtttctgctattgtgctctttcatttaaaatgtatgtttttttttttttaaactgtcaatgattttgtattatgttgaatccacccaaatctattgttgtcttaaaattgttaatggaagtattgaccctctatgatatgtgctgcagatatcgaggtcagccattcggaagctggcagcattttatcgcaactttgagcatctcagatggggaaggcaccttcttcctcgcctctccagattgtcctggaacctccaggatccttgactgagggcgttgggatggcttgtaggatttttaagagagtgtgtctacagacaagcattttctctgtagagcagccacacgttgtataaacataaactgtatgtgcagttatttaaatttgtttctatcaaattaatcatttttgttggacgattcagtggcgggggggttttgcctaaattagtatataaaaacaaaaatgctaaattatatctgtgaattgcaggtattggggaacagttttaagggaaattttggggggaacattttaggtttgtatttggtagtcttaatgtatctggcatttgggtgaactgtggacatactagagttgattatagacacattgattttgaataaggaactgctggccgagcccgctgggagtctagaaagagaaaatctgtttctagacctcagttattttcccatttttggttgttttgaagcagtaacatttttctcagtgcacatgcaatttgggttttagagaagatggccaccagctggcttcctagatattttaaacttttgttctttaatatgctgtccatggctgagtttattagtacatgggcttagtgaccacaaaatattttattaagaaactgtttcaaaaataaatttgcactgttcatttttctggcctcgctgttctccatagagcaagggtaatcctagaaaaaattttttttttttaaattatgcaacgtaagatgtcctccttgatagaagtcttagctcctgtgttacaagggagaactcatttgagatcagtctgttggcattgcaatgaagtgctttgtatcaggaaagtgtacactattgaccttttttcctgttcacaagctgagccatatgtacataatctagattttgttttcatagttttgcacttttatagcctatttttgaagattaacacatttgcaagatgattgactcaatctttgcctaatccaatgagtgttacagagagcttgctgtgactagaaccataaatcttaaagggggtatgtgataatagagggctggaatttaaacctgtatttaaaaaaaagaatcaccaaatctatttgaaaacaagtcgatttgtattatgctggaattttttgggctttcagatttctctttttaaccacatttctgaatgtataaaaataccaattattttcctacagccctttgtacttcaaaatatgtttttgtgtccatcagtattaactattggtatactactggttttatatttttttttctttgagacaacagtacatataatagaggtacaattcgttggatttttgtttatgtatttatttcattccagtttgatttattttaattgttgatacttaagttgtcgaacagtagaccttaaagttatgttattatatgtggaagtgtaaatatagatttggtgttttgcaatcttgaaaaatagtg

SEQ ID NO: 435464 - DNA, 714 bp, Homo sapiens
aagttgggattacaggcgtcagccactgtgcctggccgtagtcttatattattttatatcgtcttagagatttttattggtatttaatacagattgtaagttgtcttctagattttgttttcatagttttgcacttttatagcctatttttgaagattaacacatttgcaagatgattgactcaatctttgcctaatccaatgagtgttacagagagcttgctgtgactagaaccataaatcttaaagggggtatgtgataatagagggctggaatttaaacctgtatttaaaaaaaagaatcaccaaatctatttgaaaacaagtcgatttgtattatgctggaattttttgggctttcagatttctctttttaaccacatttctgaatgtataaaaataccaattattttcctacagccctttgtacttcaaaatatgtttttgtgtccatcagtattaactattggtatactactggttttatatttttttttctttgagacaacagtacatataatagaggtacaattcgttggatttttgtttatgtatttatttcattccagtttgatttattttaattgttgatacttaagttgtcgaacagtagacattacttgttttatttatgatatatttcagcttaaagttatgttattatatgtggaagtgtaaatatagatttggtgttttgcaatcttgaaaaatagtg

SEQ ID NO: 435465 - DNA, 3486 bp, Homo sapiens
gacaaagagaactaatgctttgtgctgattcatatttgaatcgaggcattgggaaccctgtatgccttgtttgtggaaagaaccagtgacaccatcactgagcttcctaaaagttcgaagaagttagaggactatacactttcttttgaacttttataataaatatttgctctggtttttggaacccagggctgttagaggggtgagtgacaagtcttacaagtggccttattccaactccagaaattgcccaacggaactttgagattatatgcaatcgaaagtgacaggaaacatgccaactcaatccctcttaatgtacatggatgggccagaagtgattggcagctctcttggcagtccgatggagatggaggatgccttgtcaatgaaagggaccgctgttgttccattccgagctacacaagaaaaaaatgtcatccaaatcgaggggtatatgcccttggattgcatgttctgcagccagaccttcacacattcagaagaccttaataaacatgtcttaatgcaacaccggcctaccctctgtgaaccagcagttcttcgggttgaagcagagtatctcagtccgcttgataaaagtcaagtgcgaacagaacctcccaaggaaaagaattgcaaggaaaatgaatttagctgtgaggtatgtgggcagacatttagagtcgcttttgatgttgagatccacatgagaacacacaaagattctttcacttacgggtgtaacatgtgcggaagaagattcaaggagccttggtttcttaaaaatcacatgcggacacataatggcaaatcgggggccagaagcaaactgcagcaaggcttggagagtagtccagcaacgatcaacgaggtcgtccaggtgcacgcggccgagagcatctcctctccttacaaaatctgcatggtttgtggcttcctatttccaaataaagaaagtctaattgagcaccgcaaggtgcacaccaaaaaaactgctttcggtaccagcagcgcgcagacagactctccacaaggaggaatgccgtcctcgagggaggacttcctgcagttgttcaacttgagaccaaaatctcaccctgaaacggggaagaagcctgtcagatgcatccctcagctcgatccgttcaccaccttccaggcttggcagctggctaccaaaggaaaagttgccatttgccaagaagtgaaggaatcggggcaagaagggagcaccgacaacgacgattcgagttccgagaaggagcttggagaaacaaataagggcagttgtgcaggcctctcgcaagagaaagagaagtgcaaacactcccacggcgaagcgccctccgtggacgcggatcccaagttacccagtagcaaggagaagcccactcactgctccgagtgcggcaaagctttcagaacctaccaccagctggtcttgcactccagggtccacaagaaggaccggagggccggcgcggagtcgcccaccatgtctgtggacgggaggcagccggggacgtgttctcctgacctcgccgcccctctggatgaaaatggagccgtggatcgaggggaaggtggttctgaagacggatctgaggatgggcttcccgaaggaatccatctggataaaaatgatgatggaggaaaaataaaacatcttacatcttcaagagagtgtagttattgtggaaagtttttccgttcaaattattacctcaatattcatctcagaacgcatacaggtgaaaaaccatacaaatgtgaattttgtgaatatgctgcagcccagaagacatctctgaggtatcacttggagagacatcacaaggaaaaacaaaccgatgttgctgctgaagtcaagaacgatggtaaaaatcaggacactgaagatgcactattaaccgctgacagtgcgcaaaccaaaaatttgaaaagattttttgatggtgccaaagatgttacaggcagtccacctgcaaagcagcttaaggagatgccttctgtttttcagaatgttctgggcagcgctgtcctctcaccagcacacaaagatactcaggatttccataaaaatgcagctgatgacagtgctgataaagtgaataaaaaccctacccctgcttacctggacctgttaaaaaagagatcagcagttgaaactcaggcaaataacctcatctgtagaaccaaggcggatgttactcctcctccggatggcagtaccacccataaccttgaagttagccccaaagagaagcaaacggagaccgcagctgactgcagatacaggccaagtgtggattgtcacgaaaaacctttaaatttatccgtgggggctcttcacaattgcccggcaatttctttgagtaaaagtttgattccaagtatcacctgtccattttgtaccttcaagacattttatccagaagttttaatgatgcaccagagactggagcataaatacaatcctgacgttcataaaaactgtcgaaacaagtccttgcttagaagtcgacgtaccggatgcccgccagcgttgctgggaaaagatgtgcctcccctctctagtttctgtaaacccaagcccaagtctgctttcccggcgcagtccaaatccctgccatctgcgaaggggaagcagagccctcctgggccaggcaaggcccctctgacttcagggatagactctagcactttagccccaagtaacctgaagtcccacagaccacagcagaatgtgggggtccaaggggccgccaccaggcaacagcaatctgagatgtttcctaaaaccagtgtttcccctgcaccggataagacaaaaagacccgagacaaaattgaaacctcttccagtagctccttctcagcccaccctcggcagcagtaacatcaatggttccatcgactaccccgccaagaacgacagcccgtgggcacctccgggaagagactatttctgtaatcggagtgccagcaatactgcagcagaatttggtgagccccttccaaaaagactgaagtccagcgtggttgcccttgacgttgaccagcccggggccaattacagaagaggctatgaccttcccaagtaccatatggtcagaggcatcacatcactgttaccgcaggactgtgtgtatccgtcgcaggcgctgcctcccaaaccaaggttcctgagctccagcgaggtcgattctccaaatgtgctgactgttcagaagccctatggtggctccgggccactttacacttgtgtgcctgctggtagtccagcatccagctcgacgttagaaggtattgcatgaggggcgtcgtgtttaaatggctgcctacagtgattaatagctaatccaggcattctcagtggagatggtaccactcccaagggtggggggtaggcagccagaagttcttgggggtcacagagagaagcattcttagatacggcagtggtttgtggtcctccaaggct

SEQ ID NO: 435466 - DNA, 511 bp, Homo sapiens
ggactcaagcaatccttccatccttccgtctcagcctcccgagtagctgggactaaaggtgcatgtcaccatacccagctaattttttatttttagtagagaagaggtctcaccatgttgcctatgctggcaaatccccttttaaatgattttaaaaaaagcaaaaaacaacacttttacatagtttggttcatgatgcatatacgtttcaagtattttgtgatgtcatttttttccggctttttaattctttctagtgacagcccagacaattttaatgttagtgacatcaacccaattctgtgctaacaagtgtcataaaaacaattcagctgtaactgaaaacacttggcatgcgactgtgtgacttaggcgttgattacattatcagtgtcagaaattttgaaaattgacttctaaaaacctatacacatcttacctaattgtttgaccttaactctaaatatgttttttttttcaatcaggaaaaaggcctgtgtcatatcaacac

SEQ ID NO: 435467 - DNA, 2852 bp, Homo sapiens
  misc_feature (156)..(156): n is a, c, g, or t
  misc_feature (162)..(162): n is a, c, g, or t
ggcggcggcggcggcggcgaagaactgttccttccacctcttcagccccggcaggacgggggcggccgccgcgaacccggggcggggacagcacgcagcctcgaggcgcgcacccccgcccggcagcggccccgacacccggggcgagcgggaaancggcancggcggcggcggcggcggcggcgggggaaggatgcaggggaagaagccgggcggttcgtcgggcggcggccggagcggcgagctgcagggggacgaggcgcagaggaacaagaaaaagaaaaagaaggtgtcctgcttttccaacatcaagatcttcctggtgtccgagtgcgccctgatgctggcgcagggcacggtgggcgcctacctggtgagcgtcctgaccaccctggagcgtaggttcaacctgcagagcgctgacgtgggtgtgatcgctagcagcttcgagatcgggaacctggcgctcatcctcttcgtgagctacttcggggcacgcgggcaccggccgcgcctgatcggctgcggcggcatcgtcatggcgctgggcgcgctgctgtcggcgctgcccgagttcctgacccaccagtacaagtacgaggcgggcgagatccgctggggcgccgagggccgcgacgtctgcgcagccaacggctcgggcggcgacgaggggcccgaccccgacctcatctgccgcaaccggacggctaccaacatgatgtacttgctgctcattggggcccaggtgctcctgggcatcggtgctacccctgtgcagcccctgggcgtctcctacatcgacgaccacgtgcggaggaaggactcctcgctctatataggaatcctgttcacgatgctggtatttggaccagcctgcgggtttatcctgggctctttctgtaccaaaatctacgtggatgcggtcttcattgacacaagtaacctggacatcactccggacgacccccgctggatcggagcctggtggggtggctttctgctctgcggtgccttactcttcttctcttccctcttgatgtttgggtttccacagtccctgcccccgcactcagaccccgccatggaaagcgagcaggccatgctctccgaaagagaatacgagagacccaagcccagcaacggggtcctgaggcaccccctggagccagacagcagtgcctcctgtttccagcagctgagagtgatcccgaaggtcaccaagcacctgctctcaaaccctgtgttcacctgcatcatcctggccgcctgcatggagattgcagtggtggctggcttcgctgcctttttggggaagtacctggagcagcagtttaacctcaccacctcttctgccaaccagctgcttgggatgactgcgatcccgtgtgcttgtctgggtatcttcctgggaggtcttttggtgaagaagctcagcctgtctgccctgggggccattcggatggccatgctcgtcaacctggtgtccactgcttgctacgtctccttcctcttcctgggctgcgacactggccctgtggctggggttactgttccctatggaaacagcacagcacctggctcagccctggacccctactcgccctgcaataataactgtgaatgccaaaccgattccttcactccagtgtgtggggcagatggcatcacctacctgtctgcctgctttgctggctgcaacagcacgaatctcacgggctgtgcgtgcctcaccaccgtccctgctgagaacgcaaccgtggttcctggaaaatgccccagtcctgggtgccaagaggccttcctcactttcctctgtgtgatgtgtatctgcagcctgatcggtgccatggcacagacaccctcagtcatcatcctcatcaggacagtcagccctgaactcaagtcttacgctttgggagttctttttctcctccttcgtttgttgggcttcatccctccacccctcatcttcggggctggcatcgactccacctgcctgttctggagcacgttctgtggggagcaaggcgcctgcgtcctctacgacaatgtggtctaccgatacctgtatgtcagcatcgccatcgcgctcaaatccttcgccttcatcctgtacaccaccacgtggcagtgcctgaggaaaaactataaacgctacatcaaaaaccacgagggcgggctgagcaccagcacagagtaccaagacattgagactgagaaaacctgccccgaatcacattcaccttcagaagactcctttgtgagaagctgagggcctggccctcttcctcttcctggagagaacagccctccaccacccacagacctcgcgggcctcacttagcgtgctcctccctgtccgagaacccgagggtccccatgtggattatccagccagtgtgtggtcctttgaggccccaagcgcaggcctgtgatgaggaccaaagaggtgacttatggtcaggagtactccaaacagctctcagagtaggcatctttcctgggtctctaaagagtcatgctgacctggtgtgcaaattcccttccacccatccctctacctcctctggggatggcttgccgacatgctttagaaactcccctcttgggaatgctcctctgactgagggctccaacagctttaatgaaatcagccgagagggtaaaaaccaacctgttgcatagaatggaggggggaaaaagcacatactcaatagatttttgagtgtggtactctgtatttttgcagcatttattttccaaatgagcagtttagaaatatgtgatgtaaagtacatactgtacgtttgctgaaaattatattaaaagcactattttaattcttaaaatgt

SEQ ID NO: 435468 - DNA, 1571 bp, Homo sapiens
  misc_feature (778)..(778): n is a, c, g, or t
tgaaccccagctctctcacttcggtcccacccttcccaactccccacgcccaagtctttcagtggaacccaagactgtaagaacgtaggccttgtgagagtgaaggaaggatgctcgaacttgcccaggactcaggcttcagcttcacaatcccgaggaaaggaatgacatttccaaactgtcacctttgtagcgctgggtcaaagtctaaagaggacaaataaatagagacttctgtggcctcgttgtgcctattgaacaggagagctgcatgtcacaatcaatgagacctgcacagcttgtgaatcatcactgagactagttgtgtttttaatacctttaaaatgaagccacagcatctattctggaaatgtggcgtaggcttaaaaaccttgctccaaagaggatatcgtttcagccagcatgcagtgaatatctgtggctacacaaaaaaacaaactgtcccgaatgctggaggaggaaatatgacattgtgatgccaggcagttttctgtgacactcaggaatctcttcaatagagatgtacagtgacacttagagccccagaacacaaggtctgtcactagtaatttacataagataaggataaattattgactgggatacatcttactcatccccgacatctgcttggctgtggggttggtcatgtagataaatatccttcccagaaaggatatttggccttcaaaaaagtctctgggctcagagtctggtcccttggggttacatggaatgaaacccagcactttattgntttgactgcctactcttgtcccttcactgcaaagccatcatgctattaaataagcctaacaaacagtaggtgaagcagaaaagaccgatctctttttcctcttggctcttcttccctcctccccctttaggcacagagtaccaagacattgagactgagaaaacctgccccgaatcacattcaccttcagaagactcctttgtgagaagctgagggcctggccctcttcctcttcctggagagaacagccctccaccacccacagacctcgcgggcctcacttagcgtgctcctccctgtccgagaacccgagggtccccatgtggattatccagccagtgtgtggtcctttgaggccccaagcgcaggcctgtgatgaggaccaaagaggtgacttatggtcaggagtactccaaacagctctcagagtaggcatctttcctgggtctctaaagagtcatgctgacctggtgtgcaaattcccttccacccatccctctacctcctctggggatggcttgccgacatgctttagaaactcccctcttgggaatgctcctctgactgagggctccaacagctttaatgaaatcagccgagagggtaaaaaccaacctgttgcatagaatggaggggggaaaaagcacatactcaatagatttttgagtgtggtactctgtatttttgcagcatttattttccaaatgagcagtttagaaatatgtgatgtaaagtacatactgtacgtttgctgaaaattatattaaaagcactattttaattcttaaaatgt

SEQ ID NO: 435469 - DNA, 5099 bp, Homo sapiens
  misc_feature (156)..(156): n is a, c, g, or t
  misc_feature (162)..(162): n is a, c, g, or t
ggcggcggcggcggcggcgaagaactgttccttccacctcttcagccccggcaggacgggggcggccgccgcgaacccggggcggggacagcacgcagcctcgaggcgcgcacccccgcccggcagcggccccgacacccggggcgagcgggaaancggcancggcggcggcggcggcggcggcgggggaaggatgcaggggaagaagccgggcggttcgtcgggcggcggccggagcggcgagctgcagggggacgaggcgcagaggaacaagaaaaagaaaaagaaggtgtcctgcttttccaacatcaagatcttcctggtgtccgagtgcgccctgatgctggcgcagggcacggtgggcgcctacctggtgagcgtcctgaccaccctggagcgtaggttcaacctgcagagcgctgacgtgggtgtgatcgctagcagcttcgagatcgggaacctggcgctcatcctcttcgtgagctacttcggggcacgcgggcaccggccgcgcctgatcggctgcggcggcatcgtcatggcgctgggcgcgctgctgtcggcgctgcccgagttcctgacccaccagtacaagtacgaggcgggcgagatccgctggggcgccgagggccgcgacgtctgcgcagccaacggctcgggcggcgacgaggggcccgaccccgacctcatctgccgcaaccggacggctaccaacatgatgtacttgctgctcattggggcccaggtgctcctgggcatcggtgctacccctgtgcagcccctgggcgtctcctacatcgacgaccacgtgcggaggaaggactcctcgctctatataggaatcctgttcacgatgctggtatttggaccagcctgcgggtttatcctgggctctttctgtaccaaaatctacgtggatgcggtcttcattgacacaagtaacctggacatcactccggacgacccccgctggatcggagcctggtggggtggctttctgctctgcggtgccttactcttcttctcttccctcttgatgtttgggtttccacagtccctgcccccgcactcagaccccgccatggaaagcgagcaggccatgctctccgaaagagaatacgagagacccaagcccagcaacggggtcctgaggcaccccctggagccagacagcagtgcctcctgtttccagcagctgagagtgatcccgaaggtcaccaagcacctgctctcaaaccctgtgttcacctgcatcatcctggccgcctgcatggagattgcagtggtggctggcttcgctgcctttttggggaagtacctggagcagcagtttaacctcaccacctcttctgccaaccagctgcttgggatgactgcgatcccgtgtgcttgtctgggtatcttcctgggaggtcttttggtgaagaagctcagcctgtctgccctgggggccattcggatggccatgctcgtcaacctggtgtccactgcttgctacgtctccttcctcttcctgggctgcgacactggccctgtggctggggttactgttccctatggaaacagcacagcacctggctcagccctggacccctactcgccctgcaataataactgtgaatgccaaaccgattccttcactccagtgtgtggggcagatggcatcacctacctgtctgcctgctttgctggctgcaacagcacgaatctcacgggctgtgcgtgcctcaccaccgtccctgctgagaacgcaaccgtggttcctggaaaatgccccagtcctgggtgccaagaggccttcctcactttcctctgtgtgatgtgtatctgcagcctgatcggtgccatggcacagacaccctcagtcatcatcctcatcaggacagtcagccctgaactcaagtcttacgctttgggagttctttttctcctccttcgtttgttgggcttcatccctccacccctcatcttcggggctggcatcgactccacctgcctgttctggagcacgttctgtggggagcaaggcgcctgcgtcctctacgacaatgtggtctaccgatacctgtatgtcagcatcgccatcgcgctcaaatccttcgccttcatcctgtacaccaccacgtggcagtgcctgaggaaaaactataaacgctacatcaaaaaccacgagggcgggctgagcaccagtgagttctttgcctctactctgaccctagacaacctggggagggaccctgtgcccgcaaaccagacacataggacaaagtttatctataacctggaagaccatgagtggtgtgaaaacatggagtccgttttatagtgactaaaggagggctgaactctgtattagtaatccaagggtcatttttttcttaaaaaaagaaaaaaaggttccaaaaaaaaccaaaactcagtacacacacacaggcacagatgcacacacacgcagacagacacaccgactttgtcctttttctcagcatcagagccagacaggattcagaataaggagagaatgacatcgtgcggcagggtcctggaggccactcgcgcggctgggccacagagtctactttgaaggcacctcatggttttcaggatgctgacagctgcaagcaacaggcactgccaaattcagggaacagtggtggccagcttggaggatggacatttctggatacacatacacatacaaaacagaaaacattttttaaaagaagtttcctaaaataaaaaaaataaaaaaaaaaaacccacaagttgaaaacattgccagattaagcactagtgacacaccccgtgccaccctcttcctccaggtgggggtgggggcgggcgcacaagtcggaggggtggaagcaccactcctctctctgactttcgcaatatgggtcactgtgtagacgactcacccagtctgcatgtggttcaaggccccagagttctctcagtgatgctaatgggtgatccgtgctggagtttgtaattggcacctctcaccagctccatttccatgttcaagactgagggcctgagggggagccaggtggggggccagcacctcccagtggcgggcatccaccttcccccagccccacagagtgacctcaggaagcagtaggcctcgcctggctatgactgacccggctcagagctggtgagacccaacgcagtccaagtcatttgcttacatttgccaaaaacattttgccatttttaaaagaaaaaaatacaatccatatgaattttaaactgttgtatgtataatcctctaatactatttttaactacttctaaaatctgtgttaacccttcaagtcactaacacagttctctaggccggatttattatgctggttgcttttactttttttctccttttttaatgcaccaaaaatatgtgatacaagggatgcaattaacctattgtaattttcatcattttatcctcattcgaatattctacaaaaacaagaatatacaatgtgttacaagaagaaaaaaaaatgcttcaaaaagagaatgtatatgcagcctgcctttaaaagaatcacatttgagacaacaggggataatgtgatgaattgcaaatttgccttttagcttccttccccatgattcagtgatcactgtcacgggaaacccttttatattcatgcttgacattccaagaggcgttcttttcagcctgtggaggagacactcttagatgtgggtttgtgtgtatgggtgcaacacttccggggataggaaagaagaacagttccctaacacaagctgttaagaagtctgtgtagcatctctgataacgaatagacccacaagctcctggaagctgtcgtgtgtccaatgcgtgaaaatgtccgtgacattttcagtgttagtcttgaactaaggcccttgtctgtgtgttttgaaggtgggtaaacctcagagaatgaacctgttatgatttggggtaagaatcacgttggaaaacctctcgcaaccagcacactaggccttctacggccatttccgtaaggggacagagcttaggtaaaggcacacactcatacacacacaacaaagggccctgctaacttactcctcatgctgcttcagtgacctttgttcatgtcacattcctggcgctggaaaaaaaactcaaaggttgattggtttgctttttcaccttggacacatttgcattttacccacaaggcaaacaaaagaatcaggaagtaaaaaatggttgggagtgggacaggtatggtactgaatttttaatgaacattgtaaatgaagaggcttgaatgacagcccaaatctagagaaggcactcagcaagaccaaccaaaagaaaagctgtgtcgtggtatggggccaccgtgatcagctacctggggcaggatgcttctgagacaggcctttcaactgcttagtgttagtatgtccttgcttatgaaaatggggacactcatcagtacgttaactactaaaggggagatggttctccaaccactccataaaatatgtatgttctgttgttcctaaggctttgataatatcctgtacagattttggtttagttttgcaaatatattgctaataggtcactcttatagattattgcttggcccttcaaactcagtacacacacactgaggccctttgacctagtgttttatggaactatttgctttgagagaaaaaaaaaagaaagttttttaaactctttgcattttggattttttttcctaagattttaggatgaatgtgaaaaagatgttagaataacaggaagacaactccagggctgagttttatcagcaattgggtataaatttaaagaccgctgttgcaggatggctctgaattctgttgtgtcgtcttttaaaattttaattattctcatatagtaccgaacagaaaactcagtctagttttaatttgccttttgtgctctaaagaagcattgtacatacaacactagatccagcccctcgattatctgtttggtttcaagtgaatgaaaagatttcctggtaagatcattggatttacagaatacaaaaatgtacgggatggaataaacctagaaagtgaatgct

SEQ ID NO: 435470 - DNA, 4590 bp, Homo sapiens
ggtccttctattaccctgtggttggggtaatagcaggcctcccttcccttcttgggcttttcggagatggtcatttttttgacagacacggcgtgaggaccttcactgattaccacagactcccacagagtcatttgccccgccgtgtcctcctacaggcgggggagccaccctcagaggagctggtgaccctcctaccttgaactgcactgcttcagccacaccagtgaggcaggcattccctggcatgagaaagcgtctggctccctctggtgacaagaggaagcacctgagcctttgccgccatttccactggtggtggagcacgaggaatcctgttcacgatgctggtatttggaccagcctgcgggtttatcctgggctctttctgtaccaaaatctacgtggatgcggtcttcattgacacaagtaacctggacatcactccggacgacccccgctggatcggagcctggtggggtggctttctgctctgcggtgccttactcttcttctcttccctcttgatgtttgggtttccacagtccctgcccccgcactcagaccccgccatggaaagcgagcaggccatgctctccgaaagagaatacgagagacccaagcccagcaacggggtcctgaggcaccccctggagccagacagcagtgcctcctgtttccagcagctgagagtgatcccgaaggtcaccaagcacctgctctcaaaccctgtgttcacctgcatcatcctggccgcctgcatggagattgcagtggtggctggcttcgctgcctttttggggaagtacctggagcagcagtttaacctcaccacctcttctgccaaccagctgcttgggatgactgcgatcccgtgtgcttgtctgggtatcttcctgggaggtcttttggtgaagaagctcagcctgtctgccctgggggccattcggatggccatgctcgtcaacctggtgtccactgcttgctacgtctccttcctcttcctgggctgcgacactggccctgtggctggggttactgttccctatggaaacagcacagcacctggctcagccctggacccctactcgccctgcaataataactgtgaatgccaaaccgattccttcactccagtgtgtggggcagatggcatcacctacctgtctgcctgctttgctggctgcaacagcacgaatctcacgggctgtgcgtgcctcaccaccgtccctgctgagaacgcaaccgtggttcctggaaaatgccccagtcctgggtgccaagaggccttcctcactttcctctgtgtgatgtgtatctgcagcctgatcggtgccatggcacagacaccctcagtcatcatcctcatcaggacagtcagccctgaactcaagtcttacgctttgggagttctttttctcctccttcgtttgttgggcttcatccctccacccctcatcttcggggctggcatcgactccacctgcctgttctggagcacgttctgtggggagcaaggcgcctgcgtcctctacgacaatgtggtctaccgatacctgtatgtcagcatcgccatcgcgctcaaatccttcgccttcatcctgtacaccaccacgtggcagtgcctgaggaaaaactataaacgctacatcaaaaaccacgagggcgggctgagcaccagtgagttctttgcctctactctgaccctagacaacctggggagggaccctgtgcccgcaaaccagacacataggacaaagtttatctataacctggaagaccatgagtggtgtgaaaacatggagtccgttttatagtgactaaaggagggctgaactctgtattagtaatccaagggtcatttttttcttaaaaaaagaaaaaaaggttccaaaaaaaaccaaaactcagtacacacacacaggcacagatgcacacacacgcagacagacacaccgactttgtcctttttctcagcatcagagccagacaggattcagaataaggagagaatgacatcgtgcggcagggtcctggaggccactcgcgcggctgggccacagagtctactttgaaggcacctcatggttttcaggatgctgacagctgcaagcaacaggcactgccaaattcagggaacagtggtggccagcttggaggatggacatttctggatacacatacacatacaaaacagaaaacattttttaaaagaagtttcctaaaataaaaaaaataaaaaaaaaaaacccacaagttgaaaacattgccagattaagcactagtgacacaccccgtgccaccctcttcctccaggtgggggtgggggcgggcgcacaagtcggaggggtggaagcaccactcctctctctgactttcgcaatatgggtcactgtgtagacgactcacccagtctgcatgtggttcaaggccccagagttctctcagtgatgctaatgggtgatccgtgctggagtttgtaattggcacctctcaccagctccatttccatgttcaagactgagggcctgagggggagccaggtggggggccagcacctcccagtggcgggcatccaccttcccccagccccacagagtgacctcaggaagcagtaggcctcgcctggctatgactgacccggctcagagctggtgagacccaacgcagtccaagtcatttgcttacatttgccaaaaacattttgccatttttaaaagaaaaaaatacaatccatatgaattttaaactgttgtatgtataatcctctaatactatttttaactacttctaaaatctgtgttaacccttcaagtcactaacacagttctctaggccggatttattatgctggttgcttttactttttttctccttttttaatgcaccaaaaatatgtgatacaagggatgcaattaacctattgtaattttcatcattttatcctcattcgaatattctacaaaaacaagaatatacaatgtgttacaagaagaaaaaaaaatgcttcaaaaagagaatgtatatgcagcctgcctttaaaagaatcacatttgagacaacaggggataatgtgatgaattgcaaatttgccttttagcttccttccccatgattcagtgatcactgtcacgggaaacccttttatattcatgcttgacattccaagaggcgttcttttcagcctgtggaggagacactcttagatgtgggtttgtgtgtatgggtgcaacacttccggggataggaaagaagaacagttccctaacacaagctgttaagaagtctgtgtagcatctctgataacgaatagacccacaagctcctggaagctgtcgtgtgtccaatgcgtgaaaatgtccgtgacattttcagtgttagtcttgaactaaggcccttgtctgtgtgttttgaaggtgggtaaacctcagagaatgaacctgttatgatttggggtaagaatcacgttggaaaacctctcgcaaccagcacactaggccttctacggccatttccgtaaggggacagagcttaggtaaaggcacacactcatacacacacaacaaagggccctgctaacttactcctcatgctgcttcagtgacctttgttcatgtcacattcctggcgctggaaaaaaaactcaaaggttgattggtttgctttttcaccttggacacatttgcattttacccacaaggcaaacaaaagaatcaggaagtaaaaaatggttgggagtgggacaggtatggtactgaatttttaatgaacattgtaaatgaagaggcttgaatgacagcccaaatctagagaaggcactcagcaagaccaaccaaaagaaaagctgtgtcgtggtatggggccaccgtgatcagctacctggggcaggatgcttctgagacaggcctttcaactgcttagtgttagtatgtccttgcttatgaaaatggggacactcatcagtacgttaactactaaaggggagatggttctccaaccactccataaaatatgtatgttctgttgttcctaaggctttgataatatcctgtacagattttggtttagttttgcaaatatattgctaataggtcactcttatagattattgcttggcccttcaaactcagtacacacacactgaggccctttgacctagtgttttatggaactatttgctttgagagaaaaaaaaaagaaagttttttaaactctttgcattttggattttttttcctaagattttaggatgaatgtgaaaaagatgttagaataacaggaagacaactccagggctgagttttatcagcaattgggtataaatttaaagaccgctgttgcaggatggctctgaattctgttgtgtcgtcttttaaaattttaattattctcatatagtaccgaacagaaaactcagtctagttttaatttgccttttgtgctctaaagaagcattgtacatacaacactagatccagcccctcgattatctgtttggtttcaagtgaatgaaaagatttcctggtaagatcattggatttacagaatacaaaaatgtacgggatggaataaacctagaaagtgaatgct

SEQ ID NO: 435471 - DNA, 5224 bp, Homo sapiens
  misc_feature (156)..(156): n is a, c, g, or t
  misc_feature (162)..(162): n is a, c, g, or t
ggcggcggcggcggcggcgaagaactgttccttccacctcttcagccccggcaggacgggggcggccgccgcgaacccggggcggggacagcacgcagcctcgaggcgcgcacccccgcccggcagcggccccgacacccggggcgagcgggaaancggcancggcggcggcggcggcggcggcgggggaaggatgcaggggaagaagccgggcggttcgtcgggcggcggccggagcggcgagctgcagggggacgaggcgcagaggaacaagaaaaagaaaaagaaggtgtcctgcttttccaacatcaagatcttcctggtgtccgagtgcgccctgatgctggcgcagggcacggtgggcgcctacctggtgagcgtcctgaccaccctggagcgtaggttcaacctgcagagcgctgacgtgggtgtgatcgctagcagcttcgagatcgggaacctggcgctcatcctcttcgtgagctacttcggggcacgcgggcaccggccgcgcctgatcggctgcggcggcatcgtcatggcgctgggcgcgctgctgtcggcgctgcccgagttcctgacccaccagtacaagtacgaggcgggcgagatccgctggggcgccgagggccgcgacgtctgcgcagccaacggctcgggcggcgacgaggggcccgaccccgacctcatctgccgcaaccggacggctaccaacatgatgtacttgctgctcattggggcccaggtgctcctgggcatcggtgctacccctgtgcagcccctgggcgtctcctacatcgacgaccacgtgcggaggaaggactcctcgctctatataggaatcctgttcacgatgctggtatttggaccagcctgcgggtttatcctgggctctttctgtaccaaaatctacgtggatgcggtcttcattgacacaagtaacctggacatcactccggacgacccccgctggatcggagcctggtggggtggctttctgctctgcggtgccttactcttcttctcttccctcttgatgtttgggtttccacagtccctgcccccgcactcagaccccgccatggaaagcgagcaggccatgctctccgaaagagaatacgagagacccaagcccagcaacggggtcctgaggcaccccctggagccagacagcagtgcctcctgtttccagcagctgagagtgatcccgaaggtcaccaagcacctgctctcaaaccctgtgttcacctgcatcatcctggccgcctgcatggagattgcagtggtggctggcttcgctgcctttttggggaagtacctggagcagcagtttaacctcaccacctcttctgccaaccagctgcttgggatgactgcgatcccgtgtgcttgtctgggtatcttcctgggaggtcttttggtgaagaagctcagcctgtctgccctgggggccattcggatggccatgctcgtcaacctggtgtccactgcttgctacgtctccttcctcttcctgggctgcgacactggccctgtggctggggttactgttccctatggaaacagcacagcacctggctcagccctggacccctactcgccctgcaataataactgtgaatgccaaaccgattccttcactccagtgtgtggggcagatggcatcacctacctgtctgcctgctttgctggctgcaacagcacgaatctcacgggctgtgcgtgcctcaccaccgtccctgctgagaacgcaaccgtggttcctggaaaatgccccagtcctgggtgccaagaggccttcctcactttcctctgtgtgatgtgtatctgcagcctgatcggtgccatggcacagacaccctcagtcatcatcctcatcaggacagtcagccctgaactcaagtcttacgctttgggagttctttttctcctccttcgtttgttgggacccagtaagattaaccaccattattgttaatgtgaaggccggcaaagacatcagatcctgtgacatcatcaacttttttgctggcctagcaagggcaatggggatacaatggggacatcacaggcttcatccctccacccctcatcttcggggctggcatcgactccacctgcctgttctggagcacgttctgtggggagcaaggcgcctgcgtcctctacgacaatgtggtctaccgatacctgtatgtcagcatcgccatcgcgctcaaatccttcgccttcatcctgtacaccaccacgtggcagtgcctgaggaaaaactataaacgctacatcaaaaaccacgagggcgggctgagcaccagtgagttctttgcctctactctgaccctagacaacctggggagggaccctgtgcccgcaaaccagacacataggacaaagtttatctataacctggaagaccatgagtggtgtgaaaacatggagtccgttttatagtgactaaaggagggctgaactctgtattagtaatccaagggtcatttttttcttaaaaaaagaaaaaaaggttccaaaaaaaaccaaaactcagtacacacacacaggcacagatgcacacacacgcagacagacacaccgactttgtcctttttctcagcatcagagccagacaggattcagaataaggagagaatgacatcgtgcggcagggtcctggaggccactcgcgcggctgggccacagagtctactttgaaggcacctcatggttttcaggatgctgacagctgcaagcaacaggcactgccaaattcagggaacagtggtggccagcttggaggatggacatttctggatacacatacacatacaaaacagaaaacattttttaaaagaagtttcctaaaataaaaaaaataaaaaaaaaaaacccacaagttgaaaacattgccagattaagcactagtgacacaccccgtgccaccctcttcctccaggtgggggtgggggcgggcgcacaagtcggaggggtggaagcaccactcctctctctgactttcgcaatatgggtcactgtgtagacgactcacccagtctgcatgtggttcaaggccccagagttctctcagtgatgctaatgggtgatccgtgctggagtttgtaattggcacctctcaccagctccatttccatgttcaagactgagggcctgagggggagccaggtggggggccagcacctcccagtggcgggcatccaccttcccccagccccacagagtgacctcaggaagcagtaggcctcgcctggctatgactgacccggctcagagctggtgagacccaacgcagtccaagtcatttgcttacatttgccaaaaacattttgccatttttaaaagaaaaaaatacaatccatatgaattttaaactgttgtatgtataatcctctaatactatttttaactacttctaaaatctgtgttaacccttcaagtcactaacacagttctctaggccggatttattatgctggttgcttttactttttttctccttttttaatgcaccaaaaatatgtgatacaagggatgcaattaacctattgtaattttcatcattttatcctcattcgaatattctacaaaaacaagaatatacaatgtgttacaagaagaaaaaaaaatgcttcaaaaagagaatgtatatgcagcctgcctttaaaagaatcacatttgagacaacaggggataatgtgatgaattgcaaatttgccttttagcttccttccccatgattcagtgatcactgtcacgggaaacccttttatattcatgcttgacattccaagaggcgttcttttcagcctgtggaggagacactcttagatgtgggtttgtgtgtatgggtgcaacacttccggggataggaaagaagaacagttccctaacacaagctgttaagaagtctgtgtagcatctctgataacgaatagacccacaagctcctggaagctgtcgtgtgtccaatgcgtgaaaatgtccgtgacattttcagtgttagtcttgaactaaggcccttgtctgtgtgttttgaaggtgggtaaacctcagagaatgaacctgttatgatttggggtaagaatcacgttggaaaacctctcgcaaccagcacactaggccttctacggccatttccgtaaggggacagagcttaggtaaaggcacacactcatacacacacaacaaagggccctgctaacttactcctcatgctgcttcagtgacctttgttcatgtcacattcctggcgctggaaaaaaaactcaaaggttgattggtttgctttttcaccttggacacatttgcattttacccacaaggcaaacaaaagaatcaggaagtaaaaaatggttgggagtgggacaggtatggtactgaatttttaatgaacattgtaaatgaagaggcttgaatgacagcccaaatctagagaaggcactcagcaagaccaaccaaaagaaaagctgtgtcgtggtatggggccaccgtgatcagctacctggggcaggatgcttctgagacaggcctttcaactgcttagtgttagtatgtccttgcttatgaaaatggggacactcatcagtacgttaactactaaaggggagatggttctccaaccactccataaaatatgtatgttctgttgttcctaaggctttgataatatcctgtacagattttggtttagttttgcaaatatattgctaataggtcactcttatagattattgcttggcccttcaaactcagtacacacacactgaggccctttgacctagtgttttatggaactatttgctttgagagaaaaaaaaaagaaagttttttaaactctttgcattttggattttttttcctaagattttaggatgaatgtgaaaaagatgttagaataacaggaagacaactccagggctgagttttatcagcaattgggtataaatttaaagaccgctgttgcaggatggctctgaattctgttgtgtcgtcttttaaaattttaattattctcatatagtaccgaacagaaaactcagtctagttttaatttgccttttgtgctctaaagaagcattgtacatacaacactagatccagcccctcgattatctgtttggtttcaagtgaatgaaaagatttcctggtaagatcattggatttacagaatacaaaaatgtacgggatggaataaacctagaaagtgaatgct

SEQ ID NO: 435472 - DNA, 4802 bp, Homo sapiens
  misc_feature (156)..(156): n is a, c, g, or t
  misc_feature (162)..(162): n is a, c, g, or t
ggcggcggcggcggcggcgaagaactgttccttccacctcttcagccccggcaggacgggggcggccgccgcgaacccggggcggggacagcacgcagcctcgaggcgcgcacccccgcccggcagcggccccgacacccggggcgagcgggaaancggcancggcggcggcggcggcggcggcgggggaaggatgcaggggaagaagccgggcggttcgtcgggcggcggccggagcggcgagctgcagggggacgaggcgcagaggaacaagaaaaagaaaaagaaggtgtcctgcttttccaacatcaagatcttcctggtgtccgagtgcgccctgatgctggcgcagggcacggtgggcgcctacctggtgagcgtcctgaccaccctggagcgtaggttcaacctgcagagcgctgacgtgggtgtgatcgctagcagcttcgagatcgggaacctggcgctcatcctcttcgtgagctacttcggggcacgcgggcaccggccgcgcctgatcggctgcggcggcatcgtcatggcgctgggcgcgctgctgtcggcgctgcccgagttcctgacccaccagtacaagtacgaggcgggcgagatccgctggggcgccgagggccgcgacgtctgcgcagccaacggctcgggcggcgacgaggggcccgaccccgacctcatctgccgcaaccggacggctaccaacatgatgtacttgctgctcattggggcccaggtgctcctgggcatcggtgctacccctgtgcagcccctgggcgtctcctacatcgacgaccacgtgcggaggaaggactcctcgctctatataggaatcctgttcacgatgctggtatttggaccagcctgcgggtttatcctgggctctttctgtaccaaaatctacgtggatgcggtcttcattgacacaagtaacctggacatcactccggacgacccccgctggatcggagcctggtggggtggctttctgctctgcggtgccttactcttcttctcttccctcttgatgtttgggtttccacagtccctgcccccgcactcagaccccgccatggaaagcgagcaggccatgctctccgaaagagaatacgagagacccaagcccagcaacggggtcctgaggcaccccctggagccagacagcagtgcctcctgtttccagcagctgagagtgatcccgaaggtcaccaagcacctgctctcaaaccctgtgttcacctgcatcatcctggccgcctgcatggagattgcagtggtggctggcttcgctgcctttttggggaagtacctggagcagcagtttaacctcaccacctcttctgccaaccagctgcttgggatgactgcgatcccgtgtgcttgtctgggtatcttcctgggaggtcttttggtgaagaagctcagcctgtctgccctgggggccattcggatggccatgctcgtcaacctggtgtccactgcttgctacgtctccttcctcttcctgggctgcgacactggccctgtggctggggttactgttccctatggaaacagcacagcacctggctcagccctggacccctactcgccctgcaataataactgtgaatgccaaaccgattccttcactccagtgtgtggggcagatggcatcacctacctgtctgcctgctttgctggctgcaacagcacgaatctcacgggctgtgcgtgcctcaccaccgtccctgctgagaacgcaaccgtggttcctggaaaatgccccagtcctgggtgccaagaggccttcctcactttcctctgtgtgatgtgtatctgcagcctgatcggtgccatggcacagacaccctcagtcatcatcctcatcaggacagtcagccctgaactcaagtcttacgctttgggagttctttttctcctccttcgtttgttgggcttcatccctccacccctcatcttcggggctggcatcgactccacctgcctgttctggagcacgttctgtggggagcaaggcgcctgcgtcctctacgacaatgtggtctaccgatacctgtatgtcagcatcgccatcgcgctcaaatccttcgccttcatcctgtacaccaccacgtggcagtgcctgaggaaaaactataaacgctacatcaaaaaccacgagggcgggctgagcaccacatcagagccagacaggattcagaataaggagagaatgacatcgtgcggcagggtcctggaggccactcgcgcggctgggccacagagtctactttgaaggcacctcatggttttcaggatgctgacagctgcaagcaacaggcactgccaaattcagggaacagtggtggccagcttggaggatggacatttctggatacacatacacatacaaaacagaaaacattttttaaaagaagtttcctaaaataaaaaaaataaaaaaaaaaaacccacaagttgaaaacattgccagattaagcactagtgacacaccccgtgccaccctcttcctccaggtgggggtgggggcgggcgcacaagtcggaggggtggaagcaccactcctctctctgactttcgcaatatgggtcactgtgtagacgactcacccagtctgcatgtggttcaaggccccagagttctctcagtgatgctaatgggtgatccgtgctggagtttgtaattggcacctctcaccagctccatttccatgttcaagactgagggcctgagggggagccaggtggggggccagcacctcccagtggcgggcatccaccttcccccagccccacagagtgacctcaggaagcagtaggcctcgcctggctatgactgacccggctcagagctggtgagacccaacgcagtccaagtcatttgcttacatttgccaaaaacattttgccatttttaaaagaaaaaaatacaatccatatgaattttaaactgttgtatgtataatcctctaatactatttttaactacttctaaaatctgtgttaacccttcaagtcactaacacagttctctaggccggatttattatgctggttgcttttactttttttctccttttttaatgcaccaaaaatatgtgatacaagggatgcaattaacctattgtaattttcatcattttatcctcattcgaatattctacaaaaacaagaatatacaatgtgttacaagaagaaaaaaaaatgcttcaaaaagagaatgtatatgcagcctgcctttaaaagaatcacatttgagacaacaggggataatgtgatgaattgcaaatttgccttttagcttccttccccatgattcagtgatcactgtcacgggaaacccttttatattcatgcttgacattccaagaggcgttcttttcagcctgtggaggagacactcttagatgtgggtttgtgtgtatgggtgcaacacttccggggataggaaagaagaacagttccctaacacaagctgttaagaagtctgtgtagcatctctgataacgaatagacccacaagctcctggaagctgtcgtgtgtccaatgcgtgaaaatgtccgtgacattttcagtgttagtcttgaactaaggcccttgtctgtgtgttttgaaggtgggtaaacctcagagaatgaacctgttatgatttggggtaagaatcacgttggaaaacctctcgcaaccagcacactaggccttctacggccatttccgtaaggggacagagcttaggtaaaggcacacactcatacacacacaacaaagggccctgctaacttactcctcatgctgcttcagtgacctttgttcatgtcacattcctggcgctggaaaaaaaactcaaaggttgattggtttgctttttcaccttggacacatttgcattttacccacaaggcaaacaaaagaatcaggaagtaaaaaatggttgggagtgggacaggtatggtactgaatttttaatgaacattgtaaatgaagaggcttgaatgacagcccaaatctagagaaggcactcagcaagaccaaccaaaagaaaagctgtgtcgtggtatggggccaccgtgatcagctacctggggcaggatgcttctgagacaggcctttcaactgcttagtgttagtatgtccttgcttatgaaaatggggacactcatcagtacgttaactactaaaggggagatggttctccaaccactccataaaatatgtatgttctgttgttcctaaggctttgataatatcctgtacagattttggtttagttttgcaaatatattgctaataggtcactcttatagattattgcttggcccttcaaactcagtacacacacactgaggccctttgacctagtgttttatggaactatttgctttgagagaaaaaaaaaagaaagttttttaaactctttgcattttggattttttttcctaagattttaggatgaatgtgaaaaagatgttagaataacaggaagacaactccagggctgagttttatcagcaattgggtataaatttaaagaccgctgttgcaggatggctctgaattctgttgtgtcgtcttttaaaattttaattattctcatatagtaccgaacagaaaactcagtctagttttaatttgccttttgtgctctaaagaagcattgtacatacaacactagatccagcccctcgattatctgtttggtttcaagtgaatgaaaagatttcctggtaagatcattggatttacagaatacaaaaatgtacgggatggaataaacctagaaagtgaatgct

SEQ ID NO: 435473 - DNA, 4927 bp, Homo sapiens
  misc_feature (156)..(156): n is a, c, g, or t
  misc_feature (162)..(162): n is a, c, g, or t
ggcggcggcggcggcggcgaagaactgttccttccacctcttcagccccggcaggacgggggcggccgccgcgaacccggggcggggacagcacgcagcctcgaggcgcgcacccccgcccggcagcggccccgacacccggggcgagcgggaaancggcancggcggcggcggcggcggcggcgggggaaggatgcaggggaagaagccgggcggttcgtcgggcggcggccggagcggcgagctgcagggggacgaggcgcagaggaacaagaaaaagaaaaagaaggtgtcctgcttttccaacatcaagatcttcctggtgtccgagtgcgccctgatgctggcgcagggcacggtgggcgcctacctggtgagcgtcctgaccaccctggagcgtaggttcaacctgcagagcgctgacgtgggtgtgatcgctagcagcttcgagatcgggaacctggcgctcatcctcttcgtgagctacttcggggcacgcgggcaccggccgcgcctgatcggctgcggcggcatcgtcatggcgctgggcgcgctgctgtcggcgctgcccgagttcctgacccaccagtacaagtacgaggcgggcgagatccgctggggcgccgagggccgcgacgtctgcgcagccaacggctcgggcggcgacgaggggcccgaccccgacctcatctgccgcaaccggacggctaccaacatgatgtacttgctgctcattggggcccaggtgctcctgggcatcggtgctacccctgtgcagcccctgggcgtctcctacatcgacgaccacgtgcggaggaaggactcctcgctctatataggaatcctgttcacgatgctggtatttggaccagcctgcgggtttatcctgggctctttctgtaccaaaatctacgtggatgcggtcttcattgacacaagtaacctggacatcactccggacgacccccgctggatcggagcctggtggggtggctttctgctctgcggtgccttactcttcttctcttccctcttgatgtttgggtttccacagtccctgcccccgcactcagaccccgccatggaaagcgagcaggccatgctctccgaaagagaatacgagagacccaagcccagcaacggggtcctgaggcaccccctggagccagacagcagtgcctcctgtttccagcagctgagagtgatcccgaaggtcaccaagcacctgctctcaaaccctgtgttcacctgcatcatcctggccgcctgcatggagattgcagtggtggctggcttcgctgcctttttggggaagtacctggagcagcagtttaacctcaccacctcttctgccaaccagctgcttgggatgactgcgatcccgtgtgcttgtctgggtatcttcctgggaggtcttttggtgaagaagctcagcctgtctgccctgggggccattcggatggccatgctcgtcaacctggtgtccactgcttgctacgtctccttcctcttcctgggctgcgacactggccctgtggctggggttactgttccctatggaaacagcacagcacctggctcagccctggacccctactcgccctgcaataataactgtgaatgccaaaccgattccttcactccagtgtgtggggcagatggcatcacctacctgtctgcctgctttgctggctgcaacagcacgaatctcacgggctgtgcgtgcctcaccaccgtccctgctgagaacgcaaccgtggttcctggaaaatgccccagtcctgggtgccaagaggccttcctcactttcctctgtgtgatgtgtatctgcagcctgatcggtgccatggcacagacaccctcagtcatcatcctcatcaggacagtcagccctgaactcaagtcttacgctttgggagttctttttctcctccttcgtttgttgggacccagtaagattaaccaccattattgttaatgtgaaggccggcaaagacatcagatcctgtgacatcatcaacttttttgctggcctagcaagggcaatggggatacaatggggacatcacaggcttcatccctccacccctcatcttcggggctggcatcgactccacctgcctgttctggagcacgttctgtggggagcaaggcgcctgcgtcctctacgacaatgtggtctaccgatacctgtatgtcagcatcgccatcgcgctcaaatccttcgccttcatcctgtacaccaccacgtggcagtgcctgaggaaaaactataaacgctacatcaaaaaccacgagggcgggctgagcaccacatcagagccagacaggattcagaataaggagagaatgacatcgtgcggcagggtcctggaggccactcgcgcggctgggccacagagtctactttgaaggcacctcatggttttcaggatgctgacagctgcaagcaacaggcactgccaaattcagggaacagtggtggccagcttggaggatggacatttctggatacacatacacatacaaaacagaaaacattttttaaaagaagtttcctaaaataaaaaaaataaaaaaaaaaaacccacaagttgaaaacattgccagattaagcactagtgacacaccccgtgccaccctcttcctccaggtgggggtgggggcgggcgcacaagtcggaggggtggaagcaccactcctctctctgactttcgcaatatgggtcactgtgtagacgactcacccagtctgcatgtggttcaaggccccagagttctctcagtgatgctaatgggtgatccgtgctggagtttgtaattggcacctctcaccagctccatttccatgttcaagactgagggcctgagggggagccaggtggggggccagcacctcccagtggcgggcatccaccttcccccagccccacagagtgacctcaggaagcagtaggcctcgcctggctatgactgacccggctcagagctggtgagacccaacgcagtccaagtcatttgcttacatttgccaaaaacattttgccatttttaaaagaaaaaaatacaatccatatgaattttaaactgttgtatgtataatcctctaatactatttttaactacttctaaaatctgtgttaacccttcaagtcactaacacagttctctaggccggatttattatgctggttgcttttactttttttctccttttttaatgcaccaaaaatatgtgatacaagggatgcaattaacctattgtaattttcatcattttatcctcattcgaatattctacaaaaacaagaatatacaatgtgttacaagaagaaaaaaaaatgcttcaaaaagagaatgtatatgcagcctgcctttaaaagaatcacatttgagacaacaggggataatgtgatgaattgcaaatttgccttttagcttccttccccatgattcagtgatcactgtcacgggaaacccttttatattcatgcttgacattccaagaggcgttcttttcagcctgtggaggagacactcttagatgtgggtttgtgtgtatgggtgcaacacttccggggataggaaagaagaacagttccctaacacaagctgttaagaagtctgtgtagcatctctgataacgaatagacccacaagctcctggaagctgtcgtgtgtccaatgcgtgaaaatgtccgtgacattttcagtgttagtcttgaactaaggcccttgtctgtgtgttttgaaggtgggtaaacctcagagaatgaacctgttatgatttggggtaagaatcacgttggaaaacctctcgcaaccagcacactaggccttctacggccatttccgtaaggggacagagcttaggtaaaggcacacactcatacacacacaacaaagggccctgctaacttactcctcatgctgcttcagtgacctttgttcatgtcacattcctggcgctggaaaaaaaactcaaaggttgattggtttgctttttcaccttggacacatttgcattttacccacaaggcaaacaaaagaatcaggaagtaaaaaatggttgggagtgggacaggtatggtactgaatttttaatgaacattgtaaatgaagaggcttgaatgacagcccaaatctagagaaggcactcagcaagaccaaccaaaagaaaagctgtgtcgtggtatggggccaccgtgatcagctacctggggcaggatgcttctgagacaggcctttcaactgcttagtgttagtatgtccttgcttatgaaaatggggacactcatcagtacgttaactactaaaggggagatggttctccaaccactccataaaatatgtatgttctgttgttcctaaggctttgataatatcctgtacagattttggtttagttttgcaaatatattgctaataggtcactcttatagattattgcttggcccttcaaactcagtacacacacactgaggccctttgacctagtgttttatggaactatttgctttgagagaaaaaaaaaagaaagttttttaaactctttgcattttggattttttttcctaagattttaggatgaatgtgaaaaagatgttagaataacaggaagacaactccagggctgagttttatcagcaattgggtataaatttaaagaccgctgttgcaggatggctctgaattctgttgtgtcgtcttttaaaattttaattattctcatatagtaccgaacagaaaactcagtctagttttaatttgccttttgtgctctaaagaagcattgtacatacaacactagatccagcccctcgattatctgtttggtttcaagtgaatgaaaagatttcctggtaagatcattggatttacagaatacaaaaatgtacgggatggaataaacctagaaagtgaatgct

SEQ ID NO: 435474 - DNA, 2609 bp, Homo sapiens
  misc_feature (156)..(156): n is a, c, g, or t
  misc_feature (162)..(162): n is a, c, g, or t
ggcggcggcggcggcggcgaagaactgttccttccacctcttcagccccggcaggacgggggcggccgccgcgaacccggggcggggacagcacgcagcctcgaggcgcgcacccccgcccggcagcggccccgacacccggggcgagcgggaaancggcancggcggcggcggcggcggcggcgggggaaggatgcaggggaagaagccgggcggttcgtcgggcggcggccggagcggcgagctgcagggggacgaggcgcagaggaacaagaaaaagaaaaagaaggtgtcctgcttttccaacatcaagatcttcctggtgtccgagtgcgccctgatgctggcgcagggcacggtgggcgcctacctggtgagcgtcctgaccaccctggagcgtaggttcaacctgcagagcgctgacgtgggtgtgatcgctagcagcttcgagatcgggaacctggcgctcatcctcttcgtgagctacttcggggcacgcgggcaccggccgcgcctgatcggctgcggcggcatcgtcatggcgctgggcgcgctgctgtcggcgctgcccgagttcctgacccaccagtacaagtacgaggcgggcgagatccgctggggcgccgagggccgcgacgtctgcgcagccaacggctcgggcggcgacgaggggcccgaccccgacctcatctgccgcaaccggacggctaccaacatgatgtacttgctgctcattggggcccaggtgctcctgggcatcggtgctacccctgtgcagcccctgggcgtctcctacatcgacgaccacgtgcggaggaaggactcctcgctctatataggaatcctgttcacgatgctggtatttggaccagcctgcgggtttatcctgggctctttctgtaccaaaatctacgtggatgcggtcttcattgacacaagtaacctggacatcactccggacgacccccgctggatcggagcctggtggggtggctttctgctctgcggtgccttactcttcttctcttccctcttgatgtttgggtttccacagtccctgcccccgcactcagaccccgccatggaaagcgagcaggccatgctctccgaaagagaatacgagagacccaagcccagcaacggggtcctgaggcaccccctggagccagacagcagtgcctcctgtttccagcagctgagagtgatcccgaaggtcaccaagcacctgctctcaaaccctgtgttcacctgcatcatcctggccgcctgcatggagattgcagtggtggctggcttcgctgcctttttggggaagtacctggagcagcagtttaacctcaccacctcttctgccaaccagctgcttgggatgactgcgatcccgtgtgcttgtctgggtatcttcctgggaggtcttttggtgaagaagctcagcctgtctgccctgggggccattcggatggccatgctcgtcaacctggtgtccactgcttgctacgtctccttcctcttcctgggctgcgacactggccctgtggctggggttactgttccctatggaaacagcacagcacctggctcagccctggacccctactcgccctgcaataataactgtgaatgccaaaccgattccttcactccagtgtgtggggcagatggcatcacctacctgtctgcctgctttgctggctgcaacagcacgaatctcacgggctgtgcgtgcctcaccaccgtccctgctgagaacgcaaccgtggttcctggaaaatgccccagtcctgggtgccaagaggccttcctcactttcctctgtgtgatgtgtatctgcagcctgatcggtgccatggcacagacaccctcagtcatcatcctcatcaggacagtcagccctgaactcaagtcttacgctttgggagttctttttctcctccttcgtttgttgggcacagagtaccaagacattgagactgagaaaacctgccccgaatcacattcaccttcagaagactcctttgtgagaagctgagggcctggccctcttcctcttcctggagagaacagccctccaccacccacagacctcgcgggcctcacttagcgtgctcctccctgtccgagaacccgagggtccccatgtggattatccagccagtgtgtggtcctttgaggccccaagcgcaggcctgtgatgaggaccaaagaggtgacttatggtcaggagtactccaaacagctctcagagtaggcatctttcctgggtctctaaagagtcatgctgacctggtgtgcaaattcccttccacccatccctctacctcctctggggatggcttgccgacatgctttagaaactcccctcttgggaatgctcctctgactgagggctccaacagctttaatgaaatcagccgagagggtaaaaaccaacctgttgcatagaatggaggggggaaaaagcacatactcaatagatttttgagtgtggtactctgtatttttgcagcatttattttccaaatgagcagtttagaaatatgtgatgtaaagtacatactgtacgtttgctgaaaattatattaaaagcactattttaattcttaaaatgt

SEQ ID NO: 435475 - DNA, 482 bp, Homo sapiens
aaaaccctattgtgcgcctccccttatgagctgtgaacctaaattgaggcagtgagtggggcattgagtgggatctcgtgtgagctgctttttggaagccaagagtgaatatacccggtgaaaatctacctctgaacagtaaacatttccttgtgcttctttcagcacaccttagcagtgctgccaagccagttttagcctaaattcagagaacgtctggcttctcactgtttttgtttagaccgatataaacacagggtagacaagaaaattaaggagggaatgtgatcagcctccggctttgagagaaacagaaccgctggtgtggaacaataggcttcgtagcctggcagccagtgttcccgaccgcaagtcatttctagagcccttgccctctctgttcagcggattcagattctcagcaaaatccccagtggtccagccttcttttctccactaagctgtgctctttccatttacag

SEQ ID NO: 435476 - DNA, 178 bp, Homo sapiens
cgagcaggccatgctctccgaaagagaatacgagagacccaagcccagcaacggggtcctgaggcaccccctggagccagacagcagtgcctcctgtttccagcagctgagaggtaaaggtggcctcatctgcctctgctcagaacagtagggggattgggatgggggtgatgagtga

SEQ ID NO: 435477 - DNA, 426 bp, Homo sapiens
atgctttctatgtgtaaagttagtcttcacagccatctggtgaagactgtagtattatcatcatccccattttgcagatgaggaaactaaggcaggagggcttaaataacttgctcagatttgtaccataataaaaaggcagaactgggacacaaactcatgcgctttgcctcctgagcatgtctttgagccacggagtcagacatatttgcctagcagtgctataagaaaagctaggcagagacaggaacaggggagcactggccaccagatccagaaccttaacattcttttcccggtaacaggcttcatccctccacccctcatcttcggggctggcatcgactccacctgcctgttctggagcacgttctgtggggagcaaggcgcctgcgtcctctacgacaatgtggtctaccgatacct

SEQ ID NO: 435478 - DNA, 342 bp, Homo sapiens
aaaaaaggttccaaaaaaaaccaaaactcagtacacacacacaggcacagatgcacacacacgcagacagacacaccgactttgtcctttttctcagcatcagagccagacaggattcagaataaggagagaatgacatcgtgcggcagggtcctggaggccactcgcgcggctgggccacagagtctactttgaaggcacctcatggttttcaggatgctgacagctgcaagcaacaggcactgccaaattcagggaacagtggtggccagcttggaggatggacatttctggatacacatacacatacaaaacagaaaacattttttaaaagaagtttcc

SEQ ID NO: 435479 - DNA, 4553 bp, Homo sapiens
tgcgtaagaacgttgggggcggaagtgacgagaggtggtagtcggatagttggcgggtggttgagtagaagcggtcgccatgtccgcggggagcgcgacacatcctggagctggcgggcgccgcagcaaatgggaccaaccagctccagccccacttctcttcctcccgccagcggccccaggtggggaggtcaccagcagtgggggaagtcctgggggcaccacagctgctccttcaggagccttggatgctgctgctgctgtggctgccaagattaatgccatgctcatggcaaaagggaagctgaaaccaactcagaatgcttctgagaagcttcaggctcctggcaaaggcctaactagcaataaaagcaaggatgacctggtggtagctgaagtagaaattaatgatgtgcctctcacatgtaggaacttgctgactcgaggacagactcaagacgagatcagccgacttagtggggctgcagtatcaactcgagggaggttcatgacaactgaggaaaaagccaaagtgggaccaggggatcgtccattatatcttcatgttcagggccagacacgggaattagtggacagagctgtaaaccggatcaaagaaattatcaccaatggagtggtaaaagctgccacaggaacaagtccaacttttaatggtgcaacagtaactgtctatcaccagccagcacccatcgctcagttgtctccagctgttagccagaagcctcccttccagtcagggatgcattatgttcaagataaattatttgtgggtctagaacatgctgtacccacttttaatgtcaaggagaaggtggaaggtccaggctgctcctatttgcagcacattcagattgaaacaggtgccaaagtcttcctgcggggcaaaggttcaggctgcattgagccagcatctggccgagaagcttttgaacctatgtatatttacatcagtcaccccaaaccagaaggcctggctgctgccaagaagctttgtgagaatcttttgcaaacagttcatgctgaatactctagatttgtgaatcagattaatactgctgtacctttaccaggctatacacaaccctctgctataagtagtgtccctcctcaaccaccatattatccatccaatggctatcagtctggttaccctgttgttccccctcctcagcagccagttcaacctccctacggagtaccaagcatagtgccaccagctgtttcattagcacctggagtcttgccggcattacctactggagtcccacctgtgccaacacaatacccgataacacaagtgcagcctccagctagcactggacagagtccgatgggtggtccttttattcctgctgctcctgtcaaaactgccttgcctgctggcccccagccccagccccagccccagcccccactcccaagtcagccccaggcacagaagagacgattcacagaggagctaccagatgaacgggaatctggactgcttggataccagcatggacccattcatatgactaatttaggtacaggcttctccagtcagaatgagattgaaggtgcaggatcgaagccagcaagttcctcaggcaaagagagagagagggacaggcagttgatgcctccaccagcctttccagtgactggaataaaaacagagtccgatgaaaggaatgggtctgggaccttaacagggagccatggtgagtgtgatatagctgggggaacaggggagtggctaagactggtctaaagctattagttttctcagccgggcgcagtggctcacgcctgtaatcccagcactttgggaggccgaggtgggcagatcacctaaggtcaggagttcaagaccagcttggccaacatagtgaaatcccatctctactaaaaatacaaaaactagcgggcatggtggtgggcgcctgtaattccagctactcagggggttgaggcaggagaatcgcttcaacctgggaggcagaggttgcagtgagccaagatcagaccactgccctccagcctgggcaatagagcaagactccatctcataaataaataaatacataaataaagctattaattttctaacctgatgttcattcaggtgtttaatccaacctctataatctgttggccagtgaaaatacttttgggctgggcacggtggctcacgcctgtaatcccagcactttgggaggccaaggtgggcggataacctgaggtcaggagtttgagaccagcgtggctaacacggtgaaaccccgtctctactaaaaatagaaaaattaagctgggcatggtggtgcatgcctgtaattccagcggcttggaaggctgaggcaggagaatcacttgaacttgggaggtggaggttgcagtgagccaagatcacaccactgcattccagcctgggcactagagtgagactctgtctcaaaaaaaaagaaagagaaagagaaaatagtttctaaaaaattgtatacagacaaccttttatttccaacaaacgtgtgccgagagagagagagagaaaatagttttaaaaaaattgtatacagacaaccttttgtttccaaccaacgtgtatctagaaaagagttagtcgacttattttatacatagcatcagtgaatagtaatgagtggtaggtcatttcaaaatcctgttgcctatattatgtgaataccaggaggtcatctgatacggacttaataaaggttgattttgctttatattgggagctgagccacacctccccttataactctattggtcagtaatggtcagtttgtggctgttaggaaaatgttgccttttagcattccagaactctaaatcctgtagaggtacatgggatattttattctttgcctgtactcataaaaatgaacagaagaaaatacgtttttttcttttcttaacttcttttcttttaactctttaaaaggtgaaatatcagccctcaagagactcacttgctaactttcctttttttctttttttttcttttttttgtgtttcttttttctttctctgttttcttacatggttctggtggattcacatttgctgatgctggtgctgtttttcgtgtgatcttcaacgtttttgggtgaccattgaccctgtgacctcaaaatggtgtccaactaaccacttaaaattaacatcttttttttaattaacgaatttatggtatttttttttttcccttggcggggatggggttggggttgttttttctctattctagattatccagccaagaagatgaaaactacagagaagggatttggcttggtggcttatgctgcagattcatctgatgaagaggaggaacatggaggtcataaaaatgcaagtagttttccacagggctggagtttgggataccaatatccttcatcacaaccacgagctaaacaacagatgccattctggatggctccctaggaaacagtggaacagagttttgaccctcagtgactcttcttagcaataatgcatgcatttgatttaacaagactctggggcctgtgctgggaaccatctggacctttgcagaagttagagattcagtgcccccctttcttaaaggggttccttaacaaccacaaaaatccttatttctgcagtggcatagaatctgttaaaatttaattagaatcacaaatttatctcagaagctttttaacagttggtgaaatgtgcttgtccaacaaagcatcctaacagggtcgttcccatacacatttgacctggtcagccttttccaggtgaatagccccagttctgacataaagaaagttttatttgtattttactactgtttggtcaattttgatatataactggttacaaacagagccttactatttattagtggggaaatgattttaagaccgtccttttcagtatttaattctgacagatctgcatccctgttttgttttggattatttctgttttggaaaatgctgtctcatttaaaactgttggatatagctggatcctggataggaaaatgaaattattttttcattgtgttttttaattggggtgatccaaagctggcaccttcaggcacattggtctcatagccattactgtttttattgcccttctaagatcctgtcttcagctgggtcagagaaaacttcttgactaaaactggtcagaactcatcacagaaatgaaatacagtggtctctctctcccagaactggttgcagctaaaacagagagatctgactgctggctataggattttggacttaatgactgaaattgcaaattgtcctttttcttggcattacagattttgccaaaataactttttgtatcaaatattgatgtgtgaaagtgaaggagctagtctgctgaaccaggaatagtttgagatattgaactgtcatttttgcacatttgaatactttgcaggctggctttgtataaacttatcctctggtttcctatatgttgtaaatatttagaccataatttcattataaataaatctataaatattc

SEQ ID NO: 435480 - DNA, 5213 bp, Homo sapiens
tgcgtaagaacgttgggggcggaagtgacgagaggtggtagtcggatagttggcgggtggttgagtagaagcggtcgccatgtccgcggggagcgcgacacatcctggagctggcgggcgccgcagcaaatgggaccaaccagctccagccccacttctcttcctcccgccagcggccccaggtggggaggtcaccagcagtgggggaagtcctgggggcaccacagctgctccttcaggagccttggatgctgctgctgctgtggctgccaagattaatgccatgctcatggcaaaagggaagctgaaaccaactcagaatgcttctgagaagcttcaggctcctggcaaaggcctaactagcaataaaagcaaggatgacctggtggtagctgaagtagaaattaatgatgtgcctctcacatgtaggaacttgctgactcgaggacagactcaagacgagatcagccgacttagtggggctgcagtatcaactcgagggaggttcatgacaactgaggaaaaagccaaagtgggaccaggggatcgtccattatatcttcatgttcagggccagacacgggaattagtggacagagctgtaaaccggatcaaagaaattatcaccaatggagtggtaaaagctgccacaggaacaagtccaacttttaatggtgcaacagtaactgtctatcaccagccagcacccatcgctcagttgtctccagctgttagccagaagcctcccttccagtcagggatgcattatgttcaagataaattatttgtgggtctagaacatgctgtacccacttttaatgtcaaggagaaggtggaaggtccaggctgctcctatttgcagcacattcagattgaaacaggtgccaaagtcttcctgcggggcaaaggttcaggctgcattgagccagcatctggccgagaagcttttgaacctatgtatatttacatcagtcaccccaaaccagaaggcctggctgctgccaagaagctttgtgagaatcttttgcaaacagttcatgctgaatactctagatttgtgaatcagattaatactgctgtacctttaccagcagccagttcaacctccctacggagtaccaagcatagtgccaccagctgtttcattagcacctggagtcttgccggcattacctactggagtcccacctgtgccaacacaatacccgataacacaagtgcagcctccagctagcactggacagagtccgatgggtggtccttttattcctgctgctcctgtcaaaactgccttgcctgctggcccccagccccagccccagccccagcccccactcccaagtcagccccaggcacagaagagacgattcacagaggagctaccagatgaacgggaatctggactgcttggataccaggttaaataaaataccctgttttcctatcttcaccttattcttctactatattctccctttaaaaaagataaattcacatcattctcccagtactaggatttctgctttctggaattcattttggttaggttttttatcctattcaacagactcttgaaagcctctgagagttcttactttcttatacatctcactcaaagctcttgatctaccagtatgtggtttgtatttaaaaccttggctttcagtggtgctctctcttttaccctccacctaaaaaagagagtgatatctccctccagtctccccacccctcaagactgctagaaaaggagtgattctgtacatgtaattgtaaagttagccactaaagttaaaaagattcttaatttgtagttttggtgcaattttatcagaagtacctttccattttgccagaatccttgaatcattctttaaaccaaagcatttttttatagtttctagctaggtttatagaaactagtggagctatgggcagtcagttaaaaacaggccatagatagcataatgaattataacacccctgtccaagtcctatagagaaaaaaaaaaatccctacttttgactacagttacacagcagatcccaaagagctttgtagtagtttaacgtactacaacttatcagaaagatgaggcacttgacagttacattaaggagctaaagtcaatacggcagttgtagatttgctaatgccactgtatttttctgctcatagcatggacccattcatatgactaatttaggtacaggcttctccagtcagaatgagattgaaggtgcaggatcgaagccagcaagttcctcaggcaaagagagagagagggacaggcagttgatgcctccaccagcctttccagtgactggaataaaaacagagtccgatgaaaggaatgggtctgggaccttaacagggagccatggtgagtgtgatatagctgggggaacaggggagtggctaagactggtctaaagctattagttttctcagccgggcgcagtggctcacgcctgtaatcccagcactttgggaggccgaggtgggcagatcacctaaggtcaggagttcaagaccagcttggccaacatagtgaaatcccatctctactaaaaatacaaaaactagcgggcatggtggtgggcgcctgtaattccagctactcagggggttgaggcaggagaatcgcttcaacctgggaggcagaggttgcagtgagccaagatcagaccactgccctccagcctgggcaatagagcaagactccatctcataaataaataaatacataaataaagctattaattttctaacctgatgttcattcaggtgtttaatccaacctctataatctgttggccagtgaaaatacttttgggctgggcacggtggctcacgcctgtaatcccagcactttgggaggccaaggtgggcggataacctgaggtcaggagtttgagaccagcgtggctaacacggtgaaaccccgtctctactaaaaatagaaaaattaagctgggcatggtggtgcatgcctgtaattccagcggcttggaaggctgaggcaggagaatcacttgaacttgggaggtggaggttgcagtgagccaagatcacaccactgcattccagcctgggcactagagtgagactctgtctcaaaaaaaaagaaagagaaagagaaaatagtttctaaaaaattgtatacagacaaccttttatttccaacaaacgtgtgccgagagagagagagagaaaatagttttaaaaaaattgtatacagacaaccttttgtttccaaccaacgtgtatctagaaaagagttagtcgacttattttatacatagcatcagtgaatagtaatgagtggtaggtcatttcaaaatcctgttgcctatattatgtgaataccaggaggtcatctgatacggacttaataaaggttgattttgctttatattgggagctgagccacacctccccttataactctattggtcagtaatggtcagtttgtggctgttaggaaaatgttgccttttagcattccagaactctaaatcctgtagaggtacatgggatattttattctttgcctgtactcataaaaatgaacagaagaaaatacgtttttttcttttcttaacttcttttcttttaactctttaaaaggtgaaatatcagccctcaagagactcacttgctaactttcctttttttctttttttttcttttttttgtgtttcttttttctttctctgttttcttacatggttctggtggattcacatttgctgatgctggtgctgtttttcgtgtgatcttcaacgtttttgggtgaccattgaccctgtgacctcaaaatggtgtccaactaaccacttaaaattaacatcttttttttaattaacgaatttatggtatttttttttttcccttggcggggatggggttggggttgttttttctctattctagattatccagccaagaagatgaaaactacagagaagggatttggcttggtggcttatgctgcagattcatctgatgaagaggaggaacatggaggtcataaaaatgcaagtagttttccacagggctggagtttgggataccaatatccttcatcacaaccacgagctaaacaacagatgccattctggatggctccctaggaaacagtggaacagagttttgaccctcagtgactcttcttagcaataatgcatgcatttgatttaacaagactctggggcctgtgctgggaaccatctggacctttgcagaagttagagattcagtgcccccctttcttaaaggggttccttaacaaccacaaaaatccttatttctgcagtggcatagaatctgttaaaatttaattagaatcacaaatttatctcagaagctttttaacagttggtgaaatgtgcttgtccaacaaagcatcctaacagggtcgttcccatacacatttgacctggtcagccttttccaggtgaatagccccagttctgacataaagaaagttttatttgtattttactactgtttggtcaattttgatatataactggttacaaacagagccttactatttattagtggggaaatgattttaagaccgtccttttcagtatttaattctgacagatctgcatccctgttttgttttggattatttctgttttggaaaatgctgtctcatttaaaactgttggatatagctggatcctggataggaaaatgaaattattttttcattgtgttttttaattggggtgatccaaagctggcaccttcaggcacattggtctcatagccattactgtttttattgcccttctaagatcctgtcttcagctgggtcagagaaaacttcttgactaaaactggtcagaactcatcacagaaatgaaatacagtggtctctctctcccagaactggttgcagctaaaacagagagatctgactgctggctataggattttggacttaatgactgaaattgcaaattgtcctttttcttggcattacagattttgccaaaataactttttgtatcaaatattgatgtgtgaaagtgaaggagctagtctgctgaaccaggaatagtttgagatattgaactgtcatttttgcacatttgaatactttgcaggctggctttgtataaacttatcctctggtttcctatatgttgtaaatatttagaccataatttcattataaataaatctataaatattc

SEQ ID NO: 435481 - DNA, 5253 bp, Homo sapiens
tgcgtaagaacgttgggggcggaagtgacgagaggtggtagtcggatagttggcgggtggttgagtagaagcggtcgccatgtccgcggggagcgcgacacatcctggagctggcgggcgccgcagcaaatgggaccaaccagctccagccccacttctcttcctcccgccagcggccccaggtggggaggtcaccagcagtgggggaagtcctgggggcaccacagctgctccttcaggagccttggatgctgctgctgctgtggctgccaagattaatgccatgctcatggcaaaagggaagctgaaaccaactcagaatgcttctgagaagcttcaggctcctggcaaaggcctaactagcaataaaagcaaggatgacctggtggtagctgaagtagaaattaatgatgtgcctctcacatgtaggaacttgctgactcgaggacagactcaagacgagatcagccgacttagtggggctgcagtatcaactcgagggaggttcatgacaactgaggaaaaagccaaagtgggaccaggggatcgtccattatatcttcatgttcagggccagacacgggaattagtggacagagctgtaaaccggatcaaagaaattatcaccaatggagtggtaaaagctgccacaggaacaagtccaacttttaatggtgcaacagtaactgtctatcaccagccagcacccatcgctcagttgtctccagctgttagccagaagcctcccttccagtcagggatgcattatgttcaagataaattatttgtgggtctagaacatgctgtacccacttttaatgtcaaggagaaggtggaaggtccaggctgctcctatttgcagcacattcagattgaaacaggtgccaaagtcttcctgcggggcaaaggttcaggctgcattgagccagcatctggccgagaagcttttgaacctatgtatatttacatcaggttcatgctgaatactctagatttgtgaatcagattaatactgctgtacctttaccaggctatacacaaccctctgctataagtagtgtccctcctcaaccaccatattatccatccaatggctatcagtctggttaccctgttgttccccctcctcagcagccagttcaacctccctacggagtaccaagcatagtgccaccagctgtttcattagcacctggagtcttgccggcattacctactggagtcccacctgtgccaacacaatacccgataacacaagtgcagcctccagctagcactggacagagtccgatgggtggtccttttattcctgctgctcctgtcaaaactgccttgcctgctggcccccagccccagccccagccccagcccccactcccaagtcagccccaggcacagaagagacgattcacagaggagctaccagatgaacgggaatctggactgcttggataccaggttaaataaaataccctgttttcctatcttcaccttattcttctactatattctccctttaaaaaagataaattcacatcattctcccagtactaggatttctgctttctggaattcattttggttaggttttttatcctattcaacagactcttgaaagcctctgagagttcttactttcttatacatctcactcaaagctcttgatctaccagtatgtggtttgtatttaaaaccttggctttcagtggtgctctctcttttaccctccacctaaaaaagagagtgatatctccctccagtctccccacccctcaagactgctagaaaaggagtgattctgtacatgtaattgtaaagttagccactaaagttaaaaagattcttaatttgtagttttggtgcaattttatcagaagtacctttccattttgccagaatccttgaatcattctttaaaccaaagcatttttttatagtttctagctaggtttatagaaactagtggagctatgggcagtcagttaaaaacaggccatagatagcataatgaattataacacccctgtccaagtcctatagagaaaaaaaaaaatccctacttttgactacagttacacagcagatcccaaagagctttgtagtagtttaacgtactacaacttatcagaaagatgaggcacttgacagttacattaaggagctaaagtcaatacggcagttgtagatttgctaatgccactgtatttttctgctcatagcatggacccattcatatgactaatttaggtacaggcttctccagtcagaatgagattgaaggtgcaggatcgaagccagcaagttcctcaggcaaagagagagagagggacaggcagttgatgcctccaccagcctttccagtgactggaataaaaacagagtccgatgaaaggaatgggtctgggaccttaacagggagccatggtgagtgtgatatagctgggggaacaggggagtggctaagactggtctaaagctattagttttctcagccgggcgcagtggctcacgcctgtaatcccagcactttgggaggccgaggtgggcagatcacctaaggtcaggagttcaagaccagcttggccaacatagtgaaatcccatctctactaaaaatacaaaaactagcgggcatggtggtgggcgcctgtaattccagctactcagggggttgaggcaggagaatcgcttcaacctgggaggcagaggttgcagtgagccaagatcagaccactgccctccagcctgggcaatagagcaagactccatctcataaataaataaatacataaataaagctattaattttctaacctgatgttcattcaggtgtttaatccaacctctataatctgttggccagtgaaaatacttttgggctgggcacggtggctcacgcctgtaatcccagcactttgggaggccaaggtgggcggataacctgaggtcaggagtttgagaccagcgtggctaacacggtgaaaccccgtctctactaaaaatagaaaaattaagctgggcatggtggtgcatgcctgtaattccagcggcttggaaggctgaggcaggagaatcacttgaacttgggaggtggaggttgcagtgagccaagatcacaccactgcattccagcctgggcactagagtgagactctgtctcaaaaaaaaagaaagagaaagagaaaatagtttctaaaaaattgtatacagacaaccttttatttccaacaaacgtgtgccgagagagagagagagaaaatagttttaaaaaaattgtatacagacaaccttttgtttccaaccaacgtgtatctagaaaagagttagtcgacttattttatacatagcatcagtgaatagtaatgagtggtaggtcatttcaaaatcctgttgcctatattatgtgaataccaggaggtcatctgatacggacttaataaaggttgattttgctttatattgggagctgagccacacctccccttataactctattggtcagtaatggtcagtttgtggctgttaggaaaatgttgccttttagcattccagaactctaaatcctgtagaggtacatgggatattttattctttgcctgtactcataaaaatgaacagaagaaaatacgtttttttcttttcttaacttcttttcttttaactctttaaaaggtgaaatatcagccctcaagagactcacttgctaactttcctttttttctttttttttcttttttttgtgtttcttttttctttctctgttttcttacatggttctggtggattcacatttgctgatgctggtgctgtttttcgtgtgatcttcaacgtttttgggtgaccattgaccctgtgacctcaaaatggtgtccaactaaccacttaaaattaacatcttttttttaattaacgaatttatggtatttttttttttcccttggcggggatggggttggggttgttttttctctattctagattatccagccaagaagatgaaaactacagagaagggatttggcttggtggcttatgctgcagattcatctgatgaagaggaggaacatggaggtcataaaaatgcaagtagttttccacagggctggagtttgggataccaatatccttcatcacaaccacgagctaaacaacagatgccattctggatggctccctaggaaacagtggaacagagttttgaccctcagtgactcttcttagcaataatgcatgcatttgatttaacaagactctggggcctgtgctgggaaccatctggacctttgcagaagttagagattcagtgcccccctttcttaaaggggttccttaacaaccacaaaaatccttatttctgcagtggcatagaatctgttaaaatttaattagaatcacaaatttatctcagaagctttttaacagttggtgaaatgtgcttgtccaacaaagcatcctaacagggtcgttcccatacacatttgacctggtcagccttttccaggtgaatagccccagttctgacataaagaaagttttatttgtattttactactgtttggtcaattttgatatataactggttacaaacagagccttactatttattagtggggaaatgattttaagaccgtccttttcagtatttaattctgacagatctgcatccctgttttgttttggattatttctgttttggaaaatgctgtctcatttaaaactgttggatatagctggatcctggataggaaaatgaaattattttttcattgtgttttttaattggggtgatccaaagctggcaccttcaggcacattggtctcatagccattactgtttttattgcccttctaagatcctgtcttcagctgggtcagagaaaacttcttgactaaaactggtcagaactcatcacagaaatgaaatacagtggtctctctctcccagaactggttgcagctaaaacagagagatctgactgctggctataggattttggacttaatgactgaaattgcaaattgtcctttttcttggcattacagattttgccaaaataactttttgtatcaaatattgatgtgtgaaagtgaaggagctagtctgctgaaccaggaatagtttgagatattgaactgtcatttttgcacatttgaatactttgcaggctggctttgtataaacttatcctctggtttcctatatgttgtaaatatttagaccataatttcattataaataaatctataaatattc

SEQ ID NO: 435482 - DNA, 4397 bp, Homo sapiens
tgcgtaagaacgttgggggcggaagtgacgagaggtggtagtcggatagttggcgggtggttgagtagaagcggtcgccatgtccgcggggagcgcgacacatcctggagctggcgggcgccgcagcaaatgggaccaaccagctccagccccacttctcttcctcccgccagcggccccaggtggggaggtcaccagcagtgggggaagtcctgggggcaccacagctgctccttcaggagccttggatgctgctgctgctgtggctgccaagattaatgccatgctcatggcaaaagggaagctgaaaccaactcagaatgcttctgagaagcttcaggctcctggcaaaggcctaactagcaataaaagcaaggatgacctggtggtagctgaagtagaaattaatgatgtgcctctcacatgtaggaacttgctgactcgaggacagactcaagacgagatcagccgacttagtggggctgcagtatcaactcgagggaggttcatgacaactgaggaaaaagccaaagtgggaccaggggatcgtccattatatcttcatgttcagggccagacacgggaattagtggacagagctgtaaaccggatcaaagaaattatcaccaatggagtggtaaaagctgccacaggaacaagtccaacttttaatggtgcaacagtaactgtctatcaccagccagcacccatcgctcagttgtctccagctgttagccagaagcctcccttccagtcagggatgcattatgttcaagataaattatttgtgggtctagaacatgctgtacccacttttaatgtcaaggagaaggtggaaggtccaggctgctcctatttgcagcacattcagattgaaacaggtgccaaagtcttcctgcggggcaaaggttcaggctgcattgagccagcatctggccgagaagcttttgaacctatgtatatttacatcagtcaccccaaaccagaaggcctggctgctgccaagaagctttgtgagaatcttttgcaaacagttcatgctgaatactctagatttgtgaatcagattaatactgctgtacctttaccagcagccagttcaacctccctacggagtaccaagcatagtgccaccagctgtttcattagcacctggagtcttgccggcattacctactggagtcccacctgtgccaacacaatacccgataacacaagtgcagcctccagctagcactggacagagtccgatgggtggtccttttattcctgctgctccttcccaagtcagccccaggcacagaagagacgattcacagaggagctaccagatgaacgggaatctggactgcttggataccagcatggacccattcatatgactaatttaggtacaggcttctccagtcagaatgagattgaaggtgcaggatcgaagccagcaagttcctcaggcaaagagagagagagggacaggcagttgatgcctccaccagcctttccagtgactggaataaaaacagagtccgatgaaaggaatgggtctgggaccttaacagggagccatggtgagtgtgatatagctgggggaacaggggagtggctaagactggtctaaagctattagttttctcagccgggcgcagtggctcacgcctgtaatcccagcactttgggaggccgaggtgggcagatcacctaaggtcaggagttcaagaccagcttggccaacatagtgaaatcccatctctactaaaaatacaaaaactagcgggcatggtggtgggcgcctgtaattccagctactcagggggttgaggcaggagaatcgcttcaacctgggaggcagaggttgcagtgagccaagatcagaccactgccctccagcctgggcaatagagcaagactccatctcataaataaataaatacataaataaagctattaattttctaacctgatgttcattcaggtgtttaatccaacctctataatctgttggccagtgaaaatacttttgggctgggcacggtggctcacgcctgtaatcccagcactttgggaggccaaggtgggcggataacctgaggtcaggagtttgagaccagcgtggctaacacggtgaaaccccgtctctactaaaaatagaaaaattaagctgggcatggtggtgcatgcctgtaattccagcggcttggaaggctgaggcaggagaatcacttgaacttgggaggtggaggttgcagtgagccaagatcacaccactgcattccagcctgggcactagagtgagactctgtctcaaaaaaaaagaaagagaaagagaaaatagtttctaaaaaattgtatacagacaaccttttatttccaacaaacgtgtgccgagagagagagagagaaaatagttttaaaaaaattgtatacagacaaccttttgtttccaaccaacgtgtatctagaaaagagttagtcgacttattttatacatagcatcagtgaatagtaatgagtggtaggtcatttcaaaatcctgttgcctatattatgtgaataccaggaggtcatctgatacggacttaataaaggttgattttgctttatattgggagctgagccacacctccccttataactctattggtcagtaatggtcagtttgtggctgttaggaaaatgttgccttttagcattccagaactctaaatcctgtagaggtacatgggatattttattctttgcctgtactcataaaaatgaacagaagaaaatacgtttttttcttttcttaacttcttttcttttaactctttaaaaggtgaaatatcagccctcaagagactcacttgctaactttcctttttttctttttttttcttttttttgtgtttcttttttctttctctgttttcttacatggttctggtggattcacatttgctgatgctggtgctgtttttcgtgtgatcttcaacgtttttgggtgaccattgaccctgtgacctcaaaatggtgtccaactaaccacttaaaattaacatcttttttttaattaacgaatttatggtatttttttttttcccttggcggggatggggttggggttgttttttctctattctagattatccagccaagaagatgaaaactacagagaagggatttggcttggtggcttatgctgcagattcatctgatgaagaggaggaacatggaggtcataaaaatgcaagtagttttccacagggctggagtttgggataccaatatccttcatcacaaccacgagctaaacaacagatgccattctggatggctccctaggaaacagtggaacagagttttgaccctcagtgactcttcttagcaataatgcatgcatttgatttaacaagactctggggcctgtgctgggaaccatctggacctttgcagaagttagagattcagtgcccccctttcttaaaggggttccttaacaaccacaaaaatccttatttctgcagtggcatagaatctgttaaaatttaattagaatcacaaatttatctcagaagctttttaacagttggtgaaatgtgcttgtccaacaaagcatcctaacagggtcgttcccatacacatttgacctggtcagccttttccaggtgaatagccccagttctgacataaagaaagttttatttgtattttactactgtttggtcaattttgatatataactggttacaaacagagccttactatttattagtggggaaatgattttaagaccgtccttttcagtatttaattctgacagatctgcatccctgttttgttttggattatttctgttttggaaaatgctgtctcatttaaaactgttggatatagctggatcctggataggaaaatgaaattattttttcattgtgttttttaattggggtgatccaaagctggcaccttcaggcacattggtctcatagccattactgtttttattgcccttctaagatcctgtcttcagctgggtcagagaaaacttcttgactaaaactggtcagaactcatcacagaaatgaaatacagtggtctctctctcccagaactggttgcagctaaaacagagagatctgactgctggctataggattttggacttaatgactgaaattgcaaattgtcctttttcttggcattacagattttgccaaaataactttttgtatcaaatattgatgtgtgaaagtgaaggagctagtctgctgaaccaggaatagtttgagatattgaactgtcatttttgcacatttgaatactttgcaggctggctttgtataaacttatcctctggtttcctatatgttgtaaatatttagaccataatttcattataaataaatctataaatattc

SEQ ID NO: 435483 - DNA, 3660 bp, Homo sapiens
tgcgtaagaacgttgggggcggaagtgacgagaggtggtagtcggatagttggcgggtggttgagtagaagcggtcgccatgtccgcggggagcgcgacacatcctggagctggcgggcgccgcagcaaatgggaccaaccagctccagccccacttctcttcctcccgccagcggccccaggtggggaggtcaccagcagtgggggaagtcctgggggcaccacagctgctccttcaggagccttggatgctgctgctgctgtggctgccaagattaatgccatgctcatggcaaaagggaagctgaaaccaactcagaatgcttctgagaagcttcaggctcctggcaaaggcctaactagcaataaaagcaaggatgacctggtggtagctgaagtagaaattaatgatgtgcctctcacatgtaggaacttgctgactcgaggacagactcaagacgagatcagccgacttagtggggctgcagtatcaactcgagggaggttcatgacaactgaggaaaaagccaaagtgggaccaggggatcgtccattatatcttcatgttcagggccagacacgggaattagtggacagagctgtaaaccggatcaaagaaattatcaccaatggagtggtaaaagctgccacaggaacaagtccaacttttaatggtgcaacagtaactgtctatcaccagccagcacccatcgctcagttgtctccagctgttagccagaagcctcccttccagtcagggatgcattatgttcaagataaattatttgtgggtctagaacatgctgtacccacttttaatgtcaaggagaaggtggaaggtccaggctgctcctatttgcagcacattcagattgaaacaggtgccaaagtcttcctgcggggcaaaggttcaggctgcattgagccagcatctggccgagaagcttttgaacctatgtatatttacatcagtcaccccaaaccagaaggcctggctgctgccaagaagctttgtgagaatcttttgcaaacagttcatgctgaatactctagatttgtgaatcagattaatactgctgtacctttaccagcagccagttcaacctccctacggagtaccaagcatagtgccaccagctgtttcattagcacctggagtcttgccggcattacctactggagtcccacctgtgccaacacaatacccgataacacaagtgcagcctccagctagcactggacagagtccgatgggtggtccttttattcctgctgctcctgtcaaaactgccttgcctgctggcccccagccccagccccagccccagcccccactcccaagtcagccccaggcacagaagagacgattcacagaggagctaccagatgaacgggaatctggactgcttggataccaggttaaataaaataccctgttttcctatcttcaccttattcttctactatattctccctttaaaaaagataaattcacatcattctcccagtactaggatttctgctttctggaattcattttggttaggttttttatcctattcaacagactcttgaaagcctctgagagttcttactttcttatacatctcactcaaagctcttgatctaccagtatgtggtttgtatttaaaaccttggctttcagtggtgctctctcttttaccctccacctaaaaaagagagtgatatctccctccagtctccccacccctcaagactgctagaaaaggagtgattctgtacatgtaattgtaaagttagccactaaagttaaaaagattcttaatttgtagttttggtgcaattttatcagaagtacctttccattttgccagaatccttgaatcattctttaaaccaaagcatttttttatagtttctagctaggtttatagaaactagtggagctatgggcagtcagttaaaaacaggccatagatagcataatgaattataacacccctgtccaagtcctatagagaaaaaaaaaaatccctacttttgactacagttacacagcagatcccaaagagctttgtagtagtttaacgtactacaacttatcagaaagatgaggcacttgacagttacattaaggagctaaagtcaatacggcagttgtagatttgctaatgccactgtatttttctgctcatagcatggacccattcatatgactaatttaggtacaggcttctccagtcagaatgagattgaaggtgcaggatcgaagccagcaagttcctcaggcaaagagagagagagggacaggcagttgatgcctccaccagcctttccagtgactggaataaaaacagagtccgatgaaaggaatgggtctgggaccttaacagggagccatgattatccagccaagaagatgaaaactacagagaagggatttggcttggtggcttatgctgcagattcatctgatgaagaggaggaacatggaggtcataaaaatgcaagtagttttccacagggctggagtttgggataccaatatccttcatcacaaccacgagctaaacaacagatgccattctggatggctccctaggaaacagtggaacagagttttgaccctcagtgactcttcttagcaataatgcatgcatttgatttaacaagactctggggcctgtgctgggaaccatctggacctttgcagaagttagagattcagtgcccccctttcttaaaggggttccttaacaaccacaaaaatccttatttctgcagtggcatagaatctgttaaaatttaattagaatcacaaatttatctcagaagctttttaacagttggtgaaatgtgcttgtccaacaaagcatcctaacagggtcgttcccatacacatttgacctggtcagccttttccaggtgaatagccccagttctgacataaagaaagttttatttgtattttactactgtttggtcaattttgatatataactggttacaaacagagccttactatttattagtggggaaatgattttaagaccgtccttttcagtatttaattctgacagatctgcatccctgttttgttttggattatttctgttttggaaaatgctgtctcatttaaaactgttggatatagctggatcctggataggaaaatgaaattattttttcattgtgttttttaattggggtgatccaaagctggcaccttcaggcacattggtctcatagccattactgtttttattgcccttctaagatcctgtcttcagctgggtcagagaaaacttcttgactaaaactggtcagaactcatcacagaaatgaaatacagtggtctctctctcccagaactggttgcagctaaaacagagagatctgactgctggctataggattttggacttaatgactgaaattgcaaattgtcctttttcttggcattacagattttgccaaaataactttttgtatcaaatattgatgtgtgaaagtgaaggagctagtctgctgaaccaggaatagtttgagatattgaactgtcatttttgcacatttgaatactttgcaggctggctttgtataaacttatcctctggtttcctatatgttgtaaatatttagaccataatttcattataaataaatctataaatattc

SEQ ID NO: 435484 - DNA, 5159 bp, Homo sapiens
tgcgtaagaacgttgggggcggaagtgacgagaggtggtagtcggatagttggcgggtggttgagtagaagcggtcgccatgtccgcggggagcgcgacacatcctggagctggcgggcgccgcagcaaatgggaccaaccagctccagccccacttctcttcctcccgccagcggccccaggtggggaggtcaccagcagtgggggaagtcctgggggcaccacagctgctccttcaggagccttggatgctgctgctgctgtggctgccaagattaatgccatgctcatggcaaaagggaagctgaaaccaactcagaatgcttctgagaagcttcaggctcctggcaaaggcctaactagcaataaaagcaaggatgacctggtggtagctgaagtagaaattaatgatgtgcctctcacatgtaggaacttgctgactcgaggacagactcaagacgagatcagccgacttagtggggctgcagtatcaactcgagggaggttcatgacaactgaggaaaaagccaaagtgggaccaggggatcgtccattatatcttcatgttcagggccagacacgggaattagtggacagagctgtaaaccggatcaaagaaattatcaccaatggagtggtaaaagctgccacaggaacaagtccaacttttaatggtgcaacagtaactgtctatcaccagccagcacccatcgctcagttgtctccagctgttagccagaagcctcccttccagtcagggatgcattatgttcaagataaattatttgtgggtctagaacatgctgtacccacttttaatgtcaaggagaaggtggaaggtccaggctgctcctatttgcagcacattcagattgaaacaggtgccaaagtcttcctgcggggcaaaggttcaggctgcattgagccagcatctggccgagaagcttttgaacctatgtatatttacatcagtcaccccaaaccagaaggcctggctgctgccaagaagctttgtgagaatcttttgcaaacagttcatgctgaatactctagatttgtgaatcagattaatactgctgtacctttaccagcagccagttcaacctccctacggagtaccaagcatagtgccaccagctgtttcattagcacctggagtcttgccggcattacctactggagtcccacctgtgccaacacaatacccgataacacaagtgcagcctccagctagcactggacagagtccgatgggtggtccttttattcctgctgctcctgtcaaaactgccttgcctgctggcccccagccccagccccagccccagcccccactcccaagtcagccccaggcacagaagagacgattcacagaggagctaccagatgaacgggaatctggactgcttggataccaggttaaataaaataccctgttttcctatcttcaccttattcttctactatattctccctttaaaaaagataaattcacatcattctcccagtactaggatttctgctttctggaattcattttggttaggttttttatcctattcaacagactcttgaaagcctctgagagttcttactttcttatacatctcactcaaagctcttgatctaccagtatgtggtttgtatttaaaaccttggctttcagtggtgctctctcttttaccctccacctaaaaaagagagtgatatctccctccagtctccccacccctcaagactgctagaaaaggagtgattctgtacatgtaattgtaaagttagccactaaagttaaaaagattcttaatttgtagttttggtgcaattttatcagaagtacctttccattttgccagaatccttgaatcattctttaaaccaaagcatttttttatagtttctagctaggtttatagaaactagtggagctatgggcagtcagttaaaaacaggccatagatagcataatgaattataacacccctgtccaagtcctatagagaaaaaaaaaaatccctacttttgactacagttacacagcagatcccaaagagctttgtagtagtttaacgtactacaacttatcagaaagatgaggcacttgacagttacattaaggagctaaagtcaatacggcagttgtagatttgctaatgccactgtatttttctgctcatagcatggacccattcatatgactaatttaggtacaggcttctccagtcagaatgagattgaaggtgcaggatcgaagccagcaagttcctcaggcaaagagagagagagggacaggcagttgatgcctccaccagcctttccagtgactggaataaaaacagagtccgatgaaaggaatgggtctgggaccttaacagggagccatggtgagtgtgatatagctgggggaacaggggagtggctaagactggtctaaagctattagttttctcagccgggcgcagtggctcacgcctgtaatcccagcactttgggaggccgaggtgggcagatcacctaaggtcaggagttcaagaccagcttggccaacatagtgaaatcccatctctactaaaaatacaaaaactagcgggcatggtggtgggcgcctgtaattccagctactcagggggttgaggcaggagaatcgcttcaacctgggaggcagaggttgcagtgagccaagatcagaccactgccctccagcctgggcaatagagcaagactccatctcataaataaataaatacataaataaagctattaattttctaacctgatgttcattcaggtgtttaatccaacctctataatctgttggccagtgaaaatacttttgggctgggcacggtggctcacgcctgtaatcccagcactttgggaggccaaggtgggcggataacctgaggtcaggagtttgagaccagcgtggctaacacggtgaaaccccgtctctactaaaaatagaaaaattaagctgggcatggtggtgcatgcctgtaattccagcggcttggaaggctgaggcaggagaatcacttgaacttgggaggtggaggttgcagtgagccaagatcacaccactgcattccagcctgggcactagagtgagactctgtctcaaaaaaaaagaaagagaaagagaaaatagtttctaaaaaattgtatacagacaaccttttatttccaacaaacgtgtgccgagagagagagagagaaaatagttttaaaaaaattgtatacagacaaccttttgtttccaaccaacgtgtatctagaaaagagttagtcgacttattttatacatagcatcagtgaatagtaatgagtggtaggtcatttcaaaatcctgttgcctatattatgtgaataccaggaggtcatctgatacggacttaataaaggttgattttgctttatattgggagctgagccacacctccccttataactctattggtcagtaatggtcagtttgtggctgttaggaaaatgttgccttttagcattccagaactctaaatcctgtagaggtacatgggatattttattctttgcctgtactcataaaaatgaacagaagaaaatacgtttttttcttttcttaacttcttttcttttaactctttaaaaggtgaaatatcagccctcaagagactcacttgctaactttcctttttttctttttttttcttttttttgtgtttcttttttctttctctgttttcttacatggttctggtggattcacatttgctgatgctggtgctgtttttcgtgtgatcttcaacgtttttgggtgaccattgaccctgtgacctcaaaatggtgtccaactaaccacttaaaattaacatcttttttttaattaacgaatttatggtatttttttttttcccttggcggggatggggttggggttgttttttctctattctagattatccagccaagaagatgaaaactacagagaagggatttggcttggtggcttatgctgcagattcatctgatgaagaggaggaacatggaggtcataaaaatgcaagtagttttccacagggctggagtttgggataccaatatccttcatcacaaccacgagctaaacaacagatgccattctggatggctccctaggaaacagtggaacagagttttgaccctcagtgactcttcttagcaataatgcatgcatttgatttaacaagactctggggcctgtgctgggaaccatctggacctttgcagaagttagagattcagtgcccccctttcttaaaggggttccttaacaaccacaaaaatccttatttctgcagtggcatagaatctgttatgtgcttgtccaacaaagcatcctaacagggtcgttcccatacacatttgacctggtcagccttttccaggtgaatagccccagttctgacataaagaaagttttatttgtattttactactgtttggtcaattttgatatataactggttacaaacagagccttactatttattagtggggaaatgattttaagaccgtccttttcagtatttaattctgacagatctgcatccctgttttgttttggattatttctgttttggaaaatgctgtctcatttaaaactgttggatatagctggatcctggataggaaaatgaaattattttttcattgtgttttttaattggggtgatccaaagctggcaccttcaggcacattggtctcatagccattactgtttttattgcccttctaagatcctgtcttcagctgggtcagagaaaacttcttgactaaaactggtcagaactcatcacagaaatgaaatacagtggtctctctctcccagaactggttgcagctaaaacagagagatctgactgctggctataggattttggacttaatgactgaaattgcaaattgtcctttttcttggcattacagattttgccaaaataactttttgtatcaaatattgatgtgtgaaagtgaaggagctagtctgctgaaccaggaatagtttgagatattgaactgtcatttttgcacatttgaatactttgcaggctggctttgtataaacttatcctctggtttcctatatgttgtaaatatttagaccataatttcattataaataaatctataaatattc

SEQ ID NO: 435485 - DNA, 2844 bp, Homo sapiens
tgcgtaagaacgttgggggcggaagtgacgagaggtggtagtcggatagttggcgggtggttgagtagaagcggtcgccatgtccgcggggagcgcgacacatcctggagctggcgggcgccgcagcaaatgggaccaaccagctccagccccacttctcttcctcccgccagcggccccaggtggggaggtcaccagcagtgggggaagtcctgggggcaccacagctgctccttcaggagccttggatgctgctgctgctgtggctgccaagattaatgccatgctcatggcaaaagggaagctgaaaccaactcagaatgcttctgagaagcttcaggctcctggcaaaggcctaactagcaataaaagcaaggatgacctggtggtagctgaagtagaaattaatgatgtgcctctcacatgtaggaacttgctgactcgaggacagactcaagacgagatcagccgacttagtggggctgcagtatcaactcgagggaggttcatgacaactgaggaaaaagccaaagtgggaccaggggatcgtccattatatcttcatgttcagggccagacacgggaattagtggacagagctgtaaaccggatcaaagaaattatcaccaatggagtggtaaaagctgccacaggaacaagtccaacttttaatggtgcaacagtaactgtctatcaccagccagcacccatcgctcagttgtctccagctgttagccagaagcctcccttccagtcagggatgcattatgttcaagataaattatttgtgggtctagaacatgctgtacccacttttaatgtcaaggagaaggtggaaggtccaggctgctcctatttgcagcacattcagattgaaacaggtgccaaagtcttcctgcggggcaaaggttcaggctgcattgagccagcatctggccgagaagcttttgaacctatgtatatttacatcagtcaccccaaaccagaaggcctggctgctgccaagaagctttgtgagaatcttttgcaaacagttcatgctgaatactctagatttgtgaatcagattaatactgctgtacctttaccagcagccagttcaacctccctacggagtaccaagcatagtgccaccagctgtttcattagcacctggagtcttgccggcattacctactggagtcccacctgtgccaacacaatacccgataacacaagtgcagcctccagctagcactggacagagtccgatgggtggtccttttattcctgctgctccttcccaagtcagccccaggcacagaagagacgattcacagaggagctaccagatgaacgggaatctggactgcttggataccagcatggacccattcatatgactaatttaggtacaggcttctccagtcagaatgagattgaaggtgcaggatcgaagccagcaagttcctcaggcaaagagagagagagggacaggcagttgatgcctccaccagcctttccagtgactggaataaaaacagagtccgatgaaaggaatgggtctgggaccttaacagggagccatgattatccagccaagaagatgaaaactacagagaagggatttggcttggtggcttatgctgcagattcatctgatgaagaggaggaacatggaggtcataaaaatgcaagtagttttccacagggctggagtttgggataccaatatccttcatcacaaccacgagctaaacaacagatgccattctggatggctccctaggaaacagtggaacagagttttgaccctcagtgactcttcttagcaataatgcatgcatttgatttaacaagactctggggcctgtgctgggaaccatctggacctttgcagaagttagagattcagtgcccccctttcttaaaggggttccttaacaaccacaaaaatccttatttctgcagtggcatagaatctgttaaaatttaattagaatcacaaatttatctcagaagctttttaacagttggtgaaatgtgcttgtccaacaaagcatcctaacagggtcgttcccatacacatttgacctggtcagccttttccaggtgaatagccccagttctgacataaagaaagttttatttgtattttactactgtttggtcaattttgatatataactggttacaaacagagccttactatttattagtggggaaatgattttaagaccgtccttttcagtatttaattctgacagatctgcatccctgttttgttttggattatttctgttttggaaaatgctgtctcatttaaaactgttggatatagctggatcctggataggaaaatgaaattattttttcattgtgttttttaattggggtgatccaaagctggcaccttcaggcacattggtctcatagccattactgtttttattgcccttctaagatcctgtcttcagctgggtcagagaaaacttcttgactaaaactggtcagaactcatcacagaaatgaaatacagtggtctctctctcccagaactggttgcagctaaaacagagagatctgactgctggctataggattttggacttaatgactgaaattgcaaattgtcctttttcttggcattacagattttgccaaaataactttttgtatcaaatattgatgtgtgaaagtgaaggagctagtctgctgaaccaggaatagtttgagatattgaactgtcatttttgcacatttgaatactttgcaggctggctttgtataaacttatcctctggtttcctatatgttgtaaatatttagaccataatttcattataaataaatctataaatattc

SEQ ID NO: 435486 - DNA, 2871 bp, Homo sapiens
tgcgtaagaacgttgggggcggaagtgacgagaggtggtagtcggatagttggcgggtggttgagtagaagcggtcgccatgtccgcggggagcgcgacacatcctggagctggcgggcgccgcagcaaatgggaccaaccagctccagccccacttctcttcctcccgccagcggccccaggtggggaggtcaccagcagtgggggaagtcctgggggcaccacagctgctccttcaggagccttggatgctgctgctgctgtggctgccaagattaatgccatgctcatggcaaaagggaagctgaaaccaactcagaatgcttctgagaagcttcaggctcctggcaaaggcctaactagcaataaaagcaaggatgacctggtggtagctgaagtagaaattaatgatgtgcctctcacatgtaggaacttgctgactcgaggacagactcaagacgagatcagccgacttagtggggctgcagtatcaactcgagggaggttcatgacaactgaggaaaaagccaaagtgggaccaggggatcgtccattatatcttcatgttcagggccagacacgggaattagtggacagagctgtaaaccggatcaaagaaattatcaccaatggagtggtaaaagctgccacaggaacaagtccaacttttaatggtgcaacagtaactgtctatcaccagccagcacccatcgctcagttgtctccagctgttagccagaagcctcccttccagtcagggatgcattatgttcaagataaattatttgtgggtctagaacatgctgtacccacttttaatgtcaaggagaaggtggaaggtccaggctgctcctatttgcagcacattcagattgaaacaggtgccaaagtcttcctgcggggcaaaggttcaggctgcattgagccagcatctggccgagaagcttttgaacctatgtatatttacatcagtcaccccaaaccagaaggcctggctgctgccaagaagctttgtgagaatcttttgcaaacagttcatgctgaatactctagatttgtgaatcagattaatactgctgtacctttaccagcagccagttcaacctccctacggagtaccaagcatagtgccaccagctgtttcattagcacctggagtcttgccggcattacctactggagtcccacctgtgccaacacaatacccgataacacaagtgcagcctccagctagcactggacagagtccgatgggtggtccttttattcctgctgctcctgtcaaaactgccttgcctgctggcccccagccccagccccagccccagcccccactcccaagtcagccccaggcacagaagagacgattcacagaggagctaccagatgaacgggaatctggactgcttggataccaggtacaggcttctccagtcagaatgagattgaaggtgcaggatcgaagccagcaagttcctcaggcaaagagagagagagggacaggcagttgatgcctccaccagcctttccagtgactggaataaaaacagagtccgatgaaaggaatgggtctgggaccttaacagggagccatgattatccagccaagaagatgaaaactacagagaagggatttggcttggtggcttatgctgcagattcatctgatgaagaggaggaacatggaggtcataaaaatgcaagtagttttccacagggctggagtttgggataccaatatccttcatcacaaccacgagctaaacaacagatgccattctggatggctccctaggaaacagtggaacagagttttgaccctcagtgactcttcttagcaataatgcatgcatttgatttaacaagactctggggcctgtgctgggaaccatctggacctttgcagaagttagagattcagtgcccccctttcttaaaggggttccttaacaaccacaaaaatccttatttctgcagtggcatagaatctgttaaaatttaattagaatcacaaatttatctcagaagctttttaacagttggtgaaatgtgcttgtccaacaaagcatcctaacagggtcgttcccatacacatttgacctggtcagccttttccaggtgaatagccccagttctgacataaagaaagttttatttgtattttactactgtttggtcaattttgatatataactggttacaaacagagccttactatttattagtggggaaatgattttaagaccgtccttttcagtatttaattctgacagatctgcatccctgttttgttttggattatttctgttttggaaaatgctgtctcatttaaaactgttggatatagctggatcctggataggaaaatgaaattattttttcattgtgttttttaattggggtgatccaaagctggcaccttcaggcacattggtctcatagccattactgtttttattgcccttctaagatcctgtcttcagctgggtcagagaaaacttcttgactaaaactggtcagaactcatcacagaaatgaaatacagtggtctctctctcccagaactggttgcagctaaaacagagagatctgactgctggctataggattttggacttaatgactgaaattgcaaattgtcctttttcttggcattacagattttgccaaaataactttttgtatcaaatattgatgtgtgaaagtgaaggagctagtctgctgaaccaggaatagtttgagatattgaactgtcatttttgcacatttgaatactttgcaggctggctttgtataaacttatcctctggtttcctatatgttgtaaatatttagaccataatttcattataaataaatctataaatattc

SEQ ID NO: 435487 - DNA, 5132 bp, Homo sapiens
cgggctgcaggaattggcacgaggagcgcgacacatcctggagctggcgggcgccgcagcaaatgggaccaaccagctccagccccacttctcttcctcccgccagcggccccaggtggggaggtcaccagcagtgggggaagtcctgggggcaccacagctgctccttcaggagccttggatgctgctgctgctgtggctgccaagattaatgccatgctcatggcaaaagggaagctgaaaccaactcagaatgcttctgagaagcttcaggctcctggcaaaggcctaactagcaataaaagcaaggatgacctggtggtagctgaagtagaaattaatgatgtgcctctcacatgtaggaacttgctgactcgaggacagactcaagacgagatcagccgacttagtggggctgcagtatcaactcgagggaggttcatgacaactgaggaaaaagccaaagtgggaccaggggatcgtccattatatcttcatgttcagggccagacacgggaattagtggacagagctgtaaaccggatcaaagaaattatcaccaatggagtggttcaccagccagcacccatcgctcagttgtctccagctgttagccagaagcctcccttccagtcagggatgcattatgttcaagataaattatttgtgggtctagaacatgctgtacccacttttaatgtcaaggagaaggtggaaggtccaggctgctcctatttgcagcacattcagattgaaacaggtgccaaagtcttcctgcggggcaaaggttcaggctgcattgagccagcatctggccgagaagcttttgaacctatgtatatttacatcaggttcatgctgaatactctagatttgtgaatcagattaatactgctgtacctttaccaggctatacacaaccctctgctataagtagtgtccctcctcaaccaccatattatccatccaatggctatcagtctggttaccctgttgttccccctcctcagcagccagttcaacctccctacggagtaccaagcatagtgccaccagctgtttcattagcacctggagtcttgccggcattacctactggagtcccacctgtgccaacacaatacccgataacacaagtgcagcctccagctagcactggacagagtccgatgggtggtccttttattcctgctgctcctgtcaaaactgccttgcctgctggcccccagccccagccccagccccagcccccactcccaagtcagccccaggcacagaagagacgattcacagaggagctaccagatgaacgggaatctggactgcttggataccaggttaaataaaataccctgttttcctatcttcaccttattcttctactatattctccctttaaaaaagataaattcacatcattctcccagtactaggatttctgctttctggaattcattttggttaggttttttatcctattcaacagactcttgaaagcctctgagagttcttactttcttatacatctcactcaaagctcttgatctaccagtatgtggtttgtatttaaaaccttggctttcagtggtgctctctcttttaccctccacctaaaaaagagagtgatatctccctccagtctccccacccctcaagactgctagaaaaggagtgattctgtacatgtaattgtaaagttagccactaaagttaaaaagattcttaatttgtagttttggtgcaattttatcagaagtacctttccattttgccagaatccttgaatcattctttaaaccaaagcatttttttatagtttctagctaggtttatagaaactagtggagctatgggcagtcagttaaaaacaggccatagatagcataatgaattataacacccctgtccaagtcctatagagaaaaaaaaaaatccctacttttgactacagttacacagcagatcccaaagagctttgtagtagtttaacgtactacaacttatcagaaagatgaggcacttgacagttacattaaggagctaaagtcaatacggcagttgtagatttgctaatgccactgtatttttctgctcatagcatggacccattcatatgactaatttaggtacaggcttctccagtcagaatgagattgaaggtgcaggatcgaagccagcaagttcctcaggcaaagagagagagagggacaggcagttgatgcctccaccagcctttccagtgactggaataaaaacagagtccgatgaaaggaatgggtctgggaccttaacagggagccatggtgagtgtgatatagctgggggaacaggggagtggctaagactggtctaaagctattagttttctcagccgggcgcagtggctcacgcctgtaatcccagcactttgggaggccgaggtgggcagatcacctaaggtcaggagttcaagaccagcttggccaacatagtgaaatcccatctctactaaaaatacaaaaactagcgggcatggtggtgggcgcctgtaattccagctactcagggggttgaggcaggagaatcgcttcaacctgggaggcagaggttgcagtgagccaagatcagaccactgccctccagcctgggcaatagagcaagactccatctcataaataaataaatacataaataaagctattaattttctaacctgatgttcattcaggtgtttaatccaacctctataatctgttggccagtgaaaatacttttgggctgggcacggtggctcacgcctgtaatcccagcactttgggaggccaaggtgggcggataacctgaggtcaggagtttgagaccagcgtggctaacacggtgaaaccccgtctctactaaaaatagaaaaattaagctgggcatggtggtgcatgcctgtaattccagcggcttggaaggctgaggcaggagaatcacttgaacttgggaggtggaggttgcagtgagccaagatcacaccactgcattccagcctgggcactagagtgagactctgtctcaaaaaaaaagaaagagaaagagaaaatagtttctaaaaaattgtatacagacaaccttttatttccaacaaacgtgtgccgagagagagagagagaaaatagttttaaaaaaattgtatacagacaaccttttgtttccaaccaacgtgtatctagaaaagagttagtcgacttattttatacatagcatcagtgaatagtaatgagtggtaggtcatttcaaaatcctgttgcctatattatgtgaataccaggaggtcatctgatacggacttaataaaggttgattttgctttatattgggagctgagccacacctccccttataactctattggtcagtaatggtcagtttgtggctgttaggaaaatgttgccttttagcattccagaactctaaatcctgtagaggtacatgggatattttattctttgcctgtactcataaaaatgaacagaagaaaatacgtttttttcttttcttaacttcttttcttttaactctttaaaaggtgaaatatcagccctcaagagactcacttgctaactttcctttttttctttttttttcttttttttgtgtttcttttttctttctctgttttcttacatggttctggtggattcacatttgctgatgctggtgctgtttttcgtgtgatcttcaacgtttttgggtgaccattgaccctgtgacctcaaaatggtgtccaactaaccacttaaaattaacatcttttttttaattaacgaatttatggtatttttttttttcccttggcggggatggggttggggttgttttttctctattctagattatccagccaagaagatgaaaactacagagaagggatttggcttggtggcttatgctgcagattcatctgatgaagaggaggaacatggaggtcataaaaatgcaagtagttttccacagggctggagtttgggataccaatatccttcatcacaaccacgagctaaacaacagatgccattctggatggctccctaggaaacagtggaacagagttttgaccctcagtgactcttcttagcaataatgcatgcatttgatttaacaagactctggggcctgtgctgggaaccatctggacctttgcagaagttagagattcagtgcccccctttcttaaaggggttccttaacaaccacaaaaatccttatttctgcagtggcatagaatctgttaaaatttaattagaatcacaaatttatctcagaagctttttaacagttggtgaaatgtgcttgtccaacaaagcatcctaacagggtcgttcccatacacatttgacctggtcagccttttccaggtgaatagccccagttctgacataaagaaagttttatttgtattttactactgtttggtcaattttgatatataactggttacaaacagagccttactatttattagtggggaaatgattttaagaccgtccttttcagtatttaattctgacagatctgcatccctgttttgttttggattatttctgttttggaaaatgctgtctcatttaaaactgttggatatagctggatcctggataggaaaatgaaattattttttcattgtgttttttaattggggtgatccaaagctggcaccttcaggcacattggtctcatagccattactgtttttattgcccttctaagatcctgtcttcagctgggtcagagaaaacttcttgactaaaactggtcagaactcatcacagaaatgaaatacagtggtctctctctcccagaactggttgcagctaaaacagagagatctgactgctggctataggattttggacttaatgactgaaattgcaaattgtcctttttcttggcattacagattttgccaaaataactttttgtatcaaatattgatgtgtgaaagtgaaggagctagtctgctgaaccaggaatagtttgagatattgaactgtcatttttgcacatttgaatactttgcaggctggctttgtataaacttatcctctggtttcctatatgttgtaaatatttagaccataatttcattataaataaatctataaatattc

SEQ ID NO: 435488 - DNA, 5036 bp, Homo sapiens
tgcgtaagaacgttgggggcggaagtgacgagaggtggtagtcggatagttggcgggtggttgagtagaagcggtcgccatgtccgcggggagcgcgacacatcctggagctggcgggcgccgcagcaaatgggaccaaccagctccagccccacttctcttcctcccgccagcggccccaggtggggaggtcaccagcagtgggggaagtcctgggggcaccacagctgctccttcaggagccttggatgctgctgctgctgtggctgccaagattaatgccatgctcatggcaaaagggaagctgaaaccaactcagaatgcttctgagaagcttcaggctcctggcaaaggcctaactagcaataaaagcaaggatgacctggtggtagctgaagtagaaattaatgatgtgcctctcacatgtaggaacttgctgactcgaggacagactcaagacgagatcagccgacttagtggggctgcagtatcaactcgagggaggttcatgacaactgaggaaaaagccaaagtgggaccaggatgcattatgttcaagataaattatttgtgggtctagaacatgctgtacccacttttaatgtcaaggagaaggtggaaggtccaggctgctcctatttgcagcacattcagattgaaacaggtgccaaagtcttcctgcggggcaaaggttcaggctgcattgagccagcatctggccgagaagcttttgaacctatgtatatttacatcaggttcatgctgaatactctagatttgtgaatcagattaatactgctgtacctttaccaggctatacacaaccctctgctataagtagtgtccctcctcaaccaccatattatccatccaatggctatcagtctggttaccctgttgttccccctcctcagcagccagttcaacctccctacggagtaccaagcatagtgccaccagctgtttcattagcacctggagtcttgccggcattacctactggagtcccacctgtgccaacacaatacccgataacacaagtgcagcctccagctagcactggacagagtccgatgggtggtccttttattcctgctgctcctgtcaaaactgccttgcctgctggcccccagccccagccccagccccagcccccactcccaagtcagccccaggcacagaagagacgattcacagaggagctaccagatgaacgggaatctggactgcttggataccaggttaaataaaataccctgttttcctatcttcaccttattcttctactatattctccctttaaaaaagataaattcacatcattctcccagtactaggatttctgctttctggaattcattttggttaggttttttatcctattcaacagactcttgaaagcctctgagagttcttactttcttatacatctcactcaaagctcttgatctaccagtatgtggtttgtatttaaaaccttggctttcagtggtgctctctcttttaccctccacctaaaaaagagagtgatatctccctccagtctccccacccctcaagactgctagaaaaggagtgattctgtacatgtaattgtaaagttagccactaaagttaaaaagattcttaatttgtagttttggtgcaattttatcagaagtacctttccattttgccagaatccttgaatcattctttaaaccaaagcatttttttatagtttctagctaggtttatagaaactagtggagctatgggcagtcagttaaaaacaggccatagatagcataatgaattataacacccctgtccaagtcctatagagaaaaaaaaaaatccctacttttgactacagttacacagcagatcccaaagagctttgtagtagtttaacgtactacaacttatcagaaagatgaggcacttgacagttacattaaggagctaaagtcaatacggcagttgtagatttgctaatgccactgtatttttctgctcatagcatggacccattcatatgactaatttaggtacaggcttctccagtcagaatgagattgaaggtgcaggatcgaagccagcaagttcctcaggcaaagagagagagagggacaggcagttgatgcctccaccagcctttccagtgactggaataaaaacagagtccgatgaaaggaatgggtctgggaccttaacagggagccatggtgagtgtgatatagctgggggaacaggggagtggctaagactggtctaaagctattagttttctcagccgggcgcagtggctcacgcctgtaatcccagcactttgggaggccgaggtgggcagatcacctaaggtcaggagttcaagaccagcttggccaacatagtgaaatcccatctctactaaaaatacaaaaactagcgggcatggtggtgggcgcctgtaattccagctactcagggggttgaggcaggagaatcgcttcaacctgggaggcagaggttgcagtgagccaagatcagaccactgccctccagcctgggcaatagagcaagactccatctcataaataaataaatacataaataaagctattaattttctaacctgatgttcattcaggtgtttaatccaacctctataatctgttggccagtgaaaatacttttgggctgggcacggtggctcacgcctgtaatcccagcactttgggaggccaaggtgggcggataacctgaggtcaggagtttgagaccagcgtggctaacacggtgaaaccccgtctctactaaaaatagaaaaattaagctgggcatggtggtgcatgcctgtaattccagcggcttggaaggctgaggcaggagaatcacttgaacttgggaggtggaggttgcagtgagccaagatcacaccactgcattccagcctgggcactagagtgagactctgtctcaaaaaaaaagaaagagaaagagaaaatagtttctaaaaaattgtatacagacaaccttttatttccaacaaacgtgtgccgagagagagagagagaaaatagttttaaaaaaattgtatacagacaaccttttgtttccaaccaacgtgtatctagaaaagagttagtcgacttattttatacatagcatcagtgaatagtaatgagtggtaggtcatttcaaaatcctgttgcctatattatgtgaataccaggaggtcatctgatacggacttaataaaggttgattttgctttatattgggagctgagccacacctccccttataactctattggtcagtaatggtcagtttgtggctgttaggaaaatgttgccttttagcattccagaactctaaatcctgtagaggtacatgggatattttattctttgcctgtactcataaaaatgaacagaagaaaatacgtttttttcttttcttaacttcttttcttttaactctttaaaaggtgaaatatcagccctcaagagactcacttgctaactttcctttttttctttttttttcttttttttgtgtttcttttttctttctctgttttcttacatggttctggtggattcacatttgctgatgctggtgctgtttttcgtgtgatcttcaacgtttttgggtgaccattgaccctgtgacctcaaaatggtgtccaactaaccacttaaaattaacatcttttttttaattaacgaatttatggtatttttttttttcccttggcggggatggggttggggttgttttttctctattctagattatccagccaagaagatgaaaactacagagaagggatttggcttggtggcttatgctgcagattcatctgatgaagaggaggaacatggaggtcataaaaatgcaagtagttttccacagggctggagtttgggataccaatatccttcatcacaaccacgagctaaacaacagatgccattctggatggctccctaggaaacagtggaacagagttttgaccctcagtgactcttcttagcaataatgcatgcatttgatttaacaagactctggggcctgtgctgggaaccatctggacctttgcagaagttagagattcagtgcccccctttcttaaaggggttccttaacaaccacaaaaatccttatttctgcagtggcatagaatctgttaaaatttaattagaatcacaaatttatctcagaagctttttaacagttggtgaaatgtgcttgtccaacaaagcatcctaacagggtcgttcccatacacatttgacctggtcagccttttccaggtgaatagccccagttctgacataaagaaagttttatttgtattttactactgtttggtcaattttgatatataactggttacaaacagagccttactatttattagtggggaaatgattttaagaccgtccttttcagtatttaattctgacagatctgcatccctgttttgttttggattatttctgttttggaaaatgctgtctcatttaaaactgttggatatagctggatcctggataggaaaatgaaattattttttcattgtgttttttaattggggtgatccaaagctggcaccttcaggcacattggtctcatagccattactgtttttattgcccttctaagatcctgtcttcagctgggtcagagaaaacttcttgactaaaactggtcagaactcatcacagaaatgaaatacagtggtctctctctcccagaactggttgcagctaaaacagagagatctgactgctggctataggattttggacttaatgactgaaattgcaaattgtcctttttcttggcattacagattttgccaaaataactttttgtatcaaatattgatgtgtgaaagtgaaggagctagtctgctgaaccaggaatagtttgagatattgaactgtcatttttgcacatttgaatactttgcaggctggctttgtataaacttatcctctggtttcctatatgttgtaaatatttagaccataatttcattataaataaatctataaatattc

SEQ ID NO: 435489 - DNA, 4830 bp, Homo sapiens
tgcgtaagaacgttgggggcggaagtgacgagaggtggtagtcggatagttggcgggtggttgagtagaagcggtcgccatgtccgcggggagcgcgacacatcctggagctggcgggcgccgcagcaaatgggaccaaccagctccagccccacttctcttcctcccgccagcggccccaggtggggaggtcaccagcagtgggggaagtcctgggggcaccacagctgctccttcaggagccttggatgctgctgctgctgtggctgccaagattaatgccatgctcatggcaaaagggaagctgaaaccaactcagaatgcttctgagaagcttcaggctcctggcaaaggcctaactagcaataaaagcaaggatgacctggtggtagctgaagtagaaattaatgatgtgcctctcacatgtaggaacttgctgactcgaggacagactcaagacgagatcagccgacttagtggggctgcagtatcaactcgagggaggttcatgacaactgaggaaaaagccaaagtgggaccaggtcaccccaaaccagaaggcctggctgctgccaagaagctttgtgagaatcttttgcaaacagttcatgctgaatactctagatttgtgaatcagattaatactgctgtacctttaccaggctatacacaaccctctgctataagtagtgtccctcctcaaccaccatattatccatccaatggctatcagtctggttaccctgttgttccccctcctcagcagccagttcaacctccctacggagtaccaagcatagtgccaccagctgtttcattagcacctggagtcttgccggcattacctactggagtcccacctgtgccaacacaatacccgataacacaagtgcagcctccagctagcactggacagagtccgatgggtggtccttttattcctgctgctccttcccaagtcagccccaggcacagaagagacgattcacagaggagctaccagatgaacgggaatctggactgcttggataccaggttaaataaaataccctgttttcctatcttcaccttattcttctactatattctccctttaaaaaagataaattcacatcattctcccagtactaggatttctgctttctggaattcattttggttaggttttttatcctattcaacagactcttgaaagcctctgagagttcttactttcttatacatctcactcaaagctcttgatctaccagtatgtggtttgtatttaaaaccttggctttcagtggtgctctctcttttaccctccacctaaaaaagagagtgatatctccctccagtctccccacccctcaagactgctagaaaaggagtgattctgtacatgtaattgtaaagttagccactaaagttaaaaagattcttaatttgtagttttggtgcaattttatcagaagtacctttccattttgccagaatccttgaatcattctttaaaccaaagcatttttttatagtttctagctaggtttatagaaactagtggagctatgggcagtcagttaaaaacaggccatagatagcataatgaattataacacccctgtccaagtcctatagagaaaaaaaaaaatccctacttttgactacagttacacagcagatcccaaagagctttgtagtagtttaacgtactacaacttatcagaaagatgaggcacttgacagttacattaaggagctaaagtcaatacggcagttgtagatttgctaatgccactgtatttttctgctcatagcatggacccattcatatgactaatttaggtacaggcttctccagtcagaatgagattgaaggtgcaggatcgaagccagcaagttcctcaggcaaagagagagagagggacaggcagttgatgcctccaccagcctttccagtgactggaataaaaacagagtccgatgaaaggaatgggtctgggaccttaacagggagccatggtgagtgtgatatagctgggggaacaggggagtggctaagactggtctaaagctattagttttctcagccgggcgcagtggctcacgcctgtaatcccagcactttgggaggccgaggtgggcagatcacctaaggtcaggagttcaagaccagcttggccaacatagtgaaatcccatctctactaaaaatacaaaaactagcgggcatggtggtgggcgcctgtaattccagctactcagggggttgaggcaggagaatcgcttcaacctgggaggcagaggttgcagtgagccaagatcagaccactgccctccagcctgggcaatagagcaagactccatctcataaataaataaatacataaataaagctattaattttctaacctgatgttcattcaggtgtttaatccaacctctataatctgttggccagtgaaaatacttttgggctgggcacggtggctcacgcctgtaatcccagcactttgggaggccaaggtgggcggataacctgaggtcaggagtttgagaccagcgtggctaacacggtgaaaccccgtctctactaaaaatagaaaaattaagctgggcatggtggtgcatgcctgtaattccagcggcttggaaggctgaggcaggagaatcacttgaacttgggaggtggaggttgcagtgagccaagatcacaccactgcattccagcctgggcactagagtgagactctgtctcaaaaaaaaagaaagagaaagagaaaatagtttctaaaaaattgtatacagacaaccttttatttccaacaaacgtgtgccgagagagagagagagaaaatagttttaaaaaaattgtatacagacaaccttttgtttccaaccaacgtgtatctagaaaagagttagtcgacttattttatacatagcatcagtgaatagtaatgagtggtaggtcatttcaaaatcctgttgcctatattatgtgaataccaggaggtcatctgatacggacttaataaaggttgattttgctttatattgggagctgagccacacctccccttataactctattggtcagtaatggtcagtttgtggctgttaggaaaatgttgccttttagcattccagaactctaaatcctgtagaggtacatgggatattttattctttgcctgtactcataaaaatgaacagaagaaaatacgtttttttcttttcttaacttcttttcttttaactctttaaaaggtgaaatatcagccctcaagagactcacttgctaactttcctttttttctttttttttcttttttttgtgtttcttttttctttctctgttttcttacatggttctggtggattcacatttgctgatgctggtgctgtttttcgtgtgatcttcaacgtttttgggtgaccattgaccctgtgacctcaaaatggtgtccaactaaccacttaaaattaacatcttttttttaattaacgaatttatggtatttttttttttcccttggcggggatggggttggggttgttttttctctattctagattatccagccaagaagatgaaaactacagagaagggatttggcttggtggcttatgctgcagattcatctgatgaagaggaggaacatggaggtcataaaaatgcaagtagttttccacagggctggagtttgggataccaatatccttcatcacaaccacgagctaaacaacagatgccattctggatggctccctaggaaacagtggaacagagttttgaccctcagtgactcttcttagcaataatgcatgcatttgatttaacaagactctggggcctgtgctgggaaccatctggacctttgcagaagttagagattcagtgcccccctttcttaaaggggttccttaacaaccacaaaaatccttatttctgcagtggcatagaatctgttaaaatttaattagaatcacaaatttatctcagaagctttttaacagttggtgaaatgtgcttgtccaacaaagcatcctaacagggtcgttcccatacacatttgacctggtcagccttttccaggtgaatagccccagttctgacataaagaaagttttatttgtattttactactgtttggtcaattttgatatataactggttacaaacagagccttactatttattagtggggaaatgattttaagaccgtccttttcagtatttaattctgacagatctgcatccctgttttgttttggattatttctgttttggaaaatgctgtctcatttaaaactgttggatatagctggatcctggataggaaaatgaaattattttttcattgtgttttttaattggggtgatccaaagctggcaccttcaggcacattggtctcatagccattactgtttttattgcccttctaagatcctgtcttcagctgggtcagagaaaacttcttgactaaaactggtcagaactcatcacagaaatgaaatacagtggtctctctctcccagaactggttgcagctaaaacagagagatctgactgctggctataggattttggacttaatgactgaaattgcaaattgtcctttttcttggcattacagattttgccaaaataactttttgtatcaaatattgatgtgtgaaagtgaaggagctagtctgctgaaccaggaatagtttgagatattgaactgtcatttttgcacatttgaatactttgcaggctggctttgtataaacttatcctctggtttcctatatgttgtaaatatttagaccataatttcattataaataaatctataaatattc

SEQ ID NO: 435490 - DNA, 1271 bp, Homo sapiens
tgcgtaagaacgttgggggcggaagtgacgagaggtggtagtcggatagttggcgggtggttgagtagaagcggtcgccatgtccgcggggagcgcgacacatcctggagctggcggggctggagtttgggataccaatatccttcatcacaaccacgagctaaacaacagatgccattctggatggctccctaggaaacagtggaacagagttttgaccctcagtgactcttcttagcaataatgcatgcatttgatttaacaagactctggggcctgtgctgggaaccatctggacctttgcagaagttagagattcagtgcccccctttcttaaaggggttccttaacaaccacaaaaatccttatttctgcagtggcatagaatctgttaaaatttaattagaatcacaaatttatctcagaagctttttaacagttggtgaaatgtgcttgtccaacaaagcatcctaacagggtcgttcccatacacatttgacctggtcagccttttccaggtgaatagccccagttctgacataaagaaagttttatttgtattttactactgtttggtcaattttgatatataactggttacaaacagagccttactatttattagtggggaaatgattttaagaccgtccttttcagtatttaattctgacagatctgcatccctgttttgttttggattatttctgttttggaaaatgctgtctcatttaaaactgttggatatagctggatcctggataggaaaatgaaattattttttcattgtgttttttaattggggtgatccaaagctggcaccttcaggcacattggtctcatagccattactgtttttattgcccttctaagatcctgtcttcagctgggtcagagaaaacttcttgactaaaactggtcagaactcatcacagaaatgaaatacagtggtctctctctcccagaactggttgcagctaaaacagagagatctgactgctggctataggattttggacttaatgactgaaattgcaaattgtcctttttcttggcattacagattttgccaaaataactttttgtatcaaatattgatgtgtgaaagtgaaggagctagtctgctgaaccaggaatagtttgagatattgaactgtcatttttgcacatttgaatactttgcaggctggctttgtataaacttatcctctggtttcctatatgttgtaaatatttagaccataatttcattataaataaatctataaatattc

SEQ ID NO: 435491 - DNA, 1014 bp, Homo sapiens
aagcagtggtatcaacgcagagtgcccattacggccgggacctttgcagaagttagagattcagtgcccccctttcttaaaggggttccttaacaaccacaaaaatccttatttctgcagtggcatagaatctgttaaaatttaattagaatcacaaatttatctcagaagctttttaacagttggtgaaatgtgcttgtccaacaaagcatcctaacagggtcgttcccatacacatttgacctggtcagccttttccaggtgaatagccccagttctgacataaagaaagttttatttgtattttactactgtttggtcaattttgatatataactggttacaaacagagccttactatttattagtggggaaatgattttaagaccgtccttttcagtatttaattctgacagatctgcatccctgttttgttttggattatttctgttttggaaaatgctgtctcatttaaaactgttggatatagctggatcctggataggaaaatgaaattattttttcattgtgttttttaattggggtgatccaaagctggcaccttcaggcacattggtctcatagccattactgtttttattgcccttctaagatcctgtcttcagctgggtcagagaaaacttcttgactaaaactggtcagaactcatcacagaaatgaaatacagtggtctctctctcccagaactggttgcagctaaaacagagagatctgactgctggctataggattttggacttaatgactgaaattgcaaattgtcctttttcttggcattacagattttgccaaaataactttttgtatcaaatattgatgtgtgaaagtgaaggagctagtctgctgaaccaggaatagtttgagatattgaactgtcatttttgcacatttgaatactttgcaggctggctttgtataaacttatcctctggtttcctatatgttgtaaatatttagaccataatttcattataaataaatctataaatattc

SEQ ID NO: 435492 - DNA, 2612 bp, Homo sapiens
tgcgtaagaacgttgggggcggaagtgacgagaggtggtagtcggatagttggcgggtggttgagtagaagcggtcgccatgtccgcggggagcgcgacacatcctggagctggcgggcgccgcagcaaatgggaccaaccagctccagccccacttctcttcctcccgccagcggccccaggtggggaggtcaccagcagtgggggaagtcctgggggcaccacagctgctccttcaggagccttggatgctgctgctgctgtggctgccaagattaatgccatgctcatggcaaaagggaagctgaaaccaactcagaatgcttctgagaagcttcaggctcctggcaaaggcctaactagcaataaaagcaaggatgacctggtggtagctgaagtagaaattaatgatgtgcctctcacatgtaggaacttgctgactcgaggacagactcaagacgagatcagccgacttagtggggctgcagtatcaactcgagggaggttcatgacaactgaggaaaaagccaaagtgggaccaggggatcgtccattatatcttcatgttcagggccagacacgggaattagtggacagagctgtaaaccggatcaaagaaattatcaccaatggagtggtaaaagctgccacaggaacaagtccaacttttaatggtgcaacagtaactgtctatcaccagccagcacccatcgctcagttgtctccagctgttagccagaagcctcccttccagtcagggatgcattatgttcaagataaattatttgtgggtctagaacatgctgtacccacttttaatgtcaaggagaaggtggaaggtccaggctgctcctatttgcagcacattcagattgaaacaggtgccaaagtcttcctgcggggcaaaggttcaggctgcattgagccagcatctggccgagaagcttttgaacctatgtatatttacatcagtcaccccaaaccagaaggcctggctgctgccaagaagctttgtgagaatcttttgcaaacagttcatgctgaatactctagatttgtgaatcagattaatactgctgtacctttaccagcagccagttcaacctccctacggagtaccaagcatagtgccaccagctgtttcattagcacctggagtcttgccggcattacctactggagtcccacctgtgccaacacaatacccgataacacaagtgcagcctccagctagcactggacagagtccgatgggtggtccttttattcctgctgctcctgtcaaaactgccttgcctgctggcccccagccccagccccagccccagcccccactcccaagtcagccccaggcacagaagagacgattcacagaggagctaccagatgaacgggaatctggactgcttggataccaggttaaataaaataccctgttttcctatcttcaccttattcttctactatattctccctttaaaaaagataaattcacatcattctcccagtactaggatttctgctttctggaattcattttggttaggttttttatcctattcaacagactcttgaaagcctctgagagttcttactttcttatacatctcactcaaagctcttgatctaccagtatgtggtttgtatttaaaaccttggctttcagtggtgctctctcttttaccctccacctaaaaaagagagtgatatctccctccagtctccccacccctcaagactgctagaaaaggagtgattctgtacatgtaattgtaaagttagccactaaagttaaaaagattcttaatttgtagttttggtgcaattttatcagaagtacctttccattttgccagaatccttgaatcattctttaaaccaaagcatttttttatagtttctagctaggtttatagaaactagtggagctatgggcagtcagttaaaaacaggccatagatagcataatgaattataacacccctgtccaagtcctatagagaaaaaaaaaaatccctacttttgactacagttacacagcagatcccaaagagctttgtagtagtttaacgtactacaacttatcagaaagatgaggcacttgacagttacattaaggagctaaagtcaatacggcagttgtagatttgctaatgccactgtatttttctgctcatagatagccattactgtttttattgcccttctaagatcctgtcttcagctgggtcagagaaaacttcttgactaaaactggtcagaactcatcacagaaatgaaatacagtggtctctctctcccagaactggttgcagctaaaacagagagatctgactgctggctataggattttggacttaatgactgaaattgcaaattgtcctttttcttggcattacagattttgccaaaataactttttgtatcaaatattgatgtgtgaaagtgaaggagctagtctgctgaaccaggaatagtttgagatattgaactgtcatttttgcacatttgaatactttgcaggctggctttgtataaacttatcctctggtttcctatatgttgtaaatatttagaccataatttcattataaataaatctataaatattc

SEQ ID NO: 435493 - DNA, 806 bp, Homo sapiens
tcgtcaccctgtgtacttttcatgtagctcactccgttctcaccaatcccgagcgacaggcacctgccgccacgactggctaacttttatttgtattttactactgtttggtcaattttgatatataactggttacaaacagagccttactatttattagtggggaaatgattttaagaccgtccttttcagtatttaattctgacagatctgcatccctgttttgttttggattatttctgttttggaaaatgctgtctcatttaaaactgttggatatagctggatcctggataggaaaatgaaattattttttcattgtgttttttaattggggtgatccaaagctggcaccttcaggcacattggtctcatagccattactgtttttattgcccttctaagatcctgtcttcagctgggtcagagaaaacttcttgactaaaactggtcagaactcatcacagaaatgaaatacagtggtctctctctcccagaactggttgcagctaaaacagagagatctgactgctggctataggattttggacttaatgactgaaattgcaaattgtcctttttcttggcattacagattttgccaaaataactttttgtatcaaatattgatgtgtgaaagtgaaggagctagtctgctgaaccaggaatagtttgagatattgaactgtcatttttgcacatttgaatactttgcaggctggctttgtataaacttatcctctggtttcctatatgttgtaaatatttagaccataatttcattataaataaatctataaatattc

SEQ ID NO: 435494 - DNA, 660 bp, Homo sapiens
aaaatgctgtttcattttcctatccaggatccagctatatccaacagttttaaatgagacagcattttccaaaacagaaataatccaaaacaaaacagggatgcagatctgtctcatttaaaactgttggatatagctggatcctggataggaaaatgaaattattttttcattgtgttttttaattggggtgatccaaagctggcaccttcaggcacattggtctcatagccattactgtttttattgcccttctaagatcctgtcttcagctgggtcagagaaaacttcttgactaaaactggtcagaactcatcacagaaatgaaatacagtggtctctctctcccagaactggttgcagctaaaacagagagatctgactgctggctataggattttggacttaatgactgaaattgcaaattgtcctttttcttggcattacagattttgccaaaataactttttgtatcaaatattgatgtgtgaaagtgaaggagctagtctgctgaaccaggaatagtttgagatattgaactgtcatttttgcacatttgaatactttgcaggctggctttgtataaacttatcctctggtttcctatatgttgtaaatatttagaccataatttcattataaataaatctataaatattc

SEQ ID NO: 435495 - DNA, 2003 bp, Homo sapiens
tgcgtaagaacgttgggggcggaagtgacgagaggtggtagtcggatagttggcgggtggttgagtagaagcggtcgccatgtccgcggggagcgcgacacatcctggagctggcgggcgccgcagcaaatgggaccaaccagctccagccccacttctcttcctcccgccagcggccccaggtggggaggtcaccagcagtgggggaagtcctgggggcaccacagctgctccttcaggagccttggatgctgctgctgctgtggctgccaagattaatgccatgctcatggcaaaagggaagctgaaaccaactcagaatgcttctgagaagcttcaggctcctggcaaaggcctaactagcaataaaagcaaggatgacctggtggtagctgaagtagaaattaatgatgtgcctctcacatgtaggaacttgctgactcgaggacagactcaagacgagatcagccgacttagtggggctgcagtatcaactcgagggaggttcatgacaactgaggaaaaagccaaagtgggaccaggggatcgtccattatatcttcatgttcagggccagacacgggaattagtggacagagctgtaaaccggatcaaagaaattatcaccaatggagtggtaaaagctgccacaggaacaagtccaacttttaatggtgcaacagtaactgtctatcaccagccagcacccatcgctcagttgtctccagctgttagccagaagcctcccttccagtcagggatgcattatgttcaagataaattatttgtgggtctagaacatgctgtacccacttttaatgtcaaggagaaggtggaaggtccaggctgctcctatttgcagcacattcagattgaaacaggtgccaaagtcttcctgcggggcaaaggttcaggctgcattgagccagcatctggccgagaagcttttgaacctatgtatatttacatcagtcaccccaaaccagaaggcctggctgctgccaagaagctttgtgagaatcttttgcaaacagttcatgctgaatactctagatttgtgaatcagattaatactgctgtacctttaccagcagccagttcaacctccctacggagtaccaagcatagtgccaccagctgtttcattagcacctggagtcttgccggcattacctactggagtcccacctgtgccaacacaatacccgataacacaagtgcagcctccagctagcactggacagagtccgatgggtggtccttttattcctgctgctcctgtcaaaactgccttgcctgctggcccccagccccagccccagccccagcccccactcccaagtcagccccaggcacagaagagacgattcacagaggagctaccagatgaacgggaatctggactgcttggataccaggttaaataaaataccctgttttcctatcttcaccttattcttctactatattctccctttaaaaaagataaattcacatcattctcccagtactaggatttctgctttctggaattcattttggttaggttttttatcctattcaacagactcttgaaagcctctgagagttcttactttcttatacatctcactcaaagctcttgatctaccagtatgtggtttgtatttaaaaccttggctttcagtggtgctctctcttttaccctccacctaaaaaagagagtgatatctccctccagtctccccacccctcaagactgctagaaaaggagtgattctgtacatgtaattgtaaagttagccactaaagttaaaaagattcttaatttgtagttttggtgcaattttatcagaagtacctttccattttgccagaatccttgaatcattctttaaaccaaagcatttttttatagtttctagctaggtttatagaaactagtggagctatgggcagtcagttaaaaacaggccatagatagcataatgaattataacacccctgtccaagtcctatagaga

SEQ ID NO: 435496 - DNA, 2077 bp, Homo sapiens
tgcgtaagaacgttgggggcggaagtgacgagaggtggtagtcggatagttggcgggtggttgagtagaagcggtcgccatgtccgcggggagcgcgacacatcctggagctggcgggcgccgcagcaaatgggaccaaccagctccagccccacttctcttcctcccgccagcggccccaggtggggaggtcaccagcagtgggggaagtcctgggggcaccacagctgctccttcaggagccttggatgctgctgctgctgtggctgccaagattaatgccatgctcatggcaaaagggaagctgaaaccaactcagaatgcttctgagaagcttcaggctcctggcaaaggcctaactagcaataaaagcaaggatgacctggtggtagctgaagtagaaattaatgatgtgcctctcacatgtaggaacttgctgactcgaggacagactcaagacgagatcagccgacttagtggggctgcagtatcaactcgagggaggttcatgacaactgaggaaaaagccaaagtgggaccaggggatcgtccattatatcttcatgttcagggccagacacgggaattagtggacagagctgtaaaccggatcaaagaaattatcaccaatggagtggtaaaagctgccacaggaacaagtccaacttttaatggtgcaacagtaactgtctatcaccagccagcacccatcgctcagttgtctccagctgttagccagaagcctcccttccagtcagggatgcattatgttcaagataaattatttgtgggtctagaacatgctgtacccacttttaatgtcaaggagaaggtggaaggtccaggctgctcctatttgcagcacattcagattgaaacaggtgccaaagtcttcctgcggggcaaaggttcaggctgcattgagccagcatctggccgagaagcttttgaacctatgtatatttacatcagtcaccccaaaccagaaggcctggctgctgccaagaagctttgtgagaatcttttgcaaacagttcatgctgaatactctagatttgtgaatcagattaatactgctgtacctttaccagcagccagttcaacctccctacggagtaccaagcatagtgccaccagctgtttcattagcacctggagtcttgccggcattacctactggagtcccacctgtgccaacacaatacccgataacacaagtgcagcctccagctagcactggacaggtaggatgtcaggatatgcaacaacatattactgaatttaggaaaaactggggaaagaggggaagtagtggtattccagaaataaatcatgtgatgtggaatgtctttttcctgctgtcttctgtgttcctaccaccaacctacctgaatattttggattagtgtgtatgtgtgtatgtcatcctgaagtttatattttcacaagtcttgcacaccaaatagctgtttaaagtggggatggtgggcacacttgctataaagggtcagatggcaaatattttaggctttaagggccatacattctctgtcacaactatcacactcggtggttgtagtgcagaagcagcccgtggataatacctcaatgaataagcatagctgttgtactccagtagaactttatttacaaaacaggtggcaggccacagtcatagtttgccatacccttggccattgtttgcctaaccttacctttgcagtgttaacaaagtcctcaaggagaatggggctaccttcaccacacctctcagtaattggaactgagttagcatttcaaatcttagaaggaaacataatctcagcatctggggaggccgaggcaggattgctttagcacagtttgagaccagcctaggcaacatagtgagactccatctctacaaaaaaaattaactggacatggtggcacatacctgtatttcagctacttaagaggctgagatggaagggtcccttgagcctaggaggtcatggatgcagtgaaccaagatggtgccagtgcactccagcctcagtgacagagtgagactgtctcaaaaaaaattttaaaaagc

SEQ ID NO: 435497 - DNA, 1420 bp, Homo sapiens
gccgggcgcggtggcttacgcctgtaatcccagcactttgggaggccgaggcgggtggatcacgaggtcaggagtttgagaccagcctgaccaacatggtgaaaccccgtctctactgaaaatacaaaaattagtcgggcatggtggcacgcgcctgtaatcagctactcaggaggctgaggcagaactgcttgaacccgggaggcggaggttgcagtgagccgagattgtgccagtgcactctagcctgggcgacccaatgagactccgtctcaaaaaaaaattcctaatggctttggtcctagaattatgtaatcagacccttgtaaatgcacagcttcggctgtcccatgttaatttgtttccccctctctttgttcatgctgaatactctagatttgtgaatcagattaatactgctgtacctttaccagcagccagttcaacctccctacggagtaccaagcatagtgccaccagctgtttcattagcacctggagtcttgccggcattacctactggagtcccacctgtgccaacacaatacccgataacacaagtgcagcctccagctagcactggacaggtaggatgtcaggatatgcaacaacatattactgaatttaggaaaaactggggaaagaggggaagtagtggtattccagaaataaatcatgtgatgtggaatgtctttttcctgctgtcttctgtgttcctaccaccaacctacctgaatattttggattagtgtgtatgtgtgtatgtcatcctgaagtttatattttcacaagtcttgcacaccaaatagctgtttaaagtggggatggtgggcacacttgctataaagggtcagatggcaaatattttaggctttaagggccatacattctctgtcacaactatcacactcggtggttgtagtgcagaagcagcccgtggataatacctcaatgaataagcatagctgttgtactccagtagaactttatttacaaaacaggtggcaggccacagtcatagtttgccatacccttggccattgtttgcctaaccttacctttgcagtgttaacaaagtcctcaaggagaatggggctaccttcaccacacctctcagtaattggaactgagttagcatttcaaatcttagaaggaaacataatctcagcatctggggaggccgaggcaggattgctttagcacagtttgagaccagcctaggcaacatagtgagactccatctctacaaaaaaaattaactggacatggtggcacatacctgtatttcagctacttaagaggctgagatggaagggtcccttgagcctaggaggtcatggatgcagtgaaccaagatggtgccagtgcactccagcctcagtgacagagtgagactgtctcaaaaaaaattttaaaaagc

SEQ ID NO: 435498 - DNA, 799 bp, Homo sapiens
tgcgtaagaacgttgggggcggaagtgacgagaggtggtagtcggatagttggcgggtggttgagtagaagcggtcgccatgtccgcggggagcgcgacacatcctggagctggcgggcgccgcagcaaatgggaccaaccagctccagccccacttctcttcctcccgccagcggccccaggtggggaggtcaccagcagtgggggaagtcctgggggcaccacagctgctccttcaggagccttggatgctgctgctgctgtggctgccaagattaatgccatgctcatggcaaaagggaagctgaaaccaactcagaatgcttctgagaagcttcaggctcctggcaaaggcctaactagcaataaaagcaaggatgacctggtggtagctgaagtagaaattaatgatgtgcctctcacatgtaggaacttgctgactcgaggacagactcaagacgagatcagccgacttagtggggctgcagtatcaactcgagggaggttcatgacaactgaggaaaaagccaaagtgggaccaggggatcgtccattatatcttcatgttcagggccagacacgggaattagtggacagtaagtaatgtttttggctcacgtagcactttttgtgaagagcaaagtacagggctctgtatagcaagttggcaaagtgtccctgatggctgttctaacccttgttcatgaactatacacgaatttgtatgggagtttagagggatggagagccacatatttgggtaacgtataaagcagatttacggtgaataattgaacac

SEQ ID NO: 435499 - DNA, 210 bp, Homo sapiens
ccagttgacttttaaaatcaagaagtttatttgttccccagctgttaaagcatgttctgagacattagctagcaaaaacccttctaatgtatatagtcccttttggttatttggaaacttgaaacattacaaattagatctggtgacccatttgactccttttttggttttgaccacattgagatcatccttttttgtttctctttatag

SEQ ID NO: 435500 - DNA, 390 bp, Homo sapiens
cttgaagtgtttaaaaaatattttgctagtgatagttatgtgtaactatgatacttgaggctagactgtgccagggcactattaatgttccctttaatttagggtaatttggaaagccattcatgcctcagtatttttcttccctagatattaagtttaatattcagctaaattgtctcattctgctgcagctgattaaacactttttttcttccccctcaggctatacacaaccctctgctataagtagtgtccctcctcaaccaccatattatccatccaatggctatcagtctggttaccctgttgttccccctcctcagcagccagttcaacctccctacggagtaccaagcatagtgccaccagctgtttcattagcacctggag

SEQ ID NO: 435501 - DNA, 462 bp, Homo sapiens
gctttggggcctaatgttttcctttttctccatgtaggcgccgcagcaaatgggaccaaccagctccagccccacttctcttcctcccgccagcggccccaggtggggaggtcaccagcagtgggggaagtcctgggggcaccacagctgctccttcaggagccttggatgctgctgctgctgtggctgccaagattaatgccatgctcatggcaaaagggaagctgaaaccaactcagaatgcttctgagaaggtatttgaagttgaagggtctccactaattgcgaatttaatagttgttttgccgggcgcggtggcttacgcctgtaatcccagcactttgggaggccgaggcgggtggatcacgaggtcaggagtttgagaccagcctgaccaacatggtgaaaccccgtctctactgaaaatacaaaaattagtcgggcatggtggcacgcgcctgt

SEQ ID NO: 435502 - DNA, 952 bp, Homo sapiens
atgcgcagcaccccggaccggaaacagcgcggggtccgctatggcggcggcagccgagggcgtactggcgacccggagtgatgagcccgcccgagacgatgccgccgtggagacagctgaggaagcaaaggagcctgctgaagctgacatcactgagctctgccgggacatgttctccaaaatggccacttacctgactggggaactgacggccaccagtgaagactataagctcctggaaaatatgaataaactcaccagcttgaagtatcttgaaatgaaagatattgctataaacattagtaggaacttaaaggacttaaaccagaaatatgctggactgcagccttatctggatcagatcaatgtcattgaagagcaggtagcagctcttgagcaggcagcttacaagttggatgcatattcaaaaaaactggaagccaagtacaagaagctggagaagcgatgagaaacttatttctatgggacagagtcttttttttttaatgtggaagaatgtcttataaaacctgaatcctgaggctgatgaattgtgaaaattcctcaaaaggaaattatgctggtcatcacaggaacatctcaacgttcgagtaaactggaggactgtggctattcctgaaccttctttgagacagaatccctcagaatctcacacttataacttcctaccttttacttgaatgctttgccatattcaggacagagactctcacaaagttcagaaaacagctggacttaccagtaaaatcaaatgagaggacctattcctcggagggcgcacacatattctaaggggggtcagcgccagaaggcccgccggaccagcccgtgcgaacccctcgcccaggaaccaacgcttggaacacgagcgacgcaacacagcaaaaacaaaccgagcacaaacgggaagccggacaccacgcactgcctc

SEQ ID NO: 435503 - DNA, 939 bp, Homo sapiens
cccctggataaaaaattttcatcaagataatcttctcgtttacacgcaacactttttcttagacaccgccgcaatgtttaattactccgttttggtttaacacacccctaagtacccaccctcggaaaggtttgtaattatttctccccctaggagcgcgttttcactaatgtttcgttatggagagtatttgtgcccaccaattatgtttgcgccccccccccgcatgatatggggtcttctgttcctccccagaatttcttctcccccgtgtgtccgctttttgcccagctgcgcaggcgttgtgtttttatcatcgcgccgccgctcgctgctctgtggggtttttattacacgcctccctctttttgggggggcccccttgtttcaacaaaaaacggggggcccgcgcctaaattggggcccccccgcgggggaatttttttggcgcgcggccccccctcttttttttttttttttttttttttttttttttttttttttgtttctcttttttttttttttttttttttttttatggttttttagttactatgtaaatggtcgtttttctgttaatgatgctaatgtgttgtaaacaagattctaaatttaaaaaggaaaacaaaacaaacttgttctttgcagcttatcaccttgtgaatgtcggtaacttacttttccataatattgcaaataacataaaatcttaaaataattccaagctgagtcttctagattgagcagaaatggtgaaaggagtattgataacttggcgtatgtgatgggcccctcttgtttattttctatgtgagtcacattgacatgcgatcagtttgggaaatgtgatgaaaacaaagactagatgggtatgtgtgtttatgtgttgggtagggaggtgacgattgccactcataaaataaaggattttataaaata

SEQ ID NO: 435504 - DNA, 1231 bp, Homo sapiens
atgcgcagcaccccggaccggaaacagcgcggggtccgctatggcggcggcagccgagggcgtactggcgacccggagtgatgagcccgcccgagacgatgccgccgtggagacagctgaggaagcaaaggagcctgctgaagctgacatcactgagctctgccgggacatgttctccaaaatggccacttacctgactggggaactgacggccaccagtgaagactataagctcctggaaaatatgaataaactcaccagcttgaagtatcttgaaatgaaagatattgctataaacattagtaggaacttaaaggacttaaaccagaaatatgctggactgcagccttatctggatcagatcaatgtcattgaagagcaggtagcagctcttgagcaggcagcttacaagttggatgcatattcaaaaaaactggaagccaagtacaagaagctggagaagcgatgagaaacttatttctatgggacagagtcttttttttttaatgtggaagaatgtcttataaaacctgaatcctgaggctgatgaattgtgaaaattcctcaaaaggaaattatgctggtcatcacaggaacatctcaacgttcgagtaaactggaggactgtggctattcctgaaccttctttgagacagaatccctcagaatctcacacttataacttcctaccttttacttgaatgctttgccatattcaggacagagactctcacaaagttcagaaaacagctggacttaccagtaaaatcaaatgagaggacctattttctctggtagtggttgattactacattattttcttaagtggctggttttttagttactatgtaaatggtcgtttttctgttaatgatgctaatgtgttgtaaacaagattctaaatttaaaaaggaaaacaaaacaaacttgttctttgcagcttatcaccttgtgaatgtcggtaacttacttttccataatattgcaaataacataaaatcttaaaataattccaagctgagtcttctagattgagcagaaatggtgaaaggagtattgataacttggcgtatgtgatgggcccctcttgtttattttctatgtgagtcacattgacatgcgatcagtttgggaaatgtgatgaaaacaaagactagatgggtatgtgtgtttatgtgttgggtagggaggtgacgattgccactcataaaataaaggattttataaaata

SEQ ID NO: 435505 - DNA, 1646 bp, Homo sapiens
atgcgcagcaccccggaccggaaacagcgcggggtccgctatggcggcggcagccgagggcgtactggcgacccggagtgatgagcccgcccgagacgatgccgccgtggagacagctgaggaagcaaaggagcctgctgaagctgacatcactgagctctgccgggacatgttctccaaaatggccacttacctgactggggaactgacggccaccagtgaagactataagctcctggaaaatatgaataaactcaccagcttgaagtatcttgaaatgaaagatattgctataaacattagtaggaacttaaaggacttaaaccagaaatatgctggactgcagccttatctggatcagatcaatgtcattgaagagcaggtagcagctcttgagcaggcagcttacaagttggatgcatattcaaaaaaactggaagccaagtacaagaagctggagaagcgatgagaaacttatttctatgggacagagtcttttttttttaatgtggaagaatgtcttataaaacctgaatcctgaggctgatgaattgtgaaaattcctcaaaaggaaattatgctggtcatcacaggaacatctcaacgttcgagtaaactggaggactgtggctattcctgaaccttctttgagacagaatccctcagaatctcacacttataacttcctaccttttacttgaatgctttgccatattcaggacagagactctcacaaagttcagaaaacagctggacttaccagtaaaatcaaatgagaggacctattttctctggtagtggttgattactacattattttcttaagtggctggttttttagttactatgtaaatggtcgtttttctgttaatgatgctaatgtgttgtaaacaagattctaaatttaaaaaggaaaacaaaacaaacttgttctttgcagcttatcaccttgtgaatgtcggtaacttacttttccataatattgcaaataacataaaatcttaaaataattccaagctgagtcttctagattgagcagaaatggtgaaaggagtattgataacttggcgtatgtgatgggcccctcttgtttattttctatgtgagtcacattgacatgcgatcagtttgggaaatgtgatgaaaacaaagactagatgggtatgtgtgtttatgtgttgggtagggaggtgacgattgccactcataaaataaaggattttataaaataaaaaaaaaaaaaaaaaaaaaaaaaaaaaaaaaacaaaagaacaaagaaaaaaaaaaaaaaaggaccagcaaaaaaaaaaacaagggacccacaatcgacaaaagccagacacgagggcaccaaaataggagcacggtgacccaacacggaccattttcacataaacaaagaagagggtactacatttaaggaggtgctaacgaattaaaaacaaaaacagagcaacacaatcaggcggccactccaaatgcaaaccggaccgacataaaaacgccaacaaacaagcgcgacactaacagaacactaaccgtgtacacatactacctactcatcaacgggccactagcaacacactaacgccaaaaaccccacacaaggaccacaaagagcacccccctccccctggccaacaacc

SEQ ID NO: 435506 - DNA, 1015 bp, Homo sapiens
atgcgcagcaccccggaccggaaacagcgcggggtccgctatggcggcggcagccgagggcgtactggcgacccggagtgatgagcccgcccgagacgatgccgccgtggagacagctgaggaagcaaaggagcctgctgaagctgacatcactgagctctgccgggacatgttctccaaaatggccacttacctgactggggaactgacggccaccagtgaagactataagctcctggaaaatatgaataaactcaccagcttgaagtatcttgaaatgaaagatattgctataaacattagtaggaacttaaaggacttaaaccagaaatatgctggactgcagccttatctggatcagatcaatgtcattgaagagcaggtagcagctcttgagcaggcagcttacaagttggatgcatattcaaaaaaactggaagccaagtacaagaagctggagaagcgatgagaaacttatttctatgggacagagtcttttttttttaatgtggaagaatgtcttataaaacctgaatcctgaggctgatgaattgtgaaaattcctcaaaaggaaattatgctggtcatcacaggaacatctcaacgttcgagtaaactggaggactgtggctattcctgaaccttctttgagacagaatccctcagaatctcacacttataacttcctaccttttacttgaatgctttgccatattcaggacagagactctcacaaagttcagaaaacagctggacttaccagtaaaatcaaatgagaggacctattttctctggtagtggttgattactacattattttcttaagtggctggttttttagttactatgtaaatggtcgtttttctgttaatgatgctaatgtgttgtaaacaagattctaaatttaaaaaggaaaacaaaacaaacttgttctttgcagcttatcaccttgtgaatgtcggtaacttacttttccataatattgcaaataacataaaatcttaaaataattcca

SEQ ID NO: 435507 - DNA, 1339 bp, Homo sapiens
atgcgcagcaccccggaccggaaacagcgcggggtccgctatggcggcggcagccgagggcgtactggcgacccggagtgatgagcccgcccgagacgatgccgccgtggagacagctgaggaagcaaaggagcctgctgaagctgacatcactgagctctgccgggacatgttctccaaaatggccacttacctgactggggaactgacggagctcagagattgatcagagcacaagaaacagatttcggagtcactttcgtagtggtgtgattggacgctgtgcaggatgagattgccaaggaagagcttagaagtagccaccagtgaagactataagctcctggaaaatatgaataaactcaccagcttgaagtatcttgaaatgaaagatattgctataaacattagtaggaacttaaaggacttaaaccagaaatatgctggactgcagccttatctggatcagatcaatgtcattgaagagcaggtagcagctcttgagcaggcagcttacaagttggatgcatattcaaaaaaactggaagccaagtacaagaagctggagaagcgatgagaaacttatttctatgggacagagtcttttttttttaatgtggaagaatgtcttataaaacctgaatcctgaggctgatgaattgtgaaaattcctcaaaaggaaattatgctggtcatcacaggaacatctcaacgttcgagtaaactggaggactgtggctattcctgaaccttctttgagacagaatccctcagaatctcacacttataacttcctaccttttacttgaatgctttgccatattcaggacagagactctcacaaagttcagaaaacagctggacttaccagtaaaatcaaatgagaggacctattttctctggtagtggttgattactacattattttcttaagtggctggttttttagttactatgtaaatggtcgtttttctgttaatgatgctaatgtgttgtaaacaagattctaaatttaaaaaggaaaacaaaacaaacttgttctttgcagcttatcaccttgtgaatgtcggtaacttacttttccataatattgcaaataacataaaatcttaaaataattccaagctgagtcttctagattgagcagaaatggtgaaaggagtattgataacttggcgtatgtgatgggcccctcttgtttattttctatgtgagtcacattgacatgcgatcagtttgggaaatgtgatgaaaacaaagactagatgggtatgtgtgtttatgtgttgggtagggaggtgacgattgccactcataaaataaaggattttataaaata

SEQ ID NO: 435508 - DNA, 1542 bp, Homo sapiens
gggttggcgtctagaggtccccgtcgacggtgtctggtcctctattactttcatgctgaatgatggctcatctctctcggttctctctcccccatatctacactctcatatttatactgctatcaaattagtctctctaaaacaaaggtcacagctagccaccgcgcccagcctgatagtatatatattatatgtatataagttaaatgttttcatgctgtagaagtaccaagactattttacctcccttttcttaggacatgagtttatcatttccctttgtaaccatgatcctgaaccttctggatcttgtttggtttaaatagttttctgattgttgcctgaatttctacctagactttcagagtacataggctgagttataaatgtcatagatcaaaagtggcccactcctttgacacttccttggtcctgccttgaactaccacttagcttatactcccacattctaatgatttaagacaaatcttaaagacattacatcttctgtttaattttcaagccaccagtgaagactataagctcctggaaaatatgaataaactcaccagcttgaagtatcttgaaatgaaagatattgctataaacattagtaggaacttaaaggacttaaaccagaaatatgctggactgcagccttatctggatcagatcaatgtcattgaagagcaggtagcagctcttgagcaggcagcttacaagttggatgcatattcaaaaaaactggaagccaagtacaagaagctggagaagcgatgagaaacttatttctatgggacagagtcttttttttttaatgtggaagaatgtcttataaaacctgaatcctgaggctgatgaattgtgaaaattcctcaaaaggaaattatgctggtcatcacaggaacatctcaacgttcgagtaaactggaggactgtggctattcctgaaccttctttgagacagaatccctcagaatctcacacttataacttcctaccttttacttgaatgctttgccatattcaggacagagactctcacaaagttcagaaaacagctggacttaccagtaaaatcaaatgagaggacctattttctctggtagtggttgattactacattattttcttaagtggctggttttttagttactatgtaaatggtcgtttttctgttaatgatgctaatgtgttgtaaacaagattctaaatttaaaaaggaaaacaaaacaaacttgttctttgcagcttatcaccttgtgaatgtcggtaacttacttttccataatattgcaaataacataaaatcttaaaataattccaagctgagtcttctagattgagcagaaatggtgaaaggagtattgataacttggcgtatgtgatgggcccctcttgtttattttctatgtgagtcacattgacatgcgatcagtttgggaaatgtgatgaaaacaaagactagatgggtatgtgtgtttatgtgttgggtagggaggtgacgattgccactcataaaataaaggattttataaaata

SEQ ID NO: 435509 - DNA, 1712 bp, Homo sapiens
gagacgggagagggagagggagacgggagagggagacgggagagggagacgggagagggagacgggagagggagacgggagagagagagggagacgggagagggagatggagagggagacgggcctgagtttgtttttgtccttataacatttacagattattttattttcatcatttaacaagggctgactacttcaagaaagtagtttgtagtaggctgggatttgatatgggtggcgattaacaatcagttttattttctacagttacatttagccagtgattaccgtgaaccttaccgcgtagaaggcaggggtaaccttaccatgtagaaagtatcttggttcacagtaaccatttgtgacagagtccctttttctgttaaaattgtgaaaccaggtgctttcatggttttaatagaaaaacggaatgtcagagtaagaggcttatttgatggccttttaaatatctgtatctttcaaaattgctttcctggagtaaggtgtaaggataagaacatacaggaggaaacatacatttatacttcctgagggttccagtctggttccagagggcacctgggacagtgctgagagaggcagttttttagtaaggctcccgataggtcaagtgacagatgtgccccatcctggtggagctgtctaagtaggtgctgttgacagggtgaggacttcgtgaacctgtgttaggctctcagttctgagtgtctgtgcttgaattcttattccaagttttacagatcagtgatccgtatatttggacagatgatgagattgaagctaatagatttttagtaatattatacatattttttaaacttgactggaaatgctaactaaaaactgtctttgtaagagccagttttaaaagatgtaactctccctcatccctcacagaagccaagtacaagaagctggagaagcgatgagaaacttatttctatgggacagagtcttttttttttaatgtggaagaatgtcttataaaacctgaatcctgaggctgatgaattgtgaaaattcctcaaaaggaaattatgctggtcatcacaggaacatctcaacgttcgagtaaactggaggactgtggctattcctgaaccttctttgagacagaatccctcagaatctcacacttataacttcctaccttttacttgaatgctttgccatattcaggacagagactctcacaaagttcagaaaacagctggacttaccagtaaaatcaaatgagaggacctattttctctggtagtggttgattactacattattttcttaagtggctggttttttagttactatgtaaatggtcgtttttctgttaatgatgctaatgtgttgtaaacaagattctaaatttaaaaaggaaaacaaaacaaacttgttctttgcagcttatcaccttgtgaatgtcggtaacttacttttccataatattgcaaataacataaaatcttaaaataattccaagctgagtcttctagattgagcagaaatggtgaaaggagtattgataacttggcgtatgtgatgggcccctcttgtttattttctatgtgagtcacattgacatgcgatcagtttgggaaatgtgatgaaaacaaagactagatgggtatgtgtgtttatgtgttgggtagggaggtgacgattgccactcataaaataaaggattttataaaata

SEQ ID NO: 435510 - DNA, 925 bp, Homo sapiens
atgcgcagcaccccggaccggaaacagcgcggggtccgctatggcggcggcagccgagggcgtactggcgacccggagtgatgagcccgcccgagacgatgccgccgtggagacagctgaggaagcaaaggagcctgctgaagctgacatcactgagctctgccgggacatgttctccaaaatggccacttacctgactggggaactgacggccaccagtgaagactataagctcctggaaaatatgaataaactcaccagcttgaagtatcttgaaatgaaagatattgctataaacattagtaggaacttaaaggacttaaaccagaaatatgctggactgcagccttatctggatcagatcaatgtcattgaagagcaggtagcagctcttgagcaggcagcttacaagttggatgcatattcaaaaaaactgggtaaccgtttttacttctgttttgatgtaataaagactgcttcttgccagcatattcttagtaaacataatagttaacatttatggtgtgcctacagtgatctattaatcttcacaaaaccttagtaatttattattatattaataaaaataacatttcctgattacttaatgatatatcaggcactgttcttagtgctttacatgtattatgtttggtttttgtttttggtttgttttttttgagacaagtttcactcttgttgcccaagctggagtgcaatggtgcgatctcggctcaccgcaacccccatctctactaaaaatacaaacattaattgggcgtggtggtgtgtgcctgtaatctgagctactcctgaggccgaggcaggagaattgcttgaacctgggaggtggaggttgcagtgagccaagatggcaccactgcactctagcctgggcaatggagtgagactccgtctcaattta

SEQ ID NO: 435511 - DNA, 1985 bp, Homo sapiens
atgcgcagcaccccggaccggaaacagcgcggggtccgctatggcggcggcagccgagggcgtactggcgacccggagtgatgagcccgcccgagacgatgccgccgtggagacagctgaggaagcaaaggagcctgctgaagctgacatcactgagctctgccgggacatgttctccaaaatggccacttacctgactggggaactgacggccaccagtgaagactataagctcctggaaaatatgaataaactcaccagcttgaagtatcttgaaatgaaagatattgctataaacattagtaggaacttaaaggacttaaaccagaaatatgctggactgcagccttatctggatcagatcaatgtcattgaagagcaggtagcagctcttgagcaggcagcttacaagttggatgcatattcaaaaaaactggaagccaagtacaagaagctggagaagcgatgagaaacttatttctatgggacagagtcttttttttttaatgtggaagaatgtcttataaaacctgaatcctgaggctgatgaattgtgaaaattcctcaaaaggaaattatgctggtcatcacaggaacatctcaacgttcgagtaaactggaggactgtggctattcctgaaccttctttgagacagaatccctcagaatctcacacttataacttcctaccttttacttgaatgctttgccatattcaggacagagactctcacaaagttcagaaaacagctggacttaccagtaaaatcaaatgagaggacctattttctctggtagtggttgattactacattattttcttaagtggctggttttttagttactatgtaaatggtcgtttttctgttaatgatgctaatgtgttgtaaacaagattctaaatttaaaaaggaaaacaaaacaaacttgttctttgcagcttatcaccttgtgaatgtcggtaacttacttttccataatattgcaaataacataaaatcttaaaataattccaagctgagtcttctagattgagcagaaatggtgaaaggagtattgataacttggcgtatgtgatgggcccctcttgtttattttctatgtgagtcacattgacatgcgatcagtttgggaaatgtgatgaaaacaaagactagatgggtatgtgtgtttatgtgttgggtagggaggtgacgattgccactcataaaataaaggattttataaaataccttcctactgtgtatgtaggatttggggggatcttagggacctaatcgacttctttgcacactaaaaacatcagacaatgggacatactgactgaccagtctaggttgaaagataggcagccttacccagaacacaacattagcagctgggaaggtgtctgaggtccccaattacatatcccaaagagtttcttacttctgtttctgtcatttcccctctgttccagacagtcatcatttatcctctgttcttcctggactgttgctgtggtctcttctcatcttaactgtcccttccaaccaccctccacactgctgccagagcaatcttaaaaatgtaaactggccctattactcctgcttagaaccctgtagtgacttatcatggcctctgaaaaatctagactttcattatgcatacaagtcccttgtgtttttttgtttgtttatagacagggtctctattgtcacccaggctggagtgtggtggtgtgataatagctcaccttgacctcctaggctcaactgatcttcccacctcagcctcctgaatagctgggactaccagcacgctccaccatgccttgctaattattttttatacagatggagtctcactatgttgtccaggctggtcttgaactggcctcaagtgattctcttaccacagcctgccagagtgctgagattgtaggcatgaaccaccgtgcctaacataaggcccctatttaaacatttttcttaaataaaaaa

SEQ ID NO: 435512 - DNA, 1282 bp, Homo sapiens
gcagtgaaggacttgaaattatggcagatggagaatggagccgacttgatggaatgaaggcaagtggagggatgtcggaacaggctgctttggctggattagcaccgggtgtaggcgggacacttagtcattctcccttggcccagacgatgccgccgtggagacagctgaggaagcaaaggagcctgctgaagctgacatcactgagctctgccgggacatgttctccaaaatggccacttacctgactggggaactgacggccaccagtgaagactataagctcctggaaaatatgaataaactcaccagcttgaagtatcttgaaatgaaagatattgctataaacattagtaggaacttaaaggacttaaaccagaaatatgctggactgcagccttatctggatcagatcaatgtcattgaagagcaggtagcagctcttgagcaggcagcttacaagttggatgcatattcaaaaaaactggaagccaagtacaagaagctggagaagcgatgagaaacttatttctatgggacagagtcttttttttttaatgtggaagaatgtcttataaaacctgaatcctgaggctgatgaattgtgaaaattcctcaaaaggaaattatgctggtcatcacaggaacatctcaacgttcgagtaaactggaggactgtggctattcctgaaccttctttgagacagaatccctcagaatctcacacttataacttcctaccttttacttgaatgctttgccatattcaggacagagactctcacaaagttcagaaaacagctggacttaccagtaaaatcaaatgagaggacctattttctctggtagtggttgattactacattattttcttaagtggctggttttttagttactatgtaaatggtcgtttttctgttaatgatgctaatgtgttgtaaacaagattctaaatttaaaaaggaaaacaaaacaaacttgttctttgcagcttatcaccttgtgaatgtcggtaacttacttttccataatattgcaaataacataaaatcttaaaataattccaagctgagtcttctagattgagcagaaatggtgaaaggagtattgataacttggcgtatgtgatgggcccctcttgtttattttctatgtgagtcacattgacatgcgatcagtttgggaaatgtgatgaaaacaaagactagatgggtatgtgtgtttatgtgttgggtagggaggtgacgattgccactcataaaataaaggattttataaaata

SEQ ID NO: 435513 - DNA, 2481 bp, Homo sapiens
  misc_feature (1586)..(1586): n is a, c, g, or t
  misc_feature (1602)..(1602): n is a, c, g, or t
tgttctgttaaggtacaactactgggccttgaaatctatccttcacaatcttggctgagataaggacttggcacaggatgatagagcctggacacaagagatctggagagggaactgctatttgctgctacattcagattatgagatgtcagggaactgtaaaaagggtaatgaatttttaaagagagtaaagagttatgctgtgtcccggtcaactgaaatacattaaaaattaattagatggtagttcttaactttttaaggcagataccttgagaatctagtgagttatagaccctctccctagaaaagtatagaactgtttatatggacaataattcacatgcattcagagatcttagggatctcctgaatgttttcttggatcccaagtgaaaaattcctgaatcaggtctcttaggtgtgcggttaatgtcatgtataacaatggggggacccttacttatctaaatataattatcccaatcctaataatgatgaggttgcataggaaagtaatagtgtaccaaactttagattattcactaaaaaagttgttcatttatgaagtagtcgtttatcaaacatgtcctccccactcagcaaactatgccttctatttattatatatgggtcagtttcactataattactgagtgttataaacatctgaccataacattttgaaatgatgcaaataaatttccaaacaaaaatagtgtgaatttaaaagcaaattatttgagtatctaagaaacaagatagacttctagaaaaatttgactctctagaatatttcttgcagaaatgagatttttcataatagtaaaagaggcatatgtttatcaaacaatgctgtcacaaaaagcatcaactgtaatgggactattaatgcataattattgatttattcattcaattaatatacaattatcccttttcatttaaagatttaattcataattacaattataataaaacttcctttaaagtaagatacaataattttattgtttttcattcttttttcaacaaaatatcccatccaatcattttttatattattaaatattggctgctttttcttggattcacattaaacagccctttccaacttccaattgtcttaaaataatgatgacctcctgtgagtagatacagctctttacaatttttttctttagtgccttttcttcttgaatttttcctatatcaaatggagaatatatgtacagatggtattttctcagtttataggcatatcagtgaccatggctttctttatataggtttttaaaaaagccctaaataataaatagccagatgagctggggacattgagaaatagtcttcctcttcctttttcaactcatttttttcccacctacatgactgtaaatcaaatatttaatagctcttacttaaaaaaacagatacaaagaatgtcttgatttggtgtgctcatttaccataatgtcatgaggggaattagatttcacaactttaaaaggaatatatttttattttattttgaaaaactgagtcatataggaattttcttatacttcaaggcatcatggaaacanttttttcctgtttggntattgtggaatttaaacgttcaaataaataaatggcataactaagtgttccaaatttttttacaatgtctttgaccctattcaaacactttaggtatttactgaccgtctgatgtgtaagatgtggaataaaactggaatcaattaattatttcactgtgttatcagcgcaagatcaaccatctgggtttcttaaagacacccgaaggattgaattttgtttcagtattgataatggcatagtctctatgtgctacatggaattacatcatttatccctccagtgccctatatgttgataagtatgtcagtttgacttagtatacatatatacagagatttcattacatttacctaataaatacaaaatacatttcgagtgttactgatctcctatgttacatgagcctcctgtaatcattgtgcattgatgttccaatgttttattgtttgtatgaattttaatttgaaaacaaggaaacaatccaaaagcagaaaaaatagcttttcttaaaattttcagtgctacattttccctctgaggtccatagagatttgaatgtataggagattatccgaaaacagctattttgattaaaaaatatatctcccaggattcaaccaacttaatgatgaagtactattgtctactgctttatacataaaagggaactttttatctgcttgtaaagggatttttatgtgtatttctgcataatcagatgacttctattgtgttttctactgatgaaattctctgtaaaatgtctttttcttacattatccaacaggcataaagaataacagtaaagacttttgtgtttgtaatactacctcttttatccctgcactactgttttattgcaaaaattctatattg

SEQ ID NO: 435514 - DNA, 2427 bp, Homo sapiens
  misc_feature (1586)..(1586): n is a, c, g, or t
  misc_feature (1602)..(1602): n is a, c, g, or t
tgttctgttaaggtacaactactgggccttgaaatctatccttcacaatcttggctgagataaggacttggcacaggatgatagagcctggacacaagagatctggagagggaactgctatttgctgctacattcagattatgagatgtcagggaactgtaaaaagggtaatgaatttttaaagagagtaaagagttatgctgtgtcccggtcaactgaaatacattaaaaattaattagatggtagttcttaactttttaaggcagataccttgagaatctagtgagttatagaccctctccctagaaaagtatagaactgtttatatggacaataattcacatgcattcagagatcttagggatctcctgaatgttttcttggatcccaagtgaaaaattcctgaatcaggtctcttaggtgtgcggttaatgtcatgtataacaatggggggacccttacttatctaaatataattatcccaatcctaataatgatgaggttgcataggaaagtaatagtgtaccaaactttagattattcactaaaaaagttgttcatttatgaagtagtcgtttatcaaacatgtcctccccactcagcaaactatgccttctatttattatatatgggtcagtttcactataattactgagtgttataaacatctgaccataacattttgaaatgatgcaaataaatttccaaacaaaaatagtgtgaatttaaaagcaaattatttgagtatctaagaaacaagatagacttctagaaaaatttgactctctagaatatttcttgcagaaatgagatttttcataatagtaaaagaggcatatgtttatcaaacaatgctgtcacaaaaagcatcaactgtaatgggactattaatgcataattattgatttattcattcaattaatatacaattatcccttttcatttaaagatttaattcataattacaattataataaaacttcctttaaagtaagatacaataattttattgtttttcattcttttttcaacaaaatatcccatccaatcattttttatattattaaatattggctgctttttcttggattcacattaaacagccctttccaacttccaattgtcttaaaataatgatgacctcctgtgagtagatacagctctttacaatttttttctttagtgccttttcttcttgaatttttcctatatcaaatggagaatatatgtacagatggtattttctcagtttataggcatatcagtgaccatggctttctttatataggtttttaaaaaagccctaaataataaatagccagatgagctggggacattgagaaatagtcttcctcttcctttttcaactcatttttttcccacctacatgactgtaaatcaaatatttaatagctcttacttaaaaaaacagatacaaagaatgtcttgatttggtgtgctcatttaccataatgtcatgaggggaattagatttcacaactttaaaaggaatatatttttattttattttgaaaaactgagtcatataggaattttcttatacttcaaggcatcatggaaacanttttttcctgtttggntattgtggaatttaaacgttcaaataaataaatggcataactaagtgttccaaatttttttacaatgtctttgaccctattcaaacactttaggtatttactgaccgtctgatgtgtaagatgtggaataaaactggaatcaattaattatttcactgtgttatcagcgcaagatcaaccatctgggtttcttaaagacacccgaaggattgaattttgtttcagtattgataatggcatagtctctatgtgctacatggaattacatcatttatccctccagtgccctatatgttgataagtatgtcagtttgacttagtatacatatatacagagatttcattacatttacctaataaatacaaaatacatttcgagtgttactgatctcctatgttacatgagcctcctgtaatcattgtgcattgatgttccaatgttttattgtttgtatgaattttaatttgaaaacaaggaaacaatccaaaagcagaaaaaatagcttttcttaaaattttcagtgctacattttccctctgaggtccatagagatttgaatgtataggagattatccgaaaacagctattttgattaaaaaatatatctcccaggattcaaccaacttaatgatgaagtactattgtctactgctttatacatatcagatgacttctattgtgttttctactgatgaaattctctgtaaaatgtctttttcttacattatccaacaggcataaagaataacagtaaagacttttgtgtttgtaatactacctcttttatccctgcactactgttttattgcaaaaattctatattg

SEQ ID NO: 435515 - DNA, 2336 bp, Homo sapiens
  misc_feature (40)..(40): n is a, c, g, or t
  misc_feature (63)..(63): n is a, c, g, or t
  misc_feature (73)..(73): n is a, c, g, or t
tcgacactattggatcaaagaattcggcacagcacttggngccgagcggatataaaaacactntccgcacgtncgccggcgcctcaggtttcccccggacagttgctgtgcgacttggacagtagaggagcgcctcccaagttttcatccaactgccaaccccaaagcttccacccttctcccctcagagaggacgtttgatgccgggccccttgagaggctcattgacaagcctgcccctctgggtccccctgagcagagcctgctgacccaattgcccacctttgcggctttgatgcctagccatgtctgcctcatcctcaggcggctcccccaggtttccatcgtgtgggaagaacggagtaacgagtctcacgcagaaaaaggtcttgagagcaccttgtggcgcacccagtgtaactgtgacgaaatctcacaagcgaggaatgaaaggggacactgtgaatgtgcggcggagtgtccgggtgaaaaccaagaatccacctcattgcctggagatcacgccaccatcttcagaaaagctggtctcagtgatgcggttaagtgacctctctacagaagatgatgactcaggtcactgtaaaatgaaccgttatgataagaagattgatagtctaatgaatgcggttggttgtctgaagtctgaggtcaagatgcaaaaaggtgagcgccagatggccaaaaggttcctggaggaacggaaggaagagctggaggaggtggcccacgaactggctgagactgagcacgagaacacggtgttgaggcacaacatcgagcgcatgaaggaggagaaggacttcaccatacttcagaagaaacacctacaacaggagaaggagtgcctcatgtccaagctggtggaggcggaaatggatggggctgcggctgccaagcaggtcatggccttgaaggataccatcgggaagctgaaaacggagaaacaaatgacctgcacggacatcaacaccctgacaaggcagaaggaacttctcctgcagaagctgagcacatttgaggagaccaaccgcaccctccgagacctcctgagggaacagcactgcaaagaggattctgaaagactaatggagcaacaaggagcactgctgaaacggctggcggaggccgactcagagaaagcgcgcctgctgttactgctgcaagacaaggacaaggaggtggaagagctccttcaggaaatacaatgtgagaaggctcaagcaaagacagcctctgagctttctaaatccatggagtccatgcgtgggcatttgcaggcacagcttcggtccaaagaggctgagaacagtcgcctgtgcatgcagattaagaatctggagcgcagcgggaatcagcataaggcagaagtggaggccatcatggagcagctgaaggagttgaagcagaagggagaccgagacaaagagagcttgaagaaggccatccgagcccagaaggagcgagccgagaagagcgaggagtatgctgagcagctacacgtgcaactcgctgacaaggatctttatgtcgctgaagctttatccactctggaatcctggaggagccgctacaaccaagttgtaaaagaaaagggagaccttgagctggaaattattgtcctgaatgaccgggtaacagatcttgtaaaccaacaacaaaccctggaggagaagatgcgggaagaccgggatagcctggtggagagactacaccgtcagactgctgagtattccgcattcaagctggagaatgagaggctgaaggccagctttgctccaatggaggacaaactcaaccaggcacacctcgaggtccagcagctgaaggcctcagtgaagaactatgaggggatgattgacaactataagagtcaggtgatgaagaccagattggaggctgatgaagtagctgcccagctagaacgctgtgacaaagagaacaagatccttaaagatgagatgaacaaagagattgaggcggcacgaaggcagttccagtctcagctggctgacctgcagcagctccctgacatcctgaagatcacggaggcgaagctggctgagtgccaagaccaactgcagggctatgagcggaagaacatcgacctcacagccatcatatcagacctgcgcagccgggtaagggactggcagaaagggtcccacgaactgacccgagcaggggcccgcataccaagatgagctgcacgccccccaagggaggactacttcctttttcttggctgctgctttttaaaaggagtgagctatcatcagtgctgtgaaataaaagtctggtgtgccaaatgcaaaaaa

SEQ ID NO: 435516 - DNA, 1049 bp, Homo sapiens
ggccaatgggcgagctgccgaccgggtgtcggaaaaggaggcggaagcggggaggagccgctgccagagccagactgcatccgccgcggcgtctccatggcacgaccctggcctccgacttcaacgacttcataaggcggcgtttctgggcgcagccgtgtcgctcctggacagttgctgtgcgacttggacagtagaggagcgcctcccaagttttcatccaactgccaaccccaaagcttccacccttctcccctcagagaggacgtttgatgccgggccccttgagaggctcattgacaagcctgcccctctgggtccccctgagcagagcctgctgacccaattgcccacctttgcggctttgatgcctagccatgtctgcctcatcctcaggcggctcccccaggtttccatcgtgtgggaagaacggagtaacgagtctcacgcagaaaaaggtcttgagagcaccttgtggcgcacccagtgtaactgtgacgaagccaaccatgaaggaccgctcttcaactccccccttacatgttcacgtggatgagaacacccctgtccacgtccacataaaaaaactcccgaaaccatcagcgaccagcagccagaaatctcacaagcgaggaatgaaaggggacactgtgaatgtgcggcggagtgtccgggtgaaaaccaaggtaccttggatgccccctggaaaatcatctgcccggcctgtgggatgcaagtgggaggtaggctcacccttgcccaggcttttcttctcggactgctcagatcctagcaggcctcagcctcggtatgattcagggtcagctatagctactggaatgtcctaacagaccccatttactgagggccttgctaaaccctgaaactatgtgaatcttcttgagttcttatgatactgctgtgtgggaagtcctgctgtccaaaggcagagatgaggaaccagacctcagagagaagtgattttcccagagtcacagagaagttagcagagctggagttaagattcattctagaggcagtactcttag

SEQ ID NO: 435517 - DNA, 3818 bp, Homo sapiens
ggccaatgggcgagctgccgaccgggtgtcggaaaaggaggcggaagcggggaggagccgctgccagagccagactgcatccgccgcggcgtctccatggcacgaccctggcctccgacttcaacgacttcataaggcggcgtttctgggcgcagccgtgtcgctcctggtttccatcgtgtgggaagaacggagtaacgagtctcacgcagaaaaaggtcttgagagcaccttgtggcgcacccagtgtaactgtgacgatcaaccatttttgtgttgtcctcccccacctgccagaagccaaccatgaaggaccgctcttcaactccccccttacatgttcacgtggatgagaacacccctgtccacgtccacataaaaaaactcccgaaaccatcagcgaccagcagccagaaatctcacaagcgaggaatgaaaggggacactgtgaatgtgcggcggagtgtccgggtgaaaaccaaggtaccttggatgccccctggaaaatcatctgcccggcctgtgggatgcaagtgggagaatccacctcattgcctggagatcacgccaccatcttcagaaaagctggtctcagtgatgcggttaagtgacctctctacagaagatgatgactcaggtcactgtaaaatgaaccgttatgataagaagattgatagtctaatgaatgcggttggttgtctgaagtctgaggtcaagatgcaaaaaggtgagcgccagatggccaaaaggttcctggaggaacggaaggaagagctggaggaggtggcccacgaactggctgagactgagcacgagaacacggtgttgaggcacaacatcgagcgcatgaaggaggagaaggacttcaccatacttcagaagaaacacctacaacaggagaaggagtgcctcatgtccaagctggtggaggcggaaatggatggggctgcggctgccaagcaggtcatggccttgaaggataccatcgggaagctgaaaacggagaaacaaatgacctgcacggacatcaacaccctgacaaggcagaaggaacttctcctgcagaagctgagcacatttgaggagaccaaccgcaccctccgagacctcctgagggaacagcactgcaaagaggattctgaaagactaatggagcaacaaggagcactgctgaaacggctggcggaggccgactcagagaaagcgcgcctgctgttactgctgcaagacaaggacaaggaggtggaagagctccttcaggaaatacaatgtgagaaggctcaagcaaagacagcctctgagctttctaaatccatggagtccatgcgtgggcatttgcaggcacagcttcggtccaaagaggctgagaacagtcgcctgtgcatgcagattaagaatctggagcgcagcgggaatcagcataaggcagaagtggaggccatcatggagcagctgaaggagttgaagcagaagggagaccgagacaaagagagcttgaagaaggccatccgagcccagaaggagcgagccgagaagagcgaggagtatgctgagcagctacacgtgcaactcgctgacaaggatctttatgtcgctgaagctttatccactctggaatcctggaggagccgctacaaccaagttgtaaaagaaaagggagaccttgagctggaaattattgtcctgaatgaccgggtaacagatcttgtaaaccaacaacaaaccctggaggagaagatgcgggaagaccgggatagcctggtggagagactacaccgtcagactgctgagtattccgcattcaagctggagaatgagaggctgaaggccagctttgctccaatggaggacaaactcaaccaggcacacctcgaggtccagcagctgaaggcctcagtgaagaactatgaggggatgattgacaactataagagtcaggtgatgaagaccagattggaggctgatgaagtagctgcccagctagaacgctgtgacaaagagaacaagatccttaaagatgagatgaacaaagagattgaggcggcacgaaggcagttccagtctcagctggctgacctgcagcagctccctgacatcctgaagatcacggaggcgaagctggctgagtgccaagaccaactgcagggctatgagcggaagaacatcgacctcacagccatcatatcagacctgcgcagccggatcgaacaccagggggacaagctggagatggcgagagagaaacatcaggcttcccagaaggaaaataaacagctgagtctgaaggtggatgaactggagaggaaactggaggcgaccagtgcccagaatatcgagttcctacaggtgattgccaagagggaggaggcaatccaccagtcccagctgcggctggaggagaaaacacgggaatgtgggaccctggcaaggcagttggagagtgccattgaagatgcgaggaggcaggtggaacaaaccaaggagcacgcactctccaaggagcgagcagcccagaacaaaatcctggaccttgagacccagctgagcagaaccaaaacggaattgagccagctgcggcggagccgtgatgatgcggaccgccgctaccagagccggctgcaagacctgaaagatcgcctggagcagtccgagagcaccaaccgcagcatgcagaactacgtccagttcctcaaatcatcatacgccaacgtgtttggggatggtccctattccaccttcctgactagctctcccatccgctcccgatctcctcctgcctgaggccacttatcagggcctggagccctgatggaagccataggaactccagagttgccaagccatagctgagaagcctggtggttttcctctcccagtgaaaaaatgggttcagggtcttgtccttagctactagctctagaaaagtcccaaaagcagcagaaggtgaagcaggaagcacttggttttctccttcctgatatagtcacctgttggaagtgttaaaatttcctcgacaggccttaaatttactactacattagggtaccacattttaacttaccatgactttgctccttcctttcctgagaaaatatttccactggattttttccaccagtccccttacagccctcattgttttaggaatctctctcaggtttttttctgacctaaaccagcaggaagtcgtcctgggctgtaagcaccatcacttgcttttttttttttctgatttcacaagtgtggtgttttcccaaggctcccttcccaagctcagtgcaaacctctcactcccaagtttctttgaggccacttgcccccaagcacttcacaatagaccctcgagggcttgtgtccatttggccttttacaagtgtaatgccaatttcattgatttttgtttcttttggcctgatttgtatctctggaatgcatttattcttgaaatatttgtgtgattttacaaaaagcttttgtaatcagttatttaaggctccatttgatgatttcctttacccaaccagtcctcatccctcctctaaaaaatgattaagtaaaatgctgcaggacagccagtagacatttttaaagtacttggtgcctgaaacatcaggcttctcatttcattttagctcaggttggtgctttcacattgtaatcaatgaactgtcaggagggaacaaactgtaagaaggactgcttggtgttttagggtagatcactttagctattaggaagaggatggggtagtgtacagtatatatttttaaaatgtgaattggtttctgaataagaatttgggccatttttgttcccca

SEQ ID NO: 435518 - DNA, 3781 bp, Homo sapiens
ggccaatgggcgagctgccgaccgggtgtcggaaaaggaggcggaagcggggaggagccgctgccagagccagactgcatccgccgcggcgtctccatggcacgaccctggcctccgacttcaacgacttcataaggcggcgtttctgggcgcagccgtgtcgctcctggtttccatcgtgtgggaagaacggagtaacgagtctcacgcagaaaaaggtcttgagagcaccttgtggcgcacccagtgtaactgtgacgaagccaaccatgaaggaccgctcttcaactccccccttacatgttcacgtggatgagaacacccctgtccacgtccacataaaaaaactcccgaaaccatcagcgaccagcagccagaaatctcacaagcgaggaatgaaaggggacactgtgaatgtgcggcggagtgtccgggtgaaaaccaaggtaccttggatgccccctggaaaatcatctgcccggcctgtgggatgcaagtgggagaatccacctcattgcctggagatcacgccaccatcttcagaaaagctggtctcagtgatgcggttaagtgacctctctacagaagatgatgactcaggtcactgtaaaatgaaccgttatgataagaagattgatagtctaatgaatgcggttggttgtctgaagtctgaggtcaagatgcaaaaaggtgagcgccagatggccaaaaggttcctggaggaacggaaggaagagctggaggaggtggcccacgaactggctgagactgagcacgagaacacggtgttgaggcacaacatcgagcgcatgaaggaggagaaggacttcaccatacttcagaagaaacacctacaacaggagaaggagtgcctcatgtccaagctggtggaggcggaaatggatggggctgcggctgccaagcaggtcatggccttgaaggataccatcgggaagctgaaaacggagaaacaaatgacctgcacggacatcaacaccctgacaaggcagaaggaacttctcctgcagaagctgagcacatttgaggagaccaaccgcaccctccgagacctcctgagggaacagcactgcaaagaggattctgaaagactaatggagcaacaaggagcactgctgaaacggctggcggaggccgactcagagaaagcgcgcctgctgttactgctgcaagacaaggacaaggaggtggaagagctccttcaggaaatacaatgtgagaaggctcaagcaaagacagcctctgagctttctaaatccatggagtccatgcgtgggcatttgcaggcacagcttcggtccaaagaggctgagaacagtcgcctgtgcatgcagattaagaatctggagcgcagcgggaatcagcataaggcagaagtggaggccatcatggagcagctgaaggagttgaagcagaagggagaccgagacaaagagagcttgaagaaggccatccgagcccagaaggagcgagccgagaagagcgaggagtatgctgagcagctacacgtgcaactcgctgacaaggatctttatgtcgctgaagctttatccactctggaatcctggaggagccgctacaaccaagttgtaaaagaaaagggagaccttgagctggaaattattgtcctgaatgaccgggtaacagatcttgtaaaccaacaacaaaccctggaggagaagatgcgggaagaccgggatagcctggtggagagactacaccgtcagactgctgagtattccgcattcaagctggagaatgagaggctgaaggccagctttgctccaatggaggacaaactcaaccaggcacacctcgaggtccagcagctgaaggcctcagtgaagaactatgaggggatgattgacaactataagagtcaggtgatgaagaccagattggaggctgatgaagtagctgcccagctagaacgctgtgacaaagagaacaagatccttaaagatgagatgaacaaagagattgaggcggcacgaaggcagttccagtctcagctggctgacctgcagcagctccctgacatcctgaagatcacggaggcgaagctggctgagtgccaagaccaactgcagggctatgagcggaagaacatcgacctcacagccatcatatcagacctgcgcagccggatcgaacaccagggggacaagctggagatggcgagagagaaacatcaggcttcccagaaggaaaataaacagctgagtctgaaggtggatgaactggagaggaaactggaggcgaccagtgcccagaatatcgagttcctacaggtgattgccaagagggaggaggcaatccaccagtcccagctgcggctggaggagaaaacacgggaatgtgggaccctggcaaggcagttggagagtgccattgaagatgcgaggaggcaggtggaacaaaccaaggagcacgcactctccaaggagcgagcagcccagaacaaaatcctggaccttgagacccagctgagcagaaccaaaacggaattgagccagctgcggcggagccgtgatgatgcggaccgccgctaccagagccggctgcaagacctgaaagatcgcctggagcagtccgagagcaccaaccgcagcatgcagaactacgtccagttcctcaaatcatcatacgccaacgtgtttggggatggtccctattccaccttcctgactagctctcccatccgctcccgatctcctcctgcctgaggccacttatcagggcctggagccctgatggaagccataggaactccagagttgccaagccatagctgagaagcctggtggttttcctctcccagtgaaaaaatgggttcagggtcttgtccttagctactagctctagaaaagtcccaaaagcagcagaaggtgaagcaggaagcacttggttttctccttcctgatatagtcacctgttggaagtgttaaaatttcctcgacaggccttaaatttactactacattagggtaccacattttaacttaccatgactttgctccttcctttcctgagaaaatatttccactggattttttccaccagtccccttacagccctcattgttttaggaatctctctcaggtttttttctgacctaaaccagcaggaagtcgtcctgggctgtaagcaccatcacttgcttttttttttttctgatttcacaagtgtggtgttttcccaaggctcccttcccaagctcagtgcaaacctctcactcccaagtttctttgaggccacttgcccccaagcacttcacaatagaccctcgagggcttgtgtccatttggccttttacaagtgtaatgccaatttcattgatttttgtttcttttggcctgatttgtatctctggaatgcatttattcttgaaatatttgtgtgattttacaaaaagcttttgtaatcagttatttaaggctccatttgatgatttcctttacccaaccagtcctcatccctcctctaaaaaatgattaagtaaaatgctgcaggacagccagtagacatttttaaagtacttggtgcctgaaacatcaggcttctcatttcattttagctcaggttggtgctttcacattgtaatcaatgaactgtcaggagggaacaaactgtaagaaggactgcttggtgttttagggtagatcactttagctattaggaagaggatggggtagtgtacagtatatatttttaaaatgtgaattggtttctgaataagaatttgggccatttttgttcccca

SEQ ID NO: 435519 - DNA, 3664 bp, Homo sapiens
ggccaatgggcgagctgccgaccgggtgtcggaaaaggaggcggaagcggggaggagccgctgccagagccagactgcatccgccgcggcgtctccatggcacgaccctggcctccgacttcaacgacttcataaggcggcgtttctgggcgcagccgtgtcgctcctggtttccatcgtgtgggaagaacggagtaacgagtctcacgcagaaaaaggtcttgagagcaccttgtggcgcacccagtgtaactgtgacgaaatctcacaagcgaggaatgaaaggggacactgtgaatgtgcggcggagtgtccgggtgaaaaccaaggtaccttggatgccccctggaaaatcatctgcccggcctgtgggatgcaagtgggagaatccacctcattgcctggagatcacgccaccatcttcagaaaagctggtctcagtgatgcggttaagtgacctctctacagaagatgatgactcaggtcactgtaaaatgaaccgttatgataagaagattgatagtctaatgaatgcggttggttgtctgaagtctgaggtcaagatgcaaaaaggtgagcgccagatggccaaaaggttcctggaggaacggaaggaagagctggaggaggtggcccacgaactggctgagactgagcacgagaacacggtgttgaggcacaacatcgagcgcatgaaggaggagaaggacttcaccatacttcagaagaaacacctacaacaggagaaggagtgcctcatgtccaagctggtggaggcggaaatggatggggctgcggctgccaagcaggtcatggccttgaaggataccatcgggaagctgaaaacggagaaacaaatgacctgcacggacatcaacaccctgacaaggcagaaggaacttctcctgcagaagctgagcacatttgaggagaccaaccgcaccctccgagacctcctgagggaacagcactgcaaagaggattctgaaagactaatggagcaacaaggagcactgctgaaacggctggcggaggccgactcagagaaagcgcgcctgctgttactgctgcaagacaaggacaaggaggtggaagagctccttcaggaaatacaatgtgagaaggctcaagcaaagacagcctctgagctttctaaatccatggagtccatgcgtgggcatttgcaggcacagcttcggtccaaagaggctgagaacagtcgcctgtgcatgcagattaagaatctggagcgcagcgggaatcagcataaggcagaagtggaggccatcatggagcagctgaaggagttgaagcagaagggagaccgagacaaagagagcttgaagaaggccatccgagcccagaaggagcgagccgagaagagcgaggagtatgctgagcagctacacgtgcaactcgctgacaaggatctttatgtcgctgaagctttatccactctggaatcctggaggagccgctacaaccaagttgtaaaagaaaagggagaccttgagctggaaattattgtcctgaatgaccgggtaacagatcttgtaaaccaacaacaaaccctggaggagaagatgcgggaagaccgggatagcctggtggagagactacaccgtcagactgctgagtattccgcattcaagctggagaatgagaggctgaaggccagctttgctccaatggaggacaaactcaaccaggcacacctcgaggtccagcagctgaaggcctcagtgaagaactatgaggggatgattgacaactataagagtcaggtgatgaagaccagattggaggctgatgaagtagctgcccagctagaacgctgtgacaaagagaacaagatccttaaagatgagatgaacaaagagattgaggcggcacgaaggcagttccagtctcagctggctgacctgcagcagctccctgacatcctgaagatcacggaggcgaagctggctgagtgccaagaccaactgcagggctatgagcggaagaacatcgacctcacagccatcatatcagacctgcgcagccggatcgaacaccagggggacaagctggagatggcgagagagaaacatcaggcttcccagaaggaaaataaacagctgagtctgaaggtggatgaactggagaggaaactggaggcgaccagtgcccagaatatcgagttcctacaggtgattgccaagagggaggaggcaatccaccagtcccagctgcggctggaggagaaaacacgggaatgtgggaccctggcaaggcagttggagagtgccattgaagatgcgaggaggcaggtggaacaaaccaaggagcacgcactctccaaggagcgagcagcccagaacaaaatcctggaccttgagacccagctgagcagaaccaaaacggaattgagccagctgcggcggagccgtgatgatgcggaccgccgctaccagagccggctgcaagacctgaaagatcgcctggagcagtccgagagcaccaaccgcagcatgcagaactacgtccagttcctcaaatcatcatacgccaacgtgtttggggatggtccctattccaccttcctgactagctctcccatccgctcccgatctcctcctgcctgaggccacttatcagggcctggagccctgatggaagccataggaactccagagttgccaagccatagctgagaagcctggtggttttcctctcccagtgaaaaaatgggttcagggtcttgtccttagctactagctctagaaaagtcccaaaagcagcagaaggtgaagcaggaagcacttggttttctccttcctgatatagtcacctgttggaagtgttaaaatttcctcgacaggccttaaatttactactacattagggtaccacattttaacttaccatgactttgctccttcctttcctgagaaaatatttccactggattttttccaccagtccccttacagccctcattgttttaggaatctctctcaggtttttttctgacctaaaccagcaggaagtcgtcctgggctgtaagcaccatcacttgcttttttttttttctgatttcacaagtgtggtgttttcccaaggctcccttcccaagctcagtgcaaacctctcactcccaagtttctttgaggccacttgcccccaagcacttcacaatagaccctcgagggcttgtgtccatttggccttttacaagtgtaatgccaatttcattgatttttgtttcttttggcctgatttgtatctctggaatgcatttattcttgaaatatttgtgtgattttacaaaaagcttttgtaatcagttatttaaggctccatttgatgatttcctttacccaaccagtcctcatccctcctctaaaaaatgattaagtaaaatgctgcaggacagccagtagacatttttaaagtacttggtgcctgaaacatcaggcttctcatttcattttagctcaggttggtgctttcacattgtaatcaatgaactgtcaggagggaacaaactgtaagaaggactgcttggtgttttagggtagatcactttagctattaggaagaggatggggtagtgtacagtatatatttttaaaatgtgaattggtttctgaataagaatttgggccatttttgttcccca

SEQ ID NO: 435520 - DNA, 3883 bp, Homo sapiens
cgccccttctcctaggagacagttgtccggccccgccccagcatccccgcggctccctgcgcggttctggccctctggggcccacttggggccgagcggttctcacccgccctctccgcacgtccgccggcgcctcaggtttcccccggacagttgctgtgcgacttggacagtagaggagcgcctcccaagttttcatccaactgccaaccccaaagcttccacccttctcccctcagagaggacgtttgatgccgggccccttgagaggctcattgacaagcctgcccctctgggtccccctgagcagagcctgctgacccaattgcccacctttgcggctttgatgcctagccatgtctgcctcatcctcaggcggctcccccaggtttccatcgtgtgggaagaacggagtaacgagtctcacgcagaaaaaggtcttgagagcaccttgtggcgcacccagtgtaactgtgacgaaatctcacaagcgaggaatgaaaggggacactgtgaatgtgcggcggagtgtccgggtgaaaaccaaggtaccttggatgccccctggaaaatcatctgcccggcctgtgggatgcaagtgggagaatccacctcattgcctggagatcacgccaccatcttcagaaaagctggtctcagtgatgcggttaagtgacctctctacagaagatgatgactcaggtcactgtaaaatgaaccgttatgataagaagattgatagtctaatgaatgcggttggttgtctgaagtctgaggtcaagatgcaaaaaggtgagcgccagatggccaaaaggttcctggaggaacggaaggaagagctggaggaggtggcccacgaactggctgagactgagcacgagaacacggtgttgaggcacaacatcgagcgcatgaaggaggagaaggacttcaccatacttcagaagaaacacctacaacaggagaaggagtgcctcatgtccaagctggtggaggcggaaatggatggggctgcggctgccaagcaggtcatggccttgaaggataccatcgggaagctgaaaacggagaaacaaatgacctgcacggacatcaacaccctgacaaggcagaaggaacttctcctgcagaagctgagcacatttgaggagaccaaccgcaccctccgagacctcctgagggaacagcactgcaaagaggattctgaaagactaatggagcaacaaggagcactgctgaaacggctggcggaggccgactcagagaaagcgcgcctgctgttactgctgcaagacaaggacaaggaggtggaagagctccttcaggaaatacaatgtgagaaggctcaagcaaagacagcctctgagctttctaaatccatggagtccatgcgtgggcatttgcaggcacagcttcggtccaaagaggctgagaacagtcgcctgtgcatgcagattaagaatctggagcgcagcgggaatcagcataaggcagaagtggaggccatcatggagcagctgaaggagttgaagcagaagggagaccgagacaaagagagcttgaagaaggccatccgagcccagaaggagcgagccgagaagagcgaggagtatgctgagcagctacacgtgcaactcgctgacaaggatctttatgtcgctgaagctttatccactctggaatcctggaggagccgctacaaccaagttgtaaaagaaaagggagaccttgagctggaaattattgtcctgaatgaccgggtaacagatcttgtaaaccaacaacaaaccctggaggagaagatgcgggaagaccgggatagcctggtggagagactacaccgtcagactgctgagtattccgcattcaagctggagaatgagaggctgaaggccagctttgctccaatggaggacaaactcaaccaggcacacctcgaggtccagcagctgaaggcctcagtgaagaactatgaggggatgattgacaactataagagtcaggtgatgaagaccagattggaggctgatgaagtagctgcccagctagaacgctgtgacaaagagaacaagatccttaaagatgagatgaacaaagagattgaggcggcacgaaggcagttccagtctcagctggctgacctgcagcagctccctgacatcctgaagatcacggaggcgaagctggctgagtgccaagaccaactgcagggctatgagcggaagaacatcgacctcacagccatcatatcagacctgcgcagccggatcgaacaccagggggacaagctggagatggcgagagagaaacatcaggcttcccagaaggaaaataaacagctgagtctgaaggtggatgaactggagaggaaactggaggcgaccagtgcccagaatatcgagttcctacaggtgattgccaagagggaggaggcaatccaccagtcccagctgcggctggaggagaaaacacgggaatgtgggaccctggcaaggcagttggagagtgccattgaagatgcgaggaggcaggtggaacaaaccaaggagcacgcactctccaaggagcgagcagcccagaacaaaatcctggaccttgagacccagctgagcagaaccaaaacggaattgagccagctgcggcggagccgtgatgatgcggaccgccgctaccagagccggctgcaagacctgaaagatcgcctggagcagtccgagagcaccaaccgcagcatgcagaactacgtccagttcctcaaatcatcatacgccaacgtgtttggggatggtccctattccaccttcctgactagctctcccatccgctcccgatctcctcctgcctgaggccacttatcagggcctggagccctgatggaagccataggaactccagagttgccaagccatagctgagaagcctggtggttttcctctcccagtgaaaaaatgggttcagggtcttgtccttagctactagctctagaaaagtcccaaaagcagcagaaggtgaagcaggaagcacttggttttctccttcctgatatagtcacctgttggaagtgttaaaatttcctcgacaggccttaaatttactactacattagggtaccacattttaacttaccatgactttgctccttcctttcctgagaaaatatttccactggattttttccaccagtccccttacagccctcattgttttaggaatctctctcaggtttttttctgacctaaaccagcaggaagtcgtcctgggctgtaagcaccatcacttgcttttttttttttctgatttcacaagtgtggtgttttcccaaggctcccttcccaagctcagtgcaaacctctcactcccaagtttctttgaggccacttgcccccaagcacttcacaatagaccctcgagggcttgtgtccatttggccttttacaagtgtaatgccaatttcattgatttttgtttcttttggcctgatttgtatctctggaatgcatttattcttgaaatatttgtgtgattttacaaaaagcttttgtaatcagttatttaaggctccatttgatgatttcctttacccaaccagtcctcatccctcctctaaaaaatgattaagtaaaatgctgcaggacagccagtagacatttttaaagtacttggtgcctgaaacatcaggcttctcatttcattttagctcaggttggtgctttcacattgtaatcaatgaactgtcaggagggaacaaactgtaagaaggactgcttggtgttttagggtagatcactttagctattaggaagaggatggggtagtgtacagtatatatttttaaaatgtgaattggtttctgaataagaatttgggccatttttgttcccca

SEQ ID NO: 435521 - DNA, 3826 bp, Homo sapiens
cgccccttctcctaggagacagttgtccggccccgccccagcatccccgcggctccctgcgcggttctggccctctggggcccacttggggccgagcggttctcacccgccctctccgcacgtccgccggcgcctcaggtttcccccggacagttgctgtgcgacttggacagtagaggagcgcctcccaagttttcatccaactgccaaccccaaagcttccacccttctcccctcagagaggacgtttgatgccgggccccttgagaggctcattgacaagcctgcccctctgggtccccctgagcagagcctgctgacccaattgcccacctttgcggctttgatgcctagccatgtctgcctcatcctcaggcggctcccccaggtttccatcgtgtgggaagaacggagtaacgagtctcacgcagaaaaaggtcttgagagcaccttgtggcgcacccagtgtaactgtgacgaaatctcacaagcgaggaatgaaaggggacactgtgaatgtgcggcggagtgtccgggtgaaaaccaagaatccacctcattgcctggagatcacgccaccatcttcagaaaagctggtctcagtgatgcggttaagtgacctctctacagaagatgatgactcaggtcactgtaaaatgaaccgttatgataagaagattgatagtctaatgaatgcggttggttgtctgaagtctgaggtcaagatgcaaaaaggtgagcgccagatggccaaaaggttcctggaggaacggaaggaagagctggaggaggtggcccacgaactggctgagactgagcacgagaacacggtgttgaggcacaacatcgagcgcatgaaggaggagaaggacttcaccatacttcagaagaaacacctacaacaggagaaggagtgcctcatgtccaagctggtggaggcggaaatggatggggctgcggctgccaagcaggtcatggccttgaaggataccatcgggaagctgaaaacggagaaacaaatgacctgcacggacatcaacaccctgacaaggcagaaggaacttctcctgcagaagctgagcacatttgaggagaccaaccgcaccctccgagacctcctgagggaacagcactgcaaagaggattctgaaagactaatggagcaacaaggagcactgctgaaacggctggcggaggccgactcagagaaagcgcgcctgctgttactgctgcaagacaaggacaaggaggtggaagagctccttcaggaaatacaatgtgagaaggctcaagcaaagacagcctctgagctttctaaatccatggagtccatgcgtgggcatttgcaggcacagcttcggtccaaagaggctgagaacagtcgcctgtgcatgcagattaagaatctggagcgcagcgggaatcagcataaggcagaagtggaggccatcatggagcagctgaaggagttgaagcagaagggagaccgagacaaagagagcttgaagaaggccatccgagcccagaaggagcgagccgagaagagcgaggagtatgctgagcagctacacgtgcaactcgctgacaaggatctttatgtcgctgaagctttatccactctggaatcctggaggagccgctacaaccaagttgtaaaagaaaagggagaccttgagctggaaattattgtcctgaatgaccgggtaacagatcttgtaaaccaacaacaaaccctggaggagaagatgcgggaagaccgggatagcctggtggagagactacaccgtcagactgctgagtattccgcattcaagctggagaatgagaggctgaaggccagctttgctccaatggaggacaaactcaaccaggcacacctcgaggtccagcagctgaaggcctcagtgaagaactatgaggggatgattgacaactataagagtcaggtgatgaagaccagattggaggctgatgaagtagctgcccagctagaacgctgtgacaaagagaacaagatccttaaagatgagatgaacaaagagattgaggcggcacgaaggcagttccagtctcagctggctgacctgcagcagctccctgacatcctgaagatcacggaggcgaagctggctgagtgccaagaccaactgcagggctatgagcggaagaacatcgacctcacagccatcatatcagacctgcgcagccggatcgaacaccagggggacaagctggagatggcgagagagaaacatcaggcttcccagaaggaaaataaacagctgagtctgaaggtggatgaactggagaggaaactggaggcgaccagtgcccagaatatcgagttcctacaggtgattgccaagagggaggaggcaatccaccagtcccagctgcggctggaggagaaaacacgggaatgtgggaccctggcaaggcagttggagagtgccattgaagatgcgaggaggcaggtggaacaaaccaaggagcacgcactctccaaggagcgagcagcccagaacaaaatcctggaccttgagacccagctgagcagaaccaaaacggaattgagccagctgcggcggagccgtgatgatgcggaccgccgctaccagagccggctgcaagacctgaaagatcgcctggagcagtccgagagcaccaaccgcagcatgcagaactacgtccagttcctcaaatcatcatacgccaacgtgtttggggatggtccctattccaccttcctgactagctctcccatccgctcccgatctcctcctgcctgaggccacttatcagggcctggagccctgatggaagccataggaactccagagttgccaagccatagctgagaagcctggtggttttcctctcccagtgaaaaaatgggttcagggtcttgtccttagctactagctctagaaaagtcccaaaagcagcagaaggtgaagcaggaagcacttggttttctccttcctgatatagtcacctgttggaagtgttaaaatttcctcgacaggccttaaatttactactacattagggtaccacattttaacttaccatgactttgctccttcctttcctgagaaaatatttccactggattttttccaccagtccccttacagccctcattgttttaggaatctctctcaggtttttttctgacctaaaccagcaggaagtcgtcctgggctgtaagcaccatcacttgcttttttttttttctgatttcacaagtgtggtgttttcccaaggctcccttcccaagctcagtgcaaacctctcactcccaagtttctttgaggccacttgcccccaagcacttcacaatagaccctcgagggcttgtgtccatttggccttttacaagtgtaatgccaatttcattgatttttgtttcttttggcctgatttgtatctctggaatgcatttattcttgaaatatttgtgtgattttacaaaaagcttttgtaatcagttatttaaggctccatttgatgatttcctttacccaaccagtcctcatccctcctctaaaaaatgattaagtaaaatgctgcaggacagccagtagacatttttaaagtacttggtgcctgaaacatcaggcttctcatttcattttagctcaggttggtgctttcacattgtaatcaatgaactgtcaggagggaacaaactgtaagaaggactgcttggtgttttagggtagatcactttagctattaggaagaggatggggtagtgtacagtatatatttttaaaatgtgaattggtttctgaataagaatttgggccatttttgttcccca

SEQ ID NO: 435522 - DNA, 3585 bp, Homo sapiens
cgcggggcctctcctcctcccgctaacgggcggtcggccgcctccttcctctcttggctaccacggggctctgcccctcctctgccgcccgcgggcaggcttcacctttctctctatgggcagaaaccggtaccctcctgcctgctggtttccatcgtgtgggaagaacggagtaacgagtctcacgcagaaaaaggtcttgagagcaccttgtggcgcacccagtgtaactgtgacgaaatctcacaagcgaggaatgaaaggggacactgtgaatgtgcggcggagtgtccgggtgaaaaccaagaatccacctcattgcctggagatcacgccaccatcttcagaaaagctggtctcagtgatgcggttaagtgacctctctacagaagatgatgactcaggtcactgtaaaatgaaccgttatgataagaagattgatagtctaatgaatgcggttggttgtctgaagtctgaggtcaagatgcaaaaaggtgagcgccagatggccaaaaggttcctggaggaacggaaggaagagctggaggaggtggcccacgaactggctgagactgagcacgagaacacggtgttgaggcacaacatcgagcgcatgaaggaggagaaggacttcaccatacttcagaagaaacacctacaacaggagaaggagtgcctcatgtccaagctggtggaggcggaaatggatggggctgcggctgccaagcaggtcatggccttgaaggataccatcgggaagctgaaaacggagaaacaaatgacctgcacggacatcaacaccctgacaaggcagaaggaacttctcctgcagaagctgagcacatttgaggagaccaaccgcaccctccgagacctcctgagggaacagcactgcaaagaggattctgaaagactaatggagcaacaaggagcactgctgaaacggctggcggaggccgactcagagaaagcgcgcctgctgttactgctgcaagacaaggacaaggaggtggaagagctccttcaggaaatacaatgtgagaaggctcaagcaaagacagcctctgagctttctaaatccatggagtccatgcgtgggcatttgcaggcacagcttcggtccaaagaggctgagaacagtcgcctgtgcatgcagattaagaatctggagcgcagcgggaatcagcataaggcagaagtggaggccatcatggagcagctgaaggagttgaagcagaagggagaccgagacaaagagagcttgaagaaggccatccgagcccagaaggagcgagccgagaagagcgaggagtatgctgagcagctacacgtgcaactcgctgacaaggatctttatgtcgctgaagctttatccactctggaatcctggaggagccgctacaaccaagttgtaaaagaaaagggagaccttgagctggaaattattgtcctgaatgaccgggtaacagatcttgtaaaccaacaacaaaccctggaggagaagatgcgggaagaccgggatagcctggtggagagactacaccgtcagactgctgagtattccgcattcaagctggagaatgagaggctgaaggccagctttgctccaatggaggacaaactcaaccaggcacacctcgaggtccagcagctgaaggcctcagtgaagaactatgaggggatgattgacaactataagagtcaggtgatgaagaccagattggaggctgatgaagtagctgcccagctagaacgctgtgacaaagagaacaagatccttaaagatgagatgaacaaagagattgaggcggcacgaaggcagttccagtctcagctggctgacctgcagcagctccctgacatcctgaagatcacggaggcgaagctggctgagtgccaagaccaactgcagggctatgagcggaagaacatcgacctcacagccatcatatcagacctgcgcagccggatcgaacaccagggggacaagctggagatggcgagagagaaacatcaggcttcccagaaggaaaataaacagctgagtctgaaggtggatgaactggagaggaaactggaggcgaccagtgcccagaatatcgagttcctacaggtgattgccaagagggaggaggcaatccaccagtcccagctgcggctggaggagaaaacacgggaatgtgggaccctggcaaggcagttggagagtgccattgaagatgcgaggaggcaggtggaacaaaccaaggagcacgcactctccaaggagcgagcagcccagaacaaaatcctggaccttgagacccagctgagcagaaccaaaacggaattgagccagctgcggcggagccgtgatgatgcggaccgccgctaccagagccggctgcaagacctgaaagatcgcctggagcagtccgagagcaccaaccgcagcatgcagaactacgtccagttcctcaaatcatcatacgccaacgtgtttggggatggtccctattccaccttcctgactagctctcccatccgctcccgatctcctcctgcctgaggccacttatcagggcctggagccctgatggaagccataggaactccagagttgccaagccatagctgagaagcctggtggttttcctctcccagtgaaaaaatgggttcagggtcttgtccttagctactagctctagaaaagtcccaaaagcagcagaaggtgaagcaggaagcacttggttttctccttcctgatatagtcacctgttggaagtgttaaaatttcctcgacaggccttaaatttactactacattagggtaccacattttaacttaccatgactttgctccttcctttcctgagaaaatatttccactggattttttccaccagtccccttacagccctcattgttttaggaatctctctcaggtttttttctgacctaaaccagcaggaagtcgtcctgggctgtaagcaccatcacttgcttttttttttttctgatttcacaagtgtggtgttttcccaaggctcccttcccaagctcagtgcaaacctctcactcccaagtttctttgaggccacttgcccccaagcacttcacaatagaccctcgagggcttgtgtccatttggccttttacaagtgtaatgccaatttcattgatttttgtttcttttggcctgatttgtatctctggaatgcatttattcttgaaatatttgtgtgattttacaaaaagcttttgtaatcagttatttaaggctccatttgatgatttcctttacccaaccagtcctcatccctcctctaaaaaatgattaagtaaaatgctgcaggacagccagtagacatttttaaagtacttggtgcctgaaacatcaggcttctcatttcattttagctcaggttggtgctttcacattgtaatcaatgaactgtcaggagggaacaaactgtaagaaggactgcttggtgttttagggtagatcactttagctattaggaagaggatggggtagtgtacagtatatatttttaaaatgtgaattggtttctgaataagaatttgggccatttttgttcccca

SEQ ID NO: 435523 - DNA, 3647 bp, Homo sapiens
ggccaatgggcgagctgccgaccgggtgtcggaaaaggaggcggaagcggggaggagccgctgccagagccagactgcatccgccgcggcgtctccatggcacgaccctggcctccgacttcaacgacttcataaggcggcgtttctgggcgcagccgtgtcgctcctggtttccatcgtgtgggaagaacggagtaacgagtctcacgcagaaaaaggtcttgagagcaccttgtggcgcacccagtgtaactgtgacgatcaaccatttttgtgttgtcctcccccacctgccagaagccaaccatgaaggaccgctcttcaactccccccttacatgttcacgtggatgagaacacccctgtccacgtccacataaaaaaactcccgaaaccatcagcgaccagcagccagaaatctcacaagcgaggaatgaaaggggacactgtgaatgtgcggcggagtgtccgggtgaaaaccaaggtaccttggatgccccctggaaaatcatctgcccggcctgtgggatgcaagtgggaggtcaagatgcaaaaaggtgagcgccagatggccaaaaggttcctggaggaacggaaggaagagctggaggaggtggcccacgaactggctgagactgagcacgagaacacggtgttgaggcacaacatcgagcgcatgaaggaggagaaggacttcaccatacttcagaagaaacacctacaacaggagaaggagtgcctcatgtccaagctggtggaggcggaaatggatggggctgcggctgccaagcaggtcatggccttgaaggataccatcgggaagctgaaaacggagaaacaaatgacctgcacggacatcaacaccctgacaaggcagaaggaacttctcctgcagaagctgagcacatttgaggagaccaaccgcaccctccgagacctcctgagggaacagcactgcaaagaggattctgaaagactaatggagcaacaaggagcactgctgaaacggctggcggaggccgactcagagaaagcgcgcctgctgttactgctgcaagacaaggacaaggaggtggaagagctccttcaggaaatacaatgtgagaaggctcaagcaaagacagcctctgagctttctaaatccatggagtccatgcgtgggcatttgcaggcacagcttcggtccaaagaggctgagaacagtcgcctgtgcatgcagattaagaatctggagcgcagcgggaatcagcataaggcagaagtggaggccatcatggagcagctgaaggagttgaagcagaagggagaccgagacaaagagagcttgaagaaggccatccgagcccagaaggagcgagccgagaagagcgaggagtatgctgagcagctacacgtgcaactcgctgacaaggatctttatgtcgctgaagctttatccactctggaatcctggaggagccgctacaaccaagttgtaaaagaaaagggagaccttgagctggaaattattgtcctgaatgaccgggtaacagatcttgtaaaccaacaacaaaccctggaggagaagatgcgggaagaccgggatagcctggtggagagactacaccgtcagactgctgagtattccgcattcaagctggagaatgagaggctgaaggccagctttgctccaatggaggacaaactcaaccaggcacacctcgaggtccagcagctgaaggcctcagtgaagaactatgaggggatgattgacaactataagagtcaggtgatgaagaccagattggaggctgatgaagtagctgcccagctagaacgctgtgacaaagagaacaagatccttaaagatgagatgaacaaagagattgaggcggcacgaaggcagttccagtctcagctggctgacctgcagcagctccctgacatcctgaagatcacggaggcgaagctggctgagtgccaagaccaactgcagggctatgagcggaagaacatcgacctcacagccatcatatcagacctgcgcagccggatcgaacaccagggggacaagctggagatggcgagagagaaacatcaggcttcccagaaggaaaataaacagctgagtctgaaggtggatgaactggagaggaaactggaggcgaccagtgcccagaatatcgagttcctacaggtgattgccaagagggaggaggcaatccaccagtcccagctgcggctggaggagaaaacacgggaatgtgggaccctggcaaggcagttggagagtgccattgaagatgcgaggaggcaggtggaacaaaccaaggagcacgcactctccaaggagcgagcagcccagaacaaaatcctggaccttgagacccagctgagcagaaccaaaacggaattgagccagctgcggcggagccgtgatgatgcggaccgccgctaccagagccggctgcaagacctgaaagatcgcctggagcagtccgagagcaccaaccgcagcatgcagaactacgtccagttcctcaaatcatcatacgccaacgtgtttggggatggtccctattccaccttcctgactagctctcccatccgctcccgatctcctcctgcctgaggccacttatcagggcctggagccctgatggaagccataggaactccagagttgccaagccatagctgagaagcctggtggttttcctctcccagtgaaaaaatgggttcagggtcttgtccttagctactagctctagaaaagtcccaaaagcagcagaaggtgaagcaggaagcacttggttttctccttcctgatatagtcacctgttggaagtgttaaaatttcctcgacaggccttaaatttactactacattagggtaccacattttaacttaccatgactttgctccttcctttcctgagaaaatatttccactggattttttccaccagtccccttacagccctcattgttttaggaatctctctcaggtttttttctgacctaaaccagcaggaagtcgtcctgggctgtaagcaccatcacttgcttttttttttttctgatttcacaagtgtggtgttttcccaaggctcccttcccaagctcagtgcaaacctctcactcccaagtttctttgaggccacttgcccccaagcacttcacaatagaccctcgagggcttgtgtccatttggccttttacaagtgtaatgccaatttcattgatttttgtttcttttggcctgatttgtatctctggaatgcatttattcttgaaatatttgtgtgattttacaaaaagcttttgtaatcagttatttaaggctccatttgatgatttcctttacccaaccagtcctcatccctcctctaaaaaatgattaagtaaaatgctgcaggacagccagtagacatttttaaagtacttggtgcctgaaacatcaggcttctcatttcattttagctcaggttggtgctttcacattgtaatcaatgaactgtcaggagggaacaaactgtaagaaggactgcttggtgttttagggtagatcactttagctattaggaagaggatggggtagtgtacagtatatatttttaaaatgtgaattggtttctgaataagaatttgggccatttttgttcccca

SEQ ID NO: 435524 - DNA, 3655 bp, Homo sapiens
cgccccttctcctaggagacagttgtccggccccgccccagcatccccgcggctccctgcgcggttctggccctctggggcccacttggggccgagcggttctcacccgccctctccgcacgtccgccggcgcctcaggtttcccccggacagttgctgtgcgacttggacagtagaggagcgcctcccaagttttcatccaactgccaaccccaaagcttccacccttctcccctcagagaggacgtttgatgccgggccccttgagaggctcattgacaagcctgcccctctgggtccccctgagcagagcctgctgacccaattgcccacctttgcggctttgatgcctagccatgtctgcctcatcctcaggcggctcccccaggtttccatcgtgtgggaagaacggagtaacgagtctcacgcagaaaaaggtcttgagagcaccttgtggcgcacccagtgtaactgtgacgaaatctcacaagcgaggaatgaaaggggacactgtgaatgtgcggcggagtgtccgggtgaaaaccaaggtcaagatgcaaaaaggtgagcgccagatggccaaaaggttcctggaggaacggaaggaagagctggaggaggtggcccacgaactggctgagactgagcacgagaacacggtgttgaggcacaacatcgagcgcatgaaggaggagaaggacttcaccatacttcagaagaaacacctacaacaggagaaggagtgcctcatgtccaagctggtggaggcggaaatggatggggctgcggctgccaagcaggtcatggccttgaaggataccatcgggaagctgaaaacggagaaacaaatgacctgcacggacatcaacaccctgacaaggcagaaggaacttctcctgcagaagctgagcacatttgaggagaccaaccgcaccctccgagacctcctgagggaacagcactgcaaagaggattctgaaagactaatggagcaacaaggagcactgctgaaacggctggcggaggccgactcagagaaagcgcgcctgctgttactgctgcaagacaaggacaaggaggtggaagagctccttcaggaaatacaatgtgagaaggctcaagcaaagacagcctctgagctttctaaatccatggagtccatgcgtgggcatttgcaggcacagcttcggtccaaagaggctgagaacagtcgcctgtgcatgcagattaagaatctggagcgcagcgggaatcagcataaggcagaagtggaggccatcatggagcagctgaaggagttgaagcagaagggagaccgagacaaagagagcttgaagaaggccatccgagcccagaaggagcgagccgagaagagcgaggagtatgctgagcagctacacgtgcaactcgctgacaaggatctttatgtcgctgaagctttatccactctggaatcctggaggagccgctacaaccaagttgtaaaagaaaagggagaccttgagctggaaattattgtcctgaatgaccgggtaacagatcttgtaaaccaacaacaaaccctggaggagaagatgcgggaagaccgggatagcctggtggagagactacaccgtcagactgctgagtattccgcattcaagctggagaatgagaggctgaaggccagctttgctccaatggaggacaaactcaaccaggcacacctcgaggtccagcagctgaaggcctcagtgaagaactatgaggggatgattgacaactataagagtcaggtgatgaagaccagattggaggctgatgaagtagctgcccagctagaacgctgtgacaaagagaacaagatccttaaagatgagatgaacaaagagattgaggcggcacgaaggcagttccagtctcagctggctgacctgcagcagctccctgacatcctgaagatcacggaggcgaagctggctgagtgccaagaccaactgcagggctatgagcggaagaacatcgacctcacagccatcatatcagacctgcgcagccggatcgaacaccagggggacaagctggagatggcgagagagaaacatcaggcttcccagaaggaaaataaacagctgagtctgaaggtggatgaactggagaggaaactggaggcgaccagtgcccagaatatcgagttcctacaggtgattgccaagagggaggaggcaatccaccagtcccagctgcggctggaggagaaaacacgggaatgtgggaccctggcaaggcagttggagagtgccattgaagatgcgaggaggcaggtggaacaaaccaaggagcacgcactctccaaggagcgagcagcccagaacaaaatcctggaccttgagacccagctgagcagaaccaaaacggaattgagccagctgcggcggagccgtgatgatgcggaccgccgctaccagagccggctgcaagacctgaaagatcgcctggagcagtccgagagcaccaaccgcagcatgcagaactacgtccagttcctcaaatcatcatacgccaacgtgtttggggatggtccctattccaccttcctgactagctctcccatccgctcccgatctcctcctgcctgaggccacttatcagggcctggagccctgatggaagccataggaactccagagttgccaagccatagctgagaagcctggtggttttcctctcccagtgaaaaaatgggttcagggtcttgtccttagctactagctctagaaaagtcccaaaagcagcagaaggtgaagcaggaagcacttggttttctccttcctgatatagtcacctgttggaagtgttaaaatttcctcgacaggccttaaatttactactacattagggtaccacattttaacttaccatgactttgctccttcctttcctgagaaaatatttccactggattttttccaccagtccccttacagccctcattgttttaggaatctctctcaggtttttttctgacctaaaccagcaggaagtcgtcctgggctgtaagcaccatcacttgcttttttttttttctgatttcacaagtgtggtgttttcccaaggctcccttcccaagctcagtgcaaacctctcactcccaagtttctttgaggccacttgcccccaagcacttcacaatagaccctcgagggcttgtgtccatttggccttttacaagtgtaatgccaatttcattgatttttgtttcttttggcctgatttgtatctctggaatgcatttattcttgaaatatttgtgtgattttacaaaaagcttttgtaatcagttatttaaggctccatttgatgatttcctttacccaaccagtcctcatccctcctctaaaaaatgattaagtaaaatgctgcaggacagccagtagacatttttaaagtacttggtgcctgaaacatcaggcttctcatttcattttagctcaggttggtgctttcacattgtaatcaatgaactgtcaggagggaacaaactgtaagaaggactgcttggtgttttagggtagatcactttagctattaggaagaggatggggtagtgtacagtatatatttttaaaatgtgaattggtttctgaataagaatttgggccatttttgttcccca

SEQ ID NO: 435525 - DNA, 3274 bp, Homo sapiens
attgtagcccaagcttttaattttgatgttgggaattctccaaaaccatcatttaaacatggataggtaatgttccatcacaagggttcagagtatgttcttcctggggtccccgagttagctgttacagcttttcccgtctaatcagtaaataagcctccagtggtggaactcgtggtcaaggttctgccttctgagttcatgtgtttctccctcctctacatcagaatccacctcattgcctggagatcacgccaccatcttcagaaaagctggtctcagtgatgcggttaagtgacctctctacagaagatgatgactcaggtcaacttcagaagaaacacctacaacaggagaaggagtgcctcatgtccaagctggtggaggcggaaatggatggggctgcggctgccaagcaggtcatggccttgaaggataccatcgggaagctgaaaacggagaaacaaatgacctgcacggacatcaacaccctgacaaggcagaaggaacttctcctgcagaagctgagcacatttgaggagaccaaccgcaccctccgagacctcctgagggaacagcactgcaaagaggattctgaaagactaatggagcaacaaggagcactgctgaaacggctggcggaggccgactcagagaaagcgcgcctgctgttactgctgcaagacaaggacaaggaggtggaagagctccttcaggaaatacaatgtgagaaggctcaagcaaagacagcctctgagctttctaaatccatggagtccatgcgtgggcatttgcaggcacagcttcggtccaaagaggctgagaacagtcgcctgtgcatgcagattaagaatctggagcgcagcgggaatcagcataaggcagaagtggaggccatcatggagcagctgaaggagttgaagcagaagggagaccgagacaaagagagcttgaagaaggccatccgagcccagaaggagcgagccgagaagagcgaggagtatgctgagcagctacacgtgcaactcgctgacaaggatctttatgtcgctgaagctttatccactctggaatcctggaggagccgctacaaccaagttgtaaaagaaaagggagaccttgagctggaaattattgtcctgaatgaccgggtaacagatcttgtaaaccaacaacaaaccctggaggagaagatgcgggaagaccgggatagcctggtggagagactacaccgtcagactgctgagtattccgcattcaagctggagaatgagaggctgaaggccagctttgctccaatggaggacaaactcaaccaggcacacctcgaggtccagcagctgaaggcctcagtgaagaactatgaggggatgattgacaactataagagtcaggtgatgaagaccagattggaggctgatgaagtagctgcccagctagaacgctgtgacaaagagaacaagatccttaaagatgagatgaacaaagagattgaggcggcacgaaggcagttccagtctcagctggctgacctgcagcagctccctgacatcctgaagatcacggaggcgaagctggctgagtgccaagaccaactgcagggctatgagcggaagaacatcgacctcacagccatcatatcagacctgcgcagccggatcgaacaccagggggacaagctggagatggcgagagagaaacatcaggcttcccagaaggaaaataaacagctgagtctgaaggtggatgaactggagaggaaactggaggcgaccagtgcccagaatatcgagttcctacaggtgattgccaagagggaggaggcaatccaccagtcccagctgcggctggaggagaaaacacgggaatgtgggaccctggcaaggcagttggagagtgccattgaagatgcgaggaggcaggtggaacaaaccaaggagcacgcactctccaaggagcgagcagcccagaacaaaatcctggaccttgagacccagctgagcagaaccaaaacggaattgagccagctgcggcggagccgtgatgatgcggaccgccgctaccagagccggctgcaagacctgaaagatcgcctggagcagtccgagagcaccaaccgcagcatgcagaactacgtccagttcctcaaatcatcatacgccaacgtgtttggggatggtccctattccaccttcctgactagctctcccatccgctcccgatctcctcctgcctgaggccacttatcagggcctggagccctgatggaagccataggaactccagagttgccaagccatagctgagaagcctggtggttttcctctcccagtgaaaaaatgggttcagggtcttgtccttagctactagctctagaaaagtcccaaaagcagcagaaggtgaagcaggaagcacttggttttctccttcctgatatagtcacctgttggaagtgttaaaatttcctcgacaggccttaaatttactactacattagggtaccacattttaacttaccatgactttgctccttcctttcctgagaaaatatttccactggattttttccaccagtccccttacagccctcattgttttaggaatctctctcaggtttttttctgacctaaaccagcaggaagtcgtcctgggctgtaagcaccatcacttgcttttttttttttctgatttcacaagtgtggtgttttcccaaggctcccttcccaagctcagtgcaaacctctcactcccaagtttctttgaggccacttgcccccaagcacttcacaatagaccctcgagggcttgtgtccatttggccttttacaagtgtaatgccaatttcattgatttttgtttcttttggcctgatttgtatctctggaatgcatttattcttgaaatatttgtgtgattttacaaaaagcttttgtaatcagttatttaaggctccatttgatgatttcctttacccaaccagtcctcatccctcctctaaaaaatgattaagtaaaatgctgcaggacagccagtagacatttttaaagtacttggtgcctgaaacatcaggcttctcatttcattttagctcaggttggtgctttcacattgtaatcaatgaactgtcaggagggaacaaactgtaagaaggactgcttggtgttttagggtagatcactttagctattaggaagaggatggggtagtgtacagtatatatttttaaaatgtgaattggtttctgaataagaatttgggccatttttgttcccca

SEQ ID NO: 435526 - DNA, 2896 bp, Homo sapiens
cttgaagatgacctctggtcaccagggcctctgaggagagctcatcatgggtctcctgggatcacagtgagtcaaggcatgagaaacaaatgacctgcacggacatcaacaccctgacaaggcagaaggaacttctcctgcagaagctgagcacatttgaggagaccaaccgcaccctccgagacctcctgagggaacagcactgcaaagaggattctgaaagactaatggagcaacaaggagcactgctgaaacggctggcggaggccgactcagagaaagcgcgcctgctgttactgctgcaagacaaggacaaggaggtggaagagctccttcaggaaatacaatgtgagaaggctcaagcaaagacagcctctgagctttctaaatccatggagtccatgcgtgggcatttgcaggcacagcttcggtccaaagaggctgagaacagtcgcctgtgcatgcagattaagaatctggagcgcagcgggaatcagcataaggcagaagtggaggccatcatggagcagctgaaggagttgaagcagaagggagaccgagacaaagagagcttgaagaaggccatccgagcccagaaggagcgagccgagaagagcgaggagtatgctgagcagctacacgtgcaactcgctgacaaggatctttatgtcgctgaagctttatccactctggaatcctggaggagccgctacaaccaagttgtaaaagaaaagggagaccttgagctggaaattattgtcctgaatgaccgggtaacagatcttgtaaaccaacaacaaaccctggaggagaagatgcgggaagaccgggatagcctggtggagagactacaccgtcagactgctgagtattccgcattcaagctggagaatgagaggctgaaggccagctttgctccaatggaggacaaactcaaccaggcacacctcgaggtccagcagctgaaggcctcagtgaagaactatgaggggatgattgacaactataagagtcaggtgatgaagaccagattggaggctgatgaagtagctgcccagctagaacgctgtgacaaagagaacaagatccttaaagatgagatgaacaaagagattgaggcggcacgaaggcagttccagtctcagctggctgacctgcagcagctccctgacatcctgaagatcacggaggcgaagctggctgagtgccaagaccaactgcagggctatgagcggaagaacatcgacctcacagccatcatatcagacctgcgcagccggatcgaacaccagggggacaagctggagatggcgagagagaaacatcaggcttcccagaaggaaaataaacagctgagtctgaaggtggatgaactggagaggaaactggaggcgaccagtgcccagaatatcgagttcctacaggtgattgccaagagggaggaggcaatccaccagtcccagctgcggctggaggagaaaacacgggaatgtgggaccctggcaaggcagttggagagtgccattgaagatgcgaggaggcaggtggaacaaaccaaggagcacgcactctccaaggagcgagcagcccagaacaaaatcctggaccttgagacccagctgagcagaaccaaaacggaattgagccagctgcggcggagccgtgatgatgcggaccgccgctaccagagccggctgcaagacctgaaagatcgcctggagcagtccgagagcaccaaccgcagcatgcagaactacgtccagttcctcaaatcatcatacgccaacgtgtttggggatggtccctattccaccttcctgactagctctcccatccgctcccgatctcctcctgcctgaggccacttatcagggcctggagccctgatggaagccataggaactccagagttgccaagccatagctgagaagcctggtggttttcctctcccagtgaaaaaatgggttcagggtcttgtccttagctactagctctagaaaagtcccaaaagcagcagaaggtgaagcaggaagcacttggttttctccttcctgatatagtcacctgttggaagtgttaaaatttcctcgacaggccttaaatttactactacattagggtaccacattttaacttaccatgactttgctccttcctttcctgagaaaatatttccactggattttttccaccagtccccttacagccctcattgttttaggaatctctctcaggtttttttctgacctaaaccagcaggaagtcgtcctgggctgtaagcaccatcacttgcttttttttttttctgatttcacaagtgtggtgttttcccaaggctcccttcccaagctcagtgcaaacctctcactcccaagtttctttgaggccacttgcccccaagcacttcacaatagaccctcgagggcttgtgtccatttggccttttacaagtgtaatgccaatttcattgatttttgtttcttttggcctgatttgtatctctggaatgcatttattcttgaaatatttgtgtgattttacaaaaagcttttgtaatcagttatttaaggctccatttgatgatttcctttacccaaccagtcctcatccctcctctaaaaaatgattaagtaaaatgctgcaggacagccagtagacatttttaaagtacttggtgcctgaaacatcaggcttctcatttcattttagctcaggttggtgctttcacattgtaatcaatgaactgtcaggagggaacaaactgtaagaaggactgcttggtgttttagggtagatcactttagctattaggaagaggatggggtagtgtacagtatatatttttaaaatgtgaattggtttctgaataagaatttgggccatttttgttcccca

SEQ ID NO: 435527 - DNA, 2492 bp, Homo sapiens
gtgtttcctaactgctctatgaaaagaaaggttaaactctgtgagttgaaggcacacatcacaaaggagaatctggagcgcagcgggaatcagcataaggcagaagtggaggccatcatggagcagctgaaggagttgaagcagaagggagaccgagacaaagagagcttgaagaaggccatccgagcccagaaggagcgagccgagaagagcgaggagtatgctgagcagctacacgtgcaactcgctgacaaggatctttatgtcgctgaagctttatccactctggaatcctggaggagccgctacaaccaagttgtaaaagaaaagggagaccttgagctggaaattattgtcctgaatgaccgggtaacagatcttgtaaaccaacaacaaaccctggaggagaagatgcgggaagaccgggatagcctggtggagagactacaccgtcagactgctgagtattccgcattcaagctggagaatgagaggctgaaggccagctttgctccaatggaggacaaactcaaccaggcacacctcgaggtccagcagctgaaggcctcagtgaagaactatgaggggatgattgacaactataagagtcaggtgatgaagaccagattggaggctgatgaagtagctgcccagctagaacgctgtgacaaagagaacaagatccttaaagatgagatgaacaaagagattgaggcggcacgaaggcagttccagtctcagctggctgacctgcagcagctccctgacatcctgaagatcacggaggcgaagctggctgagtgccaagaccaactgcagggctatgagcggaagaacatcgacctcacagccatcatatcagacctgcgcagccggatcgaacaccagggggacaagctggagatggcgagagagaaacatcaggcttcccagaaggaaaataaacagctgagtctgaaggtggatgaactggagaggaaactggaggcgaccagtgcccagaatatcgagttcctacaggtgattgccaagagggaggaggcaatccaccagtcccagctgcggctggaggagaaaacacgggaatgtgggaccctggcaaggcagttggagagtgccattgaagatgcgaggaggcaggtggaacaaaccaaggagcacgcactctccaaggagcgagcagcccagaacaaaatcctggaccttgagacccagctgagcagaaccaaaacggaattgagccagctgcggcggagccgtgatgatgcggaccgccgctaccagagccggctgcaagacctgaaagatcgcctggagcagtccgagagcaccaaccgcagcatgcagaactacgtccagttcctcaaatcatcatacgccaacgtgtttggggatggtccctattccaccttcctgactagctctcccatccgctcccgatctcctcctgcctgaggccacttatcagggcctggagccctgatggaagccataggaactccagagttgccaagccatagctgagaagcctggtggttttcctctcccagtgaaaaaatgggttcagggtcttgtccttagctactagctctagaaaagtcccaaaagcagcagaaggtgaagcaggaagcacttggttttctccttcctgatatagtcacctgttggaagtgttaaaatttcctcgacaggccttaaatttactactacattagggtaccacattttaacttaccatgactttgctccttcctttcctgagaaaatatttccactggattttttccaccagtccccttacagccctcattgttttaggaatctctctcaggtttttttctgacctaaaccagcaggaagtcgtcctgggctgtaagcaccatcacttgcttttttttttttctgatttcacaagtgtggtgttttcccaaggctcccttcccaagctcagtgcaaacctctcactcccaagtttctttgaggccacttgcccccaagcacttcacaatagaccctcgagggcttgtgtccatttggccttttacaagtgtaatgccaatttcattgatttttgtttcttttggcctgatttgtatctctggaatgcatttattcttgaaatatttgtgtgattttacaaaaagcttttgtaatcagttatttaaggctccatttgatgatttcctttacccaaccagtcctcatccctcctctaaaaaatgattaagtaaaatgctgcaggacagccagtagacatttttaaagtacttggtgcctgaaacatcaggcttctcatttcattttagctcaggttggtgctttcacattgtaatcaatgaactgtcaggagggaacaaactgtaagaaggactgcttggtgttttagggtagatcactttagctattaggaagaggatggggtagtgtacagtatatatttttaaaatgtgaattggtttctgaataagaatttgggccatttttgttcccca

SEQ ID NO: 435528 - DNA, 3340 bp, Homo sapiens
ggccaatgggcgagctgccgaccgggtgtcggaaaaggaggcggaagcggggaggagccgctgccagagccagactgcatccgccgcggcgtctccatggcacgaccctggcctccgacttcaacgacttcataaggcggcgtttctgggcgcagccgtgtcgctcctggtttccatcgtgtgggaagaacggagtaacgagtctcacgcagaaaaaggtcttgagagcaccttgtggcgcacccagtgtaactgtgacgatcaaccatttttgtgttgtcctcccccacctgccagaagccaaccatgaaggaccgctcttcaactccccccttacatgttcacgtggatgagaacacccctgtccacgtccacataaaaaaactcccgaaaccatcagcgaccagcagccagaaatctcacaagcgaggaatgaaaggggacactgtgaatgtgcggcggagtgtccgggtgaaaaccaaggtaccttggatgccccctggaaaatcatctgcccggcctgtgggatgcaagtgggagaatccacctcattgcctggagatcacgccaccatcttcagaaaagctggtctcagtgatgcggttaagtgacctctctacagaagatgatgactcaggtcactgtaaaatgaaccgttatgataagaagattgatagtctaatgaatgcggttggttgtctgaagtctgaggtcaagatgcaaaaaggtgagcgccagatggccaaaaggttcctggaggaacggaaggaagagctggaggaggtggcccacgaactggctgagactgagcacgagaacacggtgttgaggcacaacatcgagcgcatgaaggaggagaaggacttcaccatacttcagaagaaacacctacaacaggagaaggagtgcctcatgtccaagctggtggaggcggaaatggatggggctgcggctgccaagcaggtcatggccttgaaggataccatcgggaagctgaaaacggagaaacaaatgacctgcacggacatcaacaccctgacaaggcagaaggaacttctcctgcagaagctgagcacatttgaggagaccaaccgcaccctccgagacctcctgagggaacagcactgcaaagaggattctgaaagactaatggagcaacaaggagcactgctgaaacggctggcggaggccgactcagagaaagcgcgcctgctgttactgctgcaagacaaggacaaggaggtggaagagctccttcaggaaatacaatgtgagaaggctcaagcaaagacagcctctgagctttctaaatccatggagtccatgcgtgggcatttgcaggcacagcttcggtccaaagaggctgagaacagtcgcctgtgcatgcagattaagaatctggagcgcagcgggaatcagcataaggcagaagtggaggccatcatggagcagctgaaggagttgaagcagaagggagaccgagacaaagagagcttgaagaaggccatccgagcccagaaggagcgagccgagaagagcgaggagtatgctgagcagctacacgtgcaactcgctgacaaggatctttatgtcgctgaagctttatccactctggaatcctggaggagccgctacaaccaagttgtaaaagaaaagggagaccttgagctggaaattattgtcctgaatgaccgggtaacagatcttgtaaaccaacaacaaaccctggaggagaagatgcgggaagaccgggatagcctggtggagagactacaccgtcagactgctgagtattccgcattcaagctggagaatgagaggctgaaggccagctttgctccaatggaggacaaactcaaccaggcacacctcgaggtccagcagctgaaggcctcagtgaagaactatgaggggatgattgacaactataagagtcaggtgatgaagaccagattggaggctgatgaagtagctgcccagctagaacgctgtgacaaagagaacaagatccttaaagatgagatgaacaaagagattgaggcggcacgaaggcagttccagtctcagctggctgacctgcagcagctccctgacatcctgaagatcacggaggcgaagctggctgagtgccaagaccaactgcagggctatgagcggaagaacatcgacctcacagccatcatatcagacctgcgcagccggatcgaacaccagggggacaagctggagatggcgagagagaaacatcaggcttcccagaaggaaaataaacagctgagtctgaaggtggatgaactggagaggttagaggcacttggtcccatctctgtcctcttcctaggacctgagactttcagccacttagctgttttttgcttagtgtgcggaagtgttgagggactcgaggccctggaaggtactaggcagacctcagaggaaaagctgcttccatttcagtggaaactggaggcgaccagtgcccagaatatcgagttcctgatatagtcacctgttggaagtgttaaaatttcctcgacaggccttaaatttactactacattagggtaccacattttaacttaccatgactttgctccttcctttcctgagaaaatatttccactggattttttccaccagtccccttacagccctcattgttttaggaatctctctcaggtttttttctgacctaaaccagcaggaagtcgtcctgggctgtaagcaccatcacttgcttttttttttttctgatttcacaagtgtggtgttttcccaaggctcccttcccaagctcagtgcaaacctctcactcccaagtttctttgaggccacttgcccccaagcacttcacaatagaccctcgagggcttgtgtccatttggccttttacaagtgtaatgccaatttcattgatttttgtttcttttggcctgatttgtatctctggaatgcatttattcttgaaatatttgtgtgattttacaaaaagcttttgtaatcagttatttaaggctccatttgatgatttcctttacccaaccagtcctcatccctcctctaaaaaatgattaagtaaaatgctgcaggacagccagtagacatttttaaagtacttggtgcctgaaacatcaggcttctcatttcattttagctcaggttggtgctttcacattgtaatcaatgaactgtcaggagggaacaaactgtaagaaggactgcttggtgttttagggtagatcactttagctattaggaagaggatggggtagtgtacagtatatatttttaaaatgtgaattggtttctgaataagaatttgggccatttttgttcccca

SEQ ID NO: 435529 - DNA, 2182 bp, Homo sapiens
taaccttacattgcctgccttctccgttgaacctgagcattctcagggactttgagccttgatagctgaggcttctgcataaaacagccctctgggtaaattctcaaacttgccaactcaaaaggattgacagatttcctgttgtcttgcctgcacttgtccccagttaagaggaggttgagatcaatagtaccagcaacataacaggtaaagctctgtggttggtttgtatgggccagttagccctgccagctgtttctgccttctcatgtctgtcctggatcctagctgggtctctctgagtggcctcccctgatcgagaaagcatctttgtcattctttagcatcaaacctggtttctcccagtgtggggagagccttttgtctttggagttgggcctaacctgtccctgctgtcctttctcctctaggttgtgcgttgagacttggacacctgctgagggcactgtgcccctttcctgggtgtggacaacaggtcatagggaaaggggagggctctagcgggaaattcctttgtaaaccagtctgtgttcctgtcattttagatcgaacaccagggggacaagctggagatggcgagagagaaacatcaggcttcccagaaggaaaataaacagctgagtctgaaggtggatgaactggagaggaaactggaggcgaccagtgcccagaatatcgagttcctacaggtgattgccaagagggaggaggcaatccaccagtcccagctgcggctggaggagaaaacacgggaatgtgggaccctggcaaggcagttggagagtgccattgaagatgcgaggaggcaggtggaacaaaccaaggagcacgcactctccaaggagcgagcagcccagaacaaaatcctggaccttgagacccagctgagcagaaccaaaacggaattgagccagctgcggcggagccgtgatgatgcggaccgccgctaccagagccggctgcaagacctgaaagatcgcctggagcagtccgagagcaccaaccgcagcatgcagaactacgtccagttcctcaaatcatcatacgccaacgtgtttggggatggtccctattccaccttcctgactagctctcccatccgctcccgatctcctcctgcctgaggccacttatcagggcctggagccctgatggaagccataggaactccagagttgccaagccatagctgagaagcctggtggttttcctctcccagtgaaaaaatgggttcagggtcttgtccttagctactagctctagaaaagtcccaaaagcagcagaaggtgaagcaggaagcacttggttttctccttcctgatatagtcacctgttggaagtgttaaaatttcctcgacaggccttaaatttactactacattagggtaccacattttaacttaccatgactttgctccttcctttcctgagaaaatatttccactggattttttccaccagtccccttacagccctcattgttttaggaatctctctcaggtttttttctgacctaaaccagcaggaagtcgtcctgggctgtaagcaccatcacttgcttttttttttttctgatttcacaagtgtggtgttttcccaaggctcccttcccaagctcagtgcaaacctctcactcccaagtttctttgaggccacttgcccccaagcacttcacaatagaccctcgagggcttgtgtccatttggccttttacaagtgtaatgccaatttcattgatttttgtttcttttggcctgatttgtatctctggaatgcatttattcttgaaatatttgtgtgattttacaaaaagcttttgtaatcagttatttaaggctccatttgatgatttcctttacccaaccagtcctcatccctcctctaaaaaatgattaagtaaaatgctgcaggacagccagtagacatttttaaagtacttggtgcctgaaacatcaggcttctcatttcattttagctcaggttggtgctttcacattgtaatcaatgaactgtcaggagggaacaaactgtaagaaggactgcttggtgttttagggtagatcactttagctattaggaagaggatggggtagtgtacagtatatatttttaaaatgtgaattggtttctgaataagaatttgggccatttttgttcccca

SEQ ID NO: 435530 - DNA, 2338 bp, Homo sapiens
taaccttacattgcctgccttctccgttgaacctgagcattctcagggactttgagccttgatagctgaggcttctgcataaaacagccctctgggtaaattctcaaacttgccaactcaaaaggattgacagatttcctgttgtcttgcctgcacttgtccccagttaagaggaggttgagatcaatagtaccagcaacataacaggtaaagctctgtggttggtttgtatgggccagttagccctgccagctgtttctgccttctcatgtctgtcctggatcctagctgggtctctctgagtggcctcccctgatcgagaaagcatctttgtcattctttagcatcaaacctggtttctcccagtgtggggagagccttttgtctttggagttgggcctaacctgtccctgctgtcctttctcctctaggttgtgcgttgagacttggacacctgctgagggcactgtgcccctttcctgggtgtggacaacaggtcatagggaaaggggagggctctagcgggaaattcctttgtaaaccagtctgtgttcctgtcattttagatcgaacaccagggggacaagctggagatggcgagagagaaacatcaggcttcccagaaggaaaataaacagctgagtctgaaggtggatgaactggagaggttagaggcacttggtcccatctctgtcctcttcctaggacctgagactttcagccacttagctgttttttgcttagtgtgcggaagtgttgagggactcgaggccctggaaggtactaggcagacctcagaggaaaagctgcttccatttcagtggaaactggaggcgaccagtgcccagaatatcgagttcctacaggtgattgccaagagggaggaggcaatccaccagtcccagctgcggctggaggagaaaacacgggaatgtgggaccctggcaaggcagttggagagtgccattgaagatgcgaggaggcaggtggaacaaaccaaggagcacgcactctccaaggagcgagcagcccagaacaaaatcctggaccttgagacccagctgagcagaaccaaaacggaattgagccagctgcggcggagccgtgatgatgcggaccgccgctaccagagccggctgcaagacctgaaagatcgcctggagcagtccgagagcaccaaccgcagcatgcagaactacgtccagttcctcaaatcatcatacgccaacgtgtttggggatggtccctattccaccttcctgactagctctcccatccgctcccgatctcctcctgcctgaggccacttatcagggcctggagccctgatggaagccataggaactccagagttgccaagccatagctgagaagcctggtggttttcctctcccagtgaaaaaatgggttcagggtcttgtccttagctactagctctagaaaagtcccaaaagcagcagaaggtgaagcaggaagcacttggttttctccttcctgatatagtcacctgttggaagtgttaaaatttcctcgacaggccttaaatttactactacattagggtaccacattttaacttaccatgactttgctccttcctttcctgagaaaatatttccactggattttttccaccagtccccttacagccctcattgttttaggaatctctctcaggtttttttctgacctaaaccagcaggaagtcgtcctgggctgtaagcaccatcacttgcttttttttttttctgatttcacaagtgtggtgttttcccaaggctcccttcccaagctcagtgcaaacctctcactcccaagtttctttgaggccacttgcccccaagcacttcacaatagaccctcgagggcttgtgtccatttggccttttacaagtgtaatgccaatttcattgatttttgtttcttttggcctgatttgtatctctggaatgcatttattcttgaaatatttgtgtgattttacaaaaagcttttgtaatcagttatttaaggctccatttgatgatttcctttacccaaccagtcctcatccctcctctaaaaaatgattaagtaaaatgctgcaggacagccagtagacatttttaaagtacttggtgcctgaaacatcaggcttctcatttcattttagctcaggttggtgctttcacattgtaatcaatgaactgtcaggagggaacaaactgtaagaaggactgcttggtgttttagggtagatcactttagctattaggaagaggatggggtagtgtacagtatatatttttaaaatgtgaattggtttctgaataagaatttgggccatttttgttcccca

SEQ ID NO: 435531 - DNA, 2406 bp, Homo sapiens
ggccaatgggcgagctgccgaccgggtgtcggaaaaggaggcggaagcggggaggagccgctgccagagccagactgcatccgccgcggcgtctccatggcacgaccctggcctccgacttcaacgacttcataaggcggcgtttctgggcgcagccgtgtcgctcctggtttccatcgtgtgggaagaacggagtaacgagtctcacgcagaaaaaggtcttgagagcaccttgtggcgcacccagtgtaactgtgacgatcaaccatttttgtgttgtcctcccccacctgccagaagccaaccatgaaggaccgctcttcaactccccccttacatgttcacgtggatgagaacacccctgtccacgtccacataaaaaaactcccgaaaccatcagcgaccagcagccagaaatctcacaagcgaggaatgaaaggggacactgtgaatgtgcggcggagtgtccgggtgaaaaccaaggtaccttggatgccccctggaaaatcatctgcccggcctgtgggatgcaagtgggagaatccacctcattgcctggagatcacgccaccatcttcagaaaagctggtctcagtgatgcggttaagtgacctctctacagaagatgatgactcaggtcactgtaaaatgaaccgttatgataagaagattgatagtctaatgaatgcggttggttgtctgaagtctgaggtcaagatgcaaaaaggtgagcgccagatggccaaaaggttcctggaggaacggaaggaagagctggaggaggtggcccacgaactggctgagactgagcacgagaacacggtgttgaggcacaacatcgagcgcatgaaggaggagaaggacttcaccatacttcagaagaaacacctacaacaggagaaggagtgcctcatgtccaagctggtggaggcggaaatggatggggctgcggctgccaagcaggtcatggccttgaaggataccatcgggaagctgaaaacggagaaacaaatgacctgcacggacatcaacaccctgacaaggcagaaggaacttctcctgcagaagctgagcacatttgaggagaccaaccgcaccctccgagacctcctgagggaacagcactgcaaagaggattctgaaagactaatggagcaacaaggagcactgctgaaacggctggcggaggccgactcagagaaagcgcgcctgctgttactgctgcaagacaaggacaaggaggtggaagagctccttcaggaaatacaatgtgagaaggctcaagcaaagacagcctctgagctttctaaatccatggagtccatgcgtgggcatttgcaggcacagcttcggtccaaagaggctgagaacagtcgcctgtgcatgcagattaagaatctggagcgcagcgggaatcagcataaggcagaagtggaggccatcatggagcagctgaaggagttgaagcagaagggagaccgagacaaagagagcttgaagaaggccatccgagcccagaaggagcgagccgagaagagcgaggagtatgctgagcagctacacgtgcaactcgctgacaaggatctttatgtcgctgaagctttatccactctggaatcctggaggagccgctacaaccaagttgtaaaagaaaagggagaccttgagctggaaattattgtcctgaatgaccgggtaacagatcttgtaaaccaacaacaaaccctggaggagaagatgcgggaagaccgggatagcctggtggagagactacaccgtcagactgctgagtattccgcattcaagctggagaatgagaggctgaaggccagctttgctccaatggaggacaaactcaaccaggcacacctcgaggtccagcagctgaaggcctcagtgaagaactatgaggggaatgttacctgcaaataacaaaacaacaacaaaaaacacacaccttcgacgagcccctcttatctgtctcgggggttggcgccaaaacaaggccgcgtcctctagacactggggcccaattgggctcatttacctgcgtctccctggaccccacgctctcctttgtcacccacgggtggctaaactcccttgccgcggctcttccccatttttgtgacctccgacttacattttcccgatacaacgccccaggttcttactcgtgcattcatgccacttccggcgacgacctcccgccgcgcgccatgcgccctcctcggcgcgcgcgccctctcctcgcctctccggacagcgaccgaccccgccgccctcgttcaccttcctcgcactcggcgctcccgcgtccccgccaccctcccccgctgcccgcctcccccccctcgcctctctgccccgcctcccccccactctccgtcccccctcccccccccc

SEQ ID NO: 435532 - DNA, 1231 bp, Homo sapiens
ggccaatgggcgagctgccgaccgggtgtcggaaaaggaggcggaagcggggaggagccgctgccagagccagactgcatccgccgcggcgtctccatggcacgaccctggcctccgacttcaacgacttcataaggcggcgtttctgggcgcagccgtgtcgctcctggtttccatcgtgtgggaagaacggagtaacgagtctcacgcagaaaaaggtcttgagagcaccttgtggcgcacccagtgtaactgtgacgatcaaccatttttgtgttgtcctcccccacctgccagaagccaaccatgaaggaccgctcttcaactccccccttacatgttcacgtggatgagaacacccctgtccacgtccacataaaaaaactcccgaaaccatcagcgaccagcagccagaaatctcacaagcgaggaatgaaaggggacactgtgaatgtgcggcggagtgtccgggtgaaaaccaaggtaccttggatgccccctggaaaatcatctgcccggcctgtgggatgcaagtgggagaatccacctcattgcctggagatcacgccaccatcttcagaaaagctggtctcagtgatgcggttaagtgacctctctacagaagatgatgactcaggtcactgtaaaatgaaccgttatgataagaagattgatagtctaatgaatgcggttggttgtctgaagtctgaggtcaagatgcaaaaaggtgagcgccagatggccaaaaggttcctggaggaacggaaggaagagctggaggaggtggcccacgaactggctgagactgagcacgagaacacggtgttgaggcacaacatcgagcgcatgaaggaggagaaggacttcaccatacttcagaagaaacacctacaacaggagaaggagtgcctcatgtccaagctggtggaggcggaaatggatggggctgcggctgccaagcaggtcatggccttgaaggataccatcgggaagctgaaaacggagaaacaaatgacctgcacggacatcaacaccctgacaaggcagaaggaacttctcctgcagaagctgagcacatttgaggagaccaaccgcaccctccgagacctcctgagggaacagcactgcaaagaggattctgaacagactaactggaggcaaaaggacactgtgaaaccgctggctgtggcgacctccgaaaacggcgccggctgttactgtggcgacaggc

SEQ ID NO: 435533 - DNA, 400 bp, Homo sapiens
tccagcagctgaaggcctcagtgaagaactatgaggggatgattgacaactataagagtcaggtaggcctcactggggccctggcccttctgagcagtgccctccctgcccccatcagactgggggctccctaccaggccactcccagggagggttgggtatggaagatggttttcatcaaaacgtggctctacctaagatgaaccacagtgttgttggtccctaggtgatgaagaccagattggaggctgatgaagtagctgcccagctagaacgctgtgacaaagagaacaagatccttaaagatgagatgaacaaagagattgaggcggtactgctttccttccttgttttcttctcctacccaattccatatctaactcaatgactgtgagtctgt

SEQ ID NO: 435534 - DNA, 4106 bp, Homo sapiens
ggccaatgggcgagctgccgaccgggtgtcggaaaaggaggcggaagcggggaggagccgctgccagagccagactgcatccgccgcggcgtctccatggcacgaccctggcctccgacttcaacgacttcataaggcggcgtttctgggcgcagccgtgtcgctcctggacagttgctgtgcgacttggacagtagaggagcgcctcccaagttttcatccaactgccaaccccaaagcttccacccttctcccctcagagaggacgtttgatgccgggccccttgagaggctcattgacaagcctgcccctctgggtccccctgagcagagcctgctgacccaattgcccacctttgcggctttgatgcctagccatgtctgcctcatcctcaggcggctcccccaggtttccatcgtgtgggaagaacggagtaacgagtctcacgcagaaaaaggtcttgagagcaccttgtggcgcacccagtgtaactgtgacgttgagatcactgtgtagaaggatccgcctgctttccgctgtgcttcactaaatccaaggaggagctgtgcattccagcaggtttagaggagatccagccctaaggaccctggggccggcgtctgggatctgttctggaacggaagccaaccatgaaggaccgctcttcaactccccccttacatgttcacgtggatgagaacacccctgtccacgtccacataaaaaaactcccgaaaccatcagcgaccagcagccagaaatctcacaagcgaggaatgaaaggggacactgtgaatgtgcggcggagtgtccgggtgaaaaccaagaatccacctcattgcctggagatcacgccaccatcttcagaaaagctggtctcagtgatgcggttaagtgacctctctacagaagatgatgactcaggtcactgtaaaatgaaccgttatgataagaagattgatagtctaatgaatgcggttggttgtctgaagtctgaggtcaagatgcaaaaaggtgagcgccagatggccaaaaggttcctggaggaacggaaggaagagctggaggaggtggcccacgaactggctgagactgagcacgagaacacggtgttgaggcacaacatcgagcgcatgaaggaggagaaggacttcaccatacttcagaagaaacacctacaacaggagaaggagtgcctcatgtccaagctggtggaggcggaaatggatggggctgcggctgccaagcaggtcatggccttgaaggataccatcgggaagctgaaaacggagaaacaaatgacctgcacggacatcaacaccctgacaaggcagaaggaacttctcctgcagaagctgagcacatttgaggagaccaaccgcaccctccgagacctcctgagggaacagcactgcaaagaggattctgaaagactaatggagcaacaaggagcactgctgaaacggctggcggaggccgactcagagaaagcgcgcctgctgttactgctgcaagacaaggacaaggaggtggaagagctccttcaggaaatacaatgtgagaaggctcaagcaaagacagcctctgagctttctaaatccatggagtccatgcgtgggcatttgcaggcacagcttcggtccaaagaggctgagaacagtcgcctgtgcatgcagattaagaatctggagcgcagcgggaatcagcataaggcagaagtggaggccatcatggagcagctgaaggagttgaagcagaagggagaccgagacaaagagagcttgaagaaggccatccgagcccagaaggagcgagccgagaagagcgaggagtatgctgagcagctacacgtgcaactcgctgacaaggatctttatgtcgctgaagctttatccactctggaatcctggaggagccgctacaaccaagttgtaaaagaaaagggagaccttgagctggaaattattgtcctgaatgaccgggtaacagatcttgtaaaccaacaacaaaccctggaggagaagatgcgggaagaccgggatagcctggtggagagactacaccgtcagactgctgagtattccgcattcaagctggagaatgagaggctgaaggccagctttgctccaatggaggacaaactcaaccaggcacacctcgaggtccagcagctgaaggcctcagtgaagaactatgaggggatgattgacaactataagagtcaggtgatgaagaccagattggaggctgatgaagtagctgcccagctagaacgctgtgacaaagagaacaagatccttaaagatgagatgaacaaagagattgaggcggcacgaaggcagttccagtctcagctggctgacctgcagcagctccctgacatcctgaagatcacggaggcgaagctggctgagtgccaagaccaactgcagggctatgagcggaagaacatcgacctcacagccatcatatcagacctgcgcagccggatcgaacaccagggggacaagctggagatggcgagagagaaacatcaggcttcccagaaggaaaataaacagctgagtctgaaggtggatgaactggagaggaaactggaggcgaccagtgcccagaatatcgagttcctacaggtgattgccaagagggaggaggcaatccaccagtcccagctgcggctggaggagaaaacacgggaatgtgggaccctggcaaggcagttggagagtgccattgaagatgcgaggaggcaggtggaacaaaccaaggagcacgcactctccaaggagcgagcagcccagaacaaaatcctggaccttgagacccagctgagcagaaccaaaacggaattgagccagctgcggcggagccgtgatgatgcggaccgccgctaccagagccggctgcaagacctgaaagatcgcctggagcagtccgagagcaccaaccgcagcatgcagaactacgtccagttcctcaaatcatcatacgccaacgtgtttggggatggtccctattccaccttcctgactagctctcccatccgctcccgatctcctcctgcctgaggccacttatcagggcctggagccctgatggaagccataggaactccagagttgccaagccatagctgagaagcctggtggttttcctctcccagtgaaaaaatgggttcagggtcttgtccttagctactagctctagaaaagtcccaaaagcagcagaaggtgaagcaggaagcacttggttttctccttcctgatatagtcacctgttggaagtgttaaaatttcctcgacaggccttaaatttactactacattagggtaccacattttaacttaccatgactttgctccttcctttcctgagaaaatatttccactggattttttccaccagtccccttacagccctcattgttttaggaatctctctcaggtttttttctgacctaaaccagcaggaagtcgtcctgggctgtaagcaccatcacttgcttttttttttttctgatttcacaagtgtggtgttttcccaaggctcccttcccaagctcagtgcaaacctctcactcccaagtttctttgaggccacttgcccccaagcacttcacaatagaccctcgagggcttgtgtccatttggccttttacaagtgtaatgccaatttcattgatttttgtttcttttggcctgatttgtatctctggaatgcatttattcttgaaatatttgtgtgattttacaaaaagcttttgtaatcagttatttaaggctccatttgatgatttcctttacccaaccagtcctcatccctcctctaaaaaatgattaagtaaaatgctgcaggacagccagtagacatttttaaagtacttggtgcctgaaacatcaggcttctcatttcattttagctcaggttggtgctttcacattgtaatcaatgaactgtcaggagggaacaaactgtaagaaggactgcttggtgttttagggtagatcactttagctattaggaagaggatggggtagtgtacagtatatatttttaaaatgtgaattggtttctgaataagaatttgggccatttttgttcccca

SEQ ID NO: 435535 - DNA, 755 bp, Homo sapiens
  misc_feature (17)..(17): n is a, c, g, or t
  misc_feature (39)..(39): n is a, c, g, or t
  misc_feature (80)..(80): n is a, c, g, or t
  misc_feature (101)..(101): n is a, c, g, or t
  misc_feature (103)..(103): n is a, c, g, or t
  misc_feature (117)..(117): n is a, c, g, or t
  misc_feature (132)..(132): n is a, c, g, or t
  misc_feature (152)..(152): n is a, c, g, or t
  misc_feature (157)..(157): n is a, c, g, or t
  misc_feature (184)..(184): n is a, c, g, or t
  misc_feature (215)..(215): n is a, c, g, or t
  misc_feature (221)..(222): n is a, c, g, or t
  misc_feature (229)..(229): n is a, c, g, or t
  misc_feature (236)..(236): n is a, c, g, or t
  misc_feature (253)..(253): n is a, c, g, or t
  misc_feature (265)..(265): n is a, c, g, or t
  misc_feature (276)..(276): n is a, c, g, or t
  misc_feature (294)..(294): n is a, c, g, or t
agcgccattgtttaganttttgggcccaataaaaggccnttttccccaggttaaaatttggttaacgccaggtcaaggtnctttttgacaccaaccagttntnggaaactttaaagnttgccagtgaacttnttttttaaatttaaaccccncccgnttaccagggcccaaggtttttggtttnccaaatgggagggccaaaatttcaattccangggcannccctttngaaggtnccaacccaagcttgaanggccttcaagtngaaagaaactnatgaaggggatgatttgncaaactattaagagttcaaggtgatgaagaccagattggaggctgatgaagtagctgcccagctagaacgctgtgacaaagagaacaagatccttaaagatgagatgaacaaagagattgaggcggcacgaaggcagttccagtctcagctggctgacctgcagcagctccctgacatcctgaagatcacggaggcgaagctggctgagtgccaagaccaactgcagggctatgagcggaagaacatcgacctcacagccatcatatcagacctgcgcagccgggtaagggactggcagaaagggtcccacgaactgacccgagcaggggcccgcataccaagatgagctgcacgccccccaagggaggactacttcctttttcttggctgctgctttttaaaaggagtgagctatcatcagtgctgtgaaataaaagtctggtgtgccaaatgcaaaaaa

SEQ ID NO: 435536 - DNA, 245 bp, Homo sapiens
ccttcaacatctcatttccaacatctcatcaccccttccaacatctcatggcggaaaaaggtcttgagagcaccttgtggcgcacccagtgtaactgtgacgaagccaaccatgaaggaccgctcttcaactccccccttacatgttcacgtggatgagaacacccctgtccacgtccacataaaaaaactcccgaaaccatcagcgaccagcagccagaaatctcacaagcgatgagatgttgg

SEQ ID NO: 435537 - DNA, 4128 bp, Homo sapiens
  misc_feature (40)..(40): n is a, c, g, or t
  misc_feature (63)..(63): n is a, c, g, or t
  misc_feature (73)..(73): n is a, c, g, or t
tcgacactattggatcaaagaattcggcacagcacttggngccgagcggatataaaaacactntccgcacgtncgccggcgcctcaggtttcccccggacagttgctgtgcgacttggacagtagaggagcgcctcccaagttttcatccaactgccaaccccaaagcttccacccttctcccctcagagaggacgtttgatgccgggccccttgagaggctcattgacaagcctgcccctctgggtccccctgagcagagcctgctgacccaattgcccacctttgcggctttgatgcctagccatgtctgcctcatcctcaggcggctcccccaggtttccatcgtgtgggaagaacggagtaacgagtctcacgcagaaaaaggtcttgagagcaccttgtggcgcacccagtgtaactgtgacgttgagatcactgtgtagaaggatccgcctgctttccgctgtgcttcactaaatccaaggaggagctgtgcattccagcaggtttagaggagatccagccctaaggaccctggggccggcgtctgggatctgttctggaacggatcaaccatttttgtgttgtcctcccccacctgccagaagccaaccatgaaggaccgctcttcaactccccccttacatgttcacgtggatgagaacacccctgtccacgtccacataaaaaaactcccgaaaccatcagcgaccagcagccagaaatctcacaagcgaggaatgaaaggggacactgtgaatgtgcggcggagtgtccgggtgaaaaccaaggtaccttggatgccccctggaaaatcatctgcccggcctgtgggatgcaagtgggagaatccacctcattgcctggagatcacgccaccatcttcagaaaagctggtctcagtgatgcggttaagtgacctctctacagaagatgatgactcaggtcactgtaaaatgaaccgttatgataagaagattgatagtctaatgaatgcggttggttgtctgaagtctgaggtcaagatgcaaaaaggtgagcgccagatggccaaaaggttcctggaggaacggaaggaagagctggaggaggtggcccacgaactggctgagactgagcacgagaacacggtgttgaggcacaacatcgagcgcatgaaggaggagaaggacttcaccatacttcagaagaaacacctacaacaggagaaggagtgcctcatgtccaagctggtggaggcggaaatggatggggctgcggctgccaagcaggtcatggccttgaaggataccatcgggaagctgaaaacggagaaacaaatgacctgcacggacatcaacaccctgacaaggcagaaggaacttctcctgcagaagctgagcacatttgaggagaccaaccgcaccctccgagacctcctgagggaacagcactgcaaagaggattctgaaagactaatggagcaacaaggagcactgctgaaacggctggcggaggccgactcagagaaagcgcgcctgctgttactgctgcaagacaaggacaaggaggtggaagagctccttcaggaaatacaatgtgagaaggctcaagcaaagacagcctctgagctttctaaatccatggagtccatgcgtgggcatttgcaggcacagcttcggtccaaagaggctgagaacagtcgcctgtgcatgcagattaagaatctggagcgcagcgggaatcagcataaggcagaagtggaggccatcatggagcagctgaaggagttgaagcagaagggagaccgagacaaagagagcttgaagaaggccatccgagcccagaaggagcgagccgagaagagcgaggagtatgctgagcagctacacgtgcaactcgctgacaaggatctttatgtcgctgaagctttatccactctggaatcctggaggagccgctacaaccaagttgtaaaagaaaagggagaccttgagctggaaattattgtcctgaatgaccgggtaacagatcttgtaaaccaacaacaaaccctggaggagaagatgcgggaagaccgggatagcctggtggagagactacaccgtcagactgctgagtattccgcattcaagctggagaatgagaggctgaaggccagctttgctccaatggaggacaaactcaaccaggcacacctcgaggtccagcagctgaaggcctcagtgaagaactatgaggggatgattgacaactataagagtcaggtgatgaagaccagattggaggctgatgaagtagctgcccagctagaacgctgtgacaaagagaacaagatccttaaagatgagatgaacaaagagattgaggcggcacgaaggcagttccagtctcagctggctgacctgcagcagctccctgacatcctgaagatcacggaggcgaagctggctgagtgccaagaccaactgcagggctatgagcggaagaacatcgacctcacagccatcatatcagacctgcgcagccggatcgaacaccagggggacaagctggagatggcgagagagaaacatcaggcttcccagaaggaaaataaacagctgagtctgaaggtggatgaactggagaggaaactggaggcgaccagtgcccagaatatcgagttcctacaggtgattgccaagagggaggaggcaatccaccagtcccagctgcggctggaggagaaaacacgggaatgtgggaccctggcaaggcagttggagagtgccattgaagatgcgaggaggcaggtggaacaaaccaaggagcacgcactctccaaggagcgagcagcccagaacaaaatcctggaccttgagacccagctgagcagaaccaaaacggaattgagccagctgcggcggagccgtgatgatgcggaccgccgctaccagagccggctgcaagacctgaaagatcgcctggagcagtccgagagcaccaaccgcagcatgcagaactacgtccagttcctcaaatcatcatacgccaacgtgtttggggatggtccctattccaccttcctgactagctctcccatccgctcccgatctcctcctgcctgaggccacttatcagggcctggagccctgatggaagccataggaactccagagttgccaagccatagctgagaagcctggtggttttcctctcccagtgaaaaaatgggttcagggtcttgtccttagctactagctctagaaaagtcccaaaagcagcagaaggtgaagcaggaagcacttggttttctccttcctgatatagtcacctgttggaagtgttaaaatttcctcgacaggccttaaatttactactacattagggtaccacattttaacttaccatgactttgctccttcctttcctgagaaaatatttccactggattttttccaccagtccccttacagccctcattgttttaggaatctctctcaggtttttttctgacctaaaccagcaggaagtcgtcctgggctgtaagcaccatcacttgcttttttttttttctgatttcacaagtgtggtgttttcccaaggctcccttcccaagctcagtgcaaacctctcactcccaagtttctttgaggccacttgcccccaagcacttcacaatagaccctcgagggcttgtgtccatttggccttttacaagtgtaatgccaatttcattgatttttgtttcttttggcctgatttgtatctctggaatgcatttattcttgaaatatttgtgtgattttacaaaaagcttttgtaatcagttatttaaggctccatttgatgatttcctttacccaaccagtcctcatccctcctctaaaaaatgattaagtaaaatgctgcaggacagccagtagacatttttaaagtacttggtgcctgaaacatcaggcttctcatttcattttagctcaggttggtgctttcacattgtaatcaatgaactgtcaggagggaacaaactgtaagaaggactgcttggtgttttagggtagatcactttagctattaggaagaggatggggtagtgtacagtatatatttttaaaatgtgaattggtttctgaataagaatttgggccatttttgttcccca

SEQ ID NO: 435538 - DNA, 3761 bp, Homo sapiens
ggccaatgggcgagctgccgaccgggtgtcggaaaaggaggcggaagcggggaggagccgctgccagagccagactgcatccgccgcggcgtctccatggcacgaccctggcctccgacttcaacgacttcataaggcggcgtttctgggcgcagccgtgtcgctcctggtttccatcgtgtgggaagaacggagtaacgagtctcacgcagaaaaaggtcttgagagcaccttgtggcgcacccagtgtaactgtgacgatcaaccatttttgtgttgtcctcccccacctgccagaagccaaccatgaaggaccgctcttcaactccccccttacatgttcacgtggatgagaacacccctgtccacgtccacataaaaaaactcccgaaaccatcagcgaccagcagccagaaatctcacaagcgaggaatgaaaggggacactgtgaatgtgcggcggagtgtccgggtgaaaaccaagaatccacctcattgcctggagatcacgccaccatcttcagaaaagctggtctcagtgatgcggttaagtgacctctctacagaagatgatgactcaggtcactgtaaaatgaaccgttatgataagaagattgatagtctaatgaatgcggttggttgtctgaagtctgaggtcaagatgcaaaaaggtgagcgccagatggccaaaaggttcctggaggaacggaaggaagagctggaggaggtggcccacgaactggctgagactgagcacgagaacacggtgttgaggcacaacatcgagcgcatgaaggaggagaaggacttcaccatacttcagaagaaacacctacaacaggagaaggagtgcctcatgtccaagctggtggaggcggaaatggatggggctgcggctgccaagcaggtcatggccttgaaggataccatcgggaagctgaaaacggagaaacaaatgacctgcacggacatcaacaccctgacaaggcagaaggaacttctcctgcagaagctgagcacatttgaggagaccaaccgcaccctccgagacctcctgagggaacagcactgcaaagaggattctgaaagactaatggagcaacaaggagcactgctgaaacggctggcggaggccgactcagagaaagcgcgcctgctgttactgctgcaagacaaggacaaggaggtggaagagctccttcaggaaatacaatgtgagaaggctcaagcaaagacagcctctgagctttctaaatccatggagtccatgcgtgggcatttgcaggcacagcttcggtccaaagaggctgagaacagtcgcctgtgcatgcagattaagaatctggagcgcagcgggaatcagcataaggcagaagtggaggccatcatggagcagctgaaggagttgaagcagaagggagaccgagacaaagagagcttgaagaaggccatccgagcccagaaggagcgagccgagaagagcgaggagtatgctgagcagctacacgtgcaactcgctgacaaggatctttatgtcgctgaagctttatccactctggaatcctggaggagccgctacaaccaagttgtaaaagaaaagggagaccttgagctggaaattattgtcctgaatgaccgggtaacagatcttgtaaaccaacaacaaaccctggaggagaagatgcgggaagaccgggatagcctggtggagagactacaccgtcagactgctgagtattccgcattcaagctggagaatgagaggctgaaggccagctttgctccaatggaggacaaactcaaccaggcacacctcgaggtccagcagctgaaggcctcagtgaagaactatgaggggatgattgacaactataagagtcaggtgatgaagaccagattggaggctgatgaagtagctgcccagctagaacgctgtgacaaagagaacaagatccttaaagatgagatgaacaaagagattgaggcggcacgaaggcagttccagtctcagctggctgacctgcagcagctccctgacatcctgaagatcacggaggcgaagctggctgagtgccaagaccaactgcagggctatgagcggaagaacatcgacctcacagccatcatatcagacctgcgcagccggatcgaacaccagggggacaagctggagatggcgagagagaaacatcaggcttcccagaaggaaaataaacagctgagtctgaaggtggatgaactggagaggaaactggaggcgaccagtgcccagaatatcgagttcctacaggtgattgccaagagggaggaggcaatccaccagtcccagctgcggctggaggagaaaacacgggaatgtgggaccctggcaaggcagttggagagtgccattgaagatgcgaggaggcaggtggaacaaaccaaggagcacgcactctccaaggagcgagcagcccagaacaaaatcctggaccttgagacccagctgagcagaaccaaaacggaattgagccagctgcggcggagccgtgatgatgcggaccgccgctaccagagccggctgcaagacctgaaagatcgcctggagcagtccgagagcaccaaccgcagcatgcagaactacgtccagttcctcaaatcatcatacgccaacgtgtttggggatggtccctattccaccttcctgactagctctcccatccgctcccgatctcctcctgcctgaggccacttatcagggcctggagccctgatggaagccataggaactccagagttgccaagccatagctgagaagcctggtggttttcctctcccagtgaaaaaatgggttcagggtcttgtccttagctactagctctagaaaagtcccaaaagcagcagaaggtgaagcaggaagcacttggttttctccttcctgatatagtcacctgttggaagtgttaaaatttcctcgacaggccttaaatttactactacattagggtaccacattttaacttaccatgactttgctccttcctttcctgagaaaatatttccactggattttttccaccagtccccttacagccctcattgttttaggaatctctctcaggtttttttctgacctaaaccagcaggaagtcgtcctgggctgtaagcaccatcacttgcttttttttttttctgatttcacaagtgtggtgttttcccaaggctcccttcccaagctcagtgcaaacctctcactcccaagtttctttgaggccacttgcccccaagcacttcacaatagaccctcgagggcttgtgtccatttggccttttacaagtgtaatgccaatttcattgatttttgtttcttttggcctgatttgtatctctggaatgcatttattcttgaaatatttgtgtgattttacaaaaagcttttgtaatcagttatttaaggctccatttgatgatttcctttacccaaccagtcctcatccctcctctaaaaaatgattaagtaaaatgctgcaggacagccagtagacatttttaaagtacttggtgcctgaaacatcaggcttctcatttcattttagctcaggttggtgctttcacattgtaatcaatgaactgtcaggagggaacaaactgtaagaaggactgcttggtgttttagggtagatcactttagctattaggaagaggatggggtagtgtacagtatatatttttaaaatgtgaattggtttctgaataagaatttgggccatttttgttcccca

SEQ ID NO: 435539 - DNA, 3607 bp, Homo sapiens
ggccaatgggcgagctgccgaccgggtgtcggaaaaggaggcggaagcggggaggagccgctgccagagccagactgcatccgccgcggcgtctccatggcacgaccctggcctccgacttcaacgacttcataaggcggcgtttctgggcgcagccgtgtcgctcctggtttccatcgtgtgggaagaacggagtaacgagtctcacgcagaaaaaggtcttgagagcaccttgtggcgcacccagtgtaactgtgacgaaatctcacaagcgaggaatgaaaggggacactgtgaatgtgcggcggagtgtccgggtgaaaaccaagaatccacctcattgcctggagatcacgccaccatcttcagaaaagctggtctcagtgatgcggttaagtgacctctctacagaagatgatgactcaggtcactgtaaaatgaaccgttatgataagaagattgatagtctaatgaatgcggttggttgtctgaagtctgaggtcaagatgcaaaaaggtgagcgccagatggccaaaaggttcctggaggaacggaaggaagagctggaggaggtggcccacgaactggctgagactgagcacgagaacacggtgttgaggcacaacatcgagcgcatgaaggaggagaaggacttcaccatacttcagaagaaacacctacaacaggagaaggagtgcctcatgtccaagctggtggaggcggaaatggatggggctgcggctgccaagcaggtcatggccttgaaggataccatcgggaagctgaaaacggagaaacaaatgacctgcacggacatcaacaccctgacaaggcagaaggaacttctcctgcagaagctgagcacatttgaggagaccaaccgcaccctccgagacctcctgagggaacagcactgcaaagaggattctgaaagactaatggagcaacaaggagcactgctgaaacggctggcggaggccgactcagagaaagcgcgcctgctgttactgctgcaagacaaggacaaggaggtggaagagctccttcaggaaatacaatgtgagaaggctcaagcaaagacagcctctgagctttctaaatccatggagtccatgcgtgggcatttgcaggcacagcttcggtccaaagaggctgagaacagtcgcctgtgcatgcagattaagaatctggagcgcagcgggaatcagcataaggcagaagtggaggccatcatggagcagctgaaggagttgaagcagaagggagaccgagacaaagagagcttgaagaaggccatccgagcccagaaggagcgagccgagaagagcgaggagtatgctgagcagctacacgtgcaactcgctgacaaggatctttatgtcgctgaagctttatccactctggaatcctggaggagccgctacaaccaagttgtaaaagaaaagggagaccttgagctggaaattattgtcctgaatgaccgggtaacagatcttgtaaaccaacaacaaaccctggaggagaagatgcgggaagaccgggatagcctggtggagagactacaccgtcagactgctgagtattccgcattcaagctggagaatgagaggctgaaggccagctttgctccaatggaggacaaactcaaccaggcacacctcgaggtccagcagctgaaggcctcagtgaagaactatgaggggatgattgacaactataagagtcaggtgatgaagaccagattggaggctgatgaagtagctgcccagctagaacgctgtgacaaagagaacaagatccttaaagatgagatgaacaaagagattgaggcggcacgaaggcagttccagtctcagctggctgacctgcagcagctccctgacatcctgaagatcacggaggcgaagctggctgagtgccaagaccaactgcagggctatgagcggaagaacatcgacctcacagccatcatatcagacctgcgcagccggatcgaacaccagggggacaagctggagatggcgagagagaaacatcaggcttcccagaaggaaaataaacagctgagtctgaaggtggatgaactggagaggaaactggaggcgaccagtgcccagaatatcgagttcctacaggtgattgccaagagggaggaggcaatccaccagtcccagctgcggctggaggagaaaacacgggaatgtgggaccctggcaaggcagttggagagtgccattgaagatgcgaggaggcaggtggaacaaaccaaggagcacgcactctccaaggagcgagcagcccagaacaaaatcctggaccttgagacccagctgagcagaaccaaaacggaattgagccagctgcggcggagccgtgatgatgcggaccgccgctaccagagccggctgcaagacctgaaagatcgcctggagcagtccgagagcaccaaccgcagcatgcagaactacgtccagttcctcaaatcatcatacgccaacgtgtttggggatggtccctattccaccttcctgactagctctcccatccgctcccgatctcctcctgcctgaggccacttatcagggcctggagccctgatggaagccataggaactccagagttgccaagccatagctgagaagcctggtggttttcctctcccagtgaaaaaatgggttcagggtcttgtccttagctactagctctagaaaagtcccaaaagcagcagaaggtgaagcaggaagcacttggttttctccttcctgatatagtcacctgttggaagtgttaaaatttcctcgacaggccttaaatttactactacattagggtaccacattttaacttaccatgactttgctccttcctttcctgagaaaatatttccactggattttttccaccagtccccttacagccctcattgttttaggaatctctctcaggtttttttctgacctaaaccagcaggaagtcgtcctgggctgtaagcaccatcacttgcttttttttttttctgatttcacaagtgtggtgttttcccaaggctcccttcccaagctcagtgcaaacctctcactcccaagtttctttgaggccacttgcccccaagcacttcacaatagaccctcgagggcttgtgtccatttggccttttacaagtgtaatgccaatttcattgatttttgtttcttttggcctgatttgtatctctggaatgcatttattcttgaaatatttgtgtgattttacaaaaagcttttgtaatcagttatttaaggctccatttgatgatttcctttacccaaccagtcctcatccctcctctaaaaaatgattaagtaaaatgctgcaggacagccagtagacatttttaaagtacttggtgcctgaaacatcaggcttctcatttcattttagctcaggttggtgctttcacattgtaatcaatgaactgtcaggagggaacaaactgtaagaaggactgcttggtgttttagggtagatcactttagctattaggaagaggatggggtagtgtacagtatatatttttaaaatgtgaattggtttctgaataagaatttgggccatttttgttcccca

SEQ ID NO: 435540 - DNA, 3825 bp, Homo sapiens
cgcggggcctctcctcctcccgctaacgggcggtcggccgcctccttcctctcttggctaccacggggctctgcccctcctctgccgcccgcgggcaggcttcacctttctctctatgggcagaaaccggtaccctcctgcctgctggacagttgctgtgcgacttggacagtagaggagcgcctcccaagttttcatccaactgccaaccccaaagcttccacccttctcccctcagagaggacgtttgatgccgggccccttgagaggctcattgacaagcctgcccctctgggtccccctgagcagagcctgctgacccaattgcccacctttgcggctttgatgcctagccatgtctgcctcatcctcaggcggctcccccaggtttccatcgtgtgggaagaacggagtaacgagtctcacgcagaaaaaggtcttgagagcaccttgtggcgcacccagtgtaactgtgacgaaatctcacaagcgaggaatgaaaggggacactgtgaatgtgcggcggagtgtccgggtgaaaaccaagaatccacctcattgcctggagatcacgccaccatcttcagaaaagctggtctcagtgatgcggttaagtgacctctctacagaagatgatgactcaggtcactgtaaaatgaaccgttatgataagaagattgatagtctaatgaatgcggttggttgtctgaagtctgaggtcaagatgcaaaaaggtgagcgccagatggccaaaaggttcctggaggaacggaaggaagagctggaggaggtggcccacgaactggctgagactgagcacgagaacacggtgttgaggcacaacatcgagcgcatgaaggaggagaaggacttcaccatacttcagaagaaacacctacaacaggagaaggagtgcctcatgtccaagctggtggaggcggaaatggatggggctgcggctgccaagcaggtcatggccttgaaggataccatcgggaagctgaaaacggagaaacaaatgacctgcacggacatcaacaccctgacaaggcagaaggaacttctcctgcagaagctgagcacatttgaggagaccaaccgcaccctccgagacctcctgagggaacagcactgcaaagaggattctgaaagactaatggagcaacaaggagcactgctgaaacggctggcggaggccgactcagagaaagcgcgcctgctgttactgctgcaagacaaggacaaggaggtggaagagctccttcaggaaatacaatgtgagaaggctcaagcaaagacagcctctgagctttctaaatccatggagtccatgcgtgggcatttgcaggcacagcttcggtccaaagaggctgagaacagtcgcctgtgcatgcagattaagaatctggagcgcagcgggaatcagcataaggcagaagtggaggccatcatggagcagctgaaggagttgaagcagaagggagaccgagacaaagagagcttgaagaaggccatccgagcccagaaggagcgagccgagaagagcgaggagtatgctgagcagctacacgtgcaactcgctgacaaggatctttatgtcgctgaagctttatccactctggaatcctggaggagccgctacaaccaagttgtaaaagaaaagggagaccttgagctggaaattattgtcctgaatgaccgggtaacagatcttgtaaaccaacaacaaaccctggaggagaagatgcgggaagaccgggatagcctggtggagagactacaccgtcagactgctgagtattccgcattcaagctggagaatgagaggctgaaggccagctttgctccaatggaggacaaactcaaccaggcacacctcgaggtccagcagctgaaggcctcagtgaagaactatgaggggatgattgacaactataagagtcaggtgatgaagaccagattggaggctgatgaagtagctgcccagctagaacgctgtgacaaagagaacaagatccttaaagatgagatgaacaaagagattgaggcggcacgaaggcagttccagtctcagctggctgacctgcagcagctccctgacatcctgaagatcacggaggcgaagctggctgagtgccaagaccaactgcagggctatgagcggaagaacatcgacctcacagccatcatatcagacctgcgcagccggatcgaacaccagggggacaagctggagatggcgagagagaaacatcaggcttcccagaaggaaaataaacagctgagtctgaaggtggatgaactggagaggaaactggaggcgaccagtgcccagaatatcgagttcctacaggtgattgccaagagggaggaggcaatccaccagtcccagctgcggctggaggagaaaacacgggaatgtgggaccctggcaaggcagttggagagtgccattgaagatgcgaggaggcaggtggaacaaaccaaggagcacgcactctccaaggagcgagcagcccagaacaaaatcctggaccttgagacccagctgagcagaaccaaaacggaattgagccagctgcggcggagccgtgatgatgcggaccgccgctaccagagccggctgcaagacctgaaagatcgcctggagcagtccgagagcaccaaccgcagcatgcagaactacgtccagttcctcaaatcatcatacgccaacgtgtttggggatggtccctattccaccttcctgactagctctcccatccgctcccgatctcctcctgcctgaggccacttatcagggcctggagccctgatggaagccataggaactccagagttgccaagccatagctgagaagcctggtggttttcctctcccagtgaaaaaatgggttcagggtcttgtccttagctactagctctagaaaagtcccaaaagcagcagaaggtgaagcaggaagcacttggttttctccttcctgatatagtcacctgttggaagtgttaaaatttcctcgacaggccttaaatttactactacattagggtaccacattttaacttaccatgactttgctccttcctttcctgagaaaatatttccactggattttttccaccagtccccttacagccctcattgttttaggaatctctctcaggtttttttctgacctaaaccagcaggaagtcgtcctgggctgtaagcaccatcacttgcttttttttttttctgatttcacaagtgtggtgttttcccaaggctcccttcccaagctcagtgcaaacctctcactcccaagtttctttgaggccacttgcccccaagcacttcacaatagaccctcgagggcttgtgtccatttggccttttacaagtgtaatgccaatttcattgatttttgtttcttttggcctgatttgtatctctggaatgcatttattcttgaaatatttgtgtgattttacaaaaagcttttgtaatcagttatttaaggctccatttgatgatttcctttacccaaccagtcctcatccctcctctaaaaaatgattaagtaaaatgctgcaggacagccagtagacatttttaaagtacttggtgcctgaaacatcaggcttctcatttcattttagctcaggttggtgctttcacattgtaatcaatgaactgtcaggagggaacaaactgtaagaaggactgcttggtgttttagggtagatcactttagctattaggaagaggatggggtagtgtacagtatatatttttaaaatgtgaattggtttctgaataagaatttgggccatttttgttcccca

SEQ ID NO: 435541 - DNA, 3590 bp, Homo sapiens
ggccaatgggcgagctgccgaccgggtgtcggaaaaggaggcggaagcggggaggagccgctgccagagccagactgcatccgccgcggcgtctccatggcacgaccctggcctccgacttcaacgacttcataaggcggcgtttctgggcgcagccgtgtcgctcctggtttccatcgtgtgggaagaacggagtaacgagtctcacgcagaaaaaggtcttgagagcaccttgtggcgcacccagtgtaactgtgacgatcaaccatttttgtgttgtcctcccccacctgccagaagccaaccatgaaggaccgctcttcaactccccccttacatgttcacgtggatgagaacacccctgtccacgtccacataaaaaaactcccgaaaccatcagcgaccagcagccagaaatctcacaagcgaggaatgaaaggggacactgtgaatgtgcggcggagtgtccgggtgaaaaccaaggtcaagatgcaaaaaggtgagcgccagatggccaaaaggttcctggaggaacggaaggaagagctggaggaggtggcccacgaactggctgagactgagcacgagaacacggtgttgaggcacaacatcgagcgcatgaaggaggagaaggacttcaccatacttcagaagaaacacctacaacaggagaaggagtgcctcatgtccaagctggtggaggcggaaatggatggggctgcggctgccaagcaggtcatggccttgaaggataccatcgggaagctgaaaacggagaaacaaatgacctgcacggacatcaacaccctgacaaggcagaaggaacttctcctgcagaagctgagcacatttgaggagaccaaccgcaccctccgagacctcctgagggaacagcactgcaaagaggattctgaaagactaatggagcaacaaggagcactgctgaaacggctggcggaggccgactcagagaaagcgcgcctgctgttactgctgcaagacaaggacaaggaggtggaagagctccttcaggaaatacaatgtgagaaggctcaagcaaagacagcctctgagctttctaaatccatggagtccatgcgtgggcatttgcaggcacagcttcggtccaaagaggctgagaacagtcgcctgtgcatgcagattaagaatctggagcgcagcgggaatcagcataaggcagaagtggaggccatcatggagcagctgaaggagttgaagcagaagggagaccgagacaaagagagcttgaagaaggccatccgagcccagaaggagcgagccgagaagagcgaggagtatgctgagcagctacacgtgcaactcgctgacaaggatctttatgtcgctgaagctttatccactctggaatcctggaggagccgctacaaccaagttgtaaaagaaaagggagaccttgagctggaaattattgtcctgaatgaccgggtaacagatcttgtaaaccaacaacaaaccctggaggagaagatgcgggaagaccgggatagcctggtggagagactacaccgtcagactgctgagtattccgcattcaagctggagaatgagaggctgaaggccagctttgctccaatggaggacaaactcaaccaggcacacctcgaggtccagcagctgaaggcctcagtgaagaactatgaggggatgattgacaactataagagtcaggtgatgaagaccagattggaggctgatgaagtagctgcccagctagaacgctgtgacaaagagaacaagatccttaaagatgagatgaacaaagagattgaggcggcacgaaggcagttccagtctcagctggctgacctgcagcagctccctgacatcctgaagatcacggaggcgaagctggctgagtgccaagaccaactgcagggctatgagcggaagaacatcgacctcacagccatcatatcagacctgcgcagccggatcgaacaccagggggacaagctggagatggcgagagagaaacatcaggcttcccagaaggaaaataaacagctgagtctgaaggtggatgaactggagaggaaactggaggcgaccagtgcccagaatatcgagttcctacaggtgattgccaagagggaggaggcaatccaccagtcccagctgcggctggaggagaaaacacgggaatgtgggaccctggcaaggcagttggagagtgccattgaagatgcgaggaggcaggtggaacaaaccaaggagcacgcactctccaaggagcgagcagcccagaacaaaatcctggaccttgagacccagctgagcagaaccaaaacggaattgagccagctgcggcggagccgtgatgatgcggaccgccgctaccagagccggctgcaagacctgaaagatcgcctggagcagtccgagagcaccaaccgcagcatgcagaactacgtccagttcctcaaatcatcatacgccaacgtgtttggggatggtccctattccaccttcctgactagctctcccatccgctcccgatctcctcctgcctgaggccacttatcagggcctggagccctgatggaagccataggaactccagagttgccaagccatagctgagaagcctggtggttttcctctcccagtgaaaaaatgggttcagggtcttgtccttagctactagctctagaaaagtcccaaaagcagcagaaggtgaagcaggaagcacttggttttctccttcctgatatagtcacctgttggaagtgttaaaatttcctcgacaggccttaaatttactactacattagggtaccacattttaacttaccatgactttgctccttcctttcctgagaaaatatttccactggattttttccaccagtccccttacagccctcattgttttaggaatctctctcaggtttttttctgacctaaaccagcaggaagtcgtcctgggctgtaagcaccatcacttgcttttttttttttctgatttcacaagtgtggtgttttcccaaggctcccttcccaagctcagtgcaaacctctcactcccaagtttctttgaggccacttgcccccaagcacttcacaatagaccctcgagggcttgtgtccatttggccttttacaagtgtaatgccaatttcattgatttttgtttcttttggcctgatttgtatctctggaatgcatttattcttgaaatatttgtgtgattttacaaaaagcttttgtaatcagttatttaaggctccatttgatgatttcctttacccaaccagtcctcatccctcctctaaaaaatgattaagtaaaatgctgcaggacagccagtagacatttttaaagtacttggtgcctgaaacatcaggcttctcatttcattttagctcaggttggtgctttcacattgtaatcaatgaactgtcaggagggaacaaactgtaagaaggactgcttggtgttttagggtagatcactttagctattaggaagaggatggggtagtgtacagtatatatttttaaaatgtgaattggtttctgaataagaatttgggccatttttgttcccca

SEQ ID NO: 435542 - DNA, 3104 bp, Homo sapiens
gcagctcttcctgccctcctaagtcccagaacatgagccgagcctttcccacatccacagtgccgatgtgtggcccacgaactggctgagactgagcacgagaacacggtgttgaggcacaacatcgagcgcatgaaggaggagaaggacttcaccatacttcagaagaaacacctacaacaggagaaggagtgcctcatgtccaagctggtggaggcggaaatggatggggctgcggctgccaagcaggtcatggccttgaaggataccatcgggaagctgaaaacggagaaacaaatgacctgcacggacatcaacaccctgacaaggcagaaggaacttctcctgcagaagctgagcacatttgaggagaccaaccgcaccctccgagacctcctgagggaacagcactgcaaagaggattctgaaagactaatggagcaacaaggagcactgctgaaacggctggcggaggccgactcagagaaagcgcgcctgctgttactgctgcaagacaaggacaaggaggtggaagagctccttcaggaaatacaatgtgagaaggctcaagcaaagacagcctctgagctttctaaatccatggagtccatgcgtgggcatttgcaggcacagcttcggtccaaagaggctgagaacagtcgcctgtgcatgcagattaagaatctggagcgcagcgggaatcagcataaggcagaagtggaggccatcatggagcagctgaaggagttgaagcagaagggagaccgagacaaagagagcttgaagaaggccatccgagcccagaaggagcgagccgagaagagcgaggagtatgctgagcagctacacgtgcaactcgctgacaaggatctttatgtcgctgaagctttatccactctggaatcctggaggagccgctacaaccaagttgtaaaagaaaagggagaccttgagctggaaattattgtcctgaatgaccgggtaacagatcttgtaaaccaacaacaaaccctggaggagaagatgcgggaagaccgggatagcctggtggagagactacaccgtcagactgctgagtattccgcattcaagctggagaatgagaggctgaaggccagctttgctccaatggaggacaaactcaaccaggcacacctcgaggtccagcagctgaaggcctcagtgaagaactatgaggggatgattgacaactataagagtcaggtgatgaagaccagattggaggctgatgaagtagctgcccagctagaacgctgtgacaaagagaacaagatccttaaagatgagatgaacaaagagattgaggcggcacgaaggcagttccagtctcagctggctgacctgcagcagctccctgacatcctgaagatcacggaggcgaagctggctgagtgccaagaccaactgcagggctatgagcggaagaacatcgacctcacagccatcatatcagacctgcgcagccggatcgaacaccagggggacaagctggagatggcgagagagaaacatcaggcttcccagaaggaaaataaacagctgagtctgaaggtggatgaactggagaggaaactggaggcgaccagtgcccagaatatcgagttcctacaggtgattgccaagagggaggaggcaatccaccagtcccagctgcggctggaggagaaaacacgggaatgtgggaccctggcaaggcagttggagagtgccattgaagatgcgaggaggcaggtggaacaaaccaaggagcacgcactctccaaggagcgagcagcccagaacaaaatcctggaccttgagacccagctgagcagaaccaaaacggaattgagccagctgcggcggagccgtgatgatgcggaccgccgctaccagagccggctgcaagacctgaaagatcgcctggagcagtccgagagcaccaaccgcagcatgcagaactacgtccagttcctcaaatcatcatacgccaacgtgtttggggatggtccctattccaccttcctgactagctctcccatccgctcccgatctcctcctgcctgaggccacttatcagggcctggagccctgatggaagccataggaactccagagttgccaagccatagctgagaagcctggtggttttcctctcccagtgaaaaaatgggttcagggtcttgtccttagctactagctctagaaaagtcccaaaagcagcagaaggtgaagcaggaagcacttggttttctccttcctgatatagtcacctgttggaagtgttaaaatttcctcgacaggccttaaatttactactacattagggtaccacattttaacttaccatgactttgctccttcctttcctgagaaaatatttccactggattttttccaccagtccccttacagccctcattgttttaggaatctctctcaggtttttttctgacctaaaccagcaggaagtcgtcctgggctgtaagcaccatcacttgcttttttttttttctgatttcacaagtgtggtgttttcccaaggctcccttcccaagctcagtgcaaacctctcactcccaagtttctttgaggccacttgcccccaagcacttcacaatagaccctcgagggcttgtgtccatttggccttttacaagtgtaatgccaatttcattgatttttgtttcttttggcctgatttgtatctctggaatgcatttattcttgaaatatttgtgtgattttacaaaaagcttttgtaatcagttatttaaggctccatttgatgatttcctttacccaaccagtcctcatccctcctctaaaaaatgattaagtaaaatgctgcaggacagccagtagacatttttaaagtacttggtgcctgaaacatcaggcttctcatttcattttagctcaggttggtgctttcacattgtaatcaatgaactgtcaggagggaacaaactgtaagaaggactgcttggtgttttagggtagatcactttagctattaggaagaggatggggtagtgtacagtatatatttttaaaatgtgaattggtttctgaataagaatttgggccatttttgttcccca

SEQ ID NO: 435543 - DNA, 3974 bp, Homo sapiens
ggccaatgggcgagctgccgaccgggtgtcggaaaaggaggcggaagcggggaggagccgctgccagagccagactgcatccgccgcggcgtctccatggcacgaccctggcctccgacttcaacgacttcataaggcggcgtttctgggcgcagccgtgtcgctcctggtttccatcgtgtgggaagaacggagtaacgagtctcacgcagaaaaaggtcttgagagcaccttgtggcgcacccagtgtaactgtgacgatcaaccatttttgtgttgtcctcccccacctgccagaagccaaccatgaaggaccgctcttcaactccccccttacatgttcacgtggatgagaacacccctgtccacgtccacataaaaaaactcccgaaaccatcagcgaccagcagccagaaatctcacaagcgaggaatgaaaggggacactgtgaatgtgcggcggagtgtccgggtgaaaaccaaggtaccttggatgccccctggaaaatcatctgcccggcctgtgggatgcaagtgggagaatccacctcattgcctggagatcacgccaccatcttcagaaaagctggtctcagtgatgcggttaagtgacctctctacagaagatgatgactcaggtcactgtaaaatgaaccgttatgataagaagattgatagtctaatgaatgcggttggttgtctgaagtctgaggtcaagatgcaaaaaggtgagcgccagatggccaaaaggttcctggaggaacggaaggaagagctggaggaggtggcccacgaactggctgagactgagcacgagaacacggtgttgaggcacaacatcgagcgcatgaaggaggagaaggacttcaccatacttcagaagaaacacctacaacaggagaaggagtgcctcatgtccaagctggtggaggcggaaatggatggggctgcggctgccaagcaggtcatggccttgaaggataccatcgggaagctgaaaacggagaaacaaatgacctgcacggacatcaacaccctgacaaggcagaaggaacttctcctgcagaagctgagcacatttgaggagaccaaccgcaccctccgagacctcctgagggaacagcactgcaaagaggattctgaaagactaatggagcaacaaggagcactgctgaaacggctggcggaggccgactcagagaaagcgcgcctgctgttactgctgcaagacaaggacaaggaggtggaagagctccttcaggaaatacaatgtgagaaggctcaagcaaagacagcctctgagctttctaaatccatggagtccatgcgtgggcatttgcaggcacagcttcggtccaaagaggctgagaacagtcgcctgtgcatgcagattaagaatctggagcgcagcgggaatcagcataaggcagaagtggaggccatcatggagcagctgaaggagttgaagcagaagggagaccgagacaaagagagcttgaagaaggccatccgagcccagaaggagcgagccgagaagagcgaggagtatgctgagcagctacacgtgcaactcgctgacaaggatctttatgtcgctgaagctttatccactctggaatcctggaggagccgctacaaccaagttgtaaaagaaaagggagaccttgagctggaaattattgtcctgaatgaccgggtaacagatcttgtaaaccaacaacaaaccctggaggagaagatgcgggaagaccgggatagcctggtggagagactacaccgtcagactgctgagtattccgcattcaagctggagaatgagaggctgaaggccagctttgctccaatggaggacaaactcaaccaggcacacctcgaggtccagcagctgaaggcctcagtgaagaactatgaggggatgattgacaactataagagtcaggtgatgaagaccagattggaggctgatgaagtagctgcccagctagaacgctgtgacaaagagaacaagatccttaaagatgagatgaacaaagagattgaggcggcacgaaggcagttccagtctcagctggctgacctgcagcagctccctgacatcctgaagatcacggaggcgaagctggctgagtgccaagaccaactgcagggctatgagcggaagaacatcgacctcacagccatcatatcagacctgcgcagccggatcgaacaccagggggacaagctggagatggcgagagagaaacatcaggcttcccagaaggaaaataaacagctgagtctgaaggtggatgaactggagaggttagaggcacttggtcccatctctgtcctcttcctaggacctgagactttcagccacttagctgttttttgcttagtgtgcggaagtgttgagggactcgaggccctggaaggtactaggcagacctcagaggaaaagctgcttccatttcagtggaaactggaggcgaccagtgcccagaatatcgagttcctacaggtgattgccaagagggaggaggcaatccaccagtcccagctgcggctggaggagaaaacacgggaatgtgggaccctggcaaggcagttggagagtgccattgaagatgcgaggaggcaggtggaacaaaccaaggagcacgcactctccaaggagcgagcagcccagaacaaaatcctggaccttgagacccagctgagcagaaccaaaacggaattgagccagctgcggcggagccgtgatgatgcggaccgccgctaccagagccggctgcaagacctgaaagatcgcctggagcagtccgagagcaccaaccgcagcatgcagaactacgtccagttcctcaaatcatcatacgccaacgtgtttggggatggtccctattccaccttcctgactagctctcccatccgctcccgatctcctcctgcctgaggccacttatcagggcctggagccctgatggaagccataggaactccagagttgccaagccatagctgagaagcctggtggttttcctctcccagtgaaaaaatgggttcagggtcttgtccttagctactagctctagaaaagtcccaaaagcagcagaaggtgaagcaggaagcacttggttttctccttcctgatatagtcacctgttggaagtgttaaaatttcctcgacaggccttaaatttactactacattagggtaccacattttaacttaccatgactttgctccttcctttcctgagaaaatatttccactggattttttccaccagtccccttacagccctcattgttttaggaatctctctcaggtttttttctgacctaaaccagcaggaagtcgtcctgggctgtaagcaccatcacttgcttttttttttttctgatttcacaagtgtggtgttttcccaaggctcccttcccaagctcagtgcaaacctctcactcccaagtttctttgaggccacttgcccccaagcacttcacaatagaccctcgagggcttgtgtccatttggccttttacaagtgtaatgccaatttcattgatttttgtttcttttggcctgatttgtatctctggaatgcatttattcttgaaatatttgtgtgattttacaaaaagcttttgtaatcagttatttaaggctccatttgatgatttcctttacccaaccagtcctcatccctcctctaaaaaatgattaagtaaaatgctgcaggacagccagtagacatttttaaagtacttggtgcctgaaacatcaggcttctcatttcattttagctcaggttggtgctttcacattgtaatcaatgaactgtcaggagggaacaaactgtaagaaggactgcttggtgttttagggtagatcactttagctattaggaagaggatggggtagtgtacagtatatatttttaaaatgtgaattggtttctgaataagaatttgggccatttttgttcccca

SEQ ID NO: 435544 - DNA, 2225 bp, Homo sapiens
ggccaatgggcgagctgccgaccgggtgtcggaaaaggaggcggaagcggggaggagccgctgccagagccagactgcatccgccgcggcgtctccatggcacgaccctggcctccgacttcaacgacttcataaggcggcgtttctgggcgcagccgtgtcgctcctggtttccatcgtgtgggaagaacggagtaacgagtctcacgcagaaaaaggtcttgagagcaccttgtggcgcacccagtgtaactgtgacgaaatctcacaagcgaggaatgaaaggggacactgtgaatgtgcggcggagtgtccgggtgaaaaccaaggtaccttggatgccccctggaaaatcatctgcccggcctgtgggatgcaagtgggagaatccacctcattgcctggagatcacgccaccatcttcagaaaagctggtctcagtgatgcggttaagtgacctctctacagaagatgatgactcaggtcactgtaaaatgaaccgttatgataagaagattgatagtctaatgaatgcggttggttgtctgaagtctgaggtcaagatgcaaaaaggtgagcgccagatggccaaaaggttcctggaggaacggaaggaagagctggaggaggtggcccacgaactggctgagactgagcacgagaacacggtgttgaggcacaacatcgagcgcatgaaggaggagaaggacttcaccatacttcagaagaaacacctacaacaggagaaggagtgcctcatgtccaagctggtggaggcggaaatggatggggctgcggctgccaagcaggtcatggccttgaaggataccatcgggaagctgaaaacggagaaacaaatgacctgcacggacatcaacaccctgacaaggcagaaggaacttctcctgcagaagctgagcacatttgaggagaccaaccgcaccctccgagacctcctgagggaacagcactgcaaagaggattctgaaagactaatggagcaacaaggagcactgctgaaacggctggcggaggccgactcagagaaagcgcgcctgctgttactgctgcaagacaaggacaaggaggtggaagagctccttcaggaaatacaatgtgagaaggctcaagcaaagacagcctctgagctttctaaatccatggagtccatgcgtgggcatttgcaggcacagcttcggtccaaagaggctgagaacagtcgcctgtgcatgcagattaagaatctggagcgcagcgggaatcagcataaggcagaagtggaggccatcatggagcagctgaaggagttgaagcagaagggagaccgagacaaagagagcttgaagaaggccatccgagcccagaaggagcgagccgagaagagcgaggagtatgctgagcagctacacgtgcaactcgctgacaaggatctttatgtcgctgaagctttatccactctggaatcctggaggagccgctacaaccaagttgtaaaagaaaagggagaccttgagctggaaattattgtcctgaatgaccgggtaacagatcttgtaaaccaacaacaaaccctggaggagaagatgcgggaagaccgggatagcctggtggagagactacaccgtcagactgctgagtattccgcattcaagctggagaatgagaggctgaaggccagctttgctccaatggaggacaaactcaaccaggcacacctcgaggtccagcagctgaaggcctcagtgaagaactatgaggggatgattgacaactataagagtcaggtgatgaagaccagattggaggctgatgaagtagctgcccagctagaacgctgtgacaaagagaacaagatccttaaagatgagatgaacaaagagattgaggcggcacgaaggcagttccagtctcagctggctgacctgcagcagctccctgacatcctgaagatcacggaggcgaagctggctgagtgccaagaccaactgcagggctatgagcggaagaacatcgacctcacagccatcatatcagacctgcgcagccgggtaagggactggcagaaagggtcccacgaactgacccgagcaggggcccgcataccaagatgagctgcacgccccccaagggaggactacttcctttttcttggctgctgctttttaaaaggagtgagctatcatcagtgctgtgaaataaaagtctggtgtgccaaatgcaaaaaa

SEQ ID NO: 435545 - DNA, 3197 bp, Homo sapiens
ggccaatgggcgagctgccgaccgggtgtcggaaaaggaggcggaagcggggaggagccgctgccagagccagactgcatccgccgcggcgtctccatggcacgaccctggcctccgacttcaacgacttcataaggcggcgtttctgggcgcagccgtgtcgctcctggtttccatcgtgtgggaagaacggagtaacgagtctcacgcagaaaaaggtcttgagagcaccttgtggcgcacccagtgtaactgtgacgatcaaccatttttgtgttgtcctcccccacctgccagaagccaaccatgaaggaccgctcttcaactccccccttacatgttcacgtggatgagaacacccctgtccacgtccacataaaaaaactcccgaaaccatcagcgaccagcagccagaaatctcacaagcgaggaatgaaaggggacactgtgaatgtgcggcggagtgtccgggtgaaaaccaaggtaccttggatgccccctggaaaatcatctgcccggcctgtgggatgcaagtgggagaatccacctcattgcctggagatcacgccaccatcttcagaaaagctggtctcagtgatgcggttaagtgacctctctacagaagatgatgactcaggtcactgtaaaatgaaccgttatgataagaagattgatagtctaatgaatgcggttggttgtctgaagtctgaggtcaagatgcaaaaaggtgagcgccagatggccaaaaggttcctggaggaacggaaggaagagctggaggaggtggcccacgaactggctgagactgagcacgagaacacggtgttgaggcacaacatcgagcgcatgaaggaggagaaggacttcaccatacttcagaagaaacacctacaacaggagaaggagtgcctcatgtccaagctggtggaggcggaaatggatggggctgcggctgccaagcaggtcatggccttgaaggataccatcgggaagctgaaaacggagaaacaaatgacctgcacggacatcaacaccctgacaaggcagaaggaacttctcctgcagaagctgagcacatttgaggagaccaaccgcaccctccgagacctcctgagggaacagcactgcaaagaggattctgaaagactaatggagcaacaaggagcactgctgaaacggctggcggaggccgactcagagaaagcgcgcctgctgttactgctgcaagacaaggacaaggaggtggaagagctccttcaggaaatacaatgtgagaaggctcaagcaaagacagcctctgagctttctaaatccatggagtccatgcgtgggcatttgcaggcacagcttcggtccaaagaggctgagaacagtcgcctgtgcatgcagattaagaatctggagcgcagcgggaatcagcataaggcagaagtggaggccatcatggagcagctgaaggagttgaagcagaagggagaccgagacaaagagagcttgaagaaggccatccgagcccagaaggagcgagccgagaagagcgaggagtatgctgagcagctacacgtgcaactcgctgacaaggatctttatgtcgctgaagctttatccactctggaatcctggaggagccgctacaaccaagttgtaaaagaaaagggagaccttgagctggaaattattgtcctgaatgaccgggtaacagatcttgtaaaccaacaacaaaccctggaggagaagatgcgggaagaccgggatagcctggtggagagactacaccgtcagactgctgagtattccgcattcaagctggagaatgagaggctgaaggccagctttgctccaatggaggacaaactcaaccaggcacacctcgaggtccagcagctgaaggcctcagtgaagaactatgaggggatgattgacaactataagagtcaggtgatgaagaccagattggaggctgatgaagtagctgcccagctagaacgctgtgacaaagagaacaagatccttaaagatgagatgaacaaagagattgaggcggcacgaaggcagttccagtctcagctggctgacctgcagcagctccctgacatcctgaagatcacggaggcgaagctggctgagtgccaagaccaactgcagggctatgagcggaagaacatcgacctcacagccatcatatcagacctgcgcagccggatcgaacaccagggggacaagctggagatggcgagagagaaacatcaggcttcccagaaggaaaataaacagctgagtctgaaggtggatgaactggagaggaaactggaggcgaccagtgcccagaatatcgagttcctacaggtgattgccaagagggaggaggcaatccaccagtcccagctgcggctggaggagaaaacacgggaatgtgggaccctggcaaggcagttggagagtgccattgaagatgcgaggaggcaggtggaacaaaccaaggagcacgcactctccaaggagcgagcagcccagaacaaaatcctggaccttgagacccagctgagcagaaccaaaacggaattgagccagctgcggcggagccgtgatgatgcggaccgccgctaccagagccggctgcaagacctgaaagatcgcctggagcagtccgagagcaccaaccgcagcatgcagaactacgtccagttcctcaaatcatcatacgccaacgtgtttggggatggtccctattccaccttcctgactagctctcccatccgctcccgatctcctcctgcctgaggccacttatcagggcctggagccctgatggaagccataggaactccagagttgccaagccatagctgagaagcctggtggttttcctctcccagtgaaaaaatgggttcagggtcttgtccttagctactagctctagaaaagtcccaaaagcagcagaaggtgaagcaggaagcacttggttttctccttcctgatatagtcacctgttggaagtgttaaaatttcctcgacaggccttaaatttactactacattagggtaccacattttaacttaccatgactttgctccttcctttcctgagaaaatatttccactggatttccacagtccttacgctcatgttaggattctcccagttttctgctaacagggagtctctgggtgagcccactgttttttcgtcaagcgtc

SEQ ID NO: 435546 - DNA, 1798 bp, Homo sapiens
gctgcaagttgctgtgttccatgtgatgctatccacacttaacaaagcccacggtcagtctctgcgttcccacccttcactctgttctctaaccagttgctccagctgcacagttctttggtcgccttgctgatctgcagatttctttggcttattcctgtggctccttggagattcttggcatgatgagatccccagtccaggagaggctggcagccccctggcggggtggaacatgacaggttggggtatgcccaggatctgattgagtgctttcacctaggaaactggaggcgaccagtgcccagaatatcgagttcctacaggtgattgccaagagggaggaggcaatccaccagtcccagctgcggctggaggagaaaacacgggaatgtgggaccctggcaaggcagttggagagtgccattgaagatgcgaggaggcaggtggaacaaaccaaggagcacgcactctccaaggagcgagcagcccagaacaaaatcctggaccttgagacccagctgagcagaaccaaaacggaattgagccagctgcggcggagccgtgatgatgcggaccgccgctaccagagccggctgcaagacctgaaagatcgcctggagcagtccgagagcaccaaccgcagcatgcagaactacgtccagttcctcaaatcatcatacgccaacgtgtttggggatggtccctattccaccttcctgactagctctcccatccgctcccgatctcctcctgcctgaggccacttatcagggcctggagccctgatggaagccataggaactccagagttgccaagccatagctgagaagcctggtggttttcctctcccagtgaaaaaatgggttcagggtcttgtccttagctactagctctagaaaagtcccaaaagcagcagaaggtgaagcaggaagcacttggttttctccttcctgatatagtcacctgttggaagtgttaaaatttcctcgacaggccttaaatttactactacattagggtaccacattttaacttaccatgactttgctccttcctttcctgagaaaatatttccactggattttttccaccagtccccttacagccctcattgttttaggaatctctctcaggtttttttctgacctaaaccagcaggaagtcgtcctgggctgtaagcaccatcacttgcttttttttttttctgatttcacaagtgtggtgttttcccaaggctcccttcccaagctcagtgcaaacctctcactcccaagtttctttgaggccacttgcccccaagcacttcacaatagaccctcgagggcttgtgtccatttggccttttacaagtgtaatgccaatttcattgatttttgtttcttttggcctgatttgtatctctggaatgcatttattcttgaaatatttgtgtgattttacaaaaagcttttgtaatcagttatttaaggctccatttgatgatttcctttacccaaccagtcctcatccctcctctaaaaaatgattaagtaaaatgctgcaggacagccagtagacatttttaaagtacttggtgcctgaaacatcaggcttctcatttcattttagctcaggttggtgctttcacattgtaatcaatgaactgtcaggagggaacaaactgtaagaaggactgcttggtgttttagggtagatcactttagctattaggaagaggatggggtagtgtacagtatatatttttaaaatgtgaattggtttctgaataagaatttgggccatttttgttcccca

SEQ ID NO: 435547 - DNA, 2079 bp, Homo sapiens
ggccaatgggcgagctgccgaccgggtgtcggaaaaggaggcggaagcggggaggagccgctgccagagccagactgcatccgccgcggcgtctccatggcacgaccctggcctccgacttcaacgacttcataaggcggcgtttctgggcgcagccgtgtcgctcctggtttccatcgtgtgggaagaacggagtaacgagtctcacgcagaaaaaggtcttgagagcaccttgtggcgcacccagtgtaactgtgacgatcaaccatttttgtgttgtcctcccccacctgccagaagccaaccatgaaggaccgctcttcaactccccccttacatgttcacgtggatgagaacacccctgtccacgtccacataaaaaaactcccgaaaccatcagcgaccagcagccagaaatctcacaagcgaggaatgaaaggggacactgtgaatgtgcggcggagtgtccgggtgaaaaccaaggtaccttggatgccccctggaaaatcatctgcccggcctgtgggatgcaagtgggagaatccacctcattgcctggagatcacgccaccatcttcagaaaagctggtctcagtgatgcggttaagtgacctctctacagaagatgatgactcaggtcactgtaaaatgaaccgttatgataagaagattgatagtctaatgaatgcggttggttgtctgaagtctgaggtcaagatgcaaaaaggtgagcgccagatggccaaaaggttcctggaggaacggaaggaagagctggaggaggtggcccacgaactggctgagactgagcacgagaacacggtgttgaggcacaacatcgagcgcatgaaggaggagaaggacttcaccatacttcagaagaaacacctacaacaggagaaggagtgcctcatgtccaagctggtggaggcggaaatggatggggctgcggctgccaagcaggtcatggccttgaaggataccatcgggaagctgaaaacggagaaacaaatgacctgcacggacatcaacaccctgacaaggcagaaggaacttctcctgcagaagctgagcacatttgaggagaccaaccgcaccctccgagacctcctgagggaacagcactgcaaagaggattctgaaagactaatggagcaacaaggagcactgctgaaacggctggcggaggccgactcagagaaagcgcgcctgctgttactgctgcaagacaaggacaaggaggtggaagagctccttcaggaaatacaatgtgagaaggctcaagcaaagacagcctctgagctttctaaatccatggagtccatgcgtgggcatttgcaggcacagcttcggtccaaagaggctgagaacagtcgcctgtgcatgcagattaagaatctggagcgcagcgggaatcagcataaggcagaagtggaggccatcatggagcagctgaaggagttgaagcagaagggagaccgagacaaagagagcttgaagaaggccatccgagcccagaaggagcgagccgagaagagcgaggagtatgctgagcagctacacgtgcaactcgctgacaaggatctttatgtcgctgaagctttatccactctggaatcctggaggagccgctacaaccaagttgtaaaagaaaagggagaccttgagctggaaattattgtcctgaatgaccgggtaacagatcttgtaaaccaacaacaaaccctggaggagaagatgcgggaagaccgggatagcctggtggagagactacaccgtcagactgctgagtattccgcattcaagctggagaatgagaggctgaagtgccaagaccaactgcagggctatgagcggaagaacatcgacctcacagccatcatatcagacctgcgcagccgggtaagggactggcagaaagggtcccacgaactgacccgagcaggggcccgcataccaagatgagctgcacgccccccaagggaggactacttcctttttcttggctgctgctttttaaaaggagtgagctatcatcagtgctgtgaaataaaagtctggtgtgccaaatgcaaaaaa

SEQ ID NO: 435548 - DNA, 846 bp, Homo sapiens
ggccaatgggcgagctgccgaccgggtgtcggaaaaggaggcggaagcggggaggagccgctgccagagccagactgcatccgccgcggcgtctccatggcacgaccctggcctccgacttcaacgacttcataaggcggcgtttctgggcgcagccgtgtcgctcctggtttccatcgtgtgggaagaacggagtaacgagtctcacgcagaaaaaggtcttgagagcaccttgtggcgcacccagtgtaactgtgacgatcaaccatttttgtgttgtcctcccccacctgccagaagccaaccatgaaggaccgctcttcaactccccccttacatgttcacgtggatgagaacacccctgtccacgtccacataaaaaaactcccgaaaccatcagcgaccagcagccagaaatctcacaagcgaggaatgaaaggggacactgtgaatgtgcggcggagtgtccgggtgaaaaccaaggtaccttggatgccccctggaaaatcatctgcccggcctgtgggatgcaagtgggaggtaggctcacccttgcccaggcttttcttctcggactgctcagatcctagcaggcctcagcctcggtatgattcagggtcagctatagctactggaatgtcctaacagaccccatttactgagggccttgctaaaccctgaaactatgtgaatcttcttgagttcttatgatactgctgtgtgggaagtcctgctgtccaaaggcagagatgaggaaccagacctcagagagaagtgattttcccagagtcacagagaagttagcagagctggagttaagattcattctagaggcagtactcttag

SEQ ID NO: 435549 - DNA, 1921 bp, Homo sapiens
agttcttatcacctacaatgggtagaatgtgaacttgttacctttggcaagttttcatttttccttggtggattccttctgtgactccaggtatcttgataatgggagactggtttatttgttctttaattgcccagatttctttcaactggtaaaacatcatacttcttcagcaaaaggaattcttctagcagagccttcatggatgatatctgtcacacatgccagcacctgcagtttggaaggcagtggtgaatggatccatgcaatatgtctagaagacacaaggatgagccagccacctgatcttgtcatttataaacttttaagaattactctggtttacttttggtctgaaaatggaaaggcccaaataatgaaataatcttttcagattggaattttacatggccatgaaaatatttctttctattcagaagactgaaatagaggaagcttgagagactcctttcttttaaaagcggctctctgtatctgtttcatttaaaacatttgtgggattgaaaatcaccttaatgaagtaggcaaacatttttttaagtagtagaggaagtccagaaaacttaatgaaatggttttttttgttgcctgacactgaaagtaactagtaaataaagggtgaacttcttaattattcgaaaactgcttttaatattaggatatactcttttagctcatcttcgctggtcttgaggcttattataattgtcaaatcaacaaagtttctaatagagaagtagaagaaatatcttttgagatgtaagtagcttggtctgtcttctaaagtaatacatacctgttaaacttgaggtatttttttcatactgaaggcattctaaagtttggtactgtcacaaaacagtagtttacagagcagaagcacttagtattagaataagcctgtaggtgtgaaggaataagtgttgcaaaatagttatttatccaagctgtcaattaattgattgaagtagttatcaaaatgtttctgtttctttctttggtatctattaactggtcagtcaaaagctattaaagaatgtttttaaagtcacctaatgctgccagtttgttaaatttggtatacattttaagaatagacattctagagttattaatatggaagcagctaaaatgttttaggaaatctcaaaagttttagaagccacatttgctaaagcataacctgcacttagtctttcttggctatctgtatttttttctcattaattataaataaatttttgttaagtatagtatttaaaagtaagtttaaaggttcaatttgaactgaaatttccccagagagctttgaattcccataagtgattacagcttttactcccgacttgtttttagtaaatgttaataagacaattggtttacaaacacatataaattaaaaaaaacaactgtccatcgttttaggaagaactgaaggaactaaaaatgatatttgcttggaaattaagttagttgaactctttgaaccacagtagaaaccgctttgtgtggcctgtgagattataagctttttgtttcagctttgaagatgaaaagtgatttaatctcttaatctcatgctttgattgaattttagctctgttccttaaaatatgcaaaaggaaatgtaagtgcatttctagtcacctcatgccactacaagctatttatttaaaagtgaaactttttgtatattattgtgaactgatttgtttatttaaacttttattttggtgaatttacctttgagtttttttatattttatgtcacaaaatgaagtcctatatttttcagtgtttatgaatattaatataaactatttttttctagaatgactaattgtgtaatatctgtattatgtgataatttgaaatctaataaatattttctccatgaaaa

SEQ ID NO: 435550 - DNA, 3370 bp, Homo sapiens
  misc_feature (1)..(1): n is a, c, g, or t
nctgctgtgggtagttttaatcctaatgtgacaagcagcatgcttggtaatgttaatataagtacaagcaatattcctagtgctgctggtgtgagtgttgggcctggagttaccagtggtgttaatgtgaatatcttgagtggcatgggcaatggtactatttcttcctctgctgctgttagcagtgttcctaatgcagctgcagggatgactgggggatcggtttcaagtcagcagcaacaaccaacagttaacacttcgaggttcagagttgtgaagttagattctagttctgagccctttaaaaaaggtagatggacttgcactgagttctatgaaaaagaaaatgctgtacctgctacagaaggtgtgctgataaataaagtggtggagactgtaaagcaaaatccgatagaagtgacttctgaaagggagagcactagtgggagttcagtgagcagtagtgtcagcacactgagtcactatacagagagtgtgggaagtggagagatgggagcccctactgtggtggtgcagcagcagcagcagcaacaacaacaacaacagcaacaaccagctctccaaggtgtgaccctccaacagatggattttggtagcactggtccacagagtattccagcagttagtataccacagagtatttctcagtcacagatctcacaagtacaattacagtctcaagaactgagctatcagcaaaagcaaggtcttcagccagtacctctgcaagccactatgagtgctgcaactggtatccagccatcgcctgtaaatgtggttggtgtaacttcagctttaggtcagcagccttccatttccagtttggctcaaccccagctaccatattctcaggcggctcctccagtgcaaactccccttccaggggcaccaccaccccaacagttacagtatggacaacagcaaccaatggtttctacacagatggccccaggccatgtcaaatcagtgactcaaaatcctgcttcagagtatgtacaacagcagccaattcttcaaacagcaatgtcctccggacagcccagttctgcaggagtaggagcaggaacaacagtgattcctgtggctcagccacagggtatccagctgccagtgcagcccacagcagtcccagcacaacctgcaggggcatctgtccagcctgttggccaggctccggcagcagtgtctgctgtacctactggcagtcagattgcaaatattggtcagcaagcaaacatacctactgcagtgcagcagccctctacccaggttccaccttcagttattcagcagggtgctcctccatcttcgcaagtggttccacctgctcaaactgggattattcatcagggagttcaaactagtgctccaagccttcctcaacaattggttattgcatcccaaagttccttgttaactgtgcctccccagccacaaggagtagaaccagtagctcaaggaattgtttcacagcagttgcctgcagttagttctttgccctctgctagtagtatttctgttacaagtcaggttagttcaactggtccttctggaatgccttctgccccaacaaacttggttccaccacaaaatatagcacaaacccctgctacccaaaatggtaatttggttcaaagtgttagtcaacctcccttgatagcaactaatacaaatttgcctttggcacaacagataccactaagttctacccagttctccgcacaatcattagctcaggcaattggaagccaaattgaagatgccaggcgtgcagcggagccctccttagttggcttacctcagactatcagtggtgacagtgggggaatgtcagcagtttcagatgggagtagcagcagcctagcagcctctgcttctcttttcccgttgaaggtgctaccgctgacgacacccctggtggatggcgaggatgagagctcctctggtgcaagtgtggtagctattgacaacaaaatcgagcaagctatggatctagtgaaaagccatttgatgtatgcggtcagagaagaagtggaggtcctcaaagagcaaatcaaagaactaatagagaaaaattcccagctggagcaggagaacaatctgctgaagacactggccagtcctgagcagcttgcccagtttcaggcccagctgcagactggctccccccctgccaccacccagccacagggcaccacacagccccccgcccagccagcatcgcagggctcaggaccaaccgcatagctgcctatgcccccgcagaactggctgctgcgtgtgaactgaacagacggagaagatgtgctagggagaatctgcctccacagtcacccatttcattgctcgctgcgaaagagacgtgagactgacatatgccattatctcttttccagtattaaacactcatatgcttatggcttggagaaatttcttagttgggtgaattaaaggttaatccgagaattagcatggatataccgggacctcatgcagcttggcagatatctgagaaatggtttaattcatgctcaggagctgtgtgcctttccatcccttccggctccctacccctcacttccaagggttctctctcctgcttgcgcttagtgtcctacatggggttgtgaagcgatggagctcctcactggactcgcctctctcctctcctccccccaggaggaacttgaaaggagggtaaaaagactaaaatgagggggaacagagttcactgtacaaatttgacaactgtcaccaaaattcataaaaaacaatagtactgtgcctctttcttctcaaacaatggatgacacaaaactatgagagtgacaaaatggtgacaggtagctgggacctaggctatcttaccatgaaggttgttttgcttattgtatatttgtgtatgtagtgtaactattttgtacaatagaggactgtaactactatttaggttgtacagattgaaatttagttgtttcattggctgtctgaggaggtgtggacttttatatatagatctacataaaaactgctacatgacaaaaaccacacctaaagaaattttaagaatttggcacagttactcactttgtgtaatctgaaatctagctgctgaatacgctgaagtaaatccttgttcactgaagtctttcaattgagctggttgaatactttgaaaaatgctcagttctaactaatgaaatggatttcccagtaggggtttctgcatatcacctgtatagtagttatatgcatatgtttctgtgcatgttctctacacaattgtaaggtgtcactgtatttaactgttgcacttgtcaactttcaataaagcatataaatgttgata

SEQ ID NO: 435551 - DNA, 3912 bp, Homo sapiens
  misc_feature (1)..(1): n is a, c, g, or t
nctgctgtgggtagttttaatcctaatgtgacaagcagcatgcttggtaatgttaatataagtacaagcaatattcctagtgctgctggtgtgagtgttgggcctggagttaccagtggtgttaatgtgaatatcttgagtggcatgggcaatggtactatttcttcctctgctgctgttagcagtgttcctaatgcagctgcagggatgactgggggatcggtttcaagtcagcagcaacaaccaacagttaacacttcgaggttcagagttgtgaagttagattctagttctgagccctttaaaaaaggtagatggacttgcactgagttctatgaaaaagaaaatgctgtacctgctacagaaggtgtgctgataaataaagtggtggagactgtaaagcaaaatccgatagaagtgacttctgaaagggagagcactagtgggagttcagtgagcagtagtgtcagcacactgagtcactatacagagagtgtgggaagtggagagatgggagcccctactgtggtggtgcagcagcagcagcagcaacaacaacaacaacagcaacaaccagctctccaaggtgtgaccctccaacagatggattttggtagcactggtccacagagtattccagcagttagtataccacagagtatttctcagtcacagatctcacaagtacaattacagtctcaagaactgagctatcagcaaaagcaaggtcttcagccagtacctctgcaagccactatgagtgctgcaactggtatccagccatcgcctgtaaatgtggttggtgtaacttcagctttaggtcagcagccttccatttccagtttggctcaaccccagctaccatattctcaggcggctcctccagtgcaaactccccttccaggggcaccaccaccccaacagttacagtatggacaacagcaaccaatggtttctacacagatggccccaggccatgtcaaatcagtgactcaaaatcctgcttcagagtatgtacaacagcagccaattcttcaaacagcaatgtcctccggacagcccagttctgcaggagtaggagcaggaacaacagtgattcctgtggctcagccacagggtatccagctgccagtgcagcccacagcagtcccagcacaacctgcaggggcatctgtccagcctgttggccaggctccggcagcagtgtctgctgtacctactggcagtcagattgcaaatattggtcagcaagcaaacatacctactgcagtgcagcagccctctacccaggttccaccttcagttattcagcagggtgctcctccatcttcgcaagtggttccacctgctcaaactgggattattcatcagggagttcaaactagtgctccaagccttcctcaacaattggttattgcatcccaaagttccttgttaactgtgcctccccagccacaaggagtagaaccagtagctcaaggaattgtttcacagcagttgcctgcagttagttctttgccctctgctagtagtatttctgttacaagtcaggttagttcaactggtccttctggaatgccttctgccccaacaaacttggttccaccacaaaatatagcacaaacccctgctacccaaaatggtaatttggttcaaagtgttagtcaacctcccttgatagcaactaatacaaatttgcctttggcacaacagataccactaagttctacccagttctccgcacaatcattagctcaggcaattggaagccaaattgaagatgccaggcgtgcagcggagccctccttagttggcttacctcagactatcagtggtgacagtgggggaatgtcagcagtttcagatgggagtagcagcagcctagcagcctctgcttctcttttcccgttgaaggtgctaccgctgacgacacccctggtggatggcgaggatgagagctctctatttcagtgcttctctcctaccagaggtgcaaggagtgatcctagaaccacagatacagccaagaccacggagagcttttgacgtcaggggtccactttctccactgaacccttggagacagaatatccagcttctggagagagtgggaaaggataataaacaaatttctttcaactggtaaaacatcatacttcttcagcaaaaggaattcttctagcagagccttcatggatgatatctgtcacacatgccagcacctgcagtttggaaggcagtggtgaatggatccatgcaatatgtctagaagacacaaggatgagccagccacctgatcttgtcatttataaacttttaagaattactctggtttacttttggtctgaaaatggaaaggcccaaataatgaaataatcttttcagattggaattttacatggccatgaaaatatttctttctattcagaagactgaaatagaggaagcttgagagactcctttcttttaaaagcggctctctgtatctgtttcatttaaaacatttgtgggattgaaaatcaccttaatgaagtaggcaaacatttttttaagtagtagaggaagtccagaaaacttaatgaaatggttttttttgttgcctgacactgaaagtaactagtaaataaagggtgaacttcttaattattcgaaaactgcttttaatattaggatatactcttttagctcatcttcgctggtcttgaggcttattataattgtcaaatcaacaaagtttctaatagagaagtagaagaaatatcttttgagatgtaagtagcttggtctgtcttctaaagtaatacatacctgttaaacttgaggtatttttttcatactgaaggcattctaaagtttggtactgtcacaaaacagtagtttacagagcagaagcacttagtattagaataagcctgtaggtgtgaaggaataagtgttgcaaaatagttatttatccaagctgtcaattaattgattgaagtagttatcaaaatgtttctgtttctttctttggtatctattaactggtcagtcaaaagctattaaagaatgtttttaaagtcacctaatgctgccagtttgttaaatttggtatacattttaagaatagacattctagagttattaatatggaagcagctaaaatgttttaggaaatctcaaaagttttagaagccacatttgctaaagcataacctgcacttagtctttcttggctatctgtatttttttctcattaattataaataaatttttgttaagtatagtatttaaaagtaagtttaaaggttcaatttgaactgaaatttccccagagagctttgaattcccataagtgattacagcttttactcccgacttgtttttagtaaatgttaataagacaattggtttacaaacacatataaattaaaaaaaacaactgtccatcgttttaggaagaactgaaggaactaaaaatgatatttgcttggaaattaagttagttgaactctttgaaccacagtagaaaccgctttgtgtggcctgtgagattataagctttttgtttcagctttgaagatgaaaagtgatttaatctcttaatctcatgctttgattgaattttagctctgttccttaaaatatgcaaaaggaaatgtaagtgcatttctagtcacctcatgccactacaagctatttatttaaaagtgaaactttttgtatattattgtgaactgatttgtttatttaaacttttattttggtgaatttacctttgagtttttttatattttatgtcacaaaatgaagtcctatatttttcagtgtttatgaatattaatataaactatttttttctagaatgactaattgtgtaatatctgtattatgtgataatttgaaatctaataaatattttctccatgaaaa

SEQ ID NO: 435552 - DNA, 2137 bp, Homo sapiens
tttgatttggtcttccactcagagttgagtggtttatcacagagtgtgttatggcttagaccaatacaggtcccttcttaatagtggtagctcctttttatcctgaggattaagccattacaaactcaaatgaccagagaatgtaatttcttaataagaatttttccttaaatctatattcagctctctatttcagtgcttctctcctaccagaggtgcaaggagtgatcctagaaccacagatacagccaagaccacggagagcttttgacgtcaggggtccactttctccactgaacccttggagacagaatatccagcttctggagagagtgggaaaggataataaacaaatttctttcaactggtaaaacatcatacttcttcagcaaaaggaattcttctagcagagccttcatggatgatatctgtcacacatgccagcacctgcagtttggaaggcagtggtgaatggatccatgcaatatgtctagaagacacaaggatgagccagccacctgatcttgtcatttataaacttttaagaattactctggtttacttttggtctgaaaatggaaaggcccaaataatgaaataatcttttcagattggaattttacatggccatgaaaatatttctttctattcagaagactgaaatagaggaagcttgagagactcctttcttttaaaagcggctctctgtatctgtttcatttaaaacatttgtgggattgaaaatcaccttaatgaagtaggcaaacatttttttaagtagtagaggaagtccagaaaacttaatgaaatggttttttttgttgcctgacactgaaagtaactagtaaataaagggtgaacttcttaattattcgaaaactgcttttaatattaggatatactcttttagctcatcttcgctggtcttgaggcttattataattgtcaaatcaacaaagtttctaatagagaagtagaagaaatatcttttgagatgtaagtagcttggtctgtcttctaaagtaatacatacctgttaaacttgaggtatttttttcatactgaaggcattctaaagtttggtactgtcacaaaacagtagtttacagagcagaagcacttagtattagaataagcctgtaggtgtgaaggaataagtgttgcaaaatagttatttatccaagctgtcaattaattgattgaagtagttatcaaaatgtttctgtttctttctttggtatctattaactggtcagtcaaaagctattaaagaatgtttttaaagtcacctaatgctgccagtttgttaaatttggtatacattttaagaatagacattctagagttattaatatggaagcagctaaaatgttttaggaaatctcaaaagttttagaagccacatttgctaaagcataacctgcacttagtctttcttggctatctgtatttttttctcattaattataaataaatttttgttaagtatagtatttaaaagtaagtttaaaggttcaatttgaactgaaatttccccagagagctttgaattcccataagtgattacagcttttactcccgacttgtttttagtaaatgttaataagacaattggtttacaaacacatataaattaaaaaaaacaactgtccatcgttttaggaagaactgaaggaactaaaaatgatatttgcttggaaattaagttagttgaactctttgaaccacagtagaaaccgctttgtgtggcctgtgagattataagctttttgtttcagctttgaagatgaaaagtgatttaatctcttaatctcatgctttgattgaattttagctctgttccttaaaatatgcaaaaggaaatgtaagtgcatttctagtcacctcatgccactacaagctatttatttaaaagtgaaactttttgtatattattgtgaactgatttgtttatttaaacttttattttggtgaatttacctttgagtttttttatattttatgtcacaaaatgaagtcctatatttttcagtgtttatgaatattaatataaactatttttttctagaatgactaattgtgtaatatctgtattatgtgataatttgaaatctaataaatattttctccatgaaaa

SEQ ID NO: 435553 - DNA, 927 bp, Homo sapiens
agatagtttctttaaatttattcgtgggatacttataataatacaggtgaaagatagccaggcgaattcctttgtccattgctgagagattatggtgacatggatgttgtttttcgaaatgttaaaaaaccttatttttgcaagtctggccagagaacaggctttccccacattatgtaatttagtcctttgtggcttactaaaatagggagatgcctggatattcgttagtaagagaggggctggcattttctggagggtgatacattacatagtgttaaataacattcaaaatatgatgctagcaatatcacaaaattgggagatcctttttatcttggacgcttaagataaattccatttatcgatgacctttttccctcctctttttcagctcctctggtgcaagtgtggtagctattgacaacaaaatcgagcaagctatggtatgtactgatgaaaaatcatttatactaaatgtgggcacagcacaaaaataagatgttttgtggaaccagtgcatccctaagttcagatgatgatgattgctcttgatgcgcgtagaaatgccggcgctgtctccattcggccagcgtggagccacctaccacggcagccgtggagggagaaaggggccctgcgggtattaaatggtcttcttccccggactggtttcacacgacgggattttctcacggtgaccctttttgctggggatttattagggaagcgctggccaactatctccttcggctggtcgtgagcacacctttagcgatgtggctttactaggaatcctaatattttactagggagccgggaggtggggagggccccagaagtcgggatcctggataagggtcttctagacggtgcacaaacgggtccccggtggcgcgggctccttcacaatgaagaagaatcaga

SEQ ID NO: 435554 - DNA, 322 bp, Homo sapiens
ctggagcatggggagcaaggggacagtggtgtgagatgaagctgcagaggtaagcaggggccagatgctgtagggccctgtaagagttaggttcctattatactgtgaatagagctttgttgaaagatttttaactggaactgggtggtgggcaacatagtctaatgtgcctttaaaaaaatcatcctggctgttggatggagaaacggattatagaggaataagagtggaagctgggaggtgtgttgggacatgatttatgttatccaggtggcagtgttaaactgattcgtttcctttttttaaaaaaacaattcatatt

SEQ ID NO: 435555 - DNA, 1839 bp, Homo sapiens
agcggagtggcgtgccggccaatcggcgcagctctttcctgcatatattttgcactaagactgggagtccgggtctagagctgagtggagcccggctgcggatctgggaagcgcctcttcacggcactgggatccgcatctgcctgggatcatcaagccctagaagctgggtttctttaaattagggctgccgttttctgtttctccctgggctgcggaaagccagaagattttatctagcttatacaaggctgctggtgttccctctttttttccacgagggtgtttttggctgcaattgcatgaaatcccaatggtgtagaccagtggcgatggatctaggagtttaccaactgagacatttttcaatttctttcttgtcatccttgctggggactgaaaacgcttctgtgagacttgataatagctcctctggtgcaagtgtggtagctattgacaacaaaatcgagcaagctatggatctagtgaaaagccatttgatgtatgcggtcagagaagaagtggaggtcctcaaagagcaaatcaaagaactaatagagaaaaattcccagctggagcaggagaacaatctgctgaagacactggccagtcctgagcagcttgcccagtttcaggcccagctgcagactggctccccccctgccaccacccagccacagggcaccacacagccccccgcccagccagcatcgcagggctcaggaccaaccgcatagctgcctatgcccccgcagaactggctgctgcgtgtgaactgaacagacggagaagatgtgctagggagaatctgcctccacagtcacccatttcattgctcgctgcgaaagagacgtgagactgacatatgccattatctcttttccagtattaaacactcatatgcttatggcttggagaaatttcttagttgggtgaattaaaggttaatccgagaattagcatggatataccgggacctcatgcagcttggcagatatctgagaaatggtttaattcatgctcaggagctgtgtgcctttccatcccttccggctccctacccctcacttccaagggttctctctcctgcttgcgcttagtgtcctacatggggttgtgaagcgatggagctcctcactggactcgcctctctcctctcctccccccaggaggaacttgaaaggagggtaaaaagactaaaatgagggggaacagagttcactgtacaaatttgacaactgtcaccaaaattcataaaaaacaatagtactgtgcctctttcttctcaaacaatggatgacacaaaactatgagagtgacaaaatggtgacaggtagctgggacctaggctatcttaccatgaaggttgttttgcttattgtatatttgtgtatgtagtgtaactattttgtacaatagaggactgtaactactatttaggttgtacagattgaaatttagttgtttcattggctgtctgaggaggtgtggacttttatatatagatctacataaaaactgctacatgacaaaaaccacacctaaagaaattttaagaatttggcacagttactcactttgtgtaatctgaaatctagctgctgaatacgctgaagtaaatccttgttcactgaagtctttcaattgagctggttgaatactttgaaaaatgctcagttctaactaatgaaatggatttcccagtaggggtttctgcatatcacctgtatagtagttatatgcatatgtttctgtgcatgttctctacacaattgtaaggtgtcactgtatttaactgttgcacttgtcaactttcaataaagcatataaatgttgata

SEQ ID NO: 435556 - DNA, 2097 bp, Homo sapiens
agcggagtggcgtgccggccaatcggcgcagctctttcctgcatatattttgcactaagactgggagtccgggtctagagctgagtggagcccggctgcggatctgggaagcgcctcttcacggcactgggatccgcatctgcctgggatcatcaagccctagaagctgggtttctttaaattagggctgccgttttctgtttctccctgggctgcggaaagccagaagattttatctagcttatacaaggctgctggtgttccctctttttttccacgagggtgtttttggctgcaattgcatgaaatcccaatggtgtagaccagtggcgatggatctaggagtttaccaactgagacatttttcaatttctttcttgtcatccttgctggggactgaaaacgcttctgtgagacttgataatagctcctctggtgcaagtgtggtagctattgacaacaaaatcgagcaagctatggatctagtgaaaagccatttgatgtatgcggtcagagaagaagtggaggtcctcaaagagcaaatcaaagaactaatagagaaaaattcccagctggagcaggagaacaatctgctgaagacactggccagtcctgagcagcttgcccagtttcaggcccagctgcagactggctccccccctgccaccacccagccacagggcaccacacagccccccgcccagccagcatcgcagggctcaggaccaaccgcatagctgcctatgcccccgcagaactggctgctgcgtgtgaactgaacagacggagaagatgtgctagggagaatctgcctccacagtcacccatttcattgctcgctgcgaaagagacgtgagactgacatatgccattatctcttttccagtattaaacactcatatgcttatggcttggagaaatttcttagttgggtgaattaaaggttaatccgagaattagcatggatataccgggacctcatgcagcttggcagatatctgagaaatggtttaattcatgctcaggagctgtgtgcctttccatcccttccggctccctacccctcacttccaagggttctctctcctgcttgcgcttagtgtcctacatggggttgtgaagcgatggagctcctcactggactcgcctctctcctctcctccccccaggaggaacttgaaaggagggtaaaaagactaaaatgagggggaacagagttcactgtacaaatttgacaactgtcaccaaaattcataaaaaacaatagtactgtgcctctttcttctcaaacaatggatgacacaaaactatgagagtgacaaaatggtgacaggtagctgggacctaggctatcttaccatgaaggttgttttgcttattgtatatttgtgtatgtagtgtaactattttgtacaatagaggactgtaactactatttaggttgtacagattgaaatttagttgtttcattggctgtctgaggaggtgtggacttttatatatagatctacataaaaactgctacatgacaaaaaccacacctaaagaaattttaagaatttggcacagttactcactttgtgtaatctgaaatctagctgctgaatacgctgaagtaaatccttgttcactgaagtctttcaattgagctggttgaatactttgaaaaatgctcagttctaactaatgaaatggatttcccagtaggggtttctgcatatcacctgtatagtagttatatgcatatgtttctgtgcatgttctctacacaattgtaaggtgtcactgtatttaactgttgcacttgtcaactttcaataaagcatataaatgttgataaaaaaaaaaattcatatgaccctgttaacataatggcagtcatttccacaactgtttccaggtaaagttaacaatttgactagtaaaatcctgaagggcagtggaatgattggaaaagtaggggcgtgatttgactgcatgaagtaaaaggaaattgacacattgagttgttcagcaggtaagagaagagacagtggaggagtccagctcaattctaactactgtgtgacttggacaggttgcttcactcctggacgg

SEQ ID NO: 435557 - DNA, 2124 bp, Homo sapiens
agcggagtggcgtgccggccaatcggcgcagctctttcctgcatatattttgcactaagactgggagtccgggtctagagctgagtggagcccggctgcggatctgggaagcgcctcttcacggcactgggatccgcatctgcctgggatcatcaagccctagaagctgggtttctttaaattagggctgccgttttctgtttctccctgggctgcggaaagccagaagattttatctagcttatacaaggctgctggtgttccctctttttttccacgagggtgtttttggctgcaattgcatgaaatcccaatggtgtagaccagtggcgatggatctaggagtttaccaactgagacatttttcaatttctttcttgtcatccttgctggggactgaaaacgcttctgtgagacttgataatagctcctctggtgcaagtgtggtagctattgacaacaaaatcgagcaagctatggatctagtgaaaagccatttgatgtatgcggtcagagaagaagtggaggtcctcaaagagcaaatcaaagaactaatagagaaaaattcccagctggagcaggagaacaatctgctgaagacactggccagtcctgagcagcttgcccagtttcaggcccagctgcagactggctccccccctgccaccacccagccacagggcaccacacagccccccgcccagccagcatcgcagggctcaggaccaaccgcatagctgcctatgcccccgcagaactggctgctgcgtgtgaactgaacagacggagaagatgtgctagggagaatctgcctccacagtcacccatttcattgctcgctgcgaaagagacgtgagactgacatatgccattatctcttttccagtattaaacactcatatgcttatggcttggagaaatttcttagttgggtgaattaaaggttaatccgagaattagcatggatataccgggacctcatgcagcttggcagatatctgagaaatggtttaattcatgctcaggagctgtgtgcctttccatcccttccggctccctacccctcacttccaagggttctctctcctgcttgcgcttagtgtcctacatggggttgtgaagcgatggagctcctcactggactcgcctctctcctctcctccccccaggaggaacttgaaaggagggtaaaaagactaaaatgagggggaacagagttcactgtacaaatttgacaactgtcaccaaaattcataaaaaacaatagtactgtgcctctttcttctcaaacaatggatgacacaaaactatgagagtgacaaaatggtgacaggtagctgggacctaggctatcttaccatgaaggttgttttgcttattgtatatttgtgtatgtagtgtaactattttgtacaatagaggactgtaactactatttaggttgtacagattgaaatttagttgtttcattggctgtctgaggaggtgtggacttttatatatagatctacataaaaactgctacatgacaaaaaccacacctaaagaaattttaagaatttggcacagttactcactttgtgtaatctgaaatctagctgctgaatacgctgaagtaaatccttgttcactgaagtctttcaattgagctggttgaatactttgaaaaatgctcagttctaactaatgaaatggatttcccagtaggggtttctgcatatcacctgtatagtagttatatgcatatgtttctgtgcatgttctctacacaattgtaaggtgtcactgtatttaactgttgcacttgtcaactttcaataaagcatataaatgttgataagaaaaaaaaaaaaaaaaaaagaaaaaaaagggggggcagggctagagtaaaacaagagaaggggccccaagataacggggtcgcacaaggataacggggacaaaggtggggcccatagagggagacgcgcagaatagaaaagacaagagccacaagcacgcgagaggaaccacaaacgagcgaaagaacggcgagaaaacacgcagaaagagggaaacaacaggagagaaagaaaacacaaaaaaaaggagacagcgccacccaacaggcgcgcacagcaacat

SEQ ID NO: 435558 - DNA, 1492 bp, Homo sapiens
tcgggttacaaataggaagctttcgccgttaagcagccgcgggacacagctccggggaccggggtctgactcccttaaacctcctctggtgcaagtgtggtagctattgacaacaaaatcgagcaagctatggatctagtgaaaagccatttgatgtatgcggtcagagaagaagtggaggtcctcaaagagcaaatcaaagaactaatagagaaaaattcccagctggagcaggagaacaatctgctgaagacactggccagtcctgagcagcttgcccagtttcaggcccagctgcagactggctccccccctgccaccacccagccacagggcaccacacagccccccgcccagccagcatcgcagggctcaggaccaaccgcatagctgcctatgcccccgcagaactggctgctgcgtgtgaactgaacagacggagaagatgtgctagggagaatctgcctccacagtcacccatttcattgctcgctgcgaaagagacgtgagactgacatatgccattatctcttttccagtattaaacactcatatgcttatggcttggagaaatttcttagttgggtgaattaaaggttaatccgagaattagcatggatataccgggacctcatgcagcttggcagatatctgagaaatggtttaattcatgctcaggagctgtgtgcctttccatcccttccggctccctacccctcacttccaagggttctctctcctgcttgcgcttagtgtcctacatggggttgtgaagcgatggagctcctcactggactcgcctctctcctctcctccccccaggaggaacttgaaaggagggtaaaaagactaaaatgagggggaacagagttcactgtacaaatttgacaactgtcaccaaaattcataaaaaacaatagtactgtgcctctttcttctcaaacaatggatgacacaaaactatgagagtgacaaaatggtgacaggtagctgggacctaggctatcttaccatgaaggttgttttgcttattgtatatttgtgtatgtagtgtaactattttgtacaatagaggactgtaactactatttaggttgtacagattgaaatttagttgtttcattggctgtctgaggaggtgtggacttttatatatagatctacataaaaactgctacatgacaaaaaccacacctaaagaaattttaagaatttggcacagttactcactttgtgtaatctgaaatctagctgctgaatacgctgaagtaaatccttgttcactgaagtctttcaattgagctggttgaatactttgaaaaatgctcagttctaactaatgaaatggatttcccagtaggggtttctgcatatcacctgtatagtagttatatgcatatgtttctgtgcatgttctctacacaattgtaaggtgtcactgtatttaactgttgcacttgtcaactttcaataaagcatataaatgttgata

SEQ ID NO: 435559 - DNA, 1499 bp, Homo sapiens
agcgggcctgggtgggaagagaggcccaagaaagccaccatagtctgtagcgtgaagcttttcctatagtctagtgataatcctgctctcctctggtgcaagtgtggtagctattgacaacaaaatcgagcaagctatggatctagtgaaaagccatttgatgtatgcggtcagagaagaagtggaggtcctcaaagagcaaatcaaagaactaatagagaaaaattcccagctggagcaggagaacaatctgctgaagacactggccagtcctgagcagcttgcccagtttcaggcccagctgcagactggctccccccctgccaccacccagccacagggcaccacacagccccccgcccagccagcatcgcagggctcaggaccaaccgcatagctgcctatgcccccgcagaactggctgctgcgtgtgaactgaacagacggagaagatgtgctagggagaatctgcctccacagtcacccatttcattgctcgctgcgaaagagacgtgagactgacatatgccattatctcttttccagtattaaacactcatatgcttatggcttggagaaatttcttagttgggtgaattaaaggttaatccgagaattagcatggatataccgggacctcatgcagcttggcagatatctgagaaatggtttaattcatgctcaggagctgtgtgcctttccatcccttccggctccctacccctcacttccaagggttctctctcctgcttgcgcttagtgtcctacatggggttgtgaagcgatggagctcctcactggactcgcctctctcctctcctccccccaggaggaacttgaaaggagggtaaaaagactaaaatgagggggaacagagttcactgtacaaatttgacaactgtcaccaaaattcataaaaaacaatagtactgtgcctctttcttctcaaacaatggatgacacaaaactatgagagtgacaaaatggtgacaggtagctgggacctaggctatcttaccatgaaggttgttttgcttattgtatatttgtgtatgtagtgtaactattttgtacaatagaggactgtaactactatttaggttgtacagattgaaatttagttgtttcattggctgtctgaggaggtgtggacttttatatatagatctacataaaaactgctacatgacaaaaaccacacctaaagaaattttaagaatttggcacagttactcactttgtgtaatctgaaatctagctgctgaatacgctgaagtaaatccttgttcactgaagtctttcaattgagctggttgaatactttgaaaaatgctcagttctaactaatgaaatggatttcccagtaggggtttctgcatatcacctgtatagtagttatatgcatatgtttctgtgcatgttctctacacaattgtaaggtgtcactgtatttaactgttgcacttgtcaactttcaataaagcatataaatgttgata

SEQ ID NO: 435560 - DNA, 1722 bp, Homo sapiens
agcagcagcaacccgctcgggtcttcttctccgccgtggaagctttgttgttttactgttagcgataaatcttgctgctgctcactttttgggtctgcactacctttatgagctgagctgtaacactcactgcgagggtccacggctttattctttaagtcagcgagaccaacaacccacgggaaggaaccaattccagatacaattgctcagttattcagttgaattattgagtcatgccctgtaccaaagccgactgacttgagtttggatcttggctctgccatttgttaaacatatgtctccttggctcctctggtgcaagtgtggtagctattgacaacaaaatcgagcaagctatggatctagtgaaaagccatttgatgtatgcggtcagagaagaagtggaggtcctcaaagagcaaatcaaagaactaatagagaaaaattcccagctggagcaggagaacaatctgctgaagacactggccagtcctgagcagcttgcccagtttcaggcccagctgcagactggctccccccctgccaccacccagccacagggcaccacacagccccccgcccagccagcatcgcagggctcaggaccaaccgcatagctgcctatgcccccgcagaactggctgctgcgtgtgaactgaacagacggagaagatgtgctagggagaatctgcctccacagtcacccatttcattgctcgctgcgaaagagacgtgagactgacatatgccattatctcttttccagtattaaacactcatatgcttatggcttggagaaatttcttagttgggtgaattaaaggttaatccgagaattagcatggatataccgggacctcatgcagcttggcagatatctgagaaatggtttaattcatgctcaggagctgtgtgcctttccatcccttccggctccctacccctcacttccaagggttctctctcctgcttgcgcttagtgtcctacatggggttgtgaagcgatggagctcctcactggactcgcctctctcctctcctccccccaggaggaacttgaaaggagggtaaaaagactaaaatgagggggaacagagttcactgtacaaatttgacaactgtcaccaaaattcataaaaaacaatagtactgtgcctctttcttctcaaacaatggatgacacaaaactatgagagtgacaaaatggtgacaggtagctgggacctaggctatcttaccatgaaggttgttttgcttattgtatatttgtgtatgtagtgtaactattttgtacaatagaggactgtaactactatttaggttgtacagattgaaatttagttgtttcattggctgtctgaggaggtgtggacttttatatatagatctacataaaaactgctacatgacaaaaaccacacctaaagaaattttaagaatttggcacagttactcactttgtgtaatctgaaatctagctgctgaatacgctgaagtaaatccttgttcactgaagtctttcaattgagctggttgaatactttgaaaaatgctcagttctaactaatgaaatggatttcccagtaggggtttctgcatatcacctgtatagtagttatatgcatatgtttctgtgcatgttctctacacaattgtaaggtgtcactgtatttaactgttgcacttgtcaactttcaataaagcatataaatgttgata

SEQ ID NO: 435561 - DNA, 1461 bp, Homo sapiens
ctggagcatggggagcaaggggacagtggtgtgagatgaagctgcagagctcctctggtgcaagtgtggtagctattgacaacaaaatcgagcaagctatggatctagtgaaaagccatttgatgtatgcggtcagagaagaagtggaggtcctcaaagagcaaatcaaagaactaatagagaaaaattcccagctggagcaggagaacaatctgctgaagacactggccagtcctgagcagcttgcccagtttcaggcccagctgcagactggctccccccctgccaccacccagccacagggcaccacacagccccccgcccagccagcatcgcagggctcaggaccaaccgcatagctgcctatgcccccgcagaactggctgctgcgtgtgaactgaacagacggagaagatgtgctagggagaatctgcctccacagtcacccatttcattgctcgctgcgaaagagacgtgagactgacatatgccattatctcttttccagtattaaacactcatatgcttatggcttggagaaatttcttagttgggtgaattaaaggttaatccgagaattagcatggatataccgggacctcatgcagcttggcagatatctgagaaatggtttaattcatgctcaggagctgtgtgcctttccatcccttccggctccctacccctcacttccaagggttctctctcctgcttgcgcttagtgtcctacatggggttgtgaagcgatggagctcctcactggactcgcctctctcctctcctccccccaggaggaacttgaaaggagggtaaaaagactaaaatgagggggaacagagttcactgtacaaatttgacaactgtcaccaaaattcataaaaaacaatagtactgtgcctctttcttctcaaacaatggatgacacaaaactatgagagtgacaaaatggtgacaggtagctgggacctaggctatcttaccatgaaggttgttttgcttattgtatatttgtgtatgtagtgtaactattttgtacaatagaggactgtaactactatttaggttgtacagattgaaatttagttgtttcattggctgtctgaggaggtgtggacttttatatatagatctacataaaaactgctacatgacaaaaaccacacctaaagaaattttaagaatttggcacagttactcactttgtgtaatctgaaatctagctgctgaatacgctgaagtaaatccttgttcactgaagtctttcaattgagctggttgaatactttgaaaaatgctcagttctaactaatgaaatggatttcccagtaggggtttctgcatatcacctgtatagtagttatatgcatatgtttctgtgcatgttctctacacaattgtaaggtgtcactgtatttaactgttgcacttgtcaactttcaataaagcatataaatgttgata

SEQ ID NO: 435562 - DNA, 1806 bp, Homo sapiens
agatagtttctttaaatttattcgtgggatacttataataatacaggtgaaagatagccaggcgaattcctttgtccattgctgagagattatggtgacatggatgttgtttttcgaaatgttaaaaaaccttatttttgcaagtctggccagagaacaggctttccccacattatgtaatttagtcctttgtggcttactaaaatagggagatgcctggatattcgttagtaagagaggggctggcattttctggagggtgatacattacatagtgttaaataacattcaaaatatgatgctagcaatatcacaaaattgggagatcctttttatcttggacgcttaagataaattccatttatcgatgacctttttccctcctctttttcagctcctctggtgcaagtgtggtagctattgacaacaaaatcgagcaagctatggatctagtgaaaagccatttgatgtatgcggtcagagaagaagtggaggtcctcaaagagcaaatcaaagaactaatagagaaaaattcccagctggagcaggagaacaatctgctgaagacactggccagtcctgagcagcttgcccagtttcaggcccagctgcagactggctccccccctgccaccacccagccacagggcaccacacagccccccgcccagccagcatcgcagggctcaggaccaaccgcatagctgcctatgcccccgcagaactggctgctgcgtgtgaactgaacagacggagaagatgtgctagggagaatctgcctccacagtcacccatttcattgctcgctgcgaaagagacgtgagactgacatatgccattatctcttttccagtattaaacactcatatgcttatggcttggagaaatttcttagttgggtgaattaaaggttaatccgagaattagcatggatataccgggacctcatgcagcttggcagatatctgagaaatggtttaattcatgctcaggagctgtgtgcctttccatcccttccggctccctacccctcacttccaagggttctctctcctgcttgcgcttagtgtcctacatggggttgtgaagcgatggagctcctcactggactcgcctctctcctctcctccccccaggaggaacttgaaaggagggtaaaaagactaaaatgagggggaacagagttcactgtacaaatttgacaactgtcaccaaaattcataaaaaacaatagtactgtgcctctttcttctcaaacaatggatgacacaaaactatgagagtgacaaaatggtgacaggtagctgggacctaggctatcttaccatgaaggttgttttgcttattgtatatttgtgtatgtagtgtaactattttgtacaatagaggactgtaactactatttaggttgtacagattgaaatttagttgtttcattggctgtctgaggaggtgtggacttttatatatagatctacataaaaactgctacatgacaaaaaccacacctaaagaaattttaagaatttggcacagttactcactttgtgtaatctgaaatctagctgctgaatacgctgaagtaaatccttgttcactgaagtctttcaattgagctggttgaatactttgaaaaatgctcagttctaactaatgaaatggatttcccagtaggggtttctgcatatcacctgtatagtagttatatgcatatgtttctgtgcatgttctctacacaattgtaaggtgtcactgtatttaactgttgcacttgtcaactttcaataaagcatataaatgttgata

SEQ ID NO: 435563 - DNA, 1487 bp, Homo sapiens
tgacacgggaacagaggtcctcaccatcttttaatccacactgtatcttcctatcaaatcttcctaaatgcagcttgagcaagttttcctctcttcaaaaagttccacagcttccaataccctcacggatctagtgaaaagccatttgatgtatgcggtcagagaagaagtggaggtcctcaaagagcaaatcaaagaactaatagagaaaaattcccagctggagcaggagaacaatctgctgaagacactggccagtcctgagcagcttgcccagtttcaggcccagctgcagactggctccccccctgccaccacccagccacagggcaccacacagccccccgcccagccagcatcgcagggctcaggaccaaccgcatagctgcctatgcccccgcagaactggctgctgcgtgtgaactgaacagacggagaagatgtgctagggagaatctgcctccacagtcacccatttcattgctcgctgcgaaagagacgtgagactgacatatgccattatctcttttccagtattaaacactcatatgcttatggcttggagaaatttcttagttgggtgaattaaaggttaatccgagaattagcatggatataccgggacctcatgcagcttggcagatatctgagaaatggtttaattcatgctcaggagctgtgtgcctttccatcccttccggctccctacccctcacttccaagggttctctctcctgcttgcgcttagtgtcctacatggggttgtgaagcgatggagctcctcactggactcgcctctctcctctcctccccccaggaggaacttgaaaggagggtaaaaagactaaaatgagggggaacagagttcactgtacaaatttgacaactgtcaccaaaattcataaaaaacaatagtactgtgcctctttcttctcaaacaatggatgacacaaaactatgagagtgacaaaatggtgacaggtagctgggacctaggctatcttaccatgaaggttgttttgcttattgtatatttgtgtatgtagtgtaactattttgtacaatagaggactgtaactactatttaggttgtacagattgaaatttagttgtttcattggctgtctgaggaggtgtggacttttatatatagatctacataaaaactgctacatgacaaaaaccacacctaaagaaattttaagaatttggcacagttactcactttgtgtaatctgaaatctagctgctgaatacgctgaagtaaatccttgttcactgaagtctttcaattgagctggttgaatactttgaaaaatgctcagttctaactaatgaaatggatttcccagtaggggtttctgcatatcacctgtatagtagttatatgcatatgtttctgtgcatgttctctacacaattgtaaggtgtcactgtatttaactgttgcacttgtcaactttcaataaagcatataaatgttgata

SEQ ID NO: 435564 - DNA, 1655 bp, Homo sapiens
aactggctgcagccggtgctgaaggaggcggctccgggcgagcgcggggcggggcctgggggcggggacgcggtgggcgcgctgtggcttggacgtccccgctgctggtctcagtcggggacccagcgcccggctctggcccagtctcaggaagccttacttgggcgtttctggccaacgtctgcagagaagcacagacttttacaaagcttgatcatttatacgttaaactcaagtattgtacagtcatgtttgtattcagatttccccaagtgtcattgaaccaactttaaaggatctagtgaaaagccatttgatgtatgcggtcagagaagaagtggaggtcctcaaagagcaaatcaaagaactaatagagaaaaattcccagctggagcaggagaacaatctgctgaagacactggccagtcctgagcagcttgcccagtttcaggcccagctgcagactggctccccccctgccaccacccagccacagggcaccacacagccccccgcccagccagcatcgcagggctcaggaccaaccgcatagctgcctatgcccccgcagaactggctgctgcgtgtgaactgaacagacggagaagatgtgctagggagaatctgcctccacagtcacccatttcattgctcgctgcgaaagagacgtgagactgacatatgccattatctcttttccagtattaaacactcatatgcttatggcttggagaaatttcttagttgggtgaattaaaggttaatccgagaattagcatggatataccgggacctcatgcagcttggcagatatctgagaaatggtttaattcatgctcaggagctgtgtgcctttccatcccttccggctccctacccctcacttccaagggttctctctcctgcttgcgcttagtgtcctacatggggttgtgaagcgatggagctcctcactggactcgcctctctcctctcctccccccaggaggaacttgaaaggagggtaaaaagactaaaatgagggggaacagagttcactgtacaaatttgacaactgtcaccaaaattcataaaaaacaatagtactgtgcctctttcttctcaaacaatggatgacacaaaactatgagagtgacaaaatggtgacaggtagctgggacctaggctatcttaccatgaaggttgttttgcttattgtatatttgtgtatgtagtgtaactattttgtacaatagaggactgtaactactatttaggttgtacagattgaaatttagttgtttcattggctgtctgaggaggtgtggacttttatatatagatctacataaaaactgctacatgacaaaaaccacacctaaagaaattttaagaatttggcacagttactcactttgtgtaatctgaaatctagctgctgaatacgctgaagtaaatccttgttcactgaagtctttcaattgagctggttgaatactttgaaaaatgctcagttctaactaatgaaatggatttcccagtaggggtttctgcatatcacctgtatagtagttatatgcatatgtttctgtgcatgttctctacacaattgtaaggtgtcactgtatttaactgttgcacttgtcaactttcaataaagcatataaatgttgata

SEQ ID NO: 435565 - DNA, 1194 bp, Homo sapiens
ttgaggtacttagaggatcccaggcaaagctctacagccaaggcacacacagccccgccatgcagatctgaggctcaggaccaaccgcatagctgcctatgcccccgcagaactggctgctgcgtgtgaactgaacagacggagaagatgtgctagggagaatctgcctccacagtcacccatttcattgctcgctgcgaaagagacgtgagactgacatatgccattatctcttttccagtattaaacactcatatgcttatggcttggagaaatttcttagttgggtgaattaaaggttaatccgagaattagcatggatataccgggacctcatgcagcttggcagatatctgagaaatggtttaattcatgctcaggagctgtgtgcctttccatcccttccggctccctacccctcacttccaagggttctctctcctgcttgcgcttagtgtcctacatggggttgtgaagcgatggagctcctcactggactcgcctctctcctctcctccccccaggaggaacttgaaaggagggtaaaaagactaaaatgagggggaacagagttcactgtacaaatttgacaactgtcaccaaaattcataaaaaacaatagtactgtgcctctttcttctcaaacaatggatgacacaaaactatgagagtgacaaaatggtgacaggtagctgggacctaggctatcttaccatgaaggttgttttgcttattgtatatttgtgtatgtagtgtaactattttgtacaatagaggactgtaactactatttaggttgtacagattgaaatttagttgtttcattggctgtctgaggaggtgtggacttttatatatagatctacataaaaactgctacatgacaaaaaccacacctaaagaaattttaagaatttggcacagttactcactttgtgtaatctgaaatctagctgctgaatacgctgaagtaaatccttgttcactgaagtctttcaattgagctggttgaatactttgaaaaatgctcagttctaactaatgaaatggatttcccagtaggggtttctgcatatcacctgtatagtagttatatgcatatgtttctgtgcatgttctctacacaattgtaaggtgtcactgtatttaactgttgcacttgtcaactttcaataaagcatataaatgttgata

SEQ ID NO: 435566 - DNA, 2046 bp, Homo sapiens
  misc_feature (1438)..(1439): n is a, c, g, or t
  misc_feature (1475)..(1475): n is a, c, g, or t
agcggagtggcgtgccggccaatcggcgcagctctttcctgcatatattttgcactaagactgggagtccgggtctagagctgagtggagcccggctgcggatctgggaagcgcctcttcacggcactgggatccgcatctgcctgggatcatcaagccctagaagctgggtttctttaaattagggctgccgttttctgtttctccctgggctgcggaaagccagaagattttatctagcttatacaaggctgctggtgttccctctttttttccacgagggtgtttttggctgcaattgcatgaaatcccaatggtgtagaccagtggcgatggatctaggagtttaccaactgagacatttttcaatttctttcttgtcatccttgctggggactgaaaacgcttctgtgagacttgataatagctcctctggtgcaagtgtggtagctattgacaacaaaatcgagcaagctatggatctagtgaaaagccatttgatgtatgcggtcagagaagaagtggaggtcctcaaagagcaaatcaaagaactaatagagaaaaattcccagctggagcaggagaacaatctgctgaagacactggccagtcctgagcagcttgcccagtttcaggcccagctgcagactggctccccccctgccaccacccagccacagggcaccacacagccccccgcccagccagcatcgcagggctcaggaccaaccgcatagctgcctatgcccccgcagaactggctgctgcgtgtgaactgaacagacggagaagatgtgctagggagaatctgcctccacagtcacccatttcattgctcgctgcgaaagagacgtgagactgacatatgccattatctcttttccagtattaaacactcatatgcttatggcttggagaaatttcttagttgggtgaattaaaggttaatccgagaattagcatggatataccgggacctcatgcagcttggcagatatctgagaaatggtttaattcatgctcaggagctgtgtgcctttccatcccttccggctccctacccctcacttccaagggttctctctcctgcttgcgcttagtgtcctacatggggttgtgaagcgatggagctcctcactggactcgcctctctcctctcctccccccaggaggaacttgaaaggagggtaaaaagactaaaatgagggggaacagagttcactgtacaaatttgacaactgtcaccaaaattcataaaaaacaatagtactgtgcctctttcttctcaaacaatggatgacacaaaactatgagagtgacaaaatggtgacaggtagctgggacctaggctatcttaccatgaaggttgttttgcttattgtatatttgtgtatgtagtgtaactattttgtacaatagaggactgtaactactatgnngtttttgtcatgtagcagtttttatgtagatctatntataaaagtccacacctaaagaaattttaagaatttggcacagttactcactttgtgtaatctgaaatctagctgctgaatacgctgaagtaaatccttgttcactgaagtctttcaattgagctggttgaatactttgaaaaatgctcagttctaactaatgaaatggatttcccagtaggggtttctgcatatcacctgtatagtagttatatgcatatgtttctgtgcatgttctctacacaattgtaaggtgtcactgtatttaactgttgcacttgtcaactttcaataaagcatataaatgttgataaaaaaaaaaattcatatgaccctgttaacataatggcagtcatttccacaactgtttccaggtaaagttaacaatttgactagtaaaatcctgaagggcagtggaatgattggaaaagtaggggcgtgatttgactgcatgaagtaaaaggaaattgacacattgagttgttcagcaggtaagagaagagacagtggaggagtccagctcaattctaactactgtgtgacttggacaggttgcttcactcctggacgg

SEQ ID NO: 435567 - DNA, 1933 bp, Homo sapiens
agcggagtggcgtgccggccaatcggcgcagctctttcctgcatatattttgcactaagactgggagtccgggtctagagctgagtggagcccggctgcggatctgggaagcgcctcttcacggcactgggatccgcatctgcctgggatcatcaagccctagaagctgggtttctttaaattagggctgccgttttctgtttctccctgggctgcggaaagccagaagattttatctagcttatacaaggctgctggtgttccctctttttttccacgagggtgtttttggctgcaattgcatgaaatcccaatggtgtagaccagtggcgatggatctaggagtttaccaactgagacatttttcaatttctttcttgtcatccttgctggggactgaaaacgcttctgtgagacttgataatagctcctctggtgcaagtgtggtagctattgacaacaaaatcgagcaagctatggatctagtgaaaagccatttgatgtatgcggtcagagaagaagtggaggtcctcaaagagcaaatcaaagaactaatagagaaaaattcccagctggagcaggagaacaatctgctgaagacactggccagtcctgagcagcttgcccagtttcaggcccagctgcagactggctccccccctgccaccacccagccacagggcaccacacagccccccgcccagccagcatcgcagggctcaggaccaaccgcatagctgcctatgcccccgcagaactggctgctgcgtgtgaactgaacagacggagaagatgtgctagggagaatctgcctccacagtcacccatttcattgctcgctgcgaaagagacgtgagactgacatatgccattatctcttttccagtattaaacactcatatgcttatggcttggagaaatttcttagttgggtgaattaaaggttaatccgagaattagcatggatataccgggacctcatgcagcttggcagatatctgagaaatggtttaattcatgctcaggagctgtgtgcctttccatcccttccggctccctacccctcacttccaagggttctctctcctgcttgcgcttagtgtcctacatggggttgtgaagcgatggagctcctcactggactcgcctctctcctctcctccccccaggaggaacttgaaaggagggtaaaaagactaaaatgagggggaacagagttcactgtacaaatttgacaactgtcaccaaaattcataaaaaacaatagtactgtgcctctttcttctcaaacaatggatgacacaaaactatgagagtgacaaaatggtgacaggtagctgggacctaggctatcttaccatgaaggttgttttgcttattgtatatttgtgtatgtagtgtaactattttgtacaatagaggactgtaactactatcaaaattcataaaagaacaatagtactgtgcctctttcttctcaaacaatggatgacacaaaattatgagagtgacaaaatggtgacaggtagctgggacctaggtattttaccatgaaggttgttggcttaatgaatattcggtatggtcgtgtacctattttgtccaattagcagggccggtactacctatttcgcgtgggtcccgaattggacacttcgttggtttccctggtcggtctgaacgggaggcttgggctcttattatataggatgcttaagacggcttgcgtgacgaaaacgcccgctttagaaatttaattgtgcgcgctatccctggtgtgtctcaaactagggcgaaaaccagcaacccctgtttccgagctctacgacgcggcggatcgtcgagaggacgccaaaagagtccaccgaggtgtacacacgaaataatctgccgtcccagagcggctgtgtgggtcccttgtgccagacacacg

SEQ ID NO: 435568 - DNA, 1576 bp, Homo sapiens
  misc_feature (1438)..(1439): n is a, c, g, or t
  misc_feature (1475)..(1475): n is a, c, g, or t
agcggagtggcgtgccggccaatcggcgcagctctttcctgcatatattttgcactaagactgggagtccgggtctagagctgagtggagcccggctgcggatctgggaagcgcctcttcacggcactgggatccgcatctgcctgggatcatcaagccctagaagctgggtttctttaaattagggctgccgttttctgtttctccctgggctgcggaaagccagaagattttatctagcttatacaaggctgctggtgttccctctttttttccacgagggtgtttttggctgcaattgcatgaaatcccaatggtgtagaccagtggcgatggatctaggagtttaccaactgagacatttttcaatttctttcttgtcatccttgctggggactgaaaacgcttctgtgagacttgataatagctcctctggtgcaagtgtggtagctattgacaacaaaatcgagcaagctatggatctagtgaaaagccatttgatgtatgcggtcagagaagaagtggaggtcctcaaagagcaaatcaaagaactaatagagaaaaattcccagctggagcaggagaacaatctgctgaagacactggccagtcctgagcagcttgcccagtttcaggcccagctgcagactggctccccccctgccaccacccagccacagggcaccacacagccccccgcccagccagcatcgcagggctcaggaccaaccgcatagctgcctatgcccccgcagaactggctgctgcgtgtgaactgaacagacggagaagatgtgctagggagaatctgcctccacagtcacccatttcattgctcgctgcgaaagagacgtgagactgacatatgccattatctcttttccagtattaaacactcatatgcttatggcttggagaaatttcttagttgggtgaattaaaggttaatccgagaattagcatggatataccgggacctcatgcagcttggcagatatctgagaaatggtttaattcatgctcaggagctgtgtgcctttccatcccttccggctccctacccctcacttccaagggttctctctcctgcttgcgcttagtgtcctacatggggttgtgaagcgatggagctcctcactggactcgcctctctcctctcctccccccaggaggaacttgaaaggagggtaaaaagactaaaatgagggggaacagagttcactgtacaaatttgacaactgtcaccaaaattcataaaaaacaatagtactgtgcctctttcttctcaaacaatggatgacacaaaactatgagagtgacaaaatggtgacaggtagctgggacctaggctatcttaccatgaaggttgttttgcttattgtatatttgtgtatgtagtgtaactattttgtacaatagaggactgtaactactatgnngtttttgtcatgtagcagtttttatgtagatctatntataaaagtccacacctcctcagacagccaatgaaacaactaaatttcaatctgtacaacctaaatagtagttacagtccactgtcgacgcgcgtcacgcg

SEQ ID NO: 435569 - DNA, 1016 bp, Homo sapiens
ctgaccggacacgttgggggctcctggtgtggctcatcgcgtggcgcttgggggtcgtcgtggggctcgttgcgtggcctttgtgaggctctttaaatttcttagttgggtgaattaaaggttaatccgagaattagcatggatataccgggacctcatgcagcttggcagatatctgagaaatggtttaattcatgctcaggagctgtgtgcctttccatcccttccggctccctacccctcacttccaagggttctctctcctgcttgcgcttagtgtcctacatggggttgtgaagcgatggagctcctcactggactcgcctctctcctctcctccccccaggaggaacttgaaaggagggtaaaaagactaaaatgagggggaacagagttcactgtacaaatttgacaactgtcaccaaaattcataaaaaacaatagtactgtgcctctttcttctcaaacaatggatgacacaaaactatgagagtgacaaaatggtgacaggtagctgggacctaggctatcttaccatgaaggttgttttgcttattgtatatttgtgtatgtagtgtaactattttgtacaatagaggactgtaactactatttaggttgtacagattgaaatttagttgtttcattggctgtctgaggaggtgtggacttttatatatagatctacataaaaactgctacatgacaaaaaccacacctaaagaaattttaagaatttggcacagttactcactttgtgtaatctgaaatctagctgctgaatacgctgaagtaaatccttgttcactgaagtctttcaattgagctggttgaatactttgaaaaatgctcagttctaactaatgaaatggatttcccagtaggggtttctgcatatcacctgtatagtagttatatgcatatgtttctgtgcatgttctctacacaattgtaaggtgtcactgtatttaactgttgcacttgtcaactttcaataaagcatataaatgttgata

SEQ ID NO: 435570 - DNA, 983 bp, Homo sapiens
ccacctcagcctccagagtagctgagaccacaggtgcatgccaccttgcccagctaattttaaatttcttagttgggtgaattaaaggttaatccgagaattagcatggatataccgggacctcatgcagcttggcagatatctgagaaatggtttaattcatgctcaggagctgtgtgcctttccatcccttccggctccctacccctcacttccaagggttctctctcctgcttgcgcttagtgtcctacatggggttgtgaagcgatggagctcctcactggactcgcctctctcctctcctccccccaggaggaacttgaaaggagggtaaaaagactaaaatgagggggaacagagttcactgtacaaatttgacaactgtcaccaaaattcataaaaaacaatagtactgtgcctctttcttctcaaacaatggatgacacaaaactatgagagtgacaaaatggtgacaggtagctgggacctaggctatcttaccatgaaggttgttttgcttattgtatatttgtgtatgtagtgtaactattttgtacaatagaggactgtaactactatttaggttgtacagattgaaatttagttgtttcattggctgtctgaggaggtgtggacttttatatatagatctacataaaaactgctacatgacaaaaaccacacctaaagaaattttaagaatttggcacagttactcactttgtgtaatctgaaatctagctgctgaatacgctgaagtaaatccttgttcactgaagtctttcaattgagctggttgaatactttgaaaaatgctcagttctaactaatgaaatggatttcccagtaggggtttctgcatatcacctgtatagtagttatatgcatatgtttctgtgcatgttctctacacaattgtaaggtgtcactgtatttaactgttgcacttgtcaactttcaataaagcatataaatgttgata

SEQ ID NO: 435571 - DNA, 1188 bp, Homo sapiens
gctggacaaggacgggcgcggtggcgcgtgcctgtagtcccagctactcgggaggctgaggtgggaggatcgcttgagcccaggagttctgggctgtagtgcgctatgccgatcgggtgtccgcactaagttcggcatcaatatggtgacctcccgggagcgggggaccaccaggttgcctaaggaggggtgaaccggcccaggtcggaaacggagcaggtcaaaactcccgtgctgatcagtagtgggatcgcgcctgtgaatagccactgcactccagcctgagcaacatagcgagaccccgccttgtccagatataccgggacctcatgcagcttggcagatatctgagaaatggtttaattcatgctcaggagctgtgtgcctttccatcccttccggctccctacccctcacttccaagggttctctctcctgcttgcgcttagtgtcctacatggggttgtgaagcgatggagctcctcactggactcgcctctctcctctcctccccccaggaggaacttgaaaggagggtaaaaagactaaaatgagggggaacagagttcactgtacaaatttgacaactgtcaccaaaattcataaaaaacaatagtactgtgcctctttcttctcaaacaatggatgacacaaaactatgagagtgacaaaatggtgacaggtagctgggacctaggctatcttaccatgaaggttgttttgcttattgtatatttgtgtatgtagtgtaactattttgtacaatagaggactgtaactactatttaggttgtacagattgaaatttagttgtttcattggctgtctgaggaggtgtggacttttatatatagatctacataaaaactgctacatgacaaaaaccacacctaaagaaattttaagaatttggcacagttactcactttgtgtaatctgaaatctagctgctgaatacgctgaagtaaatccttgttcactgaagtctttcaattgagctggttgaatactttgaaaaatgctcagttctaactaatgaaatggatttcccagtaggggtttctgcatatcacctgtatagtagttatatgcatatgtttctgtgcatgttctctacacaattgtaaggtgtcactgtatttaactgttgcacttgtcaactttcaataaagcatataaatgttgata

SEQ ID NO: 435572 - DNA, 703 bp, Homo sapiens
  misc_feature (10)..(10): n is a, c, g, or t
  misc_feature (20)..(20): n is a, c, g, or t
atctagaggntcccaggatncgtagacccccaggaggaacttgaaaggagggtaaaaagactaaaatgagggggaacagagttcactgtacaaatttgacaactgtcaccaaaattcataaaaaacaatagtactgtgcctctttcttctcaaacaatggatgacacaaaactatgagagtgacaaaatggtgacaggtagctgggacctaggctatcttaccatgaaggttgttttgcttattgtatatttgtgtatgtagtgtaactattttgtacaatagaggactgtaactactatttaggttgtacagattgaaatttagttgtttcattggctgtctgaggaggtgtggacttttatatatagatctacataaaaactgctacatgacaaaaaccacacctaaagaaattttaagaatttggcacagttactcactttgtgtaatctgaaatctagctgctgaatacgctgaagtaaatccttgttcactgaagtctttcaattgagctggttgaatactttgaaaaatgctcagttctaactaatgaaatggatttcccagtaggggtttctgcatatcacctgtatagtagttatatgcatatgtttctgtgcatgttctctacacaattgtaaggtgtcactgtatttaactgttgcacttgtcaactttcaataaagcatataaatgttgata

SEQ ID NO: 435573 - DNA, 734 bp, Homo sapiens
  misc_feature (52)..(52): n is a, c, g, or t
  misc_feature (63)..(63): n is a, c, g, or t
ggtccccctgccagggacaaatggcgagactaccacccaagggttggatggnctgtctgagcnctgtgcccagtacaagaaggacaaaagactaaaatgagggggaacagagttcactgtacaaatttgacaactgtcaccaaaattcataaaaaacaatagtactgtgcctctttcttctcaaacaatggatgacacaaaactatgagagtgacaaaatggtgacaggtagctgggacctaggctatcttaccatgaaggttgttttgcttattgtatatttgtgtatgtagtgtaactattttgtacaatagaggactgtaactactatttaggttgtacagattgaaatttagttgtttcattggctgtctgaggaggtgtggacttttatatatagatctacataaaaactgctacatgacaaaaaccacacctaaagaaattttaagaatttggcacagttactcactttgtgtaatctgaaatctagctgctgaatacgctgaagtaaatccttgttcactgaagtctttcaattgagctggttgaatactttgaaaaatgctcagttctaactaatgaaatggatttcccagtaggggtttctgcatatcacctgtatagtagttatatgcatatgtttctgtgcatgttctctacacaattgtaaggtgtcactgtatttaactgttgcacttgtcaactttcaataaagcatataaatgttgata

SEQ ID NO: 435574 - DNA, 560 bp, Homo sapiens
gaggatccccgttcagacgctgaacaaactatgagagtgacaaaatggtgacaggtagctgggacctaggctatcttaccatgaaggttgttttgcttattgtatatttgtgtatgtagtgtaactattttgtacaatagaggactgtaactactatttaggttgtacagattgaaatttagttgtttcattggctgtctgaggaggtgtggacttttatatatagatctacataaaaactgctacatgacaaaaaccacacctaaagaaattttaagaatttggcacagttactcactttgtgtaatctgaaatctagctgctgaatacgctgaagtaaatccttgttcactgaagtctttcaattgagctggttgaatactttgaaaaatgctcagttctaactaatgaaatggatttcccagtaggggtttctgcatatcacctgtatagtagttatatgcatatgtttctgtgcatgttctctacacaattgtaaggtgtcactgtatttaactgttgcacttgtcaactttcaataaagcatataaatgttgata

SEQ ID NO: 435575 - DNA, 721 bp, Homo sapiens
agcggagtggcgtgccggccaatcggcgcagctctttcctgcatatattttgcactaagactgggagtccgggtctagagctgagtggagcccggctgcggatctgggaagcgcctcttcacggcactgggatccgcatctgcctgggatcatcaagccctagaagctgggtttctttaaattagggctgccgttttctgtttctccctgggctgcggaaagccagaagattttatctagcttatacaaggctgctggtgttccctctttttttccacgagggtgtttttggctgcaattgcatgaaatcccaatggtgtagaccagtggcgatggatctaggagtttaccaactgagacatttttcaatttctttcttgtcatccttgctggggactgaaaacgcttctgtgagacttgataatagctcctctggtgcaagtgtggtagctattgacaacaaaatcgagcaagctatggatctagtgaaaagccatttgatgtatgcggtcagagaagaagtggaggtcctcaaagagcaaatcaaagaactaatagagaaaaattcccagctggagcaggagaacaatctgctgaagacactggccagtcctgagcagcttgcccagtttcaggcccagctgcagactggctccccccctgccaccacccagccacagccagagccaccttctcctgatcagcaagcaccaccaataca

SEQ ID NO: 435576 - DNA, 960 bp, Homo sapiens
agcggagtggcgtgccggccaatcggcgcagctctttcctgcatatattttgcactaagactgggagtccgggtctagagctgagtggagcccggctgcggatctgggaagcgcctcttcacggcactgggatccgcatctgcctgggatcatcaagccctagaagctgggtttctttaaattagggctgccgttttctgtttctccctgggctgcggaaagccagaagattttatctagcttatacaaggctgctggtgttccctctttttttccacgagggtgtttttggctgcaattgcatgaaatcccaatggtgtagaccagtggcgatggatctaggagtttaccaactgagacatttttcaatttctttcttgtcatccttgctggggactgaaaacgcttctgtgagacttgataatagctcctctggtgcaagtgtggtagctattgacaacaaaatcgagcaagctatggtatgtactgatgaaaaatcatttatactaaatgtgggcacagcacaaaaataagatgttttgtggaaccagtgcatccctaagttcagatgatgatgattgctcttgatgcgcgtagaaatgccggcgctgtctccattcggccagcgtggagccacctaccacggcagccgtggagggagaaaggggccctgcgggtattaaatggtcttcttccccggactggtttcacacgacgggattttctcacggtgaccctttttgctggggatttattagggaagcgctggccaactatctccttcggctggtcgtgagcacacctttagcgatgtggctttactaggaatcctaatattttactagggagccgggaggtggggagggccccagaagtcgggatcctggataagggtcttctagacggtgcacaaacgggtccccggtggcgcgggctccttcacaatgaagaagaatcaga

SEQ ID NO: 435577 - DNA, 2667 bp, Homo sapiens
  misc_feature (1)..(1): n is a, c, g, or t
nctgctgtgggtagttttaatcctaatgtgacaagcagcatgcttggtaatgttaatataagtacaagcaatattcctagtgctgctggtgtgagtgttgggcctggagttaccagtggtgttaatgtgaatatcttgagtggcatgggcaatggtactatttcttcctctgctgctgttagcagtgttcctaatgcagctgcagggatgactgggggatcggtttcaagtcagcagcaacaaccaacagttaacacttcgaggttcagagttgtgaagttagattctagttctgagccctttaaaaaaggtagatggacttgcactgagttctatgaaaaagaaaatgctgtacctgctacagaaggtgtgctgataaataaagtggtggagactgtaaagcaaaatccgatagaagtgacttctgaaagggagagcactagtgggagttcagtgagcagtagtgtcagcacactgagtcactatacagagagtgtgggaagtggagagatgggagcccctactgtggtggtgcagcagcagcagcagcaacaacaacaacaacagcaacaaccagctctccaaggtgtgaccctccaacagatggattttggtagcactggtccacagagtattccagcagttagtataccacagagtatttctcagtcacagatctcacaagtacaattacagtctcaagaactgagctatcagcaaaagcaaggtcttcagccagtacctctgcaagccactatgagtgctgcaactggtatccagccatcgcctgtaaatgtggttggtgtaacttcagctttaggtcagcagccttccatttccagtttggctcaaccccagctaccatattctcaggcggctcctccagtgcaaactccccttccaggggcaccaccaccccaacagttacagtatggacaacagcaaccaatggtttctacacagatggccccaggccatgtcaaatcagtgactcaaaatcctgcttcagagtatgtacaacagcagccaattcttcaaacagcaatgtcctccggacagcccagttctgcaggagtaggagcaggaacaacagtgattcctgtggctcagccacagggtatccagctgccagtgcagcccacagcagtcccagcacaacctgcaggggcatctgtccagcctgttggccaggctccggcagcagtgtctgctgtacctactggcagtcagattgcaaatattggtcagcaagcaaacatacctactgcagtgcagcagccctctacccaggttccaccttcagttattcagcagggtgctcctccatcttcgcaagtggttccacctgctcaaactgggattattcatcagggagttcaaactagtgctccaagccttcctcaacaattggttattgcatcccaaagttccttgttaactgtgcctccccagccacaaggagtagaaccagtagctcaaggaattgtttcacagcagttgcctgcagttagttctttgccctctgctagtagtatttctgttacaagtcaggttagttcaactggtccttctggaatgccttctgccccaacaaacttggttccaccacaaaatatagcacaaacccctgctacccaaaatggtaatttggttcaaagtgttagtcaacctcccttgatagcaactaatacaaatttgcctttggcacaacagataccactaagttctacccagttctccgcacaatcattagctcaggcaattggaagccaaattgaagatgccaggcgtgcagcggagccctccttagttggcttacctcagactatcagtggtgacagtgggggaatgtcagcagtttcagatgggagtagcagcagcctagcagcctctgcttctcttttcccgttgaaggtgctaccgctgacgacacccctggtggatggcgaggatgagagctctctatttcagtgcttctctcctaccagaggtgcaaggagtgatcctagaaccacagatacagccaagaccacggagagcttttgacgtcaggggtccactttctccactgaacccttggagacagaatatccagcttctggagagagtgggaaaggataataaacaagtgggtgctttccattatttacttgggttaatttatagattggagtgtccttccattgcccatttaattctgtggtaaactccttgggttcatttaagaaccaggtgggactgcaatctgttttgtttttctgagaatgctaactagtactcattcaaaaatgagacctaaaatttaattttctctccagataattaaagcagtggatgatttggggcacatgatttgacgaatgcctatgtagtccacaggaattttaaaacgggaatatctacccattttggcctttgtggtattagtggacttctaagtgctcttttatattcaagtaatttaaaaggttctgtatttcatctttgggcaaactggacatttgaagtctaatttatacagtcacatgtccaagtgttatcctacactgttagtgagaaccttttggtcttcttcctacctcaaatgttaggacttcatattagatcttttaaaagatgcaatgatagtactattatggttttactgtcaattctaggctccattct

SEQ ID NO: 435578 - DNA, 176 bp, Homo sapiens
cagtctcaggaagccttacttgggcgtttctggccaacgtctgcagagaagcacagacttttacaaagcttgatcatttatacgttaaactcaagtattgtacagtcatgtttgtattcagatttccccaagtgtcattgaaccaactttaaaggtggaatatgtaaatagttagg

SEQ ID NO: 435579 - DNA, 2593 bp, Homo sapiens
cccgagccccgcccctccgggcccgggtcggcgcgcccagcctgccagccgcgctgctgctgctcctcctgctgtgggaccgctgaccgcgcggctgctccgctctccccgctccaagcgccgatctgggcacccgccaccagcatggacgctcgccgcgtgccgcagaaagatctcagagtaaagaagaacttaaagaaattcagatatgtgaagttgatttccatggaaacctcgtcatcctctgatgacagttgtgacagctttgcttctgataattttgcaaacacgaggctgcagtcagttcgggaaggctgtaggacccgcagccagtgcaggcactctggacctctcagggtggcgatgaagtttccagcgcggagtaccaggggagcaaccaacaaaaaagcagagtcccgccagccctcagagaattctgtgactgattccaactccgattcagaagatgaaagtggaatgaattttttggagaaaagggctttaaatataaagcaaaacaaagcaatgcttgcaaaactcatgtctgaattagaaagcttccctggctcgttccgtggaagacatcccctcccaggctccgactcacaatcaaggagaccgcgaaggcgtacattcccgggtgttgcttccaggagaaaccctgaacggagagctcgtcctcttaccaggtcaaggtcccggatcctcgggtcccttgacgctctacccatggaggaggaggaggaagaggataagtacatgttggtgagaaagaggaagaccgtggatggctacatgaatgaagatgacctgcccagaagccgtcgctccagatcatccgtgacccttccgcatataattcgcccagtggaagaaattacagaggaggagttggagaacgtctgcagcaattctcgagagaagatatataaccgttcactgggctctacttgtcatcaatgccgtcagaagactattgataccaaaacaaactgcagaaacccagactgctggggcgttcgaggccagttctgtggcccctgccttcgaaaccgttatggtgaagaggtcagggatgctctgctggatccgaactggcattgcccgccttgtcgaggaatctgcaactgcagtttctgccggcagcgagatggacggtgtgcgactggggtccttgtgtatttagccaaatatcatggctttgggaatgtgcatgcctacttgaaaagcctgaaacaggaatttgaaatgcaagcataatatctggaaaatttgctgcctgccttctacttctcaaatctttcttgtaaaagtttccaattttttcactgaaacctgagttaaaaatcttgatgatcagcctgtttcataagaaactccaatcaagttaatcttagcagacatgtgtttctggagcatcacagaaggtatattgctagttacactttgccctcctgcagtttcttctctgctcccaacccccatctcatagcatccccctctatttccaatgctcctctccaaccgcttagtttctgaatttcttttaaattacagttttatgaaagcatattttatttacttggtgttgaaatagccctcataaaacctaagcacttggaaacacaataatagtattaactaactagatctattgaatttcagagaagagccttctaacttgtttacacaaaaacgagtatgatttagcattcatactagttgaaatttttaatagaatcaaggcacaaaagtcttaaaaccatgtggaaaaattaggtaattattgcagattgatgtctctcaatcccatgtattgcgcttatgttacaagttgttgtcacagttgagacttaatttctcctaatttcttctgcccgaagggtaagtggtgcgtccagcttacacaatcataattcaaaggttggtgggcaatgtaatacttaattaaaataatgatggaagagctatctggagattatgagtaagctgatttgaattttcagtataaaactttagtataattgtagtttgcaaagtttatttcagttcacatgtaaggtattgcaaataaattcttggacaattttgtatggaaacttgatattaaaaactagtctgtggttctttgcagtttcttgtaaatttataaaccaggcacaaggttcaagtttagattttaagcacttttataacaatgataagtgcctttttggagatgtaacttttagcagtttgttaacctgacatctctgccagtctagtttctgggcaggtttcctgtgtcagtattccccctcctctttgcattaatcaaggtatttggtagaggtggaatctaagtgtttgtatgtccaatttacttgcatatgtaaaccattgctgtgccattcaatgtttgatgcataattggaccttgaatcgataagtgtaaatacagcttttgatctgtaatgcttttatacaaaagtttattttaataataaaatgtttgttctaacttgtctgcttttttaaaaataatcttactgtacttaattctaattttttcctcatatttaaataaaaggccatttccaccttttctaaaaaa

SEQ ID NO: 435580 - DNA, 2932 bp, Homo sapiens
cccgagccccgcccctccgggcccgggtcggcgcgcccagcctgccagccgcgctgctgctgctcctcctgctgtgggaccgctgaccgcgcggctgctccgctctccccgctccaagcgccgatctgggcacccgccaccagcatggacgctcgccgcgtgccgcagaaagatctcagagtaaagaagaacttaaagaaattcagatatgtgaagttgatttccatggaaacctcgtcatcctctgatgacagttgtgacagctttgcttctgataattttgcaaacacgaggctgcagtcagttcgggaaggctgtaggacccgcagccagtgcaggcactctggacctctcagggtggcgatgaagtttccagcgcggagtaccaggggagcaaccaacaaaaaagcagagtcccgccagccctcagagaattctgtgactgattccaactccgattcagaagatgaaagtggaatgaattttttggagaaaagggctttaaatataaagcaaaacaaagcaatgcttgcaaaactcatgtctgaattagaaagcttccctggctcgttccgtggaagacatcccctcccaggctccgactcacaatcaaggagaccgcgaaggcgtacattcccgggtgttgcttccaggagaaaccctgaacggagagctcgtcctcttaccaggtcaaggtcccggatcctcgggtcccttgacgctctacccatggaggaggaggaggaagaggataagtacatgttggtgagaaagaggaagaccgtggatggctacatgaatgaagatgacctgcccagaagccgtcgctccagatcatccgtgacccttccgcatataattcgcccagtggaagaaattacagaggaggagttggagaacgtctgcagcaattctcgagagaagatatataaccgttcactgggctctacttgtcatcaatgccgtcagaagactattgataccaaaacaaactgcagaaacccagactgctggggcgttcgaggccagttctgtggcccctgccttcgaaaccgttatggtgaagaggtcagggatgctctgctggatccgaactggcattgcccgccttgtcgaggaatctgcaactgcagtttctgccggcagcgagatggacggtgtgcgactggggtccttgtgtatttagccaaatatcatggctttgggaatgtgcatgcctacttgaaaagcctgaaacaggaatttgaaatgcaagcataatatctggaaaatttgctgcctgccttctacttctcaaatctttcttgtaaaagtttccaattttttcactgaaacctgagttaaaaatcttgatgatcagcctgtttcataagaaactccaatcaagttaatcttagcagacatgtgtttctggagcatcacagaaggtatattgctagttacactttgccctcctgcagtttcttctctgctcccaacccccatctcatagcatccccctctatttccaatgctcctctccaaccgcttagtttctgaatttcttttaaattacagttttatgaaagcatattttatttacttggtgttgaaatagccctcataaaacctaagcacttggaaacacaataatagtattaactaactagatctattgaatttcagagaagagccttctaacttgtttacacaaaaacgagtatgatttagcattcatactagttgaaatttttaatagaatcaaggcacaaaagtcttaaaaccatgtggaaaaattaggtaattattgcagattgatgtctctcaatcccatgtattgcgcttatgttacaagttgttgtcacagttgagacttaatttctcctaatttcttctgcccgaagggtaagtggtgcgtccagcttacacaatcataattcaaaggttggtgggcaatgtaatacttaattaaaataatgatggaagagctatctggagattatgagtaagctgatttgaattttcagtataaaactttagtataattgtagtttgcaaagtttatttcagttcacatgtaaggtattgcaaataaattcttggacaattttgtatggaaacttgatattaaaaactagtctgtggttctttgcagtttcttgtaaatttataaaccaggcacaaggttcaagtttagattttaagcacttttataacaatgataagtgcctttttggagatgtaacttttagcagtttgttaacctgacatctctgccagtctagtttctgggcaggtttcctgtgtcagtattccccctcctctttgcattaatcaaggtatttggtagaggtggaatctaagtgtttgtatgtccaatttacttgcatatgtaaaccattgctgtgccattcaatgtttgatgcataattggaccttgaatcgataagtgtaaatacagcttttgatctgtaatgcttttatacaaaagtttattttaataataaaatgtttgttaaaaaaaaaaaaaaaaaaaaaaaaaaaaaaaaaaaaaaaaaaaaaaaaaaaaaaaaaggggggggggggcaaaaaaaatacccccgggggggggcccatttatggtcccccgtttttttggtaaaaagggggcccccaaaagggggaggtaaaaaaagaaaggaggggggggggggtaaaaacgggggggggagggagaaaagctgcgcgtgcgacattttgggaagagccacccttttgtgtgcgtgtgactattgcacaccacccaaagaataaaaagcgaaataaacaggggttgagtggtagcacgttatgtcggcggaattgtttgtttttttatgacccgcctcaaatctaacaggacaaactggaagacacaaggagtatgtaacaacatagacagcagcaataaaaaccataaaagaaacaaagctga

SEQ ID NO: 435581 - DNA, 2830 bp, Homo sapiens
cccgagccccgcccctccgggcccgggtcggcgcgcccagcctgccagccgcgctgctgctgctcctcctgctgtgggaccgctgaccgcgcggctgctccgctctccccgctccaagcgccgatctgggcacccgccaccagcatggacgctcgccgcgtgccgcagaaagatctcagagtaaagaagaacttaaagaaattcagatatgtgaagttgatttccatggaaacctcgtcatcctctgatgacagttgtgacagctttgcttctgataattttgcaaacacgaaacctaaattcaggtcagatatcagtgaagaactggcaaatgttttttatgaggactctgataatgaatctttctgcggcttttcagaaagtgaggtgcaagatgtattagaccattgtggatttttacagaaaccaaggccagatgtcactaacgaactggccggtatttttcatgccgactctgacgatgaatcattttgcggtttctcagagagtgagatacaagatggaatgaggctgcagtcagttcgggaaggctgtaggacccgcagccagtgcaggcactctggacctctcagggtggcgatgaagtttccagcgcggagtaccaggggagcaaccaacaaaaaagcagagtcccgccagccctcagagaattctgtgactgattccaactccgattcagaagatgaaagtggaatgaattttttggagaaaagggctttaaatataaagcaaaacaaagcaatgcttgcaaaactcatgtctgaattagaaagcttccctggctcgttccgtggaagacatcccctcccaggctccgactcacaatcaaggagaccgcgaaggcgtacattcccgggtgttgcttccaggagaaaccctgaacggagagctcgtcctcttaccaggtcaaggtcccggatcctcgggtcccttgacgctctacccatggaggaggaggaggaagaggataagtacatgttggtgagaaagaggaagaccgtggatggctacatgaatgaagatgacctgcccagaagccgtcgctccagatcatccgtgacccttccgcatataattcgcccagtggaagaaattacagaggaggagttggagaacgtctgcagcaattctcgagagaagatatataaccgttcactgggctctacttgtcatcaatgccgtcagaagactattgataccaaaacaaactgcagaaacccagactgctggggcgttcgaggccagttctgtggcccctgccttcgaaaccgttatggtgaagaggtcagggatgctctgctggatccgaactggcattgcccgccttgtcgaggaatctgcaactgcagtttctgccggcagcgagatggacggtgtgcgactggggtccttgtgtatttagccaaatatcatggctttgggaatgtgcatgcctacttgaaaagcctgaaacaggaatttgaaatgcaagcataatatctggaaaatttgctgcctgccttctacttctcaaatctttcttgtaaaagtttccaattttttcactgaaacctgagttaaaaatcttgatgatcagcctgtttcataagaaactccaatcaagttaatcttagcagacatgtgtttctggagcatcacagaaggtatattgctagttacactttgccctcctgcagtttcttctctgctcccaacccccatctcatagcatccccctctatttccaatgctcctctccaaccgcttagtttctgaatttcttttaaattacagttttatgaaagcatattttatttacttggtgttgaaatagccctcataaaacctaagcacttggaaacacaataatagtattaactaactagatctattgaatttcagagaagagccttctaacttgtttacacaaaaacgagtatgatttagcattcatactagttgaaatttttaatagaatcaaggcacaaaagtcttaaaaccatgtggaaaaattaggtaattattgcagattgatgtctctcaatcccatgtattgcgcttatgttacaagttgttgtcacagttgagacttaatttctcctaatttcttctgcccgaagggtaagtggtgcgtccagcttacacaatcataattcaaaggttggtgggcaatgtaatacttaattaaaataatgatggaagagctatctggagattatgagtaagctgatttgaattttcagtataaaactttagtataattgtagtttgcaaagtttatttcagttcacatgtaaggtattgcaaataaattcttggacaattttgtatggaaacttgatattaaaaactagtctgtggttctttgcagtttcttgtaaatttataaaccaggcacaaggttcaagtttagattttaagcacttttataacaatgataagtgcctttttggagatgtaacttttagcagtttgttaacctgacatctctgccagtctagtttctgggcaggtttcctgtgtcagtattccccctcctctttgcattaatcaaggtatttggtagaggtggaatctaagtgtttgtatgtccaatttacttgcatatgtaaaccattgctgtgccattcaatgtttgatgcataattggaccttgaatcgataagtgtaaatacagcttttgatctgtaatgcttttatacaaaagtttattttaataataaaatgtttgttctaacttgtctgcttttttaaaaataatcttactgtacttaattctaattttttcctcatatttaaataaaaggccatttccaccttttctaaaaaa

SEQ ID NO: 435582 - DNA, 2962 bp, Homo sapiens
cccgagccccgcccctccgggcccgggtcggcgcgcccagcctgccagccgcgctgctgctgctcctcctgctgtgggaccgctgaccgcgcggctgctccgctctccccgctccaagcgccgatctgggcacccgccaccagcatggacgctcgccgcgtgccgcagaaagatctcagagtaaagaagaacttaaagaaattcagatatgtgaagttgatttccatggaaacctcgtcatcctctgatgacagttgtgacagctttgcttctgataattttgcaaacacgaaacctaaattcaggtcagatatcagtgaagaactggcaaatgttttttatgaggactctgataatgaatctttctgcggcttttcagaaagtgaggtgcaagatgtattagaccattgtggatttttacagaaaccaaggccagatgtcactaacgaactggccggtatttttcatgccgactctgacgatgaatcattttgcggtttctcagagagtgagatacaagatggaatgaggctgcagtcagttcgggaaggctgtaggacccgcagccagtgcaggcactctggacctctcagggtggcgatgaagtttccagcgcggagtaccaggggagcaaccaacaaaaaagcagagtcccgccagccctcagagaattctgtgactgattccaactccgattcagaagatgaaagtggaatgaattttttggagaaaagggctttaaatataaagcaaaacaaagcaatgcttgcaaaactcatgtctgaattagaaagcttccctggctcgttccgtggaagacatcccctcccaggctccgactcacaatcaaggagaccgcgaaggcgtacattcccgggtgttgcttccaggagaaaccctgaacggagagctcgtcctcttaccaggtcaaggtcccggatcctcgggtcccttgacgctctacccatggaggaggaggaggaagaggataagtacatgttggtgagaaagaggaagaccgtggatggctacatgaatgaagatgacctgcccagaagccgtcgctccagatcatccgtgacccttccgcatataattcgcccagtggaagaaattacagaggaggagttggagaacgtctgcagcaattctcgagagaagatatataaccgttcactgggctctacttgtcatcaatgccgtcagaagactattgataccaaaacaaactgcagaaacccagactgctggggcgttcgaggccagttctgtggcccctgccttcgaaaccgttatggtgaagaggtcagggatgctctgctggatccgaactggcattgcccgccttgtcgaggaatctgcaactgcagtttctgccggcagcgagatggacggtgtgcgactggggtccttgtgtatttagccaaatatcatggctttgggaatgtgcatgcctacttgaaaagcctgaaacaggaatttgaaatgcaagcataatatctggaaaatttgctgcctgccttctacttctcaaatctttcttgtaaaagtttccaattttttcactgaaacctgagttaaaaatcttgatgatcagcctgtttcataagaaactccaatcaagttaatcttagcagacatgtgtttctggagcatcacagaaggtatattgctagttacactttgccctcctgcagtttcttctctgctcccaacccccatctcatagcatccccctctatttccaatgctcctctccaaccgcttagtttctgaatttcttttaaattacagttttatgaaagcatattttatttacttggtgttgaaatagccctcataaaacctaagcacttggaaacacaataatagtattaactaactagatctattgaatttcagagaagagccttctaacttgtttacacaaaaacgagtatgatttagcattcatactagttgaaatttttaatagaatcaaggcacaaaagtcttaaaaccatgtggaaaaattaggtaattattgcagattgatgtctctcaatcccatgtattgcgcttatgttacaagttgttgtcacagttgagacttaatttctcctaatttcttctgcccgaagggtaagtggtgcgtccagcttacacaatcataattcaaaggttggtgggcaatgtaatacttaattaaaataatgatggaagagctatctggagattatgagtaagctgatttgaattttcagtataaaactttagtataattgtagtttgcaaagtttatttcagttcacatgtaaggtattgcaaataaattcttggacaattttgtatggaaacttgatattaaaaactagtctgtggttctttgcagtttcttgtaaatttataaaccaggcacaaggttcaagtttagattttaagcacttttataacaatgataagtgcctttttggagatgtaacttttagcagtttgttaacctgacatctctgccagtctagtttctgggcaggtttcctgtgtcagtattccccctcctctttgcattaatcaaggtatttggtagaggtggaatctaagtgtttgtatgtccaatttacttgcatatgtaaaccattgctgtgccattcaatgtttgatgcataattggaccttgaatcgataagtgtaaatacagcttttgatctgtaatgcttttatacaaaagtttattttaataataaaatgtttgttctaacttgtctgcttttttaaaaataatcttactgtacttaattctaattttttcctcatatttaaataaaaggccatttccaccttttctaaaaaaaaaaagcaaaaaaatttggggggggggccgaaagatttaaccactggttgggggggccgggggaaagggaggggcgggacggggaggtgggtcccaaaaggggggggggtgaacagggggggggggaagggg

SEQ ID NO: 435583 - DNA, 2518 bp, Homo sapiens
aacttaaagaaattcagatatgtgaagttcttctttactctgagatctttctgcggcacgcggcgagcgtccatgctggtggcgggtgcccagaaagatctcagagtaaagaagaacttaaagaaattcagatatgtgaagttgatttccatggaaacctcgtcatcctctgatgacagttgtgacagctttgcttctgataattttgcaaacacgaggctgcagtcagttcgggaaggctgtaggacccgcagccagtgcaggcactctggacctctcagggtggcgatgaagtttccagcgcggagtaccaggggagcaaccaacaaaaaagcagagtcccgccagccctcagagaattctgtgactgattccaactccgattcagaagatgaaagtggaatgaattttttggagaaaagggctttaaatataaagcaaaacaaagcaatgcttgcaaaactcatgtctgaattagaaagcttccctggctcgttccgtggaagacatcccctcccaggctccgactcacaatcaaggagaccgcgaaggcgtacattcccgggtgttgcttccaggagaaaccctgaacggagagctcgtcctcttaccaggtcaaggtcccggatcctcgggtcccttgacgctctacccatggaggaggaggaggaagaggataagtacatgttggtgagaaagaggaagaccgtggatggctacatgaatgaagatgacctgcccagaagccgtcgctccagatcatccgtgacccttccgcatataattcgcccagtggaagaaattacagaggaggagttggagaacgtctgcagcaattctcgagagaagatatataaccgttcactgggctctacttgtcatcaatgccgtcagaagactattgataccaaaacaaactgcagaaacccagactgctggggcgttcgaggccagttctgtggcccctgccttcgaaaccgttatggtgaagaggtcagggatgctctgctggatccgaactggcattgcccgccttgtcgaggaatctgcaactgcagtttctgccggcagcgagatggacggtgtgcgactggggtccttgtgtatttagccaaatatcatggctttgggaatgtgcatgcctacttgaaaagcctgaaacaggaatttgaaatgcaagcataatatctggaaaatttgctgcctgccttctacttctcaaatctttcttgtaaaagtttccaattttttcactgaaacctgagttaaaaatcttgatgatcagcctgtttcataagaaactccaatcaagttaatcttagcagacatgtgtttctggagcatcacagaaggtatattgctagttacactttgccctcctgcagtttcttctctgctcccaacccccatctcatagcatccccctctatttccaatgctcctctccaaccgcttagtttctgaatttcttttaaattacagttttatgaaagcatattttatttacttggtgttgaaatagccctcataaaacctaagcacttggaaacacaataatagtattaactaactagatctattgaatttcagagaagagccttctaacttgtttacacaaaaacgagtatgatttagcattcatactagttgaaatttttaatagaatcaaggcacaaaagtcttaaaaccatgtggaaaaattaggtaattattgcagattgatgtctctcaatcccatgtattgcgcttatgttacaagttgttgtcacagttgagacttaatttctcctaatttcttctgcccgaagggtaagtggtgcgtccagcttacacaatcataattcaaaggttggtgggcaatgtaatacttaattaaaataatgatggaagagctatctggagattatgagtaagctgatttgaattttcagtataaaactttagtataattgtagtttgcaaagtttatttcagttcacatgtaaggtattgcaaataaattcttggacaattttgtatggaaacttgatattaaaaactagtctgtggttctttgcagtttcttgtaaatttataaaccaggcacaaggttcaagtttagattttaagcacttttataacaatgataagtgcctttttggagatgtaacttttagcagtttgttaacctgacatctctgccagtctagtttctgggcaggtttcctgtgtcagtattccccctcctctttgcattaatcaaggtatttggtagaggtggaatctaagtgtttgtatgtccaatttacttgcatatgtaaaccattgctgtgccattcaatgtttgatgcataattggaccttgaatcgataagtgtaaatacagcttttgatctgtaatgcttttatacaaaagtttattttaataataaaatgtttgttctaacttgtctgcttttttaaaaataatcttactgtacttaattctaattttttcctcatatttaaataaaaggccatttccaccttttctaaaaaa

SEQ ID NO: 435584 - DNA, 3495 bp, Homo sapiens
cccgagccccgcccctccgggcccgggtcggcgcgcccagcctgccagccgcgctgctgctgctcctcctgctgtgggaccgctgaccgcgcggctgctccgctctccccgctccaagcgccgatctgggcacccgccaccagcatggacgctcgccgcgtgccgcagaaagatctcagagtaaagaagaacttaaagaaattcagatatgtgaagttgatttccatggaaacctcgtcatcctctgatgacagttgtgacagctttgcttctgataattttgcaaacacgaggctgcagtcagttcgggaaggctgtaggacccgcagccagtgcaggcactctggacctctcagggtggcgatgaagtttccagcgcggagtaccaggggagcaaccaacaaaaaagcagagtcccgccagccctcagagaattctgtgactgattccaactccgattcagaagatgaaagtggaatgaattttttggagaaaagggctttaaatataaagcaaaacaaagcaatgcttgcaaaactcatgtctgaattagaaagcttccctggctcgttccgtggaagacatcccctcccaggctccgactcagtaagtaccagttcttgtttatatacagtagtgttttgggcacacctaaggtcgatctgtgttgtatttaaaaatctaatttctttatttgtgtggccttctagacaaacgaaggggacctagaggaaaccccctgacagatctctggatgatcctccttgaatcctgggcagtttggtctctccttgctgtgctcctgtggcactaaactccttttgattggttctttctttccttcccagctagactaagcccctcatgggcaggtaatgaagattgaaaacttttttctgttctccagtgtgagcacattcctcctacatggtagatgtgcaatagatgtttttaaaattggagaatgaaaataaaagaagaaaatcacaatttcttatcaagttgtagcttggtatcatacacaattgcattctgaggaattaaggtggtacaacttagggagatttggtgtgtctgctgtgatagaaaagatttctttttcctggctttccctgaggaaaggaaagatggaaagagggaagccatacagatatccctctgttttgcagtgtagaaactgaatgtgtttctacagggtcaagagacatcagagaaattttttttttttagaacagaagatcatttcttacatcttcattaagtaaaagaataaatagctcatctctcaagttgaaagaaactgggcttggtattattacaaaagcaaaattaaaatggccatataggttttaggctcattttgccatgcattatgcaaaggacaaagaaaaagaaaaaatagagctctctttacttaaaacatccttaaggagaagctatgaattccccaaagtactacttctctttattatggaataaatggattcccttatacgtgctttgtttagcaatcaaggagaccgcgaaggcgtacattcccgggtgttgcttccaggagaaaccctgaacggagagctcgtcctcttaccaggtcaaggtcccggatcctcgggtcccttgacgctctacccatggaggaggaggaggaagaggataagtacatgttggtgagaaagaggaagaccgtggatggctacatgaatgaagatgacctgcccagaagccgtcgctccagatcatccgtgacccttccgcatataattcgcccagtggaagaaattacagaggaggagttggagaacgtctgcagcaattctcgagagaagatatataaccgttcactgggctctacttgtcatcaatgccgtcagaagactattgataccaaaacaaactgcagaaacccagactgctggggcgttcgaggccagttctgtggcccctgccttcgaaaccgttatggtgaagaggtcagggatgctctgctggatccgaactggcattgcccgccttgtcgaggaatctgcaactgcagtttctgccggcagcgagatggacggtgtgcgactggggtccttgtgtatttagccaaatatcatggctttgggaatgtgcatgcctacttgaaaagcctgaaacaggaatttgaaatgcaagcataatatctggaaaatttgctgcctgccttctacttctcaaatctttcttgtaaaagtttccaattttttcactgaaacctgagttaaaaatcttgatgatcagcctgtttcataagaaactccaatcaagttaatcttagcagacatgtgtttctggagcatcacagaaggtatattgctagttacactttgccctcctgcagtttcttctctgctcccaacccccatctcatagcatccccctctatttccaatgctcctctccaaccgcttagtttctgaatttcttttaaattacagttttatgaaagcatattttatttacttggtgttgaaatagccctcataaaacctaagcacttggaaacacaataatagtattaactaactagatctattgaatttcagagaagagccttctaacttgtttacacaaaaacgagtatgatttagcattcatactagttgaaatttttaatagaatcaaggcacaaaagtcttaaaaccatgtggaaaaattaggtaattattgcagattgatgtctctcaatcccatgtattgcgcttatgttacaagttgttgtcacagttgagacttaatttctcctaatttcttctgcccgaagggtaagtggtgcgtccagcttacacaatcataattcaaaggttggtgggcaatgtaatacttaattaaaataatgatggaagagctatctggagattatgagtaagctgatttgaattttcagtataaaactttagtataattgtagtttgcaaagtttatttcagttcacatgtaaggtattgcaaataaattcttggacaattttgtatggaaacttgatattaaaaactagtctgtggttctttgcagtttcttgtaaatttataaaccaggcacaaggttcaagtttagattttaagcacttttataacaatgataagtgcctttttggagatgtaacttttagcagtttgttaacctgacatctctgccagtctagtttctgggcaggtttcctgtgtcagtattccccctcctctttgcattaatcaaggtatttggtagaggtggaatctaagtgtttgtatgtccaatttacttgcatatgtaaaccattgctgtgccattcaatgtttgatgcataattggaccttgaatcgataagtgtaaatacagcttttgatctgtaatgcttttatacaaaagtttattttaataataaaatgtttgttctaacttgtctgcttttttaaaaataatcttactgtacttaattctaattttttcctcatatttaaataaaaggccatttccaccttttctaaaaaa

SEQ ID NO: 435585 - DNA, 2804 bp, Homo sapiens
  misc_feature (2734)..(2735): n is a, c, g, or t
cccgagccccgcccctccgggcccgggtcggcgcgcccagcctgccagccgcgctgctgctgctcctcctgctgtgggaccgctgaccgcgcggctgctccgctctccccgctccaagcgccgatctgggcacccgccaccagcatggacgctcgccgcgtgccgcagaaagatctcagagtaaagaagaacttaaagaaattcagatatgtgaagttgatttccatggaaacctcgtcatcctctgatgacagttgtgacagctttgcttctgataattttgcaaacacgaaacctaaattcaggtcagatatcagtgaagaactggcaaatgttttttatgaggactctgataatgaatctttctgcggcttttcagaaagtgaggtgcaagatgtattagaccattgtggatttttacagaaaccaaggccagatgtcactaacgaactggccggtatttttcatgccgactctgacgatgaatcattttgcggtttctcagagagtgagatacaagatggaatgaggctgcagtcagttcgggaaggctgtaggacccgcagccagtgcaggcactctggacctctcagggtggcgatgaagtttccagcgcggagtaccaggggagcaaccaacaaaaaagcagagtcccgccagccctcagagaattctgtgactgattccaactccgattcagaagatgaaagtggaatgaattttttggagaaaagggctttaaatataaagcaaaacaaagcaatgcttgcaaaactcatgtctgaattagaaagcttccctggctcgttccgtggaagacatcccctcccaggctccgactcacaatcaaggagaccgcgaaggcgtacattcccgggtgttgcttccaggagaaaccctgaacggagagctcgtcctcttaccaggtcaaggtcccggatcctcgggtcccttgacgctctacccatggaggaggaggaggaagaggataagtacatgttggtgagaaagaggaagaccgtggatggctacatgaatgaagatgacctgcccagaagccgtcgctccagatcatccgtgacccttccgcatataattcgcccagtggaagaaattacagaggaggagttggagaacgtctgcagcaattctcgagagaagatatataaccgttcactgggctctacttgtcatcaatgccgtcagaagactattgataccaaaacaaactgcagaaacccagactgctggggcgttcgaggccagttctgtggcccctgccttcgaaaccgttatggtgaagaggtcagggatgctctgctggatccgaactggcattgcccgccttgtcgaggaatctgcaactgcagtttctgccggcagcgagatggacggtgtgcgactggggtccttgtgtatttagccaaatatcatggctttgggaatgtgcatgcctacttgaaaagcctgaaacaggaatttgaaatgcaagcataatatctggaaaatttgctgcctgccttctacttctcaaatctttcttgtaaaagtttccaattttttcactgaaacctgagttaaaaatcttgatgatcagcctgtttcataagaaactccaatcaagttaatcttagcagacatgtgtttctggagcatcacagaaggtatattgctagttacactttgccctcctgcagtttcttctctgctcccaacccccatctcatagcatccccctctatttccaatgctcctctccaaccgcttagtttctgaatttcttttaaattacagttttatgaaagcatattttatttacttggtgttgaaatagccctcataaaacctaagcacttggaaacacaataatagtattaactaactagatctattgaatttcagagaagagccttctaacttgtttacacaaaaacgagtatgatttagcattcatactagttgaaatttttaatagaatcaaggcacaaaagtcttaaaaccatgtggaaaaattaggtaattattgcagattgatgtctctcaatcccatgtattgcgcttatgttacaagttgttgtcacagttgagacttaatttctcctaatttcttctgcccgaagggtaagtggtgcgtccagcttacacaatcataattcaaaggttggtgggcaatgtaatacttaattaaaataatgatggaagagctatctggagattatgagtaagctgatttgaattttcagtataaaactttagtataattgtagtttgcaaagtttatttcagttcacatgtaaggtattgcaaataaattcttggacaattttgtatggaaacttgatattaaaaactagtctgtggttctttgcagtttcttgtaaatttataaaccaggcacaaggttcaagtttagattttaagcacttttataacaatgataagtgcctttttggagatgtaacttttagcagtttgttaacctgacatctctgccagtctagtttctgggcaggtttcctgtgtcagtattccccctcctctttgcattaatcaaggtatttggtagaggtggaatctaagtgtttgtatgtccaatttacttgcatatgtaaaccattgctgtgccattcaatgtttgatgcataattggaccttgaatcgataagtgtaaatacagcttttgatctgtaatgcttttatacaaaagtttattttaataataaaatgtttgttnnaaaaaaaaaagagggggcggtaaatactgagggcatatcgtacatttgtaaagggccagggggaaagag

SEQ ID NO: 435586 - DNA, 2992 bp, Homo sapiens
cccgagccccgcccctccgggcccgggtcggcgcgcccagcctgccagccgcgctgctgctgctcctcctgctgtgggaccgctgaccgcgcggctgctccgctctccccgctccaagcgccgatctgggcacccgccaccagcatggacgctcgccgcgtgccgcagaaagatctcagagtaaagaagaacttaaagaaattcagatatgtgaagttgatttccatggaaacctcgtcatcctctgatgacagttgtgacagctttgcttctgataattttgcaaacacgaaacctaaattcaggtcagatatcagtgaagaactggcaaatgttttttatgaggactctgataatgaatctttctgcggcttttcagaaagtgaggtgcaagatgtattagaccattgtggatttttacagaaaccaaggccagatgtcactaacgaactggccggtatttttcatgccgactctgacgatgaatcattttgcggtttctcagagagtgagatacaagatggaatgaggctgcagtcagttcgggaaggctgtaggacccgcagccagtgcaggcactctggacctctcagggtggcgatgaagtttccagcgcggagtaccaggggagcaaccaacaaaaaagcagagtcccgccagccctcagagaattctgtgactgattccaactccgattcagaagatgaaagtggaatgaattttttggagaaaagggctttaaatataaagcaaaacaaagcaatgcttgcaaaactcatgtctgaattagaaagcttccctggctcgttccgtggaagacatcccctcccaggctccgactcaacaaacgaaggggacctagaggaaaccccctgacagatctctggatgatcctccttgaatcctgggcagtttggtctctccttgctgtgctcctgtggcactaaactccttttgattggttctttctttccttcccagctagactaagcccctcatgggcagcaatcaaggagaccgcgaaggcgtacattcccgggtgttgcttccaggagaaaccctgaacggagagctcgtcctcttaccaggtcaaggtcccggatcctcgggtcccttgacgctctacccatggaggaggaggaggaagaggataagtacatgttggtgagaaagaggaagaccgtggatggctacatgaatgaagatgacctgcccagaagccgtcgctccagatcatccgtgacccttccgcatataattcgcccagtggaagaaattacagaggaggagttggagaacgtctgcagcaattctcgagagaagatatataaccgttcactgggctctacttgtcatcaatgccgtcagaagactattgataccaaaacaaactgcagaaacccagactgctggggcgttcgaggccagttctgtggcccctgccttcgaaaccgttatggtgaagaggtcagggatgctctgctggatccgaactggcattgcccgccttgtcgaggaatctgcaactgcagtttctgccggcagcgagatggacggtgtgcgactggggtccttgtgtatttagccaaatatcatggctttgggaatgtgcatgcctacttgaaaagcctgaaacaggaatttgaaatgcaagcataatatctggaaaatttgctgcctgccttctacttctcaaatctttcttgtaaaagtttccaattttttcactgaaacctgagttaaaaatcttgatgatcagcctgtttcataagaaactccaatcaagttaatcttagcagacatgtgtttctggagcatcacagaaggtatattgctagttacactttgccctcctgcagtttcttctctgctcccaacccccatctcatagcatccccctctatttccaatgctcctctccaaccgcttagtttctgaatttcttttaaattacagttttatgaaagcatattttatttacttggtgttgaaatagccctcataaaacctaagcacttggaaacacaataatagtattaactaactagatctattgaatttcagagaagagccttctaacttgtttacacaaaaacgagtatgatttagcattcatactagttgaaatttttaatagaatcaaggcacaaaagtcttaaaaccatgtggaaaaattaggtaattattgcagattgatgtctctcaatcccatgtattgcgcttatgttacaagttgttgtcacagttgagacttaatttctcctaatttcttctgcccgaagggtaagtggtgcgtccagcttacacaatcataattcaaaggttggtgggcaatgtaatacttaattaaaataatgatggaagagctatctggagattatgagtaagctgatttgaattttcagtataaaactttagtataattgtagtttgcaaagtttatttcagttcacatgtaaggtattgcaaataaattcttggacaattttgtatggaaacttgatattaaaaactagtctgtggttctttgcagtttcttgtaaatttataaaccaggcacaaggttcaagtttagattttaagcacttttataacaatgataagtgcctttttggagatgtaacttttagcagtttgttaacctgacatctctgccagtctagtttctgggcaggtttcctgtgtcagtattccccctcctctttgcattaatcaaggtatttggtagaggtggaatctaagtgtttgtatgtccaatttacttgcatatgtaaaccattgctgtgccattcaatgtttgatgcataattggaccttgaatcgataagtgtaaatacagcttttgatctgtaatgcttttatacaaaagtttattttaataataaaatgtttgttctaacttgtctgcttttttaaaaataatcttactgtacttaattctaattttttcctcatatttaaataaaaggccatttccaccttttctaaaaaa

SEQ ID NO: 435587 - DNA, 659 bp, Homo sapiens
cccgagccccgcccctccgggcccgggtcggcgcgcccagcctgccagccgcgctgctgctgctcctcctgctgtgggaccgctgaccgcgcggctgctccgctctccccgctccaagcgccgatctgggcacccgccaccagcatggacgctcgccgcgtgccgcagaaagatctcagagtaaagaagaacttaaagaaattcagatatgtgaagttgatttccatggaaacctcgtcatcctctgatgacagttgtgacagctttgcttctgataattttgcaaacacgaggctgcagtcagttcgggaaggctgtaggacccgcagccagtgcaggcactctggacctctcagggtggcgatgaagtttccagcgcggagtaccaggggagcaaccaacaaaaaagcagagtcccgccagccctcagagaattctgtgactgattccaactccgattcagaagatgaaagtggaatgaattttttggagaaaagggctttaaatataaagcaaaacaaagcaatggtaggtatctgactttgtgttagaattaatttttcctctctaagcgactcattacttaaatctgttccatcacgcaaaagttatttttttctgttacatgaataaaaagttatttttgtttacctgtgaag

SEQ ID NO: 435588 - DNA, 353 bp, Homo sapiens
aactgcagaaacccagactgctggggcgttcgaggccagttctgtggcccctgccttcgaaaccgttatggtgaagaggtcagggatgctctgctggatccggtaggtgcctgccaggggttggtcctgtgggcttgaaggtcagccacaaactgtgatgaggccagaaaaaggcattggtgaaggggtggagccctttctgttatggggtgctcttctttttttttaagatggagtctcattctgtcgccaggctgcagtgcagtggcgcgatctcagctcactgcaacctcctcctcctgggttcaagcgattctcctgcctcagcctcccaagtagctgggactacaggc

SEQ ID NO: 435589 - DNA, 2491 bp, Homo sapiens
tttgggttagggagagtgctttcgtttgttttaaatgggagaaactggagcatgttgccaaggcagagagccagcagagaggggtgaatggaagaaggagcgagaagggggttactgacgaagccttatcctggaggagagaaggatggactccagagcccagctttggggactggccttgaataaaaggagggccactctacctcatcctggagggagcacgaacctaaaggcagacccagaagagctttttacaaaactagagaaaattgggaagggctcctttggagaggtgttcaaaggcattgacaatcggactcagaaagtggttgccataaagatcattgatctggaagaagctgaagatgagatagaggacattcaacaagaaatcacagtgctgagtcagtgtgacagtccatatgtaaccaaatattatggatcctatctgaaggatacaaaattatggataataatggaatatcttggtggaggctccgcactagatctattagaacctggcccattagatgaaacccagatcgctactatattaagagaaatactgaaaggactcgattatctccattcggagaagaaaatccacagagacattaaagcggccaacgtcctgctgtctgagcatggcgaggtgaagctggcggactttggcgtggctggccagctgacagacacccagatcaaaaggaacaccttcgtgggcaccccattctggatggcacccgaggtcatcaaacagtcggcctatgactcgaaggcagacatctggtccctgggcataacagctattgaacttgcaagaggggaaccacctcattccgagctgcaccccatgaaagttttattcctcattccaaagaacaacccaccgacgttggaaggaaactacagtaaacccctcaaggagtttgtggaggcctgtttgaataaggagccgagctttagacccactgctaaggagttattgaagcacaagtttatactacgcaatgcaaagaaaacttcctacttgaccgagctcatcgacaggtacaagagatggaaggccgagcagagccatgacgactcgagctccgaggattccgacgcggaaacagatggccaagcctcggggggcagtgattctggggactggatcttcacaatccgagaaaaagatcccaagaatctcgagaatggagctcttcagccatcggacttggacagaaataagatgaaagacatcccaaagaggcctttctctcagtgtttatctacaattatttctcctctgtttgcagagttgaaggagaagagccaggcgtgcggagggaacttggggtccattgaagagctgcgaggggccatctacctagcggaggaggcgtgccctggcatctccgacaccatggtggcccagctcgtgcagcggctccagagatactctctaagtggtggaggaacttcatcccactgaaattcctttggcatttggggttttgtttttccttttttccttcttcatcctcctccttttttaaaagtcaacgagagccttcgctgactccaccgaagaggtgcgccactgggagccaccccagcgccaggcgcccgtccagggacacacacagtcttcactgtgctgcagccagatgaagtctctcagatgggtggggagggtcagctccttccagcgatcattttattttattttattacttttgtttttaattttaaccatagtgcacatattccaggaaagtgtctttaaaaacaaaaacaaaccctgaaatgtatatttgggattatgataaggcaactaaagacatgaaacctcaggtatcctgctttaagttgataactccctctgggagctggagaatcgctctggtggatgggtgtacagatttgtatataatgtcatttttacggaaaccctttcggcgtgcataaggaatcactgtgtacaaactggccaagtgcttctgtagataacgtcagtggagtaaatattcgacaggccataacttgagtctattgccttgcctttattacatgtacattttgaattctgtgaccagtgatttgggttttattttgtatttgcagggtttgtcattaataattaatgcccctctcttacagaacactcctatttgtacctcaacaaatgcaaattttccccgtttgccctacgccccttttggtacacctagaggttgatttcctttttcatcgatggtactatttcttagtgttttaaattggaacatatcttgcctcatgaagctttaaattataattttcagtttctccccatgaagcgctctcgtctgacatttgtttggaatcgtgccactgctggtctgcgccagatgtaccgtcctttccaatacgattttctgttgcaccttgtagtggattctgcatatcatctttcccacctaaaaatgtctgaatgcttacacaaataaattttataacacgctta

SEQ ID NO: 435590 - DNA, 2619 bp, Homo sapiens
agcggccagcgcgcgcgggcccaggccgcccggctccagcccagcagtagcggcagcagcggcggcggcggcagtgcgcgcgaggccctgcgcccccagcagctcctccctggcgccgtgcatggagacgcggcccgccacccgccgctgagcccccgccgcccggccgggacccgccaggctggggtggcctcgggctccggccggccccgccgcccgagggctgcgcgcggcccgcgggcctcgccgccccgcgcggatcgtcgcggcccggccgtcccgtcccaggaagtggccgtcctgagcgccatggctcactccccggtgcagtcgggcctgcccggcatgcagaacctaaaggcagacccagaagagctttttacaaaactagagaaaattgggaagggctcctttggagaggtgttcaaaggcattgacaatcggactcagaaagtggttgccataaagatcattgatctggaagaagctgaagatgagatagaggacattcaacaagaaatcacagtgctgagtcagtgtgacagtccatatgtaaccaaatattatggatcctatctgaaggatacaaaattatggataataatggaatatcttggtggaggctccgcactagatctattagaacctggcccattagatgaaacccagatcgctactatattaagagaaatactgaaaggactcgattatctccattcggagaagaaaatccacagagacattaaagcggccaacgtcctgctgtctgagcatggcgaggtgaagctggcggactttggcgtggctggccagctgacagacacccagatcaaaaggaacaccttcgtgggcaccccattctggatggcacccgaggtcatcaaacagtcggcctatgactcgaaggcagacatctggtccctgggcataacagctattgaacttgcaagaggggaaccacctcattccgagctgcaccccatgaaagttttattcctcattccaaagaacaacccaccgacgttggaaggaaactacagtaaacccctcaaggagtttgtggaggcctgtttgaataaggagccgagctttagacccactgctaaggagttattgaagcacaagtttatactacgcaatgcaaagaaaacttcctacttgaccgagctcatcgacaggtacaagagatggaaggccgagcagagccatgacgactcgagctccgaggattccgacgcggaaacagatggccaagcctcggggggcagtgattctggggactggatcttcacaatccgagaaaaagatcccaagaatctcgagaatggagctcttcagccatcggacttggacagaaataagatgaaagacatcccaaagaggcctttctctcagtgtttatctacaattatttctcctctgtttgcagagttgaaggagaagagccaggcgtgcggagggaacttggggtccattgaagagctgcgaggggccatctacctagcggaggaggcgtgccctggcatctccgacaccatggtggcccagctcgtgcagcggctccagagatactctctaagtggtggaggaacttcatcccactgaaattcctttggcatttggggttttgtttttccttttttccttcttcatcctcctccttttttaaaagtcaacgagagccttcgctgactccaccgaagaggtgcgccactgggagccaccccagcgccaggcgcccgtccagggacacacacagtcttcactgtgctgcagccagatgaagtctctcagatgggtggggagggtcagctccttccagcgatcattttattttattttattacttttgtttttaattttaaccatagtgcacatattccaggaaagtgtctttaaaaacaaaaacaaaccctgaaatgtatatttgggattatgataaggcaactaaagacatgaaacctcaggtatcctgctttaagttgataactccctctgggagctggagaatcgctctggtggatgggtgtacagatttgtatataatgtcatttttacggaaaccctttcggcgtgcataaggaatcactgtgtacaaactggccaagtgcttctgtagataacgtcagtggagtaaatattcgacaggccataacttgagtctattgccttgcctttattacatgtacattttgaattctgtgaccagtgatttgggttttattttgtatttgcagggtttgtcattaataattaatgcccctctcttacagaacactcctatttgtacctcaacaaatgcaaattttccccgtttgccctacgccccttttggtacacctagaggttgatttcctttttcatcgatggtactatttcttagtgttttaaattggaacatatcttgcctcatgaagctttaaattataattttcagtttctccccatgaagcgctctcgtctgacatttgtttggaatcgtgccactgctggtctgcgccagatgtaccgtcctttccaatacgattttctgttgcaccttgtagtggattctgcatatcatctttcccacctaaaaatgtctgaatgcttacacaaataaattttataacacgctta

SEQ ID NO: 435591 - DNA, 3160 bp, Homo sapiens
agcggccagcgcgcgcgggcccaggccgcccggctccagcccagcagtagcggcagcagcggcggcggcggcagtgcgcgcgaggccctgcgcccccagcagctcctccctggcgccgtgcatggagacgcggcccgccacccgccgctgagcccccgccgcccggccgggacccgccaggctggggtggcctcgggctccggccggccccgccgcccgagggctgcgcgcggcccgcgggcctcgccgccccgcgcggatcgtcgcggcccggccgtcccgtcccaggaagtggccgtcctgagcgccatggctcactccccggtgcagtcgggcctgcccggcatgcagaacctaaaggcagacccagaagagctttttacaaaactagagaaaattgggaagggctcctttggagaggtgttcaaaggcattgacaatcggactcagaaagtggttgccataaagatcattgatctggaagaagctgaagatgagatagaggacattcaacaagaaatcacagtgctgagtcagtgtgacagtccatatgtaaccaaatattatggatcctatctgaaggatacaaaattatggataataatggaatatcttggtggaggctccgcactagatctattagaacctggcccattagatgaaacccagatcgctactatattaagagaaatactgaaaggactcgattatctccattcggagaagaaaatccacagagacattaaagcggccaacgtcctgctgtctgagcatggcgaggtgaagctggcggactttggcgtggctggccagctgacagacacccagatcaaaaggaacaccttcgtgggcaccccattctggatggcacccgaggtcatcaaacagtcggcctatgactcgaaggcagacatctggtccctgggcataacagctattgaacttgcaagaggggaaccacctcattccgagctgcaccccatgaaagttttattcctcattccaaagaacaacccaccgacgttggaaggaaactacagtaaacccctcaaggagtttgtggaggcctgtttgaataaggagccgagctttagacccactgctaaggagttattgaagcacaagtttatactacgcaatgcaaagaaaacttcctacttgaccgagctcatcgacaggtacaagagatggaaggccgagcagagccatgacgactcgagctccgaggattccgacgcggaaacagatggccaagcctcggggggcagtgattctggggactggatcttcacaatccgagaaaaagatcccaagaatctcgagaatggagctcttcagccatcggacttggacagaaataagatgaaagacatcccaaagaggcctttctctcagtgtttatctacaattatttctcctctgtttgcagagttgaaggagaagagccaggcgtgcggagggaacttggggtccattgaagagctgcgaggggccatctacctagcggaggaggcgtgccctggcatctccgacaccatggtggcccagctcgtgcagcggctccagagatactctctaagtggtggaggaacttcatcccactgaaattcctttggcatttggggttttgtttttccttttttccttcttcatcctcctccttttttaaaagtcaacgagagccttcgctgactccaccgaagaggtgcgccactgggagccaccccagcgccaggcgcccgtccagggacacacacagtcttcactgtgctgcagccagatgaagtctctcagatgggtggggagggtcagctccttccagcgatcattttattttattttattacttttgtttttaattttaaccatagtgcacatattccaggaaagtgtctttaaaaacaaaaacaaaccctgaaatgtatatttgggattatgataaggcaactaaagacatgaaacctcaggtatcctgctttaagttgataactccctctgggagctggagaatcgctctggtggatgggtgtacagatttgtatataatgtcatttttacggaaaccctttcggcgtgcataaggaatcactgtgtacaaactggccaagtgcttctgtagataacgtcagtggagtaaatattcgacaggccataacttgagtctattgccttgcctttattacatgtacattttgaattctgtgaccagtgatttgggttttattttgtatttgcagggtttgtcattaataattaatgcccctctcttacagaacactcctatttgtacctcaacaaatgcaaattttccccgtttgccctacgccccttttggtacacctagaggttgatttcctttttcatcgatggtactatttcttagtgttttaaattggaacatatcttgcctcatgaagctttaaattataattttcagtttctccccatgaagcgctctcgtctgacatttgtttggaatcgtgccactgctggtctgcgccagatgtaccgtcctttccaatacgattttctgttgcaccttgtagtggattctgcatatcatctttcccacctaaaaatgtctgaatgcttacacaaataaattttataacacgcttaaaaaaaaaaaaaaaaaaaaaaaaaaaattggggggggggcggggccccggagaaaacctccaacaccactcggttggggccgccggggccccacgagcgggtaacggcgtaacagcgtggtcccaacgcggttccccaggagaagcaccggtggtcacgataacatggcggccgtgggatctcccccacaataacaaaagcgcccggggaggaacacgagagccgtttctcgtagaacaacacatctcccacaagtgggagctctctcagagagggggtggccacataacaccagggaggaggctctcacatatccacaccaccggggggacaggcgcctcaaccagagcagcgacgccccccgcaacagcatctccaacaatatctaaacacgccccccgccgccaccccgggggagggacgcctaccaagccaacgaacacgcacaacctacccgccaacccaacgccaaccacacagacaccaaaccaaaccacagcaccaacaccaactcacaccacacgtcactaccagacacagc

SEQ ID NO: 435592 - DNA, 4587 bp, Homo sapiens
agcggccagcgcgcgcgggcccaggccgcccggctccagcccagcagtagcggcagcagcggcggcggcggcagtgcgcgcgaggccctgcgcccccagcagctcctccctggcgccgtgcatggagacgcggcccgccacccgccgctgagcccccgccgcccggccgggacccgccaggctggggtggcctcgggctccggccggccccgccgcccgagggctgcgcgcggcccgcgggcctcgccgccccgcgcggatcgtcgcggcccggccgtcccgtcccaggaagtggccgtcctgagcgccatggctcactccccggtgcagtcgggcctgcccggcatgcagaacctaaaggcagacccagaagagctttttacaaaactagagaaaattgggaagggctcctttggagaggtgttcaaaggcattgacaatcggactcagaaagtggttgccataaagatcattgatctggaagaagctgaagatgagatagaggacattcaacaagaaatcacagtgctgagtcagtgtgacagtccatatgtaaccaaatattatggatcctatctgaaggatacaaaattatggataataatggaatatcttggtggaggctccgcactagatctattagaacctggcccattagatgaaacccagatcgctactatattaagagaaatactgaaaggactcgattatctccattcggagaagaaaatccacagagacattaaagcggccaacgtcctgctgtctgagcatggcgaggtgaagctggcggactttggcgtggctggccagctgacagacacccagatcaaaaggaacaccttcgtgggcaccccattctggatggcacccgaggtcatcaaacagtcggcctatgactcgaaggcagacatctggtccctgggcataacagctattgaacttgcaagaggggaaccacctcattccgagctgcaccccatgaaagttttattcctcattccaaagaacaacccaccgacgttggaaggaaactacagtaaacccctcaaggagtttgtggaggcctgtttgaataaggagccgagctttagacccactgctaaggagttattgaagcacaagtttatactacgcaatgcaaagaaaacttcctacttgaccgagctcatcgacaggtacaagagatggaaggccgagcagagccatgacgactcgagctccgaggattccgacgcggaaacagatggccaagcctcggggggcagtgattctggggactggatcttcacaatccgagaaaaagatcccaagaatctcgagaatggagctcttcagccatcggacttggacagaaataagatgaaagacatcccaaagaggcctttctctcagtgtttatctacaattatttctcctctgtttgcagagttgaaggagaagagccaggcgtgcggagggaacttggggtccattgaagagctgcgaggggccatctacctagcggaggaggcgtgccctggcatctccgacaccatggtggcccagctcgtgcagcggctccagagatactctctaagtggtggaggaacttcatcccactgaaattcctttggcatttggggttttgtttttccttttttccttcttcatcctcctccttttttaaaagtcaacgagagccttcgctgactccaccgaagaggtgcgccactgggagccaccccagcgccaggcgcccgtccagggacacacacagtcttcactgtgctgcagccagatgaagtctctcagatgggtggggagggtcagctccttccagcgatcattttattttattttattacttttgtttttaattttaaccatagtgcacatattccaggaaagtgtctttaaaaacaaaaacaaaccctgaaatgtatatttgggattatgataaggcaactaaagacatgaaacctcaggtatcctgctttaagttgataactccctctgggagctggagaatcgctctggtggatgggtgtacagatttgtatataatgtcatttttacggaaaccctttcggcgtgcataaggaatcactgtgtacaaactggccaagtgcttctgtagataacgtcagtggagtaaatattcgacaggccataacttgagtctattgccttgcctttattacatgtacattttgaattctgtgaccagtgatttgggttttattttgtatttgcagggtttgtcattaataattaatgcccctctcttacagaacactcctatttgtacctcaacaaatgcaaattttccccgtttgccctacgccccttttggtacacctagaggttgatttcctttttcatcgatggtactatttcttagtgttttaaattggaacatatcttgcctcatgaagctttaaattataattttcagtttctccccatgaagcgctctcgtctgacatttgtttggaatcgtgccactgctggtctgcgccagatgtaccgtcctttccaatacgattttctgttgcaccttgtagtggattctgcatatcatctttcccacctaaaaatgtctgaatgcttacacaaataaattttataacacgcttattttgcatactccttgaaatgtgactcttcagaggacagggcacctgctgtgtatgtgtggccgtgcgtgtgtactcgtggctgtgtgtgtgtgatgagacactttggaagactccagggagaagtccccaggcctggagctgccgagtgcccaggtcagcgccctggactgcttgcgcacttgctcaccgagatgatgcagttggaggttgctgatctgtgcgattgctgtagcggttgccggggaccttaagagttattttgcttctctggaaggggcctatgcttgctaggcaggcagccagtgtgtctgtttttcttggtttgctgtgggaccttgcttggcgagggggaaaatctctgggtttctggagtgggagggttcgtgcagcagctgttgactggtacatgaagcattcttttatgtttgttgaagctgatgattgacatctcccgtgggtgtgccagttcttgtggagttaagacaggatttttggaagcaaggaagttagtgggtgagcttggggatgtagctcagctatctgctggtctagtggcctctaagctatagggaggggacagagccctgagctacagatgcttgagtgggttattgtgtcggtttgctagtgcagtctggtttttaagctctaaaattgaggtattttattagaagtggatttgggttgaactcttaatttgtataagggatatattttggttggggaaatagaactgagttgctaattcttattgtactcattactccatacaagaatgttatgttgaataataaaattggagaagatttcattttgtgtttccagggagtattctgtgtggggaactgtttccttacgtgaggccggcggcataagtcaaagatgagttttgtccttgcgaatcacacagattgagtctgtgttccccagggtgtgccgttacctgatttttaagtgagccagggcggacagcagcttttctgatttacagagttcttcagatttacaaatggacaatgacatcacagtttttagcactgaagccagtctcatgctagtaacagtgggtgagccgctcgagggactgggttctaatgaatactggtatgaacggggagtctctgcagtcgccagacaaatcatactcagccccttcccccgtagagcaacaagtggttcttttagagttgactggcagcatttcctgtcgggggaggtggggtttgatggagttagaaagctcgcctctgtgtacattctctcctgggctgttactttctgtagacgcacaaaatcagccccaatgtttttaagggcatcttagccaaggaagctggcttttgtgtcgccacttccaggcctgcattaagagagagcccaggcaccagggctaccactggaacctgcctcagcgtcaactgctgctggtctgtagccaggcccagcctttgagacgggtttactgtcaccagtagcctctcagtgccagccctgagctgctcctggctcagctgcccagagcctgcagcctggggaggtactcagcctctgggagacgagggccgtggactgggtggctggtagctcctgcgtttttgagctgtgtcctggctggctgctgccaatgaggtggacaccagtgtggtttggggtgcactggccacttcttgctgggttctgattttcttggaagtgcatctgccttccttatccaatagttttatccctgcattgctcttgtgaagtggctggtttggttctgtatgtagcattttgtacctttcctctggcaaaacactgtcagtttataaacattttttatatttccctcctttaaaaacagcttgtgtatttctgctataaaatgtgtcagcaaaggcagagtgacctaatagggcatgttcttaagcacagggactgtatcatgcaggggccaataaagctcaagaaaacgagtaaagcatca

SEQ ID NO: 435593 - DNA, 2300 bp, Homo sapiens
gaactggtgctcgagtgggcctggagcttccgaacctaaaggcagacccagaagagctttttacaaaactagagaaaattgggaagggctcctttggagaggtgttcaaaggcattgacaatcggactcagaaagtggttgccataaagatcattgatctggaagaagctgaagatgagatagaggacattcaacaagaaatcacagtgctgagtcagtgtgacagtccatatgtaaccaaatattatggatcctatctgaaggatacaaaattatggataataatggaatatcttggtggaggctccgcactagatctattagaacctggcccattagatgaaacccagatcgctactatattaagagaaatactgaaaggactcgattatctccattcggagaagaaaatccacagagacattaaagcggccaacgtcctgctgtctgagcatggcgaggtgaagctggcggactttggcgtggctggccagctgacagacacccagatcaaaaggaacaccttcgtgggcaccccattctggatggcacccgaggtcatcaaacagtcggcctatgactcgaaggcagacatctggtccctgggcataacagctattgaacttgcaagaggggaaccacctcattccgagctgcaccccatgaaagttttattcctcattccaaagaacaacccaccgacgttggaaggaaactacagtaaacccctcaaggagtttgtggaggcctgtttgaataaggagccgagctttagacccactgctaaggagttattgaagcacaagtttatactacgcaatgcaaagaaaacttcctacttgaccgagctcatcgacaggtacaagagatggaaggccgagcagagccatgacgactcgagctccgaggattccgacgcggaaacagatggccaagcctcggggggcagtgattctggggactggatcttcacaatccgagaaaaagatcccaagaatctcgagaatggagctcttcagccatcggacttggacagaaataagatgaaagacatcccaaagaggcctttctctcagtgtttatctacaattatttctcctctgtttgcagagttgaaggagaagagccaggcgtgcggagggaacttggggtccattgaagagctgcgaggggccatctacctagcggaggaggcgtgccctggcatctccgacaccatggtggcccagctcgtgcagcggctccagagatactctctaagtggtggaggaacttcatcccactgaaattcctttggcatttggggttttgtttttccttttttccttcttcatcctcctccttttttaaaagtcaacgagagccttcgctgactccaccgaagaggtgcgccactgggagccaccccagcgccaggcgcccgtccagggacacacacagtcttcactgtgctgcagccagatgaagtctctcagatgggtggggagggtcagctccttccagcgatcattttattttattttattacttttgtttttaattttaaccatagtgcacatattccaggaaagtgtctttaaaaacaaaaacaaaccctgaaatgtatatttgggattatgataaggcaactaaagacatgaaacctcaggtatcctgctttaagttgataactccctctgggagctggagaatcgctctggtggatgggtgtacagatttgtatataatgtcatttttacggaaaccctttcggcgtgcataaggaatcactgtgtacaaactggccaagtgcttctgtagataacgtcagtggagtaaatattcgacaggccataacttgagtctattgccttgcctttattacatgtacattttgaattctgtgaccagtgatttgggttttattttgtatttgcagggtttgtcattaataattaatgcccctctcttacagaacactcctatttgtacctcaacaaatgcaaattttccccgtttgccctacgccccttttggtacacctagaggttgatttcctttttcatcgatggtactatttcttagtgttttaaattggaacatatcttgcctcatgaagctttaaattataattttcagtttctccccatgaagcgctctcgtctgacatttgtttggaatcgtgccactgctggtctgcgccagatgtaccgtcctttccaatacgattttctgttgcaccttgtagtggattctgcatatcatctttcccacctaaaaatgtctgaatgcttacacaaataaattttataacacgctta

SEQ ID NO: 435594 - DNA, 2562 bp, Homo sapiens
agcggccagcgcgcgcgggcccaggccgcccggctccagcccagcagtagcggcagcagcggcggcggcggcagtgcgcgcgaggccctgcgcccccagcagctcctccctggcgccgtgcatggagacgcggcccgccacccgccgctgagcccccgccgcccggccgggacccgccaggctggggtggcctcgggctccggccggccccgccgcccgagggctgcgcgcggcccgcgggcctcgccgccccgcgcggatcgtcgcggcccggccgtcccgtcccaggaagtggccgtcctgagcgccatggctcactccccggtgcagtcgggcctgcccggcatgcagaacctaaaggcagacccagaagagctttttacaaaactagagaaaattgggaagggctcctttggagaggtgttcaaaggcattgacaatcggactcagaaagtggttgccataaagatcattgatctggaagaagctgaagatgagatagaggacattcaacaagaaatcacagtgctgagtcagtgtgacagtccatatgtaaccaaatattatggatcctatctgaagttagaacctggcccattagatgaaacccagatcgctactatattaagagaaatactgaaaggactcgattatctccattcggagaagaaaatccacagagacattaaagcggccaacgtcctgctgtctgagcatggcgaggtgaagctggcggactttggcgtggctggccagctgacagacacccagatcaaaaggaacaccttcgtgggcaccccattctggatggcacccgaggtcatcaaacagtcggcctatgactcgaaggcagacatctggtccctgggcataacagctattgaacttgcaagaggggaaccacctcattccgagctgcaccccatgaaagttttattcctcattccaaagaacaacccaccgacgttggaaggaaactacagtaaacccctcaaggagtttgtggaggcctgtttgaataaggagccgagctttagacccactgctaaggagttattgaagcacaagtttatactacgcaatgcaaagaaaacttcctacttgaccgagctcatcgacaggtacaagagatggaaggccgagcagagccatgacgactcgagctccgaggattccgacgcggaaacagatggccaagcctcggggggcagtgattctggggactggatcttcacaatccgagaaaaagatcccaagaatctcgagaatggagctcttcagccatcggacttggacagaaataagatgaaagacatcccaaagaggcctttctctcagtgtttatctacaattatttctcctctgtttgcagagttgaaggagaagagccaggcgtgcggagggaacttggggtccattgaagagctgcgaggggccatctacctagcggaggaggcgtgccctggcatctccgacaccatggtggcccagctcgtgcagcggctccagagatactctctaagtggtggaggaacttcatcccactgaaattcctttggcatttggggttttgtttttccttttttccttcttcatcctcctccttttttaaaagtcaacgagagccttcgctgactccaccgaagaggtgcgccactgggagccaccccagcgccaggcgcccgtccagggacacacacagtcttcactgtgctgcagccagatgaagtctctcagatgggtggggagggtcagctccttccagcgatcattttattttattttattacttttgtttttaattttaaccatagtgcacatattccaggaaagtgtctttaaaaacaaaaacaaaccctgaaatgtatatttgggattatgataaggcaactaaagacatgaaacctcaggtatcctgctttaagttgataactccctctgggagctggagaatcgctctggtggatgggtgtacagatttgtatataatgtcatttttacggaaaccctttcggcgtgcataaggaatcactgtgtacaaactggccaagtgcttctgtagataacgtcagtggagtaaatattcgacaggccataacttgagtctattgccttgcctttattacatgtacattttgaattctgtgaccagtgatttgggttttattttgtatttgcagggtttgtcattaataattaatgcccctctcttacagaacactcctatttgtacctcaacaaatgcaaattttccccgtttgccctacgccccttttggtacacctagaggttgatttcctttttcatcgatggtactatttcttagtgttttaaattggaacatatcttgcctcatgaagctttaaattataattttcagtttctccccatgaagcgctctcgtctgacatttgtttggaatcgtgccactgctggtctgcgccagatgtaccgtcctttccaatacgattttctgttgcaccttgtagtggattctgcatatcatctttcccacctaaaaatgtctgaatgcttacacaaataaattttataacacgctta

SEQ ID NO: 435595 - DNA, 2686 bp, Homo sapiens
agcggccagcgcgcgcgggcccaggccgcccggctccagcccagcagtagcggcagcagcggcggcggcggcagtgcgcgcgaggccctgcgcccccagcagctcctccctggcgccgtgcatggagacgcggcccgccacccgccgctgagcccccgccgcccggccgggacccgccaggctggggtggcctcgggctccggccggccccgccgcccgagggctgcgcgcggcccgcgggcctcgccgccccgcgcggatcgtcgcggcccggccgtcccgtcccaggaagtggccgtcctgagcgccatggctcactccccggtgcagtcgggcctgcccggcatgcagaacctaaaggcagacccagaagagctttttacaaaactagagaaaattgggaagggctcctttggagaggtgttcaaaggcattgacaatcggactcagaaagtggttgccataaagatcattgatctggaagaagctgaagatgagatagaggacattcaacaagaaatcacagtgctgagtcagtgtgacagtccatatgtaaccaaatattatggatcctatctgaaggatacaaaattatggataataatggaatatcttggtggaggctccgcactagatctattagaacctggcccattagatgaaacccagatcgctactatattaagagaaatactgaaaggactcgattatctccattcggagaagaaaatccacagagacattaaagcggccaacgtcctgctgtctgagcatggcgaggtgaagctggcggactttggcgtggctggccagctgacagacacccagatcaaaaggaacaccttcgtgggcaccccattctggatggcacccgaggtcatcaaacagtcggcctatgactcgaaggcagacatctggtccctgggcataacagctattgaacttgcaagaggggaaccacctcattccgagctgcaccccatgaaagttttattcctcattccaaagaacaacccaccgacgttggaaggaaactacagtaaacccctcaaggagtttgtggaggcctgtttgaataaggagccgagctttagacccactgctaaggagttattgaagcacaagtttatactacgcaatgcaaagaaaacttcctacttgaccgagctcatcgacaggtacaagagatggaaggccgagcagagccatgacgactcgagctccgaggattccgacgcggaaacagatggccaagcctcggggggcagtgattctggggactggatcttcacaatccgagaaaaagatcccaagaatctcgagaatggagctcttcagccatcggacttggacagaaataagatgaaagacatcccaaagaggcctttctctcagtgtttatctacaattatttctcctctgtttgcagagttgaaggagaagagccaggcgtgcggagggaacttggggtccattgaagagctgcgaggggccatctacctagcggaggaggcgtgccctggcatctccgacaccatggtggcccagctcgtgcagcggctccagagatactctctaagtggtggaggaacttcatcccactgaaattcctttggcatttggggttttgtttttccttttttccttcttcatcctcctccttttttaaaagtcaacgagagccttcgctgactccaccgaagaggtgcgccactgggagccaccccagcgccaggcgcccgtccagggacacacacagtcttcactgtgctgcagccagatgaagtctctcagatgggtggggagggtcagctccttccagcgatcattttattttattttattacttttgtttttaattttaaccatagtgcacatattccaggaaagtgtctttaaaaacaaaaacaaaccctgaaatgtatatttgggattatgataaggcaactaaagacatgaaacctcaggtatcctgctttaagttgataactccctctgggagctggagaatcgctctggtggatgggtgtacagatttgtatataatgtcatttttacggaaaccctttcggcgtgcataaggaatcactgtgtacaaactggccaagtgcttctgtagataacgtcagtggagtaaatattcgacaggccataacttgagtctattgccttgcctttattacatgtacattttgaattctgtgaccagtgatttgggttttattttgtatttgcagggtttgtcattaataattaatgcccctctcttacagaacactcctatttgtacctcaacaaatgcaaattttccccgtttgccctacgccccttttggtacacctagaggttgatttcctttttcatcgatggtactatttcttagtgttttaaattggaacatatcttgcctcatgaagctttaaattataattttcagtttctccccatgaagcgctctcgtctgacatttgtttggaatcgtgccactgctggtctgcgccagatgtaccgtcctttccaatacgattttctgttgcaccttgtagtggattctgcatatcatctttcccacttttttttttttttttttttacaacacaattgattgggccattttatggatttttacctcctaatagtggatacaggttgccgtggttcccagcaggatctcagatgcgagggg

SEQ ID NO: 435596 - DNA, 2588 bp, Homo sapiens
agcggccagcgcgcgcgggcccaggccgcccggctccagcccagcagtagcggcagcagcggcggcggcggcagtgcgcgcgaggccctgcgcccccagcagctcctccctggcgccgtgcatggagacgcggcccgccacccgccgctgagcccccgccgcccggccgggacccgccaggctggggtggcctcgggctccggccggccccgccgcccgagggctgcgcgcggcccgcgggcctcgccgccccgcgcggatcgtcgcggcccggccgtcccgtcccaggaagtggccgtcctgagcgccatggctcactccccggtgcagtcgggcctgcccggcatgcagaacctaaaggcagacccagaagagctttttacaaaactagagaaaattgggaagggctcctttggagaggtgttcaaaggcattgacaatcggactcagaaagtggttgccataaagatcattgatctggaagaagctgaagatgagatagaggacattcaacaagaaatcacagtgctgagtcagtgtgacagtccatatgtaaccaaatattatggatcctatctgaaggatacaaaattatggataataatggaatatcttggtggaggctccgcactagatctattagaacctggcccattagatgaaacccagatcgctactatattaagagaaatactgaaaggactcgattatctccattcggagaagaaaatccacagagacattaaagcggccaacgtcctgctgtctgagcatggcgaggtgaagctggcggactttggcgtggctggccagctgacagacacccagatcaaaaggaacaccttcgtgggcaccccattctggatggcacccgaggtcatcaaacagtcggcctatgactcgaaggcagacatctggtccctgggcataacagctattgaacttgcaagaggggaaccacctcattccgagctgcaccccatgaaagttttattcctcattccaaagaacaacccaccgacgttggaaggaaactacagtaaacccctcaaggagtttgtggaggcctgtttgaataaggagccgagctttagacccactgctaaggagttattgaagcacaagtttatactacgcaatgcaaagaaaacttcctacttgaccgagctcatcgacaggtacaagagatggaaggccgagcagagccatgacgactcgagctccgaggattccgacgcggaaacagatggccaagcctcggggggcagtgattctggggactggatcttcacaatccgagtcttcagccatcggacttggacagaaataagatgaaagacatcccaaagaggcctttctctcagtgtttatctacaattatttctcctctgtttgcagagttgaaggagaagagccaggcgtgcggagggaacttggggtccattgaagagctgcgaggggccatctacctagcggaggaggcgtgccctggcatctccgacaccatggtggcccagctcgtgcagcggctccagagatactctctaagtggtggaggaacttcatcccactgaaattcctttggcatttggggttttgtttttccttttttccttcttcatcctcctccttttttaaaagtcaacgagagccttcgctgactccaccgaagaggtgcgccactgggagccaccccagcgccaggcgcccgtccagggacacacacagtcttcactgtgctgcagccagatgaagtctctcagatgggtggggagggtcagctccttccagcgatcattttattttattttattacttttgtttttaattttaaccatagtgcacatattccaggaaagtgtctttaaaaacaaaaacaaaccctgaaatgtatatttgggattatgataaggcaactaaagacatgaaacctcaggtatcctgctttaagttgataactccctctgggagctggagaatcgctctggtggatgggtgtacagatttgtatataatgtcatttttacggaaaccctttcggcgtgcataaggaatcactgtgtacaaactggccaagtgcttctgtagataacgtcagtggagtaaatattcgacaggccataacttgagtctattgccttgcctttattacatgtacattttgaattctgtgaccagtgatttgggttttattttgtatttgcagggtttgtcattaataattaatgcccctctcttacagaacactcctatttgtacctcaacaaatgcaaattttccccgtttgccctacgccccttttggtacacctagaggttgatttcctttttcatcgatggtactatttcttagtgttttaaattggaacatatcttgcctcatgaagctttaaattataattttcagtttctccccatgaagcgctctcgtctgacatttgtttggaatcgtgccactgctggtctgcgccagatgtaccgtcctttccaatacgattttctgttgcaccttgtagtggattctgcatatcatctttcccacctaaaaatgtctgaatgcttacacaaataaattttataacacgctta

SEQ ID NO: 435597 - DNA, 2618 bp, Homo sapiens
agcggccagcgcgcgcgggcccaggccgcccggctccagcccagcagtagcggcagcagcggcggcggcggcagtgcgcgcgaggccctgcgcccccagcagctcctccctggcgccgtgcatggagacgcggcccgccacccgccgctgagcccccgccgcccggccgggacccgccaggctggggtggcctcgggctccggccggccccgccgcccgagggctgcgcgcggcccgcgggcctcgccgccccgcgcggatcgtcgcggcccggccgtcccgtcccaggaagtggccgtcctgagcgccatggctcactccccggtgcagtcgggcctgcccggcatgcagaacctaaaggcagacccagaagagctttttacaaaactagagaaaattgggaagggctcctttggagaggtgttcaaaggcattgacaatcggactcagaaagtggttgccataaagatcattgatctggaagaagctgaagatgagatagaggacattcaacaagaaatcacagtgctgagtcagtgtgacagtccatatgtaaccaaatattatggatcctatctgaaggatacaaaattatggataataatggaatatcttggtggaggctccgcactagatctattagaacctggcccattagatgaaacccagatcgctactatattaagagaaatactgaaaggactcgattatctccattcggagaagaaaatccacagagacattaaagcggccaacgtcctgctgtctgagcatggcgaggtgaagctggcggactttggcgtggctggccagctgacagacacccagatcaaaaggaacaccttcgtgggcaccccattctggatggcacccgaggtcatcaaacagtcggcctatgactcgaaggcagacatctggtccctgggcataacagctattgaacttgcaagaggggaaccacctcattccgagctgcaccccatgaaagttttattcctcattccaaagaacaacccaccgacgttggaaggaaactacagtaaacccctcaaggagtttgtggaggcctgtttgaataaggagccgagctttagacccactgctaaggagttattgaagcacaagtttatactacgcaatgcaaagaaaacttcctacttgaccgagctcatcgacaggtacaagagatggaaggccgagcagagccatgacgactcgagctccgaggattccgacgcggaaacagatggccaagcctcggggggcagtgattctggggactggatcttcacaatccgagaaaaagatcccaagaatctcgagaatggagctcttcagccatcggacttggacagaaataagatgaaagacatcccaaagaggcctttctctcagtgtttatctacaattatttctcctctgtttgcagagttgaaggagaagagccaggcgtgcggagggaacttggggtccattgaagagctgcgaggggccatctacctagcggaggaggcgtgccctggcatctccgacaccatggtggcccagctcgtgcagcggctccagagatactctctaagtggtggaggaacttcatcccactgaaattcctttggcatttggggttttgtttttccttttttccttcttcatcctcctccttttttaaaagtcaacgagagccttcgctgactccaccgaagaggtgcgccactgggagccaccccagcgccaggcgcccgtccagggacacacacagtcttcactgtgctgcagccagatgaagtctctcagatgggtggggagggtcagctccttccagcgatcattttattttattttattacttttgtttttaattttaaccatagtgcacatattccaggaaagtgtctttaaaaacaaaaacaaaccctgaaatgtatatttgggattatgataaggcaactaaagacatgaaacctcaggtatcctgctttaagttgataactccctctgggagctggagaatcgctctggtggatgggtgtacagatttgtatataatgtcatttttacggaaaccctttcggcgtgcataaggaatcactgtgtacaaactggccaagtgcttctgtagataacgtcagtggagtaaatattcgacaggccataacttgagtctattgccttgcctttattacatgtacattttgaattctgtgaccagtgatttgggttttattttgtatttgcagggtttgtcattaataattaatgcccctctcttacagaacactcctatttgtacctcaacaaatgcaaattttccccgtttgccctacgccccttttggtacacctagaggttgatttcctttttcatcgatggtactatttcttagtgttttaaattggaacatatcttgcctcatgaagctttaaattataattttcataactcgtgcagtcaccctggcgttttcttcctgcaactcttctaacaacactcataatgccacactgtttattcctctctgctaaaatgttctcgacagttttaagaccagtcttctggatctgcccattccttgttccgtttccaatgaaatcaataaaaaaactagaagtactccaaaa

SEQ ID NO: 435598 - DNA, 2130 bp, Homo sapiens
agcggccagcgcgcgcgggcccaggccgcccggctccagcccagcagtagcggcagcagcggcggcggcggcagtgcgcgcgaggccctgcgcccccagcagctcctccctggcgccgtgcatggagacgcggcccgccacccgccgctgagcccccgccgcccggccgggacccgccaggctggggtggcctcgggctccggccggccccgccgcccgagggctgcgcgcggcccgcgggcctcgccgccccgcgcggatcgtcgcggcccggccgtcccgtcccaggaagtggccgtcctgagcgccatggctcactccccggtgcagtcgggcctgcccggcatgcagaacctaaaggcagacccagaagagctttttacaaaactagagaaaattgggaagggctcctttggagaggtgttcaaaggcattgacaatcggactcagaaagtggttgccataaagatcattgatctggaagaagctgaagatgagatagaggacattcaacaagaaatcacagtgctgagtcagtgtgacagtccatatgtaaccaaatattatggatcctatctgaaggatacaaaattatggataataatggaatatcttggtggaggctccgcactagatctattagaacctggcccattagatgaaacccagatcgctactatattaagagaaatactgaaaggactcgattatctccattcggagaagaaaatccacagagacattaaagcggccaacgtcctgctgtctgagcatggcgaggtgaagctggcggactttggcgtggctggccagctgacagacacccagatcaaaaggaacactcttcagccatcggacttggacagaaataagatgaaagacatcccaaagaggcctttctctcagtgtttatctacaattatttctcctctgtttgcagagttgaaggagaagagccaggcgtgcggagggaacttggggtccattgaagagctgcgaggggccatctacctagcggaggaggcgtgccctggcatctccgacaccatggtggcccagctcgtgcagcggctccagagatactctctaagtggtggaggaacttcatcccactgaaattcctttggcatttggggttttgtttttccttttttccttcttcatcctcctccttttttaaaagtcaacgagagccttcgctgactccaccgaagaggtgcgccactgggagccaccccagcgccaggcgcccgtccagggacacacacagtcttcactgtgctgcagccagatgaagtctctcagatgggtggggagggtcagctccttccagcgatcattttattttattttattacttttgtttttaattttaaccatagtgcacatattccaggaaagtgtctttaaaaacaaaaacaaaccctgaaatgtatatttgggattatgataaggcaactaaagacatgaaacctcaggtatcctgctttaagttgataactccctctgggagctggagaatcgctctggtggatgggtgtacagatttgtatataatgtcatttttacggaaaccctttcggcgtgcataaggaatcactgtgtacaaactggccaagtgcttctgtagataacgtcagtggagtaaatattcgacaggccataacttgagtctattgccttgcctttattacatgtacattttgaattctgtgaccagtgatttgggttttattttgtatttgcagggtttgtcattaataattaatgcccctctcttacagaacactcctatttgtacctcaacaaatgcaaattttccccgtttgccctacgccccttttggtacacctagaggttgatttcctttttcatcgatggtactatttcttagtgttttaaattggaacatatcttgcctcatgaagctttaaattataattttcagtttctccccatgaagcgctctcgtctgacatttgtttggaatcgtgccactgctggtctgcgccagatgtaccgtcctttccaatacgattttctgttgcaccttgtagtggattctgcatatcatctttcccacctaaaaatgtctgaatgcttacacaaataaattttataacacgctta

SEQ ID NO: 435599 - DNA, 2326 bp, Homo sapiens
agcggccagcgcgcgcgggcccaggccgcccggctccagcccagcagtagcggcagcagcggcggcggcggcagtgcgcgcgaggccctgcgcccccagcagctcctccctggcgccgtgcatggagacgcggcccgccacccgccgctgagcccccgccgcccggccgggacccgccaggctggggtggcctcgggctccggccggccccgccgcccgagggctgcgcgcggcccgcgggcctcgccgccccgcgcggatcgtcgcggcccggccgtcccgtcccaggaagtggccgtcctgagcgccatggctcactccccggtgcagtcgggcctgcccggcatgcagaacctaaaggcagacccagaagagctttttacaaaactagagaaaattgggaagggctcctttggagaggtgttcaaaggcattgacaatcggactcagaaagtggttgccataaagatcattgatctggaagaagctgaagatgagatagaggacattcaacaagaaatcacagtgctgagtcagtgtgacagtccatatgtaaccaaatattatggatcctatctgaaggatacaaaattatggataataatggaatatcttggtggaggctccgcactagatctattagaacctggcccattagatgaaacccagatcgctactatattaagagaaatactgaaaggactcgattatctccattcggagaagaaaatccacagagacattaaagcggccaacgtcctgctgtctgagcatggcgaggtgaagctggcggactttggcgtggctggccagctgacagacacccagatcaaaaggaacaccttcgtgggcaccccattctggatggcacccgaggtcatcaaacagtcggcctatgactcgaaggcagacatctggtccctgggcataacagctattgaacttgcaagaggggaaccacctcattccgagctgcaccccatgaaagttttattcctcattccaaagaacaacccaccgacgttggaaggaaactacagtaaacccctcaaggagtttgtggaggcctgtttgaataaggagccgagctttagacccactgctaaggagttattgaagcacaagtttatactacgcaatgcaaagaaaacttcctacttgaccgagctcatcgacaggtacaagagatggaaggccgagcagagccatgacgactcgagctccgaggattccgacgcggaaacagatggccaagcctcggggggcagtgattctggggactggatcttcacaatccgagaaaaagatcccaagaatctcgagaatggagctcttcagccatcggacttggacagaaataagatgaaagacatcccaaagaggcctttctctcagtgtttatctacaattatttctcctctgtttgcagagcccagcgccaggcgcccgtccagggacacacacagtcttcactgtgctgcagccagatgaagtctctcagatgggtggggagggtcagctccttccagcgatcattttattttattttattacttttgtttttaattttaaccatagtgcacatattccaggaaagtgtctttaaaaacaaaaacaaaccctgaaatgtatatttgggattatgataaggcaactaaagacatgaaacctcaggtatcctgctttaagttgataactccctctgggagctggagaatcgctctggtggatgggtgtacagatttgtatataatgtcatttttacggaaaccctttcggcgtgcataaggaatcactgtgtacaaactggccaagtgcttctgtagataacgtcagtggagtaaatattcgacaggccataacttgagtctattgccttgcctttattacatgtacattttgaattctgtgaccagtgatttgggttttattttgtatttgcagggtttgtcattaataattaatgcccctctcttacagaacactcctatttgtacctcaacaaatgcaaattttccccgtttgccctacgccccttttggtacacctagaggttgatttcctttttcatcgatggtactatttcttagtgttttaaattggaacatatcttgcctcatgaagctttaaattataattttcagtttctccccatgaagcgctctcgtctgacatttgtttggaatcgtgccactgctggtctgcgccagatgtaccgtcctttccaatacgattttctgttgcaccttgtagtggattctgcatatcatctttcccacctaaaaatgtctgaatgcttacacaaataaattttataacacgctta

SEQ ID NO: 435600 - DNA, 2152 bp, Homo sapiens
agcggccagcgcgcgcgggcccaggccgcccggctccagcccagcagtagcggcagcagcggcggcggcggcagtgcgcgcgaggccctgcgcccccagcagctcctccctggcgccgtgcatggagacgcggcccgccacccgccgctgagcccccgccgcccggccgggacccgccaggctggggtggcctcgggctccggccggccccgccgcccgagggctgcgcgcggcccgcgggcctcgccgccccgcgcggatcgtcgcggcccggccgtcccgtcccaggaagtggccgtcctgagcgccatggctcactccccggtgcagtcgggcctgcccggcatgcagaacctaaaggcagacccagaagagctttttacaaaactagagaaaattgggaagggctcctttggagaggtgttcaaaggcattgacaatcggactcagaaagtggttgccataaagatcattgatctggaagaagctgaagatgagatagaggacattcaacaagaaatcacagtgctgagtcagtgtgacagtccatatgtaaccaaatattatggatcctatctgaaggatacaaaattatggataataatggaatatcttggtggaggctccgcactagatctattagaacctggcccattagatgaaacccagatcgctactatattaagagaaatactgaaaggactcgattatctccattcggagaagaaaatccacagagacattaaagcggccaacgtcctgctgtctgagcatggcgaggtgaagctggcggactttggcgtggctggccagctgacagacacccagatcaaaaggaacaccttcgtgggcaccccattctggatggcacccgaggtcatcaaacagtcggcctatgactcgaaggcagacatctggtccctgggcataacagctattgaacttgcaagaggggaaccacctcattccgagctgcaccccatgaaagttttattcctcattccaaagaacaacccaccgacgttggaaggaaactacagtaaacccctcaaggagtttgtggaggcctgtttgaataaggagccgagctttagacccactgctaaggagttattgaagcacaagtttatactacgcaatgcaaagaaaacttcctacttgaccgagctcatcgacaggtacaagagatggaaggccgagcagagccatgacgactcgagctccgaggattccgacgcggaaacagatggccaagcctcggggggcagtgattctggggactggatcttcacaatccgagaaaaagatcccaagaatctcgagaatggagctcttcagccatcggacttggacagaaataagatgaaagacatcccaaagaggcctttctctcagtgtttatctacaattatttctcctctgtttgcagagttgaaggagaagagccaggcgtgcggagggaacttggggtccattgaagagctgcgaggggccatctacctagcggaggaggcgtgccctggcatctccgacaccatggtggcccagctcgtgcagcggctccagagatactctctaagtggtggaggaacttcatcccactgaaattcctttggcatttggggttttgtttttccttttttccttcttcatcctcctccttttttaaaagtcaacgagagccttcgctgactccaccgaagaggtgcgccactgggagccaccccagcgccaggcgcccgtccagggacacacacagtcttcactgtgctgcagccagatgaagtctctcagatgggtggggagggtcagctccttccagcgatcattttattttattttattacttttgtttttaattttaaccatagtgcacatattccaggaaagtgtctttaaaaacaaaaacaaaccctgaaatgtatatttgggattatgataaggcaactaaagacatgaaacctcaggtatcctgctttaagttgataactccctctgggagctggagaatcgctctggtggatgggtgtacagatttgtatataatgtcatttttacggaaaccctttcggcgtgcataaggaatcactgtgtacaaactggccaagtgcttctgtagataacgtcagtggagtaaatattcgacaggcca

SEQ ID NO: 435601 - DNA, 3315 bp, Homo sapiens
agcggccagcgcgcgcgggcccaggccgcccggctccagcccagcagtagcggcagcagcggcggcggcggcagtgcgcgcgaggccctgcgcccccagcagctcctccctggcgccgtgcatggagacgcggcccgccacccgccgctgagcccccgccgcccggccgggacccgccaggctggggtggcctcgggctccggccggccccgccgcccgagggctgcgcgcggcccgcgggcctcgccgccccgcgcggatcgtcgcggcccggccgtcccgtcccaggaagtggccgtcctgagcgccatggctcactccccggtgcagtcgggcctgcccggcatgcagaacctaaaggcagacccagaagagctttttacaaaactagagaaaattgggaagggctcctttggagaggtgttcaaaggcattgacaatcggactcagaaagtggttgccataaagatcattgatctggaagaagctgaagatgagatagaggacattcaacaagaaatcacagtgctgagtcagtgtgacagtccatatgtaaccaaatattatggatcctatctgaaggatacaaaattatggataataatggaatatcttggtggaggctccgcactagatctattagaacctggcccattagatgaaacccagatcgctactatattaagagaaatactgaaaggactcgattatctccattcggagaagaaaatccacagagacattaaagcggccaacgtcctgctgtctgagcatggcgaggtgaagctggcggactttggcgtggctggccagctgacagacacccagatcaaaaggaacaccttcgtgggcaccccattctggatggcacccgaggtcatcaaacagtcggcctatgactcgaaggcagacatctggtccctgggcataacagctattgaacttgcaagaggggaaccacctcattccgagctgcaccccatgaaagttttattcctcattccaaagaacaacccaccgacgttggaaggaaactacagtaaacccctcaaggagtttgtggaggcctgtttgaataaggagccgagctttagacccactgctaaggagttattgaagcacaagtttatactacgcaatgcaaagaaaacttcctacttgaccgagctcatcgacaggtacaagagatggaaggccgagcagagccatgacgactcgagctccgaggattccgacgcggaaacagatggccaagcctcggggggcagtgattctggggactggatcttcacaatccgagaaaaagatcccaagaatctcgagaatggagctcttcagccatcggacttggacagaaataagatgaaagacatcccaaagaggcctttctctcagtgtttatctacaattatttctcctctgtttgcagagttgaaggagaagagccaggcgtgcggagggaacttggggtccattgaagagctgcgaggggccatctacctagcggaggaggcgtgccctggcatctccgacaccatggtggcccagctcgtgcagcggctccagaggtaactacccagggcccctctgggctggggaaggagagacctgcacttgggctgggacttagttgatgagtttggtacttgattcttggcctgtctgttcctgttatcttgcaggcctcagggtagacagagttgaattagaggagactttgttctgaattctagaaatcaatgtgaatgaaggatctgaatctggaaactactggaaagcccacaggacttagtgcatttgtagcttttgccacataaatacagggtggtggtgaaatacctgtttcctcttaattatgcagcttaattattggccagagaatgatcgttcttagccagatgtgtgtaactatctatctggttttcggctttaaagtcaagtgtgagaaatgacagcagctttggtgtggtcaactcagcgggagcgggcgcaggtgtgttccctgtgttagctgtgtgtgtcatgtctggaagcctccttggtaggggttcatctgtgccagcctgtagggagcttttgtccctgcccagtggccccacctgttgaatgcactatgggtgaggactcagtggggtgacagttttgccctccctgccccctcccaacttgttgtaggagtatccatgggaaccaagcccctcctgactgccatctggcacaagtgcaggcgtttggaggcagtggatgtgtgctgggaagccgctctgtgtgacctgagggtgatttgtcactgggctgtcctccacacccccaggaggaccaggcgtgctgctgccttgacagttcatcttcaggtgtccaggctgacacctcccaaagctggctgagactctgtgatcatgagggggatttctgggtctttcctgagactgcgtcccacctgacagtacataaagaagttttgcacacgtgaggtcccttttgctatttggaagtgattgaaggggctgcctactgtcctgtgaagagcccctctacgtggggacagcaggagaaaaccacagttctgatacttcacgtttatgcttctgaactcgggtttcttagtaagacatttcaactttttaagttgctagaaaataaaaatgatctacttggctgccttcaattttgaggcaattgaaggacgatccctccctcctttgatactaaaaacaatataggaataaaggaaaatagaattaaaaagtcacccatcttttgcctgaacacaaactttttgatttctcaaacttagcatcacatacctcattctagaggcatttatttcccattagaaagagctttataataaaacaaatagaacaaaaccagaaacgggtaggattgttactgtcttgttgggcattttgctctctgcttttgtagtattacttttaaaaccaatactttccacactgtccagaattgcctgaaattgttatgaactgtttgtttatatacgtgacttgatttccccagggcagctccagggcacagagtgtgtggcttgtatgtgttgaactgatccacgtttcccattcccaggcccctatctctctgttcctcttcttttagttgttaaggcaagttgatctgtaccagtgctggccagtagaagtacagcgtgggccacacacagaattttatgttttctgctggatgtggtggctcatgcctgtaatcccaatgctttgggaggcccaggcaggaggatcgcttgaggccaagagtttgagaccagcctgggcaaaatagcaagaccctgtctctacc

SEQ ID NO: 435602 - DNA, 2147 bp, Homo sapiens
agcggccagcgcgcgcgggcccaggccgcccggctccagcccagcagtagcggcagcagcggcggcggcggcagtgcgcgcgaggccctgcgcccccagcagctcctccctggcgccgtgcatggagacgcggcccgccacccgccgctgagcccccgccgcccggccgggacccgccaggctggggtggcctcgggctccggccggccccgccgcccgagggctgcgcgcggcccgcgggcctcgccgccccgcgcggatcgtcgcggcccggccgtcccgtcccaggaagtggccgtcctgagcgccatggctcactccccggtgcagtcgggcctgcccggcatgcagaacctaaaggcagacccagaagagctttttacaaaactagagaaaattgggaagggctcctttggagaggtgttcaaaggcattgacaatcggactcagaaagtggttgccataaagatcattgatctggaagaagctgaagatgagatagaggacattcaacaagaaatcacagtgctgagtcagtgtgacagtccatatgtaaccaaatattatggatcctatctgaaggatacaaaattatggataataatggaatatcttggtggaggctccgcactagatctattagaacctggcccattagatgaaacccagatcgctactatattaagagaaatactgaaaggactcgattatctccattcggagaagaaaatccacagagacattaaagcggccaacgtcctgctgtctgagcatggcgaggtgaagctggcggactttggcgtggctggccagctgacagacacccagatcaaaaggaacaccttcgtgggcaccccattctggatggcacccgaggtcatcaaacagtcggcctatgactcgaaggcagacatctggtccctgggcataacagctattgaacttgcaagaggggaaccacctcattccgagctgcaccccatgaaagttttattcctcattccaaagaacaacccaccgacgttggaaggaaactacagtaaacccctcaaggagtttgtggaggcctgtttgaataaggagccgagctttagacccactgctaaggagttattgaagcacaagtttatactacgcaatgcaaagaaaacttcctacttgaccgagctcatcgacaggtacaagagatggaaggccgagcagagccatgacgactcgagctccgaggattccgacgcggaaacagatggccaagcctcggggggcagtgattctggggactggatcttcacaatccgagaaaaagatcccaagaatctcgagaatggagctcttcagccatcggacttggacagaaataagatgaaagacatcccaaagaggcctttctctcagtgtttatctacaattatttctcctctgtttgcagagttgaaggagaagagccaggcgtgcggagggaacttggggtccattgaagagctgcgaggggccatctacctagcggaggaggcgtgccctggcatctccgacaccatggtggcccagctcgtgcagcggctccagaggagtatccatgggaaccaagcccctcctgactgccatctggcacaagtgcaggcgtttggaggcagtggatgtgtgctgggaagccgctctgtgtgacctgagggtgatttgtcactgggctgtcctccacacccccaggaggaccaggcgtgctgctgccttgacagttcatcttcaggtgtccaggctgacacctcccaaagctggctgagactctgtgatcatgagggggatttctgggtctttcctgagactgcgtcccacctgacagtacataaagaagttttgcacacgtgaggtcccttttgctatttggaagtgattgaaggggctgcctactgtcctgtgaagagcccctctacgtggggacagcaggagaaaaccacagttctgatacttcacgtttatgcttctgaactcgggtttcttagtaagacatttcaactttttaagttgctagaaaataaaaatgatctacttggctgccttcaattttgaggcaattgaaggacgatccctccctcctttgatactaaaaacaatataggaataaaggaaaatagaattaaaaagtcacc

SEQ ID NO: 435603 - DNA, 1783 bp, Homo sapiens
agcggccagcgcgcgcgggcccaggccgcccggctccagcccagcagtagcggcagcagcggcggcggcggcagtgcgcgcgaggccctgcgcccccagcagctcctccctggcgccgtgcatggagacgcggcccgccacccgccgctgagcccccgccgcccggccgggacccgccaggctggggtggcctcgggctccggccggccccgccgcccgagggctgcgcgcggcccgcgggcctcgccgccccgcgcggatcgtcgcggcccggccgtcccgtcccaggaagtggccgtcctgagcgccatggctcactccccggtgcagtcgggcctgcccggcatgcagaacctaaaggcagacccagaagagctttttacaaaactagagaaaattgggaagggctcctttggagaggtgttcaaaggcattgacaatcggactcagaaagtggttgccataaagatcattgatctggaagaagctgaagatgagatagaggacattcaacaagaaatcacagtgctgagtcagtgtgacagtccatatgtaaccaaatattatggatcctatctgaaggatacaaaattatggataataatggaatatcttggtggaggctccgcactagatctattagaacctggcccattagatgaaacccagatcgctactatattaagagaaatactgaaaggactcgattatctccattcggagaagaaaatccacagagacattaaagcggccaacgtcctgctgtctgagcatggcgaggtgaagctggcggactttggcgtggctggccagctgacagacacccagatcaaaaggaacaccttcgtgggcaccccattctggatggcacccgaggtcatcaaacagtcggcctatgactcgaaggcagacatctggtccctgggcataacagctattgaacttgcaagaggggaaccacctcattccgagctgcaccccatgaaagttttattcctcattccaaagaacaacccaccgacgttggaaggaaactacagtaaacccctcaaggagtttgtggaggcctgtttgaataaggagccgagctttagacccactgctaaggagttattgaagcacaagtttatactacgcaatgcaaagaaaacttcctacttgaccgagctcatcgacaggtacaagagatggaaggccgagcagagccatgacgactcgagctccgaggattccgacgcggaaacagatggccaagcctcggggggcagtgattctggggactggatcttcacaatccgagaaaaagatcccaagaatctcgagaatggagctcttcagccatcggacttggacagaaataagatgaaagacatcccaaagaggcctttctctcagtgtttatctacaattatttctcctctgtttgcagagttgaaggagaagagccaggcgtgcggagggaacttggggtccattgaagagctgcgaggggccatctacctagcggaggaggcgtgccctggcatctccgacaccatggtggcccagctcgtgcagcggctccagagatactctctaagtggtggaggaacttcatcccactgaaattcctttggcatttggggttttgtttttccttttttccttcttcatcctcctccttttttaaaagtcaacgagagccttcgctgactccaccgaagaggtgcgccactgggagccaccccagcgccaggcgcccgtccagggagaatttcaggtataagctcggattgtatatgta

SEQ ID NO: 435604 - DNA, 2754 bp, Homo sapiens
agcggccagcgcgcgcgggcccaggccgcccggctccagcccagcagtagcggcagcagcggcggcggcggcagtgcgcgcgaggccctgcgcccccagcagctcctccctggcgccgtgcatggagacgcggcccgccacccgccgctgagcccccgccgcccggccgggacccgccaggctggggtggcctcgggctccggccggccccgccgcccgagggctgcgcgcggcccgcgggcctcgccgccccgcgcggatcgtcgcggcccggccgtcccgtcccaggaagtggccgtcctgagcgccatggctcactccccggtgcagtcgggcctgcccggcatgcagaacctaaaggcagacccagaagagctttttacaaaactagagaaaattgggaagggctcctttggagaggtgttcaaaggcattgacaatcggactcagaaagtggttgccataaagatcattgatctggaagaagctgaagatgagatagaggacattcaacaagaaatcacagtgctgagtcagtgtgacagtccatatgtaaccaaatattatggatcctatctgaaggatacaaaattatggataataatggaatatcttggtggaggctccgcactagatctattagaacctggcccattagatgaaacccagatcgctactatattaagagaaatactgaaaggactcgattatctccattcggagaagaaaatccacagagacattaaagcggccaacgtcctgctgtctgagcatggcgaggtgaagctggcggactttggcgtggctggccagctgacagacacccagatcaaaaggaacaccttcgtgggcaccccattctggatggcacccgaggtcatcaaacagtcggcctatgactcgaaggcagacatctggtccctgggcataacagctattgaacttgcaagaggggaaccacctcattccgagctgcaccccatgaaagttttattcctcattccaaagaacaacccaccgacgttggaaggaaactacagtaaacccctcaaggagtttgtggaggcctgtttgaataaggagccgagctttagacccactgctaaggagttattgaagcacaagtttatactacgcaatgcaaagaaaacttcctacttgaccgagctcatcgacaggtacaagagatggaaggccgagcagagccatgacgactcgagctccgaggattccgacgcggaaacagatggccaagcctcggggggcagtgattctggggactggatcttcacaatccgagaaaaagatcccaagaatctcgagaatggagctcttcagccatcggacttggacagaaataagatgaaagacatcccaaagaggcctttctctcagtgtttatctacaattatttctcctctgtttgcagagttgaaggagaagagccaggcgtgcggagggaacttggggtccattgaagagctgcgaggggccatctacctagcggaggaggcgtgccctggcatctccgacaccatggtggcccagctcgtgcagcggctccagaggtaactacccagggcccctctgggctggggaaggagagacctgcacttgggctgggacttagttgatgagtttggtacttgattcttggcctgtctgttcctgttatcttgcaggcctcagggtagacagagttgaattagaggagactttgttctgaattctagaaatcaatgtgaatgaaggatctgaatctggaaactactggaaagcccacaggacttagtgcatttgtagcttttgccacataaatacagggtggtggtgaaatacctgtttcctcttaattatgcagcttaattattggccagagaatgatcgttcttagccagatgtgtgtaactatctatctggttttcggctttaaagtcaagtgtgagaaatgacagcagctttggtgtggtcaactcagcgggagcgggcgcaggtgtgttccctgtgttagctgtgtgtgtcatgtctggaagcctccttggtaggggttcatctgtgccagcctgtagggagcttttgtccctgcccagtggccccacctgttgaatgcactatgggtgaggactcagtggggtgacagttttgccctccctgccccctcccaacttgttgtaggagtatccatgggaaccaagcccctcctgactgccatctggcacaagtgcaggcgtttggaggcagtggatgtgtgctgggaagccgctctgtgtgacctgagggtgatttgtcactgggctgtcctccacacccccaggaggaccaggcgtgctgctgccttgacagttcatcttcaggtgtccaggctgacacctcccaaagctggctgagactctgtgatcatgagggggatttctgggtctttcctgagactgcgtcccacctgacagtacataaagaagttttgcacacgtgaggtcccttttgctatttggaagtgattgaaggggctgcctactgtcctgtgaagagcccctctacgtggggacagcaggagaaaaccacagttctgatacttcacgtttatgcttctgaactcgggtttcttagtaagacatttcaactttttaagttgctagaaaataaaaatgatctacttggctgccttcaattttgaggcaattgaaggacgatccctccctcctttgatactaaaaacaatataggaataaaggaaaatagaattaaaaagtcacc

SEQ ID NO: 435605 - DNA, 1676 bp, Homo sapiens
agcggccagcgcgcgcgggcccaggccgcccggctccagcccagcagtagcggcagcagcggcggcggcggcagtgcgcgcgaggccctgcgcccccagcagctcctccctggcgccgtgcatggagacgcggcccgccacccgccgctgagcccccgccgcccggccgggacccgccaggctggggtggcctcgggctccggccggccccgccgcccgagggctgcgcgcggcccgcgggcctcgccgccccgcgcggatcgtcgcggcccggccgtcccgtcccaggaagtggccgtcctgagcgccatggctcactccccggtgcagtcgggcctgcccggcatgcagaacctaaaggcagacccagaagagctttttacaaaactagagaaaattgggaagggctcctttggagaggtgttcaaaggcattgacaatcggactcagaaagtggttgccataaagatcattgatctggaagaagctgaagatgagatagaggacattcaacaagaaatcacagtgctgagtcagtgtgacagtccatatgtaaccaaatattatggatcctatctgaaggatacaaaattatggataataatggaatatcttggtggaggctccgcactagatctattagaacctggcccattagatgaaacccagatcgctactatattaagagaaatactgaaaggactcgattatctccattcggagaagaaaatccacagagacattaaagcggccaacgtcctgctgtctgagcatggcgaggtgaagctggcggactttggcgtggctggccagctgacagacacccagatcaaaaggaacaccttcgtgggcaccccattctggatggcacccgaggtcatcaaacagtcggcctatgactcgaaggcagacatctggtccctgggcataacagctattgaacttgcaagaggggaaccacctcattccgagctgcaccccatgaaagttttattcctcattccaaagaacaacccaccgacgttggaaggaaactacagtaaacccctcaaggagtttgtggaggcctgtttgaataaggagccgagctttagacccactgctaaggagttattgaagcacaagtttatactacgcaatgcaaagaaaacttcctacttgaccgagctcatcgacaggtacaagagatggaaggccgagcagagccatgacgactcgagctccgaggattccgacgcggaaacagatggccaagcctcggggggcagtgattctggggactggatcttcacaatccgagaaaaagatcccaagaatctcgagaatggagctcttcagccatcggacttggacagaaataaggtacgtctgctcactccagaatggccacgctgacctcagtctgcagtgttttggaggcacttgtgtgtgaagcttgctgtgggtgcggctggggtcctttgtggcagctgtcctggaattttgttgctaggggatgggcagatgaagagctttagttctgtctgatgatccaggtgttcacaccagggagtctggcctctggtctgttttgtgccactctattctgctctctgcagccctgctgttgagttaggatgtcccgatgtggcaatgtcatggggtttgggggtgacccgtgaaatgacttcatagct

SEQ ID NO: 435606 - DNA, 2420 bp, Homo sapiens
tgattgcatttagactagctacttcataaacagccccaccaagaaaagaaaaatcgcgatcccgatataaaccattcagcattcaattcctttctcctagtaaaaagaggcaggtagagttttgggtctaaatgcaaattttccccgtttgccctacgccccttttggtacacctagaggttgatttcctttttcatcgatggtactatttcttagtgttttaaattggaacatatcttgcctcatgaagctttaaattataattttcagtttctccccatgaagcgctctcgtctgacatttgtttggaatcgtgccactgctggtctgcgccagatgtaccgtcctttccaatacgattttctgttgcaccttgtagtggattctgcatatcatctttcccacctaaaaatgtctgaatgcttacacaaataaattttataacacgcttattttgcatactccttgaaatgtgactcttcagaggacagggcacctgctgtgtatgtgtggccgtgcgtgtgtactcgtggctgtgtgtgtgtgatgagacactttggaagactccagggagaagtccccaggcctggagctgccgagtgcccaggtcagcgccctggactgcttgcgcacttgctcaccgagatgatgcagttggaggttgctgatctgtgcgattgctgtagcggttgccggggaccttaagagttattttgcttctctggaaggggcctatgcttgctaggcaggcagccagtgtgtctgtttttcttggtttgctgtgggaccttgcttggcgagggggaaaatctctgggtttctggagtgggagggttcgtgcagcagctgttgactggtacatgaagcattcttttatgtttgttgaagctgatgattgacatctcccgtgggtgtgccagttcttgtggagttaagacaggatttttggaagcaaggaagttagtgggtgagcttggggatgtagctcagctatctgctggtctagtggcctctaagctatagggaggggacagagccctgagctacagatgcttgagtgggttattgtgtcggtttgctagtgcagtctggtttttaagctctaaaattgaggtattttattagaagtggatttgggttgaactcttaatttgtataagggatatattttggttggggaaatagaactgagttgctaattcttattgtactcattactccatacaagaatgttatgttgaataataaaattggagaagatttcattttgtgtttccagggagtattctgtgtggggaactgtttccttacgtgaggccggcggcataagtcaaagatgagttttgtccttgcgaatcacacagattgagtctgtgttccccagggtgtgccgttacctgatttttaagtgagccagggcggacagcagcttttctgatttacagagttcttcagatttacaaatggacaatgacatcacagtttttagcactgaagccagtctcatgctagtaacagtgggtgagccgctcgagggactgggttctaatgaatactggtatgaacggggagtctctgcagtcgccagacaaatcatactcagccccttcccccgtagagcaacaagtggttcttttagagttgactggcagcatttcctgtcgggggaggtggggtttgatggagttagaaagctcgcctctgtgtacattctctcctgggctgttactttctgtagacgcacaaaatcagccccaatgtttttaagggcatcttagccaaggaagctggcttttgtgtcgccacttccaggcctgcattaagagagagcccaggcaccagggctaccactggaacctgcctcagcgtcaactgctgctggtctgtagccaggcccagcctttgagacgggtttactgtcaccagtagcctctcagtgccagccctgagctgctcctggctcagctgcccagagcctgcagcctggggaggtactcagcctctgggagacgagggccgtggactgggtggctggtagctcctgcgtttttgagctgtgtcctggctggctgctgccaatgaggtggacaccagtgtggtttggggtgcactggccacttcttgctgggttctgattttcttggaagtgcatctgccttccttatccaatagttttatccctgcattgctcttgtgaagtggctggtttggttctgtatgtagcattttgtacctttcctctggcaaaacactgtcagtttataaacattttttatatttccctcctttaaaaacagcttgtgtatttctgctataaaatgtgtcagcaaaggcagagtgacctaatagggcatgttcttaagcacagggactgtatcatgcaggggccaataaagctcaagaaaacgagtaaagcatca

SEQ ID NO: 435607 - DNA, 1416 bp, Homo sapiens
  misc_feature (1302)..(1302): n is a, c, g, or t
  misc_feature (1314)..(1314): n is a, c, g, or t
agcggccagcgcgcgcgggcccaggccgcccggctccagcccagcagtagcggcagcagcggcggcggcggcagtgcgcgcgaggccctgcgcccccagcagctcctccctggcgccgtgcatggagacgcggcccgccacccgccgctgagcccccgccgcccggccgggacccgccaggctggggtggcctcgggctccggccggccccgccgcccgagggctgcgcgcggcccgcgggcctcgccgccccgcgcggatcgtcgcggcccggccgtcccgtcccaggaagtggccgtcctgagcgccatggctcactccccggtgcagtcgggcctgcccggcatgcagaacctaaaggcagacccagaagagctttttacaaaactagagaaaattgggaagggctcctttggagaggtgttcaaaggcattgacaatcggactcagaaagtggttgccataaagatcattgatctggaagaagctgaagatgagatagaggacattcaacaagaaatcacagtgctgagtcagtgtgacagtccatatgtaaccaaatattatggatcctatctgaaggatacaaaattatggataataatggaatatcttggtggaggctccgcactagatctattagaacctggcccattagatgaaacccagatcgctactatattaagagaaatactgaaaggactcgattatctccattcggagaagaaaatccacagagacattaaagcggccaacgtcctgctgtctgagcatggcgaggtgaagctggcggactttggcgtggctggccagctgacagacacccagatcaaaaggaacaccttcgtgggcaccccattctggatggcacccgaggtcatcaaacagtcggcctatgactcgaaggcagacatctggtccctgggcataacagctattgaacttgcaagaggggaaccacctcattccgagctgcaccccatgaaagttttattcctcattccaaagaacaacccaccgacgttggaaggaaactacagtaaacccctcaaggagtttgtggaggcctgtttgaataaggagccgagctttagacccactgctaaggagttattgaagcactcgaggagctctcctgggcggctgaagaaggagcttcttctccggagtgcgccggcggtggcgcctgcggacctaactagctccaggttaggccgagctttgcgggaaagcagcggacttgaaaatactggaaatctgtccggatccaaattattttgcaagccagatgagtaaccaganggcatgaaaggntgagaacatttgactttccttgcaaaccttgggataagatcactttccttttcttttaaggaaaaggaaaaggcccccaaaagagccccaatggaggtccca

SEQ ID NO: 435608 - DNA, 1010 bp, Homo sapiens
agcggccagcgcgcgcgggcccaggccgcccggctccagcccagcagtagcggcagcagcggcggcggcggcagtgcgcgcgaggccctgcgcccccagcagctcctccctggcgccgtgcatggagacgcggcccgccacccgccgctgagcccccgccgcccggccgggacccgccaggctggggtggcctcgggctccggccggccccgccgcccgagggctgcgcgcggcccgcgggcctcgccgccccgcgcggatcgtcgcggcccggccgtcccgtcccaggaagtggccgtcctgagcgccatggctcactccccggtgcagtcgggcctgcccggcatgcagaacctaaaggcagacccagaagagctttttacaaaactagagaaaattgggaagggctcctttggagaggtgttcaaaggcattgacaatcggactcagaaagtggttgccataaagatcattgatctggaagaagctgaagatgagatagaggacattcaacaagaaatcacagtgctgagtcagtgtgacagtccatatgtaaccaaatattatggatcctatctgaaggatacaaaattatggataataatggaatatcttggtggaggctccgcactagatctattagaacctggcccattagatgaaacccagatcgctactatattaagagaaatactgaaaggactcgattatctccattcggagaagaaaatccacagagacattaaagcggccaacgtcctgctgtctgagcatggcgaggtgaagctggcggactttggcgtggctggccagctgacagacacccagatcaaaaggaacaccttcgtgggcaccccattctggatggcacccgaggtcatcaaacagtcggcctatgactcgaaggcagacatctggtccctgggcataacagctattgaacttgcaagaggggaaccacctcattccgagtgcactccagcctgggcaacaagagcaaaactgtctca

SEQ ID NO: 435609 - DNA, 691 bp, Homo sapiens
aaaggcattgacaatcggactcagaaagtggttgccataaagatcattgatctggaagaagctgaagatgagatagaggacattcaacaagaaatcacagtgctgagtcagtgtgacagtccatatgtaaccaaatattatggatcctatctgaaggtaaggcttaaaataacgtgcttctccgttctgcagcacttggctgaggtgccagcagggaatgggaaggactctgataggacaaagcacagcaggtttcagagcaaggagagatgttttgaccttcgtgatcaaaagaacctggctttgatagttccatcatctcaaatgtctcctatagaaatatttgtggtgaaagtgtttgatgttctaattctcttttgaataaggaagagtatttctggtgggactttgtcattaaaactgtttcttattaagttattataacagttattcacctaattttaggactgcttatgattagtattaaaaactcataccaacttaagaatgttaatcttttgatattctcacttaccagctgtggtttaatttaatgctgttaaaaactgctgatgagaattgataatgttggttagttagctagcttatctacgcttgacttttaagaatgctaggcaaattggtaattacttaaataaaacggtagttataataatatgacacaaaaatt

SEQ ID NO: 435610 - DNA, 683 bp, Homo sapiens
ggcatttttccagctttatgttctctgagcttcctgggtctgcagtttggtgtctgacaagtgtttgggaaaattctcagtcattattgcttcaaatatttcttctgttattttctctcttatcctgatatgttacacattttgtagttatcccacagttcttagatattctattctgggtttttttgaagcttttttctttttgcttttcagtcttggaagtttctgttgacatatcttcaagttccaagattctttcttcagccatgtccagtctcctgatgagcccactgaaggcatttttcatttcagttacagtgtttttgagctctggcattttttaaattctttcttagaatttccatctctgtgcctatatgatccatctgttattttaatcaaaattatacatgcacagaggtacctggtgacaccaattcttttgccataatctctttttcacattgtgtaacttggtcctgaattagagatttctctctctttcacaagcataatgtcagattctatagttttcaagaaacttcagaatgtctttgtgagaacagtgagagagttgtgttctcattctagccaagaaaaaaaaagatactaaatatcaacactaaaactgaaaacacagcaccaagcaatttagagaatttgattaattttgtacattaaac

SEQ ID NO: 435611 - DNA, 631 bp, Homo sapiens
  misc_feature (580)..(580): n is a, c, g, or t
  misc_feature (583)..(583): n is a, c, g, or t
  misc_feature (592)..(592): n is a, c, g, or t
  misc_feature (594)..(595): n is a, c, g, or t
ggcatttttccagctttatgttctctgagcttcctgggtctgcagtttggtgtctgacaagtgtttgggaaaattctcagtcattattgcttcaaatatttcttctgttattttctctcttatcctgatatgttacacattttgtagttatcccacagttcttagatattctattctgggtttttttgaagcttttttctttttgcttttcagtcttggaagtttctgttgacatatcttcaagttccaagattctttcttcagccatgtccagtctcctgatgagcccactgaaggcatttttcatttcagttacagtgtttttgagctctggcattttttaaattctttcttagaatttccatctctgtgcctatatgatccatctgttattttaatcaaaattatacatgcacagaggtacctggtgacaccaattcttttgccataatctctttttcacattgtgtaacttggtcctgaattagagatttctctctctttcacaagcataatgtcagattctatagttttcaagaaacttcagaatgtctttgtgagaacaggaaaaagtggtttnctnccgagtttncnnaaaaaaacctatccctctttccagtgctgctctccc

SEQ ID NO: 435612 - DNA, 2948 bp, Homo sapiens
gacagaaggttgaacgactgcccacttatgcactgagccttccggagggacgagtctacaggggtcgcgcgtcgtaacgacgtcacttccgtcggaaggttctcatgaggagccactcagattcctgtcacttctcaaagcatctccgtcgtgaacatggccctgccaccattcttcggccagggtcgcccaggcccaccgcccccgcagccgccgcctcctgctcctttcggctgtccgccaccgccgctgccctccccggctttcccgccgcctctcccccagcggcccggcccttttccgggggcctccgcccccttccttcagcctccgctggctctgcagccccgagcctccgcggaggcctcccgcggcggaggcggcgctggcgccttctacccggtgccaccaccgccgctgcctcctccgccgccccagtgtcggcccttcccggggaccgacgccggcgagcggccgcggccaccgcctcccggcccggggccgccctggagcccgcggtggcctgaggcgccgccgccgccggccgacgtgctcggggatgcggccctccaacgcctgcgcgaccggcagtggctggaggcggtgttcgggaccccgcggcgggcaggctgtccggtgccccagcgcacgcatgccgggcccagccttggcgaagtgcgcgcgcgattgctccgggctctgcgcctggtgcggcggctgcgcggcctgagccaggccctgcgcgaggccgaagccgacggcgcggcctgggtcctgctgtactcccagaccgcgccgctgcgcgcggaactggccgagcggctacagccgttgacccaggctgcctatgtgggcgaggcgcggaggaggctggagagggtccggcgccgccggctgcggcttcgcgagagggcccgggaacgcgaggccgagcgggaggcagaggccgcgcgggcagtggaacgcgagcaggagattgaccgctggagggtgaagtgtgtgcaggaggtggaggagaagaagcgggagcaggaactcaaagcagccgctgatggcgtactatctgaagtgaggaaaaaacaagcagataccaaaagaatggtggacattctacgggctttggagaaattgaggaaactgaggaaagaggctgcagcgaggaaaggggtctgtcctccagcctcagcagatgagacttttacgcatcatcttcagcgactgagaaaactcattaaaaagcgctctgaactgtatgaagctgaagagagagccctcagagttatgctagaaggagaacaagaggaagagaggaaaagagaattagaaaagaaacaaagaaaagaaaaagagaaaattttacttcagaaacgtgaaattgagtccaagttgtttggggatccagatgagttcccacttgctcacctcttggagcctttccgacagtattatctccaagccgagcactccctgccagcgctcatccagatcaggcatgattgggatcagtacctggtgccatccgatcatcccaaaggcaacttcgttccccaaggatgggtccttcccccgctccccagcaacgacatctgggcaactgctgttaagctgcattagtaaagatgctccaggagtgtggtccagccagcgctctttccagctgtaaatattagcgatggtgccatcttttgctgtagactaaactgcaacttctaaattccatgtggcattcccctaccctgaagttatgctttccttctgtgctctgtgctggccagaggtgcctcttgaatcagattaatgtggtttttcaggaaaggacttaggtgaactgaggtttttaccacaggcagtgaatgaccttggttcaccaaatttgcctctgttttgaggggcttggtccagagtgacttgttaatttactctaacttccttgtgtgttgatgggtaagtacactcaaacactgaatacaggtgtgtgatgggtagatttcacagcccttctactaatagtgagtgtgaaggcaagcttgatgcaaaacctcctgacctttcctacctgaagagccctttgacttctaggaagaaaggtcaaaaatgttatcttcagttgtgttaatcccagttttagtgcagcttaggaggctgctagttaggaagatggcagtggctgtaggctgggttgccagaaaagatggtggcctagtcttattattcagatggagaacttagaaaacctgaagagtacccaaattggattgtattttaatggacaatggctgtattttttccatgttagaaggatcctaatgaaagcacctgttatttttaagtttctaagggtctagttgttcagaatccccaaggatatttccctaacctcactcagtcacattgtaggagccagtgtagctatggaattatcttaggaactcaagcttctaaaactatccatgtagtcaaatctaggggaaaaagcaaataaaaatagtaaaatttggccgggcacagtggctcacgcctgtaatcccaacactttgggaggccgaggcgggccgatcacgaggtcaggagatcaaggccatcctggctaacacggtgaaaccctgtctctactaaaaatacaaaaaaatattagctgggcgtaggtggtgcacacctgtagtcccagctactggggaggctgaggcaggagaatggtgtaaaacccaggaggcagagcttgcagtgagccgagatcgcgccacggcactccagcctgggagacagagcaagactccgtctcaaaaaaaaaaaaagtaaaatttattttttatattcattaataaatgctgttgtgcttggagatgatcactcatataacatgtcatttttttggttctgttttggtttggtttttgccaattattttgttatatttccaaaaaactaaataaaaatcatttttattt

SEQ ID NO: 435613 - DNA, 2331 bp, Homo sapiens
gacagaaggttgaacgactgcccacttatgcactgagccttccggagggacgagtctacaggggtcgcgcgtcgtaacgacgtcacttccgtcggaaggttctcatgaggagccactcagattcctgtcacttctcaaagcatctccgtcgtgaacatggccctgccaccattcttcggccagggtcgcccaggcccaccgcccccgcagccgccgcctcctgctcctttcggctgtccgccaccgccgctgccctccccggctttcccgccgcctctcccccagcggcccggcccttttccgggggcctccgcccccttccttcagcctccggcgggcagtggaacgcgagcaggagattgaccgctggagggtgaagtgtgtgcaggaggtggaggagaagaagcgggagcaggaactcaaagcagccgctgatggcgtactatctgaagtgaggaaaaaacaagcagataccaaaagaatggtggacattctacgggctttggagaaattgaggaaactgaggaaagaggctgcagcgaggaaaggggtctgtcctccagcctcagcagatgagacttttacgcatcatcttcagcgactgagaaaactcattaaaaagcgctctgaactgtatgaagctgaagagagagccctcagagttatgctagaaggagaacaagaggaagagaggaaaagagaattagaaaagaaacaaagaaaagaaaaagagaaaattttacttcagaaacgtgaaattgagtccaagttgtttggggatccagatgagttcccacttgctcacctcttggagcctttccgacagtattatctccaagccgagcactccctgccagcgctcatccagatcaggcatgattgggatcagtacctggtgccatccgatcatcccaaaggcaacttcgttccccaaggatgggtccttcccccgctccccagcaacgacatctgggcaactgctgttaagctgcattagtaaagatgctccaggagtgtggtccagccagcgctctttccagctgtaaatattagcgatggtgccatcttttgctgtagactaaactgcaacttctaaattccatgtggcattcccctaccctgaagttatgctttccttctgtgctctgtgctggccagaggtgcctcttgaatcagattaatgtggtttttcaggaaaggacttaggtgaactgaggtttttaccacaggcagtgaatgaccttggttcaccaaatttgcctctgttttgaggggcttggtccagagtgacttgttaatttactctaacttccttgtgtgttgatgggtaagtacactcaaacactgaatacaggtgtgtgatgggtagatttcacagcccttctactaatagtgagtgtgaaggcaagcttgatgcaaaacctcctgacctttcctacctgaagagccctttgacttctaggaagaaaggtcaaaaatgttatcttcagttgtgttaatcccagttttagtgcagcttaggaggctgctagttaggaagatggcagtggctgtaggctgggttgccagaaaagatggtggcctagtcttattattcagatggagaacttagaaaacctgaagagtacccaaattggattgtattttaatggacaatggctgtattttttccatgttagaaggatcctaatgaaagcacctgttatttttaagtttctaagggtctagttgttcagaatccccaaggatatttccctaacctcactcagtcacattgtaggagccagtgtagctatggaattatcttaggaactcaagcttctaaaactatccatgtagtcaaatctaggggaaaaagcaaataaaaatagtaaaatttggccgggcacagtggctcacgcctgtaatcccaacactttgggaggccgaggcgggccgatcacgaggtcaggagatcaaggccatcctggctaacacggtgaaaccctgtctctactaaaaatacaaaaaaatattagctgggcgtaggtggtgcacacctgtagtcccagctactggggaggctgaggcaggagaatggtgtaaaacccaggaggcagagcttgcagtgagccgagatcgcgccacggcactccagcctgggagacagagcaagactccgtctcaaaaaaaaaaaaagtaaaatttattttttatattcattaataaatgctgttgtgcttggagatgatcactcatataacatgtcatttttttggttctgttttggtttggtttttgccaattattttgttatatttccaaaaaactaaataaaaatcatttttattt

SEQ ID NO: 435614 - DNA, 2279 bp, Homo sapiens
cttcaggtctagggaatctgcatttttaacaagtctcagcttaacaaggtaagttggacacctgatctctgcactacactttgagaaacactgaggaagaaacaaaaccagtgctatgtggaagatacagagaggagaggttctcctttaagatgaaggttgtaccatcagtggagggggataacctcttagctagaggggagttgtgcaaggcctaagaaattgggatggagattcaatagagtctctcttaacctggagactgtctgatcctttaaaatctaaccactgggcagctattctctgctgtaagtttgttcctaatacgaggtctcatgggctttgtttctcttccaggagcaggaactcaaagcagccgctgatggcgtactatctgaagtgaggaaaaaacaagcagataccaaaagaatggtggacattctacgggctttggagaaattgaggaaactgaggaaagaggctgcagcgaggaaaggggtctgtcctccagcctcagcagatgagacttttacgcatcatcttcagcgactgagaaaactcattaaaaagcgctctgaactgtatgaagctgaagagagagccctcagagttatgctagaaggagaacaagaggaagagaggaaaagagaattagaaaagaaacaaagaaaagaaaaagagaaaattttacttcagaaacgtgaaattgagtccaagttgtttggggatccagatgagttcccacttgctcacctcttggagcctttccgacagtattatctccaagccgagcactccctgccagcgctcatccagatcaggcatgattgggatcagtacctggtgccatccgatcatcccaaaggcaacttcgttccccaaggatgggtccttcccccgctccccagcaacgacatctgggcaactgctgttaagctgcattagtaaagatgctccaggagtgtggtccagccagcgctctttccagctgtaaatattagcgatggtgccatcttttgctgtagactaaactgcaacttctaaattccatgtggcattcccctaccctgaagttatgctttccttctgtgctctgtgctggccagaggtgcctcttgaatcagattaatgtggtttttcaggaaaggacttaggtgaactgaggtttttaccacaggcagtgaatgaccttggttcaccaaatttgcctctgttttgaggggcttggtccagagtgacttgttaatttactctaacttccttgtgtgttgatgggtaagtacactcaaacactgaatacaggtgtgtgatgggtagatttcacagcccttctactaatagtgagtgtgaaggcaagcttgatgcaaaacctcctgacctttcctacctgaagagccctttgacttctaggaagaaaggtcaaaaatgttatcttcagttgtgttaatcccagttttagtgcagcttaggaggctgctagttaggaagatggcagtggctgtaggctgggttgccagaaaagatggtggcctagtcttattattcagatggagaacttagaaaacctgaagagtacccaaattggattgtattttaatggacaatggctgtattttttccatgttagaaggatcctaatgaaagcacctgttatttttaagtttctaagggtctagttgttcagaatccccaaggatatttccctaacctcactcagtcacattgtaggagccagtgtagctatggaattatcttaggaactcaagcttctaaaactatccatgtagtcaaatctaggggaaaaagcaaataaaaatagtaaaatttggccgggcacagtggctcacgcctgtaatcccaacactttgggaggccgaggcgggccgatcacgaggtcaggagatcaaggccatcctggctaacacggtgaaaccctgtctctactaaaaatacaaaaaaatattagctgggcgtaggtggtgcacacctgtagtcccagctactggggaggctgaggcaggagaatggtgtaaaacccaggaggcagagcttgcagtgagccgagatcgcgccacggcactccagcctgggagacagagcaagactccgtctcaaaaaaaaaaaaagtaaaatttattttttatattcattaataaatgctgttgtgcttggagatgatcactcatataacatgtcatttttttggttctgttttggtttggtttttgccaattattttgttatatttccaaaaaactaaataaaaatcatttttattt

SEQ ID NO: 435615 - DNA, 2042 bp, Homo sapiens
cttcaggtctagggaatctgcatttttaacaagtctcagcttaacaaggtaagttggacacctgatctctgcactacactttgagaaacactgaggaagaaacaaaaccagtgctatgtggaagatacagagaggagaggttctcctttaagatgaaggttgtaccatcagtggagggggataacctcttagctagaggggagttgtgcaaggcctaagaaattgggatggagattcaatagagtctctcttaacctggagactgtctgatcctttaaaatctaaccactgggcagctattctctgctgtaagtttgttcctaatacgaggtctcatgggctttgtttctcttccaggagcaggaactcaaagcagccgctgatggcgtactatctgaagtgaggaaaaaacaagcagataccaaaagaatggtggacattctacgggctttggagaaattgaggaaactgaggaaagaggctgcagcgaggaaagatgagttcccacttgctcacctcttggagcctttccgacagtattatctccaagccgagcactccctgccagcgctcatccagatcaggcatgattgggatcagtacctggtgccatccgatcatcccaaaggcaacttcgttccccaaggatgggtccttcccccgctccccagcaacgacatctgggcaactgctgttaagctgcattagtaaagatgctccaggagtgtggtccagccagcgctctttccagctgtaaatattagcgatggtgccatcttttgctgtagactaaactgcaacttctaaattccatgtggcattcccctaccctgaagttatgctttccttctgtgctctgtgctggccagaggtgcctcttgaatcagattaatgtggtttttcaggaaaggacttaggtgaactgaggtttttaccacaggcagtgaatgaccttggttcaccaaatttgcctctgttttgaggggcttggtccagagtgacttgttaatttactctaacttccttgtgtgttgatgggtaagtacactcaaacactgaatacaggtgtgtgatgggtagatttcacagcccttctactaatagtgagtgtgaaggcaagcttgatgcaaaacctcctgacctttcctacctgaagagccctttgacttctaggaagaaaggtcaaaaatgttatcttcagttgtgttaatcccagttttagtgcagcttaggaggctgctagttaggaagatggcagtggctgtaggctgggttgccagaaaagatggtggcctagtcttattattcagatggagaacttagaaaacctgaagagtacccaaattggattgtattttaatggacaatggctgtattttttccatgttagaaggatcctaatgaaagcacctgttatttttaagtttctaagggtctagttgttcagaatccccaaggatatttccctaacctcactcagtcacattgtaggagccagtgtagctatggaattatcttaggaactcaagcttctaaaactatccatgtagtcaaatctaggggaaaaagcaaataaaaatagtaaaatttggccgggcacagtggctcacgcctgtaatcccaacactttgggaggccgaggcgggccgatcacgaggtcaggagatcaaggccatcctggctaacacggtgaaaccctgtctctactaaaaatacaaaaaaatattagctgggcgtaggtggtgcacacctgtagtcccagctactggggaggctgaggcaggagaatggtgtaaaacccaggaggcagagcttgcagtgagccgagatcgcgccacggcactccagcctgggagacagagcaagactccgtctcaaaaaaaaaaaaagtaaaatttattttttatattcattaataaatgctgttgtgcttggagatgatcactcatataacatgtcatttttttggttctgttttggtttggtttttgccaattattttgttatatttccaaaaaactaaataaaaatcatttttattt

SEQ ID NO: 435616 - DNA, 1516 bp, Homo sapiens
agataatactgtcggaaaggctccaagaggtgagcaagtgggaactcatctagatcaggcatgattgggatcagtacctggtgccatccgatcatcccaaaggcaacttcgttccccaaggatgggtccttcccccgctccccagcaacgacatctgggcaactgctgttaagctgcattagtaaagatgctccaggagtgtggtccagccagcgctctttccagctgtaaatattagcgatggtgccatcttttgctgtagactaaactgcaacttctaaattccatgtggcattcccctaccctgaagttatgctttccttctgtgctctgtgctggccagaggtgcctcttgaatcagattaatgtggtttttcaggaaaggacttaggtgaactgaggtttttaccacaggcagtgaatgaccttggttcaccaaatttgcctctgttttgaggggcttggtccagagtgacttgttaatttactctaacttccttgtgtgttgatgggtaagtacactcaaacactgaatacaggtgtgtgatgggtagatttcacagcccttctactaatagtgagtgtgaaggcaagcttgatgcaaaacctcctgacctttcctacctgaagagccctttgacttctaggaagaaaggtcaaaaatgttatcttcagttgtgttaatcccagttttagtgcagcttaggaggctgctagttaggaagatggcagtggctgtaggctgggttgccagaaaagatggtggcctagtcttattattcagatggagaacttagaaaacctgaagagtacccaaattggattgtattttaatggacaatggctgtattttttccatgttagaaggatcctaatgaaagcacctgttatttttaagtttctaagggtctagttgttcagaatccccaaggatatttccctaacctcactcagtcacattgtaggagccagtgtagctatggaattatcttaggaactcaagcttctaaaactatccatgtagtcaaatctaggggaaaaagcaaataaaaatagtaaaatttggccgggcacagtggctcacgcctgtaatcccaacactttgggaggccgaggcgggccgatcacgaggtcaggagatcaaggccatcctggctaacacggtgaaaccctgtctctactaaaaatacaaaaaaatattagctgggcgtaggtggtgcacacctgtagtcccagctactggggaggctgaggcaggagaatggtgtaaaacccaggaggcagagcttgcagtgagccgagatcgcgccacggcactccagcctgggagacagagcaagactccgtctcaaaaaaaaaaaaagtaaaatttattttttatattcattaataaatgctgttgtgcttggagatgatcactcatataacatgtcatttttttggttctgttttggtttggtttttgccaattattttgttatatttccaaaaaactaaataaaaatcatttttattt

SEQ ID NO: 435617 - DNA, 1434 bp, Homo sapiens
gacagaaggttgaacgactgcccacttatgcactgagccttccggagggacgagtctacaggggtcgcgcgtcgtaacgacgtcacttccgtcggaaggttctcatgaggagccactcagattcctgtcacttctcaaagcatctccgtcgtgaacatggccctgccaccattcttcggccagggtcgcccaggcccaccgcccccgcagccgccgcctcctgctcctttcggctgtccgccaccgccgctgccctccccggctttcccgccgcctctcccccagcggcccggcccttttccgggggcctccgcccccttccttcagcctccgctggctctgcagccccgagcctccgcggaggcctcccgcggcggaggcggcgctggcgccttctacccggtgccaccaccgccgctgcctcctccgccgccccagtgtcggcccttcccggggaccgacgccggcgagcggccgcggccaccgcctcccggcccggggccgccctggagcccgcggtggcctgaggcgccgccgccgccggccgacgtgctcggggatgcggccctccaacgcctgcgcgaccggcagtggctggaggcggtgttcgggaccccgcggcgggcaggctgtccggtgccccagcgcacgcatgccgggcccagccttggcgaagtgcgcgcgcgattgctccgggctctgcgcctggtgcggcggctgcgcggcctgagccaggccctgcgcgaggccgaagccgacggcgcggcctgggtcctgctgtactcccagaccgcgccgctgcgcgcggaactggccgagcggctacagccgttgacccaggctgcctatgtgggcgaggcgcggaggaggctggagagggtccggcgccgccggctgcggcttcgcgagagggcccgggaacgcgaggccgagcgggaggcagaggccgcgcgggcagtggaacgcgagcaggagattgaccgctggagggtgaagtgtgtgcaggaggtggaggagaagaagcgggagcaggaactcaaagcagccgctgatggcgtactatctgaagtgaggaaaaaacaagcagataccaaaagaatggtggacattctacgggctttggagaaattgaggaaactgaggaaagaggctgcagcgaggaaaggggtctgtcctccagcctcagcagatgagacttttacgcatcatcttcagcgactgagaaaactcattaaaaagcgctctgaactgtatgaagctgaagagagagccctcagagttatgctagaaggagaacaagaggaagagaggaaaagagaattagaaaagaaacaaagaaaagaaaaagagaaaattttacttcagaaacgtgaaattgagtccaagttgtttggggatccaggtatgttgctctataaccagtggagaaaatga

SEQ ID NO: 435618 - DNA, 268 bp, Homo sapiens
agtcattttcttgattcctagaaatcaagttctgtaatagattagtatatcagtcatttgaaagctaagtcttagaatatgtagttgctgaacatcttatttggaataaaacagaaataaatagttgttctataatgttcttattaaggcatgattgggatcagtacctggtgccatccgatcatcccaaaggcaacttcgttccccaaggatgggtccttcccccgctccccagcaacgacatctgggcaactgctgttaagctgca

SEQ ID NO: 435619 - DNA, 606 bp, Homo sapiens
atctgaaaataaaaaataaaaaataaaaaaaagccaggcatggtggtgcacacttgtacttgtagctacttgggaagccaaggtgggaggatgggttgagcccaggagtttgaagttgcagtgagctatgatcacaccactgtactccagcctgggtgttagagcgaggccttgtctcaaaaaaaaaaataaataaaatgccattttgtcctgtctgcccagggggtctgtcctccagcctcagcagatgagacttttacgcatcatcttcagcgactgagaaaactcattaaaaagcgctctgaactgtatgaagctgaagagagagccctcagagttatgctagaaggagaacaagaggaagagaggaaaagagaattagaaaagaaacaaagaaaagaaaaagagaaaattttacttcagaaacgtgaaattgagtccaagttgtttggggatccaggtatgttgctctataaccagtggagaaaatgaaaatactagattgacgctcttctcatcacgggtgatctcaagctaagaggtggtaggcaacaaatgacaccttccagatgcaattctgtgtcatagaactcatggatacagata

SEQ ID NO: 435620 - DNA, 2104 bp, Homo sapiens
  misc_feature (916)..(916): n is a, c, g, or t
  misc_feature (1508)..(1508): n is a, c, g, or t
  misc_feature (1533)..(1534): n is a, c, g, or t
  misc_feature (1603)..(1603): n is a, c, g, or t
aggatacagagatcatatacacctctatttacccttcagaggagcatgaccagcaaccactggaagctttatgtctacctgtcaataatagttcgatgatgcgatcagatgtcacttaaatctgtgaaagtagtcgtagagcccactgattaaacctttggctgtgctttgatatgtatgtaaataaattctctaactggcgttggaaaaaccctacaaatgtaaagaatgtggaaaagcttttcaccgatactcaatccttagtacacataagaaaattcatactggggagaaaccccacaaatgtggagaatgcggaaaagcctttaactggtcctcaactcttattacacataagataattcacagtggagaaaaaccctacaaatatgaagaatgtggcaaagcttttaaccagtcctcacaccttatgagacataagaaaattcatagtaaagagaaaccttacaaatgtgaacagtgtggcaaggtctttaagaagtcctcaactcttactgcacataagatcattcatactggagagaaaccttacaaatgtgaggaatgtggcaaaggttttagccaactctcaaaccttactaaacacaagaagattcatactagagagaaaccctacaaacgtgaagaatgtggcatatcttttaaccagttctcacaacttgctatacataagatgattcacacttgaatgaaaccctacaaatgtgaacgatgtggcagttgttttaactagttctcgaactttactatgcataagaaaattcaaactggagagaaactctacaaatgtgaagaatgtggcaaagcttttaaccaagtctcaacacttactatacataagataatttatactggagcaaaaccttggaaattcaaagaatgtggtaaaacttanaatcctcaaaacttcttacacctaaaattcatgcaggagagaaaccccacaaatgtgaaaaatttggtaaattctttaacaagtcttcaaccctttctgcacataatataattcatactggagagaaaccccacaaatatgaagaatgtggtaatgcttttaaccaattctcaaatcttactaaacaaaattaatactgaaaatgttacaaaccagaaaaatgtgaaaatgattttaacaaaaccttcaaatttttctaaacataaaggaaatcatactggtaagaaattataaaaatgtgaagaatgtgacaaagcctttaaatggttgtcacacttgattgtaggtaagataattcatactggcagaaactcccagaagtgtgaagaatatggcaaaactttaattcctataccttattgcacaggaaagcatttatacttcagaaaatgttgtactgatataaagaatgtagaaaagccattaatatgtgcttacatcttattcaacattagagagttagtacttaataaaagcattataaatgcaattactgtcaaaactcagtataaggttttgttttagtgtgtgntttgtttgtttgtttgttttgtttnnttttttttaaatgagactacgtaatactctctcccaggctggagtgcactggtgcaatcttggtttacngtaacctctgccttccaggttcaagcaattctcctgcctgggcctccagaatagctgggactacaggcatgtgccatcacgcccggctaagttttgtattttttagtagagacagggttttactgtgttggccaggctcatctcgaactcctgacttgaaatgatccatacacctctgcctcccaaagtgctggaataacaggtgtgagccactgttcccagccaatataagcctttaaagtaaaaaaagagtttttattttgaagacaaacattagaaacataaagagggttgtagtgcctgccttacttgtatcacagatcttattgtacacattttgtatccgaagcagttgctccaaacttcgttcaacatcagggaatttatatcggagaaaaactacaaatgtaatacatttcaaaaatttttcaaaaactacatcttagaaaacaccaggggatgcatactaaactatatttttccacatgcagtaaatataaa

SEQ ID NO: 435621 - DNA, 1845 bp, Homo sapiens
  misc_feature (22)..(22): n is a, c, g, or t
  misc_feature (58)..(59): n is a, c, g, or t
  misc_feature (657)..(657): n is a, c, g, or t
  misc_feature (1249)..(1249): n is a, c, g, or t
  misc_feature (1274)..(1275): n is a, c, g, or t
  misc_feature (1344)..(1344): n is a, c, g, or t
atctgtgatacaagtaaggcangcactacaaccctctttatgtttctaatgtttgtcnncaaaataaaaactctttttttactttaaaggcttatattggctgggaacagtggagaaaaaccctacaaatatgaagaatgtggcaaagcttttaaccagtcctcacaccttatgagacataagaaaattcatagtaaagagaaaccttacaaatgtgaacagtgtggcaaggtctttaagaagtcctcaactcttactgcacataagatcattcatactggagagaaaccttacaaatgtgaggaatgtggcaaaggttttagccaactctcaaaccttactaaacacaagaagattcatactagagagaaaccctacaaacgtgaagaatgtggcatatcttttaaccagttctcacaacttgctatacataagatgattcacacttgaatgaaaccctacaaatgtgaacgatgtggcagttgttttaactagttctcgaactttactatgcataagaaaattcaaactggagagaaactctacaaatgtgaagaatgtggcaaagcttttaaccaagtctcaacacttactatacataagataatttatactggagcaaaaccttggaaattcaaagaatgtggtaaaacttanaatcctcaaaacttcttacacctaaaattcatgcaggagagaaaccccacaaatgtgaaaaatttggtaaattctttaacaagtcttcaaccctttctgcacataatataattcatactggagagaaaccccacaaatatgaagaatgtggtaatgcttttaaccaattctcaaatcttactaaacaaaattaatactgaaaatgttacaaaccagaaaaatgtgaaaatgattttaacaaaaccttcaaatttttctaaacataaaggaaatcatactggtaagaaattataaaaatgtgaagaatgtgacaaagcctttaaatggttgtcacacttgattgtaggtaagataattcatactggcagaaactcccagaagtgtgaagaatatggcaaaactttaattcctataccttattgcacaggaaagcatttatacttcagaaaatgttgtactgatataaagaatgtagaaaagccattaatatgtgcttacatcttattcaacattagagagttagtacttaataaaagcattataaatgcaattactgtcaaaactcagtataaggttttgttttagtgtgtgntttgtttgtttgtttgttttgtttnnttttttttaaatgagactacgtaatactctctcccaggctggagtgcactggtgcaatcttggtttacngtaacctctgccttccaggttcaagcaattctcctgcctgggcctccagaatagctgggactacaggcatgtgccatcacgcccggctaagttttgtattttttagtagagacagggttttactgtgttggccaggctcatctcgaactcctgacttgaaatgatccatacacctctgcctcccaaagtgctggaataacaggtgtgagccactgttcccagccaatataagcctttaaagtaaaaaaagagtttttattttgaagacaaacattagaaacataaagagggttgtagtgcctgccttacttgtatcacagatcttattgtacacattttgtatccgaagcagttgctccaaacttcgttcaacatcagggaatttatatcggagaaaaactacaaatgtaatacatttcaaaaatttttcaaaaactacatcttagaaaacaccaggggatgcatactaaactatatttttccacatgcagtaaatataaa

SEQ ID NO: 435622 - DNA, 2924 bp, Homo sapiens
  misc_feature (1736)..(1736): n is a, c, g, or t
  misc_feature (2328)..(2328): n is a, c, g, or t
  misc_feature (2353)..(2354): n is a, c, g, or t
  misc_feature (2423)..(2423): n is a, c, g, or t
tactactactaaattcgcgcccgggtcgacggaatatgaagagacatgagatggtggtagccaaacattcagctctgtgttctcgttttgcccaagacctttggctagagcagaacataaaagattctttccaaaaagtgacactgagcagatatggaaaatatggacataagaatttacagttaagaaaaggctgtaaaagtgtggatgagtgtaagggacaccaaggaggttataatggacttaaccaatgtttgaaaattaccacaagcaaaatatttcaatgtaataaatatgtaaaagtcatgcataaattttcaaattcaaatagacacaagataagacatactgaaaataaacatttcagatgtaaagaatgtgacaaatcactttgcatgctttcacgcctaactcaacataaaaaaattcatactagagagaatttctacaaatgtgaagagtgtggaaaaacctttaactggtccacaaacctttctaaacctaagaaaattcatactggagaaaaaccctacaaatgtgaagtatgtggaaaagcctttcaccaatcctcaatccttactaaacataagataattcgtactggagaaaaaccctataaatgtgcacactgtggcaaagcctttaaacagtcctcacaccttactagacataagataattcatactgaagagaaaccctacaaatgtgaacaatgtggcaaggtctttaagcagtccccaacccttactaaacatcagataatttatactggagaggaaccatacaaatgtgaggaatgtggcaaagcttttaacctatcttaacaacttactgaacataagaaaatttacactagagagaaagcctacaaatgtgaagaatgtggcaaagcctttaaccagttttcaacccttattacacataagataattcatagcagagagaaaccccacaaatgtgaagaatgtggcagagcttttaaccagtccgcaaagctcactgaacataagttaattcatactggagaaaaaccctacaaatgtaaagaatgtggaaaagcttttcaccgatactcaatccttagtacacataagaaaattcatactggggagaaaccccacaaatgtggagaatgcggaaaagcctttaactggtcctcaactcttattacacataagataattcacagtggagaaaaaccctacaaatatgaagaatgtggcaaagcttttaaccagtcctcacaccttatgagacataagaaaattcatagtaaagagaaaccttacaaatgtgaacagtgtggcaaggtctttaagaagtcctcaactcttactgcacataagatcattcatactggagagaaaccttacaaatgtgaggaatgtggcaaaggttttagccaactctcaaaccttactaaacacaagaagattcatactagagagaaaccctacaaacgtgaagaatgtggcatatcttttaaccagttctcacaacttgctatacataagatgattcacacttgaatgaaaccctacaaatgtgaacgatgtggcagttgttttaactagttctcgaactttactatgcataagaaaattcaaactggagagaaactctacaaatgtgaagaatgtggcaaagcttttaaccaagtctcaacacttactatacataagataatttatactggagcaaaaccttggaaattcaaagaatgtggtaaaacttanaatcctcaaaacttcttacacctaaaattcatgcaggagagaaaccccacaaatgtgaaaaatttggtaaattctttaacaagtcttcaaccctttctgcacataatataattcatactggagagaaaccccacaaatatgaagaatgtggtaatgcttttaaccaattctcaaatcttactaaacaaaattaatactgaaaatgttacaaaccagaaaaatgtgaaaatgattttaacaaaaccttcaaatttttctaaacataaaggaaatcatactggtaagaaattataaaaatgtgaagaatgtgacaaagcctttaaatggttgtcacacttgattgtaggtaagataattcatactggcagaaactcccagaagtgtgaagaatatggcaaaactttaattcctataccttattgcacaggaaagcatttatacttcagaaaatgttgtactgatataaagaatgtagaaaagccattaatatgtgcttacatcttattcaacattagagagttagtacttaataaaagcattataaatgcaattactgtcaaaactcagtataaggttttgttttagtgtgtgntttgtttgtttgtttgttttgtttnnttttttttaaatgagactacgtaatactctctcccaggctggagtgcactggtgcaatcttggtttacngtaacctctgccttccaggttcaagcaattctcctgcctgggcctccagaatagctgggactacaggcatgtgccatcacgcccggctaagttttgtattttttagtagagacagggttttactgtgttggccaggctcatctcgaactcctgacttgaaatgatccatacacctctgcctcccaaagtgctggaataacaggtgtgagccactgttcccagccaatataagcctttaaagtaaaaaaagagtttttattttgaagacaaacattagaaacataaagagggttgtagtgcctgccttacttgtatcacagatcttattgtacacattttgtatccgaagcagttgctccaaacttcgttcaacatcagggaatttatatcggagaaaaactacaaatgtaatacatttcaaaaatttttcaaaaactacatcttagaaaacaccaggggatgcatactaaactatatttttccacatgcagtaaatataaa

SEQ ID NO: 435623 - DNA, 3031 bp, Homo sapiens
  misc_feature (1843)..(1843): n is a, c, g, or t
  misc_feature (2435)..(2435): n is a, c, g, or t
  misc_feature (2460)..(2461): n is a, c, g, or t
  misc_feature (2530)..(2530): n is a, c, g, or t
ggacatgacgtcttccgggatgcggcggggtctttgtctcgctgcagcgggtgctgcaggtctggccttcacttttctgcgtcctcttactcctagaggcccagcctctgtggcgctgtgatctggttatcgggagattcacagctaagacgccaggatcccccggaagcctagaaatgctctgtgttctcgttttgcccaagacctttggctagagcagaacataaaagattctttccaaaaagtgacactgagcagatatggaaaatatggacataagaatttacagttaagaaaaggctgtaaaagtgtggatgagtgtaagggacaccaaggaggttataatggacttaaccaatgtttgaaaattaccacaagcaaaatatttcaatgtaataaatatgtaaaagtcatgcataaattttcaaattcaaatagacacaagataagacatactgaaaataaacatttcagatgtaaagaatgtgacaaatcactttgcatgctttcacgcctaactcaacataaaaaaattcatactagagagaatttctacaaatgtgaagagtgtggaaaaacctttaactggtccacaaacctttctaaacctaagaaaattcatactggagaaaaaccctacaaatgtgaagtatgtggaaaagcctttcaccaatcctcaatccttactaaacataagataattcgtactggagaaaaaccctataaatgtgcacactgtggcaaagcctttaaacagtcctcacaccttactagacataagataattcatactgaagagaaaccctacaaatgtgaacaatgtggcaaggtctttaagcagtccccaacccttactaaacatcagataatttatactggagaggaaccatacaaatgtgaggaatgtggcaaagcttttaacctatcttaacaacttactgaacataagaaaatttacactagagagaaagcctacaaatgtgaagaatgtggcaaagcctttaaccagttttcaacccttattacacataagataattcatagcagagagaaaccccacaaatgtgaagaatgtggcagagcttttaaccagtccgcaaagctcactgaacataagttaattcatactggagaaaaaccctacaaatgtaaagaatgtggaaaagcttttcaccgatactcaatccttagtacacataagaaaattcatactggggagaaaccccacaaatgtggagaatgcggaaaagcctttaactggtcctcaactcttattacacataagataattcacagtggagaaaaaccctacaaatatgaagaatgtggcaaagcttttaaccagtcctcacaccttatgagacataagaaaattcatagtaaagagaaaccttacaaatgtgaacagtgtggcaaggtctttaagaagtcctcaactcttactgcacataagatcattcatactggagagaaaccttacaaatgtgaggaatgtggcaaaggttttagccaactctcaaaccttactaaacacaagaagattcatactagagagaaaccctacaaacgtgaagaatgtggcatatcttttaaccagttctcacaacttgctatacataagatgattcacacttgaatgaaaccctacaaatgtgaacgatgtggcagttgttttaactagttctcgaactttactatgcataagaaaattcaaactggagagaaactctacaaatgtgaagaatgtggcaaagcttttaaccaagtctcaacacttactatacataagataatttatactggagcaaaaccttggaaattcaaagaatgtggtaaaacttanaatcctcaaaacttcttacacctaaaattcatgcaggagagaaaccccacaaatgtgaaaaatttggtaaattctttaacaagtcttcaaccctttctgcacataatataattcatactggagagaaaccccacaaatatgaagaatgtggtaatgcttttaaccaattctcaaatcttactaaacaaaattaatactgaaaatgttacaaaccagaaaaatgtgaaaatgattttaacaaaaccttcaaatttttctaaacataaaggaaatcatactggtaagaaattataaaaatgtgaagaatgtgacaaagcctttaaatggttgtcacacttgattgtaggtaagataattcatactggcagaaactcccagaagtgtgaagaatatggcaaaactttaattcctataccttattgcacaggaaagcatttatacttcagaaaatgttgtactgatataaagaatgtagaaaagccattaatatgtgcttacatcttattcaacattagagagttagtacttaataaaagcattataaatgcaattactgtcaaaactcagtataaggttttgttttagtgtgtgntttgtttgtttgtttgttttgtttnnttttttttaaatgagactacgtaatactctctcccaggctggagtgcactggtgcaatcttggtttacngtaacctctgccttccaggttcaagcaattctcctgcctgggcctccagaatagctgggactacaggcatgtgccatcacgcccggctaagttttgtattttttagtagagacagggttttactgtgttggccaggctcatctcgaactcctgacttgaaatgatccatacacctctgcctcccaaagtgctggaataacaggtgtgagccactgttcccagccaatataagcctttaaagtaaaaaaagagtttttattttgaagacaaacattagaaacataaagagggttgtagtgcctgccttacttgtatcacagatcttattgtacacattttgtatccgaagcagttgctccaaacttcgttcaacatcagggaatttatatcggagaaaaactacaaatgtaatacatttcaaaaatttttcaaaaactacatcttagaaaacaccaggggatgcatactaaactatatttttccacatgcagtaaatataaa

SEQ ID NO: 435624 - DNA, 156 bp, Homo sapiens
gaccttaggcgatctgcccacctcggcctcccgaagtgctgggattacaggcctgagccaccgagcccagcctcagcaccatttttaaaaggtgcaaatgcatctatttctgcttgctttctttattttttaaattatttatttatttattttgag

SEQ ID NO: 435625 - DNA, 612 bp, Homo sapiens
gaaaaagaggtggagagaggagcctgcaacagaagggagaatgaaagggaaggaagagagaaaggaagggattttggtgttctgttcactgctgtatccccagaacttaaaacagagcctggtgcataataggtgtaaataactgttgaataaatgaatcaatgctacatacacacacgcacgcacacacacacagagagagagtcaaccacactcttcagaaggtggataagttaaaacaagagtttcaaacaaatatatgttcagatgccctttcctcccacttactggctggctggccttaagtaagcaacttaacctttctgttctttctgctttcttatctgcaacgagtagcatgccatagctagagtaacacggcatatagttggtcctgataaatgtagcatattttagccaccataggagtacacataataaaagctaacatgtagtatgtgcttagcttatctatgttttgtggatgtgatacaattttctgttcacttttaaatgccctgcatcttagtcaattttaacagtgattctgtaagttagataaggttaggcattattattaaatccattttacaccaagagaaacttgggtca

SEQ ID NO: 435626 - DNA, 3247 bp, Homo sapiens
aaagcagtgcactccgtgaaggcaaagagaacacgctgcaaaaggctttccaagaatcctcgacatggcaaggaggagctcgttccagtcgtgtcagataatatccctgttcacttttgccgttggagtcaatatctgcttaggattcactgcacatcgaattaagagagcagaaggatgggaggaaggtcctcctacagtgctatcagactccccctggaccaacatctccggatcttgcaagggcaggtgctttgaacttcaagaggctggacctcctgattgtcgctgtgacaacttgtgtaagagctataccagttgctgccatgactttgatgagctgtgtttgaagacagcccgtggctgggagtgtactaaggacagatgtggagaagtcagaaatgaagaaaatgcctgtcactgctcagaggactgcttggccaggggagactgctgtaccaattaccaagtggtttgcaaaggagagtcgcattgggttgatgatgactgtgaggaaataaaggccgcagaatgccctgcagggtttgttcgccctccattaatcatcttctccgtggatggcttccgtgcatcatacatgaagaaaggcagcaaagtcatgcctaatattgaaaaactaaggtcttgtggcacacactctccctacatgaggccggtgtacccaactaaaacctttcctaacttatacactttggccactgggctatatccagaatcacatggaattgttggcaattcaatgtatgatcctgtatttgatgccacttttcatctgcgagggcgagagaaatttaatcatagatggtggggaggtcaaccgctatggattacagccaccaagcaaggggtgaaagctggaacattcttttggtctgttgtcatccctcacgagcggagaatattaaccatattgcagtggctcaccctgccagatcatgagaggccttcggtctatgccttctattctgagcaacctgatttctctggacacaaatatggccctttcggccctgaggagagtagttatggctcaccttttactccggctaagagacctaagaggaaagttgcccctaagaggagacaggaaagaccagttgctcctccaaagaaaagaagaagaaaaatacataggatggatcattatgctgcggaaactcgtcaggacaaaatgacaaatcctctgagggaaatcgacaaaattgtggggcaattaatggatggactgaaacaactaaaactgcatcggtgtgtcaacgtcatctttgtcggagaccatggaatggaagatgtcacatgtgatagaactgagttcttgagtaattacctaactaatgtggatgatattactttagtgcctggaactctaggaagaattcgatccaaatttagcaacaatgctaaatatgaccccaaagccattattgccaatctcacgtgtaaaaaaccagatcagcactttaagccttacttgaaacagcaccttcccaaacgtttgcactatgccaacaacagaagaattgaggatatccatttattggtggaacgcagatggcatgttgcaaggaaacctttggatgtttataagaaaccatcaggaaaatgctttttccagggagaccacggatttgataacaaggtcaacagcatgcagactgtttttgtaggttatggcccaacatttaagtacaagactaaagtgcctccatttgaaaacattgaactttacaatgttatgtgtgatctcctgggattgaagccagctcctaataatgggacccatggaagtttgaatcatctcctgcgcactaataccttcaggccaaccatgccagaggaagttaccagacccaattatccagggattatgtaccttcagtctgattttgacctgggctgcacttgtgatgataaggtagagccaaagaacaagttggatgaactcaacaaacggcttcatacaaaagggtctacagaagagagacacctcctctatgggcgacctgcagtgctttatcggactagatatgatatcttatatcacactgactttgaaagtggttatagtgaaatattcctaatgccactctggacatcatatactgtttccaaacaggctgaggtttccagcgttcctgaccatctgaccagttgcgtccggcctgatgtccgtgtttctccgagtttcagtcagaactgtttggcctacaaaaatgataagcagatgtcctacggattcctctttcctccttatctgagctcttcaccagaggctaaatatgatgcattccttgtaaccaatatggttccaatgtatcctgctttcaaacgggtctggaattatttccaaagggtattggtgaagaaatatgcttcggaaagaaatggagttaacgtgataagtggaccaatcttcgactatgactatgatggcttacatgacacagaagacaaaataaaacagtacgtggaaggcagttccattcctgttccaactcactactacagcatcatcaccagctgtctggatttcactcagcctgccgacaagtgtgacggccctctctctgtgtcctccttcatcctgcctcaccggcctgacaacgaggagagctgcaatagctcagaggacgaatcaaaatgggtagaagaactcatgaagatgcacacagctagggtgcgtgacattgaacatctcaccagcctggacttcttccgaaagaccagccgcagctacccagaaatcctgacactcaagacatacctgcatacatatgagagcgagatttaactttctgagcatctgcagtacagtcttatcaactggttgtatatttttatattgtttttgtatttattaatttgaaaccaggacattaaaaatgttagtattttaatcctgtaccaaatctgacatattatgcctgaatgactccactgtttttctctaatgcttgatttaggtagccttgtgttctgagtagagcttgtaataaatactgcagcttgagtttttagtggaagcttctaaatggtgctgcagatttgatatttgcattgaggaaatattaattttccaatgcacagttgccacatttagtcctgtactgtatggaaacactgattttgtaaagttgcctttatttgctgttaactgttaactatgacagatatatttaagccttataaaccaatcttaaacataataaatcacacattcagtttt

SEQ ID NO: 435627 - DNA, 1000 bp, Homo sapiens
tgggaatgtggatggcggcgctggacgccccgtcttcagcctcccgacactttccttccccaaagccattttagtcaaaggtcatgtgtgtgtcttgtcaaaggccagcttccaatggaatcattgtcccccgggacagcggccccctgactacatctgcactggagaaatcccaaaagcaaacggccagtgcaaacaagagcagtccgcagcagccgtcccgagcacagctcccaggtcgcggggctgcagcccaggccgcgtccgcagcgcccgggcaggaacagacgccgagactcccgcagcatgacccgccacgccgatcggataatatccctgttcacttttgccgttggagtcaatatctgcttaggattcactgcacatcgaattaagagagcagaaggatgggaggaaggtcctcctacagtgctatcagactccccctggaccaacatctccggatcttgcaagggcaggtgctttgaacttcaagaggctggacctcctgattgtcgctgtgacaacttgtgtaagagctataccagttgctgccatgactttgatgagctgtgtttgaagacagcccgtggctgggagtgtactaaggacagatgtggagaagtcagaaatgaagaaaatgcctgtcactgctcagaggactggagagtcgcattgggttgatgatgactgtgaggaaataaaggccgcagaatgccctgcagggtttgttcgccctccattaatcatcttctccgtggatggcttccgtgcatcatacatgaagaaaggcagcaaagtcatgcctaatattgaaaaactaaggtcttgtggcacacactctccctacatgaggccggtgtacccaactaaaacctttcctaacttatacactttggccactgggctatatcccggaatcacatggcattgttgggcaattcaagtttgatcctgggatttgaatgcccactttcatcctgggaaggcgaaaagaaat

SEQ ID NO: 435628 - DNA, 3091 bp, Homo sapiens
aaagcagtgcactccgtgaaggcaaagagaacacgctgcaaaaggctttccaagaatcctcgacatggcaaggaggagctcgttccagtcgtgtcagataatatccctgttcacttttgccgttggagtcaatatctgcttaggattcactgcacatcgaattaagagagcagaaggatgggaggaaggtcctcctacagtgctatcagactccccctggaccaacatctccggatcttgcaagggcaggtgctttgaacttcaagaggctggacctcctgattgtcgctgtgacaacttgtgtaagagctataccagttgctgccatgactttgatgagctgtgtttgaagacagcccgtggctgggagtgtactaaggacagatgtggagaagtcagaaatgaagaaaatgcctgtcactgctcagaggactgcttggccaggggagactgctgtaccaattaccaagtggtttgcaaaggagagtcgcattgggttgatgatgactgtgaggaaataaaggccgcagaatgccctgcagggtttgttcgccctccattaatcatcttctccgtggatggcttccgtgcatcatacatgaagaaaggcagcaaagtcatgcctaatattgaaaaactaaggtcttgtggcacacactctccctacatgaggccggtgtacccaactaaaacctttcctaacttatacactttggccactgggctatatccagaatcacatggaattgttggcaattcaatgtatgatcctgtatttgatgccacttttcatctgcgagggcgagagaaatttaatcatagatggtggggaggtcaaccgctatggattacagccaccaagcaaggggtgaaagctggaacattcttttggtctgttgtcatccctcacgagcggagaatattaaccatattgcagtggctcaccctgccagatcatgagaggccttcggtctatgccttctattctgagcaacctgatttctctggacacaaatatggccctttcggccctgagatgacaaatcctctgagggaaatcgacaaaattgtggggcaattaatggatggactgaaacaactaaaactgcatcggtgtgtcaacgtcatctttgtcggagaccatggaatggaagatgtcacatgtgatagaactgagttcttgagtaattacctaactaatgtggatgatattactttagtgcctggaactctaggaagaattcgatccaaatttagcaacaatgctaaatatgaccccaaagccattattgccaatctcacgtgtaaaaaaccagatcagcactttaagccttacttgaaacagcaccttcccaaacgtttgcactatgccaacaacagaagaattgaggatatccatttattggtggaacgcagatggcatgttgcaaggaaacctttggatgtttataagaaaccatcaggaaaatgctttttccagggagaccacggatttgataacaaggtcaacagcatgcagactgtttttgtaggttatggcccaacatttaagtacaagactaaagtgcctccatttgaaaacattgaactttacaatgttatgtgtgatctcctgggattgaagccagctcctaataatgggacccatggaagtttgaatcatctcctgcgcactaataccttcaggccaaccatgccagaggaagttaccagacccaattatccagggattatgtaccttcagtctgattttgacctgggctgcacttgtgatgataaggtagagccaaagaacaagttggatgaactcaacaaacggcttcatacaaaagggtctacagaagagagacacctcctctatgggcgacctgcagtgctttatcggactagatatgatatcttatatcacactgactttgaaagtggttatagtgaaatattcctaatgccactctggacatcatatactgtttccaaacaggctgaggtttccagcgttcctgaccatctgaccagttgcgtccggcctgatgtccgtgtttctccgagtttcagtcagaactgtttggcctacaaaaatgataagcagatgtcctacggattcctctttcctccttatctgagctcttcaccagaggctaaatatgatgcattccttgtaaccaatatggttccaatgtatcctgctttcaaacgggtctggaattatttccaaagggtattggtgaagaaatatgcttcggaaagaaatggagttaacgtgataagtggaccaatcttcgactatgactatgatggcttacatgacacagaagacaaaataaaacagtacgtggaaggcagttccattcctgttccaactcactactacagcatcatcaccagctgtctggatttcactcagcctgccgacaagtgtgacggccctctctctgtgtcctccttcatcctgcctcaccggcctgacaacgaggagagctgcaatagctcagaggacgaatcaaaatgggtagaagaactcatgaagatgcacacagctagggtgcgtgacattgaacatctcaccagcctggacttcttccgaaagaccagccgcagctacccagaaatcctgacactcaagacatacctgcatacatatgagagcgagatttaactttctgagcatctgcagtacagtcttatcaactggttgtatatttttatattgtttttgtatttattaatttgaaaccaggacattaaaaatgttagtattttaatcctgtaccaaatctgacatattatgcctgaatgactccactgtttttctctaatgcttgatttaggtagccttgtgttctgagtagagcttgtaataaatactgcagcttgagtttttagtggaagcttctaaatggtgctgcagatttgatatttgcattgaggaaatattaattttccaatgcacagttgccacatttagtcctgtactgtatggaaacactgattttgtaaagttgcctttatttgctgttaactgttaactatgacagatatatttaagccttataaaccaatcttaaacataataaatcacacattcagtttt

SEQ ID NO: 435629 - DNA, 3396 bp, Homo sapiens
aaagcagtgcactccgtgaaggcaaagagaacacgctgcaaaaggctttccaagaatcctcgacatggcaaggaggagctcgttccagtcgtgtcagataatatccctgttcacttttgccgttggagtcaatatctgcttaggattcactgcacatcgaattaagagagcagaaggatgggaggaaggtcctcctacagtgctatcagactccccctggaccaacatctccggatcttgcaagggcaggtgctttgaacttcaagaggctggacctcctgattgtcgctgtgacaacttgtgtaagagctataccagttgctgccatgactttgatgagctgtgtttgaagacagcccgtggctgggagtgtactaaggacagatgtggagaagtcagaaatgaagaaaatgcctgtcactgctcagaggactgcttggccaggggagactgctgtaccaattaccaagtggtttgcaaaggagagtcgcattgggttgatgatgactgtgaggaaataaaggccgcagaatgccctgcagggtttgttcgccctccattaatcatcttctccgtggatggcttccgtgcatcatacatgaagaaaggcagcaaagtcatgcctaatattgaaaaactaaggtcttgtggcacacactctccctacatgaggccggtgtacccaactaaaacctttcctaacttatacactttggccactgggctatatccagaatcacatggaattgttggcaattcaatgtatgatcctgtatttgatgccacttttcatctgcgagggcgagagaaatttaatcatagatggtggggaggtcaaccgctatggattacagccaccaagcaaggggtgaaagctggaacattcttttggtctgttgtcatccctcacgagcggagaatattaaccatattgcagtggctcaccctgccagatcatgagaggccttcggtctatgccttctattctgagcaacctgatttctctggacacaaatatggccctttcggccctgagatgacaaatcctctgagggaaatcgacaaaattgtggggcaattaatggatggactgaaacaactaaaactgcatcggtgtgtcaacgtcatctttgtcggagaccatggaatggaagatgtcacatgtgatagaactgagttcttgagtaattacctaactaatgtggatgatattactttagtgcctggaactctaggaagaattcgatccaaatttagcaacaatgctaaatatgaccccaaagccattattgccaatctcacgtgtaaaaaaccagatcagcactttaagccttacttgaaacagcaccttcccaaacgtttgcactatgccaacaacagaagaattgaggatatccatttattggtggaacgcagatggcatgttgcaaggaaacctttggatgtttataagaaaccatcaggaaaatgctttttccagggagaccacggatttgataacaaggtcaacagcatgcagactgtttttgtaggttatggcccaacatttaagtacaagactaaagtgcctccatttgaaaacattgaactttacaatgttatgtgtgatctcctgggattgaagccagctcctaataatgggacccatggaagtttgaatcatctcctgcgcactaataccttcaggccaaccatgccagaggaagttaccagacccaattatccagggattatgtaccttcagtctgattttgacctgggctgcacttgtgatgataaggtagagccaaagaacaagttggatgaactcaacaaacggcttcatacaaaagggtctacagaagagagacacctcctctatgggcgacctgcagtgctttatcggactagatatgatatcttatatcacactgactttgaaagtggttatagtgaaatattcctaatgccactctggacatcatatactgtttccaaacaggctgaggtttccagcgttcctgaccatctgaccagttgcgtccggcctgatgtccgtgtttctccgagtttcagtcagaactgtttggcctacaaaaatgataagcagatgtcctacggattcctctttcctccttatctgagctcttcaccagaggctaaatatgatgcattccttgtaaccaatatggttccaatgtatcctgctttcaaacgggtctggaattatttccaaagggtattggtgaagaaatatgcttcggaaagaaatggagttaacgtgataagtggaccaatcttcgactatgactatgatggcttacatgacacagaagacaaaataaaacagtacgtggaaggcagttccattcctgttccaactcactactacagcatcatcaccagctgtctggatttcactcagcctgccgacaagtgtgacggccctctctctgtgtcctccttcatcctgcctcaccggcctgacaacgaggagagctgcaatagctcagaggacgaatcaaaatgggtagaagaactcatgaagatgcacacagctagggtgcgtgacattgaacatctcaccagcctggacttcttccgaaagaccagccgcagctacccagaaatcctgacactcaagacatacctgcatacatatgagagcgagatttaactttctgagcatctgcagtacagtcttatcaactggttgtatatttttatattgtttttgtatttattaatttgaaaccaggacattaaaaatgttagtattttaatcctgtaccaaatctgacatattatgcctgaatgactccactgtttttctctaatgcttgatttaggtagccttgtgttctgagtagagcttgtaataaatactgcagcttgagtttttagtggaagcttctaaatggtgctgcagatttgatatttgcattgaggaaatattaattttccaatgcacagttgccacatttagtcctgtactgtatggaaacactgattttgtaaagttgcctttatttgctgttaactgttaactatgacagatatatttaagccttataaaccaatcttaaacataataaatcacacattcagttttaaaaaaagaaaaaaacaaaaaaaaaaaaaaaaaaaaaaaacaaaaaaaaaaacaaaaaaaaaatttttgggggcccctctgcgccctagaaaaagctttttaaaaccacctcgctggtgggcggcgacgccgcccactttggttgtaccagcaccggtggccataacggtgtttccccgaagagaactctcggggccaaagaaatacaggtgggtgtgtttctcccccatattatagaaagccccggggggacaccccacgttttttgtgaacacacgcgatggagtcctcacggcacaacaggc

SEQ ID NO: 435630 - DNA, 3037 bp, Homo sapiens
aaagcagtgcactccgtgaaggcaaagagaacacgctgcaaaaggctttccaagaatcctcgacatggcaaggaggagctcgttccagtcgtgtcagataatatccctgttcacttttgccgttggagtcaatatctgcttaggattcactgcacatcgaattaagagagcagaaggatgggaggaaggtcctcctacagtgctatcagactccccctggaccaacatctccggatcttgcaagggcaggtgctttgaacttcaagaggctggacctcctgattgtcgctgtgacaacttgtgtaagagctataccagttgctgccatgactttgatgagctgtgtttgaagacagcccgtggctgggagtgtactaaggacagatgtggagaagtcagaaatgaagaaaatgcctgtcactgctcagaggactgcttggccaggggagactgctgtaccaattaccaagtggtttgcaaaggagagtcgcattgggttgatgatgactgtgaggaaataaaggccgcagaatgccctgcagggtttgttcgccctccattaatcatcttctccgtggatggcttccgtgcatcatacatgaagaaaggcagcaaagtcatgcctaatattgaaaaactaaggtcttgtggcacacactctccctacatgaggccggtgtacccaactaaaacctttcctaacttatacactttggccactgggctatatccagaatcacatggaattgttggcaattcaatgtatgatcctgtatttgatgccacttttcatctgcgagggcgagagaaatttaatcatagatggtggggaggtcaaccgctatggattacagccaccaagcaaggggtgaaagctggaacattcttttggtctgttgtcatccctcacgagcggagaatattaaccatattgcagtggctcaccctgccagatcatgagaggccttcggtctatgccttctattctgagcaacctgatttctctggacacaaatatggccctttcggccctgagatgacaaatcctctgagggaaatcgacaaaattgtggggcaattaatggatggacgaatggaagatgtcacatgtgatagaactgagttcttgagtaattacctaactaatgtggatgatattactttagtgcctggaactctaggaagaattcgatccaaatttagcaacaatgctaaatatgaccccaaagccattattgccaatctcacgtgtaaaaaaccagatcagcactttaagccttacttgaaacagcaccttcccaaacgtttgcactatgccaacaacagaagaattgaggatatccatttattggtggaacgcagatggcatgttgcaaggaaacctttggatgtttataagaaaccatcaggaaaatgctttttccagggagaccacggatttgataacaaggtcaacagcatgcagactgtttttgtaggttatggcccaacatttaagtacaagactaaagtgcctccatttgaaaacattgaactttacaatgttatgtgtgatctcctgggattgaagccagctcctaataatgggacccatggaagtttgaatcatctcctgcgcactaataccttcaggccaaccatgccagaggaagttaccagacccaattatccagggattatgtaccttcagtctgattttgacctgggctgcacttgtgatgataaggtagagccaaagaacaagttggatgaactcaacaaacggcttcatacaaaagggtctacagaagagagacacctcctctatgggcgacctgcagtgctttatcggactagatatgatatcttatatcacactgactttgaaagtggttatagtgaaatattcctaatgccactctggacatcatatactgtttccaaacaggctgaggtttccagcgttcctgaccatctgaccagttgcgtccggcctgatgtccgtgtttctccgagtttcagtcagaactgtttggcctacaaaaatgataagcagatgtcctacggattcctctttcctccttatctgagctcttcaccagaggctaaatatgatgcattccttgtaaccaatatggttccaatgtatcctgctttcaaacgggtctggaattatttccaaagggtattggtgaagaaatatgcttcggaaagaaatggagttaacgtgataagtggaccaatcttcgactatgactatgatggcttacatgacacagaagacaaaataaaacagtacgtggaaggcagttccattcctgttccaactcactactacagcatcatcaccagctgtctggatttcactcagcctgccgacaagtgtgacggccctctctctgtgtcctccttcatcctgcctcaccggcctgacaacgaggagagctgcaatagctcagaggacgaatcaaaatgggtagaagaactcatgaagatgcacacagctagggtgcgtgacattgaacatctcaccagcctggacttcttccgaaagaccagccgcagctacccagaaatcctgacactcaagacatacctgcatacatatgagagcgagatttaactttctgagcatctgcagtacagtcttatcaactggttgtatatttttatattgtttttgtatttattaatttgaaaccaggacattaaaaatgttagtattttaatcctgtaccaaatctgacatattatgcctgaatgactccactgtttttctctaatgcttgatttaggtagccttgtgttctgagtagagcttgtaataaatactgcagcttgagtttttagtggaagcttctaaatggtgctgcagatttgatatttgcattgaggaaatattaattttccaatgcacagttgccacatttagtcctgtactgtatggaaacactgattttgtaaagttgcctttatttgctgttaactgttaactatgacagatatatttaagccttataaaccaatcttaaacataataaatcacacattcagtttt

SEQ ID NO: 435631 - DNA, 3112 bp, Homo sapiens
aaagcagtgcactccgtgaaggcaaagagaacacgctgcaaaaggctttccaagaatcctcgacatggcaaggaggagctcgttccagtcgtgtcagataatatccctgttcacttttgccgttggagtcaatatctgcttaggattcactgcacatcgaattaagagagcagaaggatgggaggaaggtcctcctacagtgctatcagactccccctggaccaacatctccggatcttgcaagggcaggtgctttgaacttcaagaggctggacctcctgattgtcgctgtgacaacttgtgtaagagctataccagttgctgccatgactttgatgagctgtgtttgaagacagcccgtggctgggagtgtactaaggacagatgtggagaagtcagaaatgaagaaaatgcctgtcactgctcagaggactgcttggccaggggagactgctgtaccaattaccaagtggtttgcaaaggagagtcgcattgggttgatgatgactgtgaggaaataaaggccgcagaatgccctgcagggtttgttcgccctccattaatcatcttctccgtggatggcttccgtgcatcatacatgaagaaaggcagcaaagtcatgcctaatattgaaaaactaaggtcttgtggcacacactctccctacatgaggccggtgtacccaactaaaacctttcctaacttatacactttggccactgggctatatccagaatcacatggaattgttggcaattcaatgtatgatcctgtatttgatgccacttttcatctgcgagggcgagagaaatttaatcatagatggtggggaggtcaaccgctatggattacagccaccaagcaaggggtgaaagctggaacattcttttggtctgttgtcatccctcacgagcggagaatattaaccatattgcagtggctcaccctgccagatcatgagaggccttcggtctatgccttctattctgagcaacctgatttctctggacacaaatatggccctttcggccctgagatgacaaatcctctgagggaaatcgacaaaattgtggggcaattaatggatggacgaatggaagatgtcacatgtgatagaactgagttcttgagtaattacctaactaatgtggatgatattactttagtgcctggaactctaggaagaattcgatccaaatttagcaacaatgctaaatatgaccccaaagccattattgccaatctcacgtgtaaaaaaccagatcagcactttaagccttacttgaaacagcaccttcccaaacgtttgcactatgccaacaacagaagaattgaggatatccatttattggtggaacgcagatggcatgttgcaaggaaacctttggatgtttataagaaaccatcaggaaaatgctttttccagggagaccacggatttgataacaaggtcaacagcatgcagactgtttttgtaggttatggcccaacatttaagtacaagactaaagtgcctccatttgaaaacattgaactttacaatgttatgtgtgatctcctgggattgaagccagctcctaataatgggacccatggaagtttgaatcatctcctgcgcactaataccttcaggccaaccatgccagaggaagttaccagacccaattatccagggattatgtaccttcagtctgattttgacctgggctgcacttgtgatgataaggtagagccaaagaacaagttggatgaactcaacaaacggcttcatacaaaagggtctacagaagctgaaaccaggaaattcagaggcagcagaaatgaaaacaaggaaaacattaatggaaattttgaacctagaaaagagagacacctcctctatgggcgacctgcagtgctttatcggactagatatgatatcttatatcacactgactttgaaagtggttatagtgaaatattcctaatgccactctggacatcatatactgtttccaaacaggctgaggtttccagcgttcctgaccatctgaccagttgcgtccggcctgatgtccgtgtttctccgagtttcagtcagaactgtttggcctacaaaaatgataagcagatgtcctacggattcctctttcctccttatctgagctcttcaccagaggctaaatatgatgcattccttgtaaccaatatggttccaatgtatcctgctttcaaacgggtctggaattatttccaaagggtattggtgaagaaatatgcttcggaaagaaatggagttaacgtgataagtggaccaatcttcgactatgactatgatggcttacatgacacagaagacaaaataaaacagtacgtggaaggcagttccattcctgttccaactcactactacagcatcatcaccagctgtctggatttcactcagcctgccgacaagtgtgacggccctctctctgtgtcctccttcatcctgcctcaccggcctgacaacgaggagagctgcaatagctcagaggacgaatcaaaatgggtagaagaactcatgaagatgcacacagctagggtgcgtgacattgaacatctcaccagcctggacttcttccgaaagaccagccgcagctacccagaaatcctgacactcaagacatacctgcatacatatgagagcgagatttaactttctgagcatctgcagtacagtcttatcaactggttgtatatttttatattgtttttgtatttattaatttgaaaccaggacattaaaaatgttagtattttaatcctgtaccaaatctgacatattatgcctgaatgactccactgtttttctctaatgcttgatttaggtagccttgtgttctgagtagagcttgtaataaatactgcagcttgagtttttagtggaagcttctaaatggtgctgcagatttgatatttgcattgaggaaatattaattttccaatgcacagttgccacatttagtcctgtactgtatggaaacactgattttgtaaagttgcctttatttgctgttaactgttaactatgacagatatatttaagccttataaaccaatcttaaacataataaatcacacattcagtttt

SEQ ID NO: 435632 - DNA, 3267 bp, Homo sapiens
tgggaatgtggatggcggcgctggacgccccgtcttcagcctcccgacactttccttccccaaagccattttagtcaaaggtcatgtgtgtgtcttgtcaaaggccagcttccaatggaatcattgtcccccgggacagcggccccctgactacatctgcactggagaaatcccaaaagcaaacggccagtgcaaacaagagcagtccgcagcagccgtcccgagcacagctcccaggtcgcggggctgcagcccaggccgcgtccgcagcgcccgggcaggaacagacgccgagactcccgcagcatgacccgccacgccgatcggataatatccctgttcacttttgccgttggagtcaatatctgcttaggattcactgcacatcgaattaagagagcagaaggatgggaggaaggtcctcctacagtgctatcagactccccctggaccaacatctccggatcttgcaagggcaggtgctttgaacttcaagaggctggacctcctgattgtcgctgtgacaacttgtgtaagagctataccagttgctgccatgactttgatgagctgtgtttgaagacagcccgtggctgggagtgtactaaggacagatgtggagaagtcagaaatgaagaaaatgcctgtcactgctcagaggactgcttggccaggggagactgctgtaccaattaccaagtggtttgcaaaggagagtcgcattgggttgatgatgactgtgaggaaataaaggccgcagaatgccctgcagggtttgttcgccctccattaatcatcttctccgtggatggcttccgtgcatcatacatgaagaaaggcagcaaagtcatgcctaatattgaaaaactaaggtcttgtggcacacactctccctacatgaggccggtgtacccaactaaaacctttcctaacttatacactttggccactgggctatatccagaatcacatggaattgttggcaattcaatgtatgatcctgtatttgatgccacttttcatctgcgagggcgagagaaatttaatcatagatggtggggaggtcaaccgctatggattacagccaccaagcaaggggtgaaagctggaacattcttttggtctgttgtcatccctcacgagcggagaatattaaccatattgcagtggctcaccctgccagatcatgagaggccttcggtctatgccttctattctgagcaacctgatttctctggacacaaatatggccctttcggccctgagatgacaaatcctctgagggaaatcgacaaaattgtggggcaattaatggatggacgaatggaagatgtcacatgtgatagaactgagttcttgagtaattacctaactaatgtggatgatattactttagtgcctggaactctaggaagaattcgatccaaatttagcaacaatgctaaatatgaccccaaagccattattgccaatctcacgtgtaaaaaaccagatcagcactttaagccttacttgaaacagcaccttcccaaacgtttgcactatgccaacaacagaagaattgaggatatccatttattggtggaacgcagatggcatgttgcaaggaaacctttggatgtttataagaaaccatcaggaaaatgctttttccagggagaccacggatttgataacaaggtcaacagcatgcagactgtttttgtaggttatggcccaacatttaagtacaagactaaagtgcctccatttgaaaacattgaactttacaatgttatgtgtgatctcctgggattgaagccagctcctaataatgggacccatggaagtttgaatcatctcctgcgcactaataccttcaggccaaccatgccagaggaagttaccagacccaattatccagggattatgtaccttcagtctgattttgacctgggctgcacttgtgatgataaggtagagccaaagaacaagttggatgaactcaacaaacggcttcatacaaaagggtctacagaagagagacacctcctctatgggcgacctgcagtgctttatcggactagatatgatatcttatatcacactgactttgaaagtggttatagtgaaatattcctaatgccactctggacatcatatactgtttccaaacaggctgaggtttccagcgttcctgaccatctgaccagttgcgtccggcctgatgtccgtgtttctccgagtttcagtcagaactgtttggcctacaaaaatgataagcagatgtcctacggattcctctttcctccttatctgagctcttcaccagaggctaaatatgatgcattccttgtaaccaatatggttccaatgtatcctgctttcaaacgggtctggaattatttccaaagggtattggtgaagaaatatgcttcggaaagaaatggagttaacgtgataagtggaccaatcttcgactatgactatgatggcttacatgacacagaagacaaaataaaacagtacgtggaaggcagttccattcctgttccaactcactactacagcatcatcaccagctgtctggatttcactcagcctgccgacaagtgtgacggccctctctctgtgtcctccttcatcctgcctcaccggcctgacaacgaggagagctgcaatagctcagaggacgaatcaaaatgggtagaagaactcatgaagatgcacacagctagggtgcgtgacattgaacatctcaccagcctggacttcttccgaaagaccagccgcagctacccagaaatcctgacactcaagacatacctgcatacatatgagagcgagatttaactttctgagcatctgcagtacagtcttatcaactggttgtatatttttatattgtttttgtatttattaatttgaaaccaggacattaaaaatgttagtattttaatcctgtaccaaatctgacatattatgcctgaatgactccactgtttttctctaatgcttgatttaggtagccttgtgttctgagtagagcttgtaataaatactgcagcttgagtttttagtggaagcttctaaatggtgctgcagatttgatatttgcattgaggaaatattaattttccaatgcacagttgccacatttagtcctgtactgtatggaaacactgattttgtaaagttgcctttatttgctgttaactgttaactatgacagatatatttaagccttataaaccaatcttaaacataataaatcacacattcagtttt

SEQ ID NO: 435633 - DNA, 1733 bp, Homo sapiens
cccccaagcttggcacgcgggcaagaattgaggatatccatttattggtggaacgcagatggcatgttgcaaggaaacctttggatgtttataagaaaccatcaggaaaatgctttttccagggagaccacggatttgataacaaggtcaacagcatgcagactgtttttgtaggttatggcccaacatttaagtacaagactaaagtgcctccatttgaaaacattgaactttacaatgttatgtgtgatctcctgggattgaagccagctcctaataatgggacccatggaagtttgaatcatctcctgcgcactaataccttcaggccaaccatgccagaggaagttaccagacccaattatccagggattatgtaccttcagtctgattttgacctgggctgcacttgtgatgataaggtagagccaaagaacaagttggatgaactcaacaaacggcttcatacaaaagggtctacagaagagagacacctcctctatgggcgacctgcagtgctttatcggactagatatgatatcttatatcacactgactttgaaagtggttatagtgaaatattcctaatgccactctggacatcatatactgtttccaaacaggctgaggtttccagcgttcctgaccatctgaccagttgcgtccggcctgatgtccgtgtttctccgagtttcagtcagaactgtttggcctacaaaaatgataagcagatgtcctacggattcctctttcctccttatctgagctcttcaccagaggctaaatatgatgcattccttgtaaccaatatggttccaatgtatcctgctttcaaacgggtctggaattatttccaaagggtattggtgaagaaatatgcttcggaaagaaatggagttaacgtgataagtggaccaatcttcgactatgactatgatggcttacatgacacagaagacaaaataaaacagtacgtggaaggcagttccattcctgttccaactcactactacagcatcatcaccagctgtctggatttcactcagcctgccgacaagtgtgacggccctctctctgtgtcctccttcatcctgcctcaccggcctgacaacgaggagagctgcaatagctcagaggacgaatcaaaatgggtagaagaactcatgaagatgcacacagctagggtgcgtgacattgaacatctcaccagcctggacttcttccgaaagaccagccgcagctacccagaaatcctgacactcaagacatacctgcatacatatgagagcgagatttaactttctgagcatctgcagtacagtcttatcaactggttgtatatttttatattgtttttgtatttattaatttgaaaccaggacattaaaaatgttagtattttaatcctgtaccaaatctgacatattatgcctgaatgactccactgtttttctctaatgcttgatttaggtagccttgtgttctgagtagagcttgtaataaatactgcagcttgagtttttagtggaagcttctaaatggtgctgcagatttgatatttgcattgaggaaatattaattttccaatgcacagttgccacatttagtcctgtactgtatggaaacactgattttgtaaagttgcctttatttgctgttaactgttaactatgacagatatatttaagccttataaaccaatcttaaacataataaatcacacattcagtttt

SEQ ID NO: 435634 - DNA, 2022 bp, Homo sapiens
gaggaattccctccagaagagcagaactggacctaggagggcagtttactataggatttgttccacttgcttagctgcatgtcaatgactgaaatgttaaatacccctacacaattatttatctttcaaacaaaacactaaagtgatagtcttctgtgggatggaaggagaaagaattgagtatcttgctgcaaaaatgatttctcttggtaatggttgttatttcttttgaaatctttctcctctctttgaacagatgaccccaaagccattattgccaatctcacgtgtaaaaaaccagatcagcactttaagccttacttgaaacagcaccttcccaaacgtttgcactatgccaacaacagaagaattgaggatatccatttattggtggaacgcagatggcatgttgcaaggaaacctttggatgtttataagaaaccatcaggaactgtttttgtaggttatggcccaacatttaagtacaagactaaagtgcctccatttgaaaacattgaactttacaatgttatgtgtgatctcctgggattgaagccagctcctaataatgggacccatggaagtttgaatcatctcctgcgcactaataccttcaggccaaccatgccagaggaagttaccagacccaattatccagggattatgtaccttcagtctgattttgacctgggctgcacttgtgatgataaggtagagccaaagaacaagttggatgaactcaacaaacggcttcatacaaaagggtctacagaagagagacacctcctctatgggcgacctgcagtgctttatcggactagatatgatatcttatatcacactgactttgaaagtggttatagtgaaatattcctaatgccactctggacatcatatactgtttccaaacaggctgaggtttccagcgttcctgaccatctgaccagttgcgtccggcctgatgtccgtgtttctccgagtttcagtcagaactgtttggcctacaaaaatgataagcagatgtcctacggattcctctttcctccttatctgagctcttcaccagaggctaaatatgatgcattccttgtaaccaatatggttccaatgtatcctgctttcaaacgggtctggaattatttccaaagggtattggtgaagaaatatgcttcggaaagaaatggagttaacgtgataagtggaccaatcttcgactatgactatgatggcttacatgacacagaagacaaaataaaacagtacgtggaaggcagttccattcctgttccaactcactactacagcatcatcaccagctgtctggatttcactcagcctgccgacaagtgtgacggccctctctctgtgtcctccttcatcctgcctcaccggcctgacaacgaggagagctgcaatagctcagaggacgaatcaaaatgggtagaagaactcatgaagatgcacacagctagggtgcgtgacattgaacatctcaccagcctggacttcttccgaaagaccagccgcagctacccagaaatcctgacactcaagacatacctgcatacatatgagagcgagatttaactttctgagcatctgcagtacagtcttatcaactggttgtatatttttatattgtttttgtatttattaatttgaaaccaggacattaaaaatgttagtattttaatcctgtaccaaatctgacatattatgcctgaatgactccactgtttttctctaatgcttgatttaggtagccttgtgttctgagtagagcttgtaataaatactgcagcttgagtttttagtggaagcttctaaatggtgctgcagatttgatatttgcattgaggaaatattaattttccaatgcacagttgccacatttagtcctgtactgtatggaaacactgattttgtaaagttgcctttatttgctgttaactgttaactatgacagatatatttaagccttataaaccaatcttaaacataataaatcacacattcagtttt

SEQ ID NO: 435635 - DNA, 1445 bp, Homo sapiens
atgtgatgagctcggtaccgccaagcactcttttcttcaggccaaccatgccagaggaagttaccagacccaattatccagggattatgtaccttcagtctgattttgacctgggctgcacttgtgatgataaggtagagccaaagaacaagttggatgaactcaacaaacggcttcatacaaaagggtctacagaagagagacacctcctctatgggcgacctgcagtgctttatcggactagatatgatatcttatatcacactgactttgaaagtggttatagtgaaatattcctaatgccactctggacatcatatactgtttccaaacaggctgaggtttccagcgttcctgaccatctgaccagttgcgtccggcctgatgtccgtgtttctccgagtttcagtcagaactgtttggcctacaaaaatgataagcagatgtcctacggattcctctttcctccttatctgagctcttcaccagaggctaaatatgatgcattccttgtaaccaatatggttccaatgtatcctgctttcaaacgggtctggaattatttccaaagggtattggtgaagaaatatgcttcggaaagaaatggagttaacgtgataagtggaccaatcttcgactatgactatgatggcttacatgacacagaagacaaaataaaacagtacgtggaaggcagttccattcctgttccaactcactactacagcatcatcaccagctgtctggatttcactcagcctgccgacaagtgtgacggccctctctctgtgtcctccttcatcctgcctcaccggcctgacaacgaggagagctgcaatagctcagaggacgaatcaaaatgggtagaagaactcatgaagatgcacacagctagggtgcgtgacattgaacatctcaccagcctggacttcttccgaaagaccagccgcagctacccagaaatcctgacactcaagacatacctgcatacatatgagagcgagatttaactttctgagcatctgcagtacagtcttatcaactggttgtatatttttatattgtttttgtatttattaatttgaaaccaggacattaaaaatgttagtattttaatcctgtaccaaatctgacatattatgcctgaatgactccactgtttttctctaatgcttgatttaggtagccttgtgttctgagtagagcttgtaataaatactgcagcttgagtttttagtggaagcttctaaatggtgctgcagatttgatatttgcattgaggaaatattaattttccaatgcacagttgccacatttagtcctgtactgtatggaaacactgattttgtaaagttgcctttatttgctgttaactgttaactatgacagatatatttaagccttataaaccaatcttaaacataataaatcacacattcagtttt

SEQ ID NO: 435636 - DNA, 3038 bp, Homo sapiens
aaagcagtgcactccgtgaaggcaaagagaacacgctgcaaaaggctttccaagaatcctcgacatggcaaggaggagctcgttccagtcgtgtcagataatatccctgttcacttttgccgttggagtcaatatctgcttaggattcactgcacatcgaattaagagagcagaaggatgggaggaaggtcctcctacagtgctatcagactccccctggaccaacatctccggatcttgcaagggcaggtgctttgaacttcaagaggctggacctcctgattgtcgctgtgacaacttgtgtaagagctataccagttgctgccatgactttgatgagctgtgtttgaagacagcccgtggctgggagtgtactaaggacagatgtggagaagtcagaaatgaagaaaatgcctgtcactgctcagaggactgcttggccaggggagactgctgtaccaattaccaagtggtttgcaaaggagagtcgcattgggttgatgatgactgtgaggaaataaaggccgcagaatgccctgcagggtttgttcgccctccattaatcatcttctccgtggatggcttccgtgcatcatacatgaagaaaggcagcaaagtcatgcctaatattgaaaaactaaggtcttgtggcacacactctccctacatgaggccggtgtacccaactaaaacctttcctaacttatacactttggccactgggctatatccagaatcacatggaattgttggcaattcaatgtatgatcctgtatttgatgccacttttcatctgcgagggcgagagaaatttaatcatagatggtggggaggtcaaccgctatggattacagccaccaagcaaggggtgaaagctggaacattcttttggtctgttgtcatccctcacgagcggagaatattaaccatattgcagtggctcaccctgccagatcatgagaggccttcggtctatgccttctattctgagcaacctgatttctctggacacaaatatggccctttcggccctgagatgacaaatcctctgagggaaatcgacaaaattgtggggcaattaatggatggactgaaacaactaaaactgcatcggtgtgtcaacgtcatctttgtcggagaccatggaatggaagatgtcacatgtgatagaactgagttcttgagtaattacctaactaatgtggatgatattactttagtgcctggaactctaggaagaattcgatccaaatttagcaacaatgctaaatatgaccccaaagccattattgccaatctcacgtgtaaaaaaccagatcagcactttaagccttacttgaaacagcaccttcccaaacgtttgcactatgccaacaacagaagaattgaggatatccatttattggtggaacgcagatggcatgttgcaaggaaacctttggatgtttataagaaaccatcaggaaaatgctttttccagggagaccacggatttgataacaaggtcaacagcatgcagactgtttttgtaggttatggcccaacatttaagtacaagactaaagtgcctccatttgaaaacattgaactttacaatgttatgtgtgatctcctgggattgaagccagctcctaataatgggacccatggaagtttgaatcatctcctgcgcactaataccttcaggccaaccatgccagaggaagttaccagacccaattatccagggattatgtaccttcagtctgattttgacctgggctgcacttgtgatgataaggtagagccaaagaacaagttggatgaactcaacaaacggcttcatacaaaagggtctacagaagagagacacctcctctatgggcgacctgcagtgctttatcggactagatatgatatcttatatcacactgactttgaaagtggttatagtgaaatattcctaatgccactctggacatcatatactgtttccaaacaggctgaggtttccagcgttcctgaccatctgaccagttgcgtccggcctgatgtccgtgtttctccgagtttcagtcagaactgtttggcctacaaaaatgataagcagatgtcctacggattcctctttcctccttatctgagctcttcaccagaggctaaatatgatgcattccttgtaaccaatatggttccaatgtatcctgctttcaaacgggtctggaattatttccaaagggtattggtgaagaaatatgcttcggaaagaaatggagttaacgtgataagtggaccaatcttcgactatgactatgatggcttacatgacacagaagacaaaataaaacagtacgtggaaggcagttccattcctgttccaactcactactacagcatcatcaccagctgtctggatttcactcagcctgccgacaagtgtgacggccctctctctgtgtcctccttcatcctgcctcaccggcctgacaacgaggagagctgcaatagctcagaggacgaatcaaaatgggtagaagaactcatgaagatgcacacagctagggtgcgtgacattgaacatctcaccagcctggacttcttccgaaagaccagccgcagctacccagaaatcctgacactcaagacatacctgcatacatatgagagcgagatttaactttctgagcatctgcagtacagtcttatcaactggttgtatatttttatattgtttttgtatttattaatttgaaaccaggacattactccactgtttttctctaatgcttgatttaggtagccttgtgttctgagtagagcttgtaataaatactgcagcttgagtttttagtggaagcttctaaatggtgctgcagatttgatatttgcattgaggaaatattaattttccaatgcacagttgccacatttagtcctgtactgtatggaaacactgattttgtaaagttgcctttatttgctgttaactgttaactatgacagatatatttaagccttataaaccaatcttaaacataataaatcacacattcagtttt

SEQ ID NO: 435637 - DNA, 2763 bp, Homo sapiens
aaagcagtgcactccgtgaaggcaaagagaacacgctgcaaaaggctttccaagaatcctcgacatggcaaggaggagctcgttccagtcgtgtcagataatatccctgttcacttttgccgttggagtcaatatctgcttaggattcactgcacatcgaattaagagagcagaaggatgggaggaaggtcctcctacagtgctatcagactccccctggaccaacatctccggatcttgcaagggcaggtgctttgaacttcaagaggctggacctcctgattgtcgctgtgacaacttgtgtaagagctataccagttgctgccatgactttgatgagctgtgtttgaagacagcccgtggctgggagtgtactaaggacagatgtggagaagtcagaaatgaagaaaatgcctgtcactgctcagaggactgcttggccaggggagactgctgtaccaattaccaagtggtttgcaaaggagagtcgcattgggttgatgatgactgtgaggaaataaaggccgcagaatgccctgcagggtttgttcgccctccattaatcatcttctccgtggatggcttccgtgcatcatacatgaagaaaggcagcaaagtcatgcctaatattgaaaaactaaggtcttgtggcacacactctccctacatgaggccggtgtacccaactaaaacctttcctaacttatacactttggccactgggctatatccagaatcacatggaattgttggcaattcaatgtatgatcctgtatttgatgccacttttcatctgcgagggcgagagaaatttaatcatagatggtggggaggtcaaccgctatggattacagccaccaagcaaggggtgaaagctggaacattcttttggtctgttgtcatccctcacgagcggagaatattaaccatattgcagtggctcaccctgccagatcatgagaggccttcggtctatgccttctattctgagcaacctgatttctctggacacaaatatggccctttcggccctgagatgacaaatcctctgagggaaatcgacaaaattgtggggcaattaatggatggactgaaacaactaaaactgcatcggtgtgtcaacgtcatctttgtcggagaccatggaatggaagatgtcacatgtgatagaactgagttcttgagtaattacctaactaatgtggatgatattactttagtgcctggaactctaggaagaattcgatccaaatttagcaacaatgctaaatatgaccccaaagccattattgccaatctcacgtgtaaaaaaccagatcagcactttaagccttacttgaaacagcaccttcccaaacgtttgcactatgccaacaacagaagaattgaggatatccatttattggtggaacgcagatggcatgttgcaaggaaacctttggatgtttataagaaaccatcaggaaaatgctttttccagggagaccacggatttgataacaaggtcaacagcatgcagactgtttttgtaggttatggcccaacatttaagtacaagactaaagtgcctccatttgaaaacattgaactttacaatgttatgtgtgatctcctgggattgaagccagctcctaataatgggacccatggaagtttgaatcatctcctgcgcactaataccttcaggccaaccatgccagaggaagttaccagacccaattatccagggattatgtaccttcagtctgattttgacctgggctgcacttgtgatgataaggtagagccaaagaacaagttggatgaactcaacaaacggcttcatacaaaagggtctacagaagagagacacctcctctatgggcgacctgcagtgctttatcggactagatatgatatcttatatcacactgactttgaaagtggttatagtgaaatattcctaatgccactctggacatcatatactgtttccaaacaggctgaggtttccagcgttcctgaccatctgaccagttgcgtccggcctgatgtccgtgtttctccgagtttcagtcagaactgtttggcctacaaaaatgataagcagatgtcctacggattcctctttcctccttatctgagctcttcaccagaggctaaatatgatgcattccttgtaaccaatatggttccaatgtatcctgctttcaaacgggtctggaattatttccaaagggtattggtgaagaaatatgcttcggaaagaaatggagttaacgtgataagtggaccaatcttcgactatgactatgatggcttacatgacacagaagacaaaataaaacagtacgtggaaggcagttccattcctgttccaactcactactacagcatcatcaccagctgtctggatttcactcagcctgccgacaagtgtgacggccctctctctgtgtcctccttcatcctgcctcaccggcctgacaacgaggagagctgcaatagctcagaggacgaatcaaaatgggtagaagaactcatgaagatgcacacagctagggtgcgtgacattgaacatctcaccagcctggacttcttccgaaagaccagccgcagctacccagaaatcctgacactcaagacatacctgcatacatatgagagcgagatttaactttctgagcatctgcagtacagtcttatcaactggttgtatattttactcccgggggtttacccaacaaaaaccgattttacaagagacacggccaagtgccagga

SEQ ID NO: 435638 - DNA, 979 bp, Homo sapiens
agcatgcatcctagagagaatttggctagagtaaggagttttcttcatgaataattgatttttggatttttgtctttgcacaggggtctggaattatttccaaagggtattggtgaagaaatatgcttcggaaagaaatggagttaacgtgataagtggaccaatcttcgactatgactatgatggcttacatgacacagaagacaaaataaaacagtacgtggaaggcagttccattcctgttccaactcactactacagcatcatcaccagctgtctggatttcactcagcctgccgacaagtgtgacggccctctctctgtgtcctccttcatcctgcctcaccggcctgacaacgaggagagctgcaatagctcagaggacgaatcaaaatgggtagaagaactcatgaagatgcacacagctagggtgcgtgacattgaacatctcaccagcctggacttcttccgaaagaccagccgcagctacccagaaatcctgacactcaagacatacctgcatacatatgagagcgagatttaactttctgagcatctgcagtacagtcttatcaactggttgtatatttttatattgtttttgtatttattaatttgaaaccaggacattaaaaatgttagtattttaatcctgtaccaaatctgacatattatgcctgaatgactccactgtttttctctaatgcttgatttaggtagccttgtgttctgagtagagcttgtaataaatactgcagcttgagtttttagtggaagcttctaaatggtgctgcagatttgatatttgcattgaggaaatattaattttccaatgcacagttgccacatttagtcctgtactgtatggaaacactgattttgtaaagttgcctttatttgctgttaactgttaactatgacagatatatttaagccttataaaccaatcttaaacataataaatcacacattcagtttt

SEQ ID NO: 435639 - DNA, 926 bp, Homo sapiens
atggcccacgtgtatccagcgtcgcagactgggtctggaattatttccaaagggtattggtgaagaaatatgcttcggaaagaaatggagttaacgtgataagtggaccaatcttcgactatgactatgatggcttacatgacacagaagacaaaataaaacagtacgtggaaggcagttccattcctgttccaactcactactacagcatcatcaccagctgtctggatttcactcagcctgccgacaagtgtgacggccctctctctgtgtcctccttcatcctgcctcaccggcctgacaacgaggagagctgcaatagctcagaggacgaatcaaaatgggtagaagaactcatgaagatgcacacagctagggtgcgtgacattgaacatctcaccagcctggacttcttccgaaagaccagccgcagctacccagaaatcctgacactcaagacatacctgcatacatatgagagcgagatttaactttctgagcatctgcagtacagtcttatcaactggttgtatatttttatattgtttttgtatttattaatttgaaaccaggacattaaaaatgttagtattttaatcctgtaccaaatctgacatattatgcctgaatgactccactgtttttctctaatgcttgatttaggtagccttgtgttctgagtagagcttgtaataaatactgcagcttgagtttttagtggaagcttctaaatggtgctgcagatttgatatttgcattgaggaaatattaattttccaatgcacagttgccacatttagtcctgtactgtatggaaacactgattttgtaaagttgcctttatttgctgttaactgttaactatgacagatatatttaagccttataaaccaatcttaaacataataaatcacacattcagtttt

SEQ ID NO: 435640 - DNA, 970 bp, Homo sapiens
taagcgaagtatcactagcacccccttcgttacccttgaacaggattccaactggattctgatccaacaccgggtactgcaattgtctacaaagatatgccagagggaattatgcataatatagaagagcctctaaagtgatccgggaagcattcttccatgataattatcagtggcttacctgagacataacagagaataacacaggtacgtggaaggcagttccattcctgttccaactcactactacagcatcatcaccagctgtctggatttcactcagcctgccgacaagtgtgacggccctctctctgtgtcctccttcatcctgcctcaccggcctgacaacgaggagagctgcaatagctcagaggacgaatcaaaatgggtagaagaactcatgaagatgcacacagctagggtgcgtgacattgaacatctcaccagcctggacttcttccgaaagaccagccgcagctacccagaaatcctgacactcaagacatacctgcatacatatgagagcgagatttaactttctgagcatctgcagtacagtcttatcaactggttgtatatttttatattgtttttgtatttattaatttgaaaccaggacattaaaaatgttagtattttaatcctgtaccaaatctgacatattatgcctgaatgactccactgtttttctctaatgcttgatttaggtagccttgtgttctgagtagagcttgtaataaatactgcagcttgagtttttagtggaagcttctaaatggtgctgcagatttgatatttgcattgaggaaatattaattttccaatgcacagttgccacatttagtcctgtactgtatggaaacactgattttgtaaagttgcctttatttgctgttaactgttaactatgacagatatatttaagccttataaaccaatcttaaacataataaatcacacattcagtttt

SEQ ID NO: 435641 - DNA, 1082 bp, Homo sapiens
gcagtttcttttgaaaaactaggaatgcacacacatcatttcgtgcattaggcttaagttcttcactttccttgggaagcagaagcatattccaagttacttgtactctgtgctcaatattgcaatttgacagcttggaaaagaaacaaattactgaattctctagggcctttggttttcctaattttgatttatgttctgagaacctattgagtcaaatgccctctgacaccacatgtctcgtttatttggtacagttaattgctgttgaaaatgtttacagccaagggcaggtatttgtggcacattacccataggaatgcggtagagtggcagggaggccaggaaggatcaacatgcgttggctctgtgtgcaagagtgcacagaggtcatttgtggacttggagtaaactgaccatttggagaaactcctctggaaaattctgattctgattttgttctgtttccattgcagagctcagaggacgaatcaaaatgggtagaagaactcatgaagatgcacacagctagggtgcgtgacattgaacatctcaccagcctggacttcttccgaaagaccagccgcagctacccagaaatcctgacactcaagacatacctgcatacatatgagagcgagatttaactttctgagcatctgcagtacagtcttatcaactggttgtatatttttatattgtttttgtatttattaatttgaaaccaggacattaaaaatgttagtattttaatcctgtaccaaatctgacatattatgcctgaatgactccactgtttttctctaatgcttgatttaggtagccttgtgttctgagtagagcttgtaataaatactgcagcttgagtttttagtggaagcttctaaatggtgctgcagatttgatatttgcattgaggaaatattaattttccaatgcacagttgccacatttagtcctgtactgtatggaaacactgattttgtaaagttgcctttatttgctgttaactgttaactatgacagatatatttaagccttataaaccaatcttaaacataataaatcacacattcagtttt

SEQ ID NO: 435642 - DNA, 2023 bp, Homo sapiens
  misc_feature (1967)..(1967): n is a, c, g, or t
  misc_feature (1985)..(1985): n is a, c, g, or t
  misc_feature (2018)..(2018): n is a, c, g, or t
aaagcagtgcactccgtgaaggcaaagagaacacgctgcaaaaggctttccaagaatcctcgacatggcaaggaggagctcgttccagtcgtgtcagataatatccctgttcacttttgccgttggagtcaatatctgcttaggattcactgcacatcgaattaagagagcagaaggatgggaggaaggtcctcctacagtgctatcagactccccctggaccaacatctccggatcttgcaagggcaggtgctttgaacttcaagaggctggacctcctgattgtcgctgtgacaacttgtgtaagagctataccagttgctgccatgactttgatgagctgtgtttgaagacagcccgtggctgggagtgtactaaggacagatgtggagaagtcagaaatgaagaaaatgcctgtcactgctcagaggactgcttggccaggggagactgctgtaccaattaccaagtggtttgcaaaggagagtcgcattgggttgatgatgactgtgaggaaataaaggccgcagaatgccctgcagggtttgttcgccctccattaatcatcttctccgtggatggcttccgtgcatcatacatgaagaaaggcagcaaagtcatgcctaatattgaaaaactaaggtcttgtggcacacactctccctacatgaggccggtgtacccaactaaaacctttcctaacttatacactttggccactgggctatatccagaatcacatggaattgttggcaattcaatgtatgatcctgtatttgatgccacttttcatctgcgagggcgagagaaatttaatcatagatggtggggaggtcaaccgctatggattacagccaccaagcaaggggtgaaagctggaacattcttttggtctgttgtcatccctcacgagcggagaatattaaccatattgcagtggctcaccctgccagatcatgagaggccttcggtctatgccttctattctgagcaacctgatttctctggacacaaatatggccctttcggccctgagatgacaaatcctctgagggaaatcgacaaaattgtggggcaattaatggatggacgaatggaagatgtcacatgtgatagaactgagttcttgagtaattacctaactaatgtggatgatattactttagtgcctggaactctaggaagaattcgatccaaatttagcaacaatgctaaatatgaccccaaagccattattgccaatctcacgtgtaaaaaaccagatcagcactttaagccttacttgaaacagcaccttcccaaacgtttgcactatgccaacaacagaagaattgaggatatccatttattggtggaacgcagatggcatgttgcaaggaaacctttggatgtttataagaaaccatcaggaaaatgctttttccagggagaccacggatttgataacaaggtcaacagcatgcagactgtttttgtaggttatggcccaacatttaagtacaagactaaagtgcctccatttgaaaacattgaactttacaatgttatgtgtgatctcctgggattgaagccagctcctaataatgggacccatggaagtttgaatcatctcctgcgcactaataccttcaggccaaccatgccagaggaagttaccagacccaattatccagggattatgtaccttcagtctgattttgacctgggctgcacttgtgatgataaggtagagccaaagaacaagttggatgaactcaacaaacggcttcatacaaaagggtctacagaagagagacacctcctctatgggcgacctgcagtgctttatcggactagatatgatatcttatatcacactgactttgaaagtggttatagtgaaatattcctaatgccactctggacatcatatactgtttccaaacaggctgagggttccaagcgttccctgaccaacctggaccaanttggcgttccggggcctngatggtccgtggtttccccccggggttttcaantccaa

SEQ ID NO: 435643 - DNA, 1447 bp, Homo sapiens
aaagcagtgcactccgtgaaggcaaagagaacacgctgcaaaaggctttccaagaatcctcgacatggcaaggaggagctcgttccagtcgtgtcagataatatccctgttcacttttgccgttggagtcaatatctgcttaggattcactgcacatcgaattaagagagcagaaggatgggaggaaggtcctcctacagtgctatcagactccccctggaccaacatctccggatcttgcaagggcaggtgctttgaacttcaagaggctggacctcctgattgtcgctgtgacaacttgtgtaagagctataccagttgctgccatgactttgatgagctgtgtttgaagacagcccgtggctgggagtgtactaaggacagatgtggagaagtcagaaatgaagaaaatgcctgtcactgctcagaggactgcttggccaggggagactgctgtaccaattaccaagtggtttgcaaaggagagtcgcattgggttgatgatgactgtgaggaaataaaggccgcagaatgccctgcagggtttgttcgccctccattaatcatcttctccgtggatggcttccgtgcatcatacatgaagaaaggcagcaaagtcatgcctaatattgaaaaactaaggtcttgtggcacacactctccctacatgaggccggtgtacccaactaaaacctttcctaacttatacactttggccactgggctatatccagaatcacatggaattgttggcaattcaatgtatgatcctgtatttgatgccacttttcatctgcgagggcgagagaaatttaatcatagatggtggggaggtcaaccgctatggattacagccaccaagcaaggggtgaaagctggaacattcttttggtctgttgtcatccctcacgagcggagaatattaaccatattgcagtggctcaccctgccagatcatgagaggccttcggtctatgccttctattctgagcaacctgatttctctggacacaaatatggccctttcggccctgaggagagtagttatggctcaccttttactccggctaagagacctaagaggaaagttgcccctaagaggagacaggaaagaccagttgctcctccaaagaaaagaagaagaaaaatacataggatggatcattatgctgcggaaactcgtcaggacaaaatgacaaatcctctgagggaaatcgacaaaattgtggggcaattaatggatggactctgtacagggtccgatgcagaaaaggggaaggaggaaatcagagttccccaaatggggttttatcagatctcagggaagttggtatcatgcttcttatcaaggccaacccataggattacggtagggaggcaaaatcccaggcttttcagaagtggatccttaggaaaggaaagtagggggaaggtgcctaagtcactc

SEQ ID NO: 435644 - DNA, 989 bp, Homo sapiens
  misc_feature (23)..(23): n is a, c, g, or t
  misc_feature (28)..(28): n is a, c, g, or t
  misc_feature (30)..(30): n is a, c, g, or t
gcgaatccagctgcagctcagtnatttngngtccccgaacgagctaattgagcattctgtaaccataggttccaatgtatcctgctttcaaacgggtctggaattatttccaaagggtattggtgaagaaatatgcttcggaaagaaatggagttaacgtgataagtggaccaatcttcgactatgactatgatggcttacatgacacagaagacaaaataaaacagtacgtggaaggcagttccattcctgttccaactcactactacagcatcatcaccagctgtctggatttcactcagcctgccgacaagtgtgacggccctctctctgtgtcctccttcatcctgcctcaccggcctgacaacgaggagagctgcaatagctcagaggacgaatcaaaatgggtagaagaactcatgaagatgcacacagctagggtgcgtgacattgaacatctcaccagcctggacttcttccgaaagaccagccgcagctacccagaaatcctgacactcaagacatacctgcatacatatgagagcgagatttaactttctgagcatctgcagtacagtcttatcaactggttgtatatttttatattgtttttgtatttattaatttgaaaccaggacattaaaaatgttagtattttaatcctgtaccaaatctgacatattatgcctgaatgactccactgtttttctctaatgcttgatttaggtagccttgtgttctgagtagagcttgtaataaatactgcagcttgagtttttagtggaagcttctaaatggtgctgcagatttgatatttgcattgaggaaatattaattttccaatgcacagttgccacatttagtcctgtactgtatggaaacactgattttgtaaagttgcctttatttgctgttaactgttaactatgacagatatatttaagccttataaaccaatcttaaacataataaatcacacattcagtttt

SEQ ID NO: 435645 - DNA, 2674 bp, Homo sapiens
aaagcagtgcactccgtgaaggcaaagagaacacgctgcaaaaggctttccaagaatcctcgacatggcaaggaggagctcgttccagtcgtgtcagataatatccctgttcacttttgccgttggagtcaatatctgcttaggattcactgcacatcgaattaagagagcagaaggatgggaggaaggtcctcctacagtgctatcagactccccctggaccaacatctccggatcttgcaagggcaggtgctttgaacttcaagaggctggacctcctgattgtcgctgtgacaacttgtgtaagagctataccagttgctgccatgactttgatgagctgtgtttgaagacagcccgtggctgggagtgtactaaggacagatgtggagaagtcagaaatgaagaaaatgcctgtcactgctcagaggactgcttggccaggggagactgctgtaccaattaccaagtggtttgcaaaggagagtcgcattgggttgatgatgactgtgaggaaataaaggccgcagaatgccctgcagggtttgttcgccctccattaatcatcttctccgtggatggcttccgtgcatcatacatgaagaaaggcagcaaagtcatgcctaatattgaaaaactaaggtcttgtggcacacactctccctacatgaggccggtgtacccaactaaaacctttcctaacttatacactttggccactgggctatatccagaatcacatggaattgttggcaattcaatgtatgatcctgtatttgatgccacttttcatctgcgagggcgagagaaatttaatcatagatggtggggaggtcaaccgctatggattacagccaccaagcaaggggtgaaagctggaacattcttttggtctgttgtcatccctcacgagcggagaatattaaccatattgcagtggctcaccctgccagatcatgagaggccttcggtctatgccttctattctgagcaacctgatttctctggacacaaatatggccctttcggccctgagatgacaaatcctctgagggaaatcgacaaaattgtggggcaattaatggatggacgaatggaagatgtcacatgtgatagaactgagttcttgagtaattacctaactaatgtggatgatattactttagtgcctggaactctaggaagaattcgatccaaatttagcaacaatgctaaatatgaccccaaagccattattgccaatctcacgtgtaaaaaaccagatcagcactttaagccttacttgaaacagcaccttcccaaacgtttgcactatgccaacaacagaagaattgaggatatccatttattggtggaacgcagatggcatgttgcaaggaaacctttggatgtttataagaaaccatcaggaaaatgctttttccagggagaccacggatttgataacaaggtcaacagcatgcagactgtttttgtaggttatggcccaacatttaagtacaagactaaagtgcctccatttgaaaacattgaactttacaatgttatgtgtgatctcctgggattgaagccagctcctaataatgggacccatggaagtttgaatcatctcctgcgcactaataccttcaggccaaccatgccagaggaagttaccagacccaattatccagggattatgtaccttcagtctgattttgacctgggctgcacttgtgatgataaggtagagccaaagaacaagttggatgaactcaacaaacggcttcatacaaaagggtctacagaagagagacacctcctctatgggcgacctgcagtgctttatcggactagatatgatatcttatatcacactgactttgaaagtggttatagtgaaatattcctaatgccactctggacatcatatactgtttccaaacaggctgaggtttccagcgttcctgaccatctgaccagttgcgtccggcctgatgtccgtgtttctccgagtttcagtcagaactgtttggcctacaaaaatgataagcagatgtcctacggattcctctttcctccttatctgagctcttcaccagaggctaaatatgatgcattccttgtaaccaatatggttccaatgtatcctgctttcaaacgggtctggaattatttccaaagggtattggtgaagaaatatgcttcggaaagaaatggagttaacgtgataagtggaccaatcttcgactatgactatgatggcttacatgacacagaagacaaaataaaacagtacgtggaaggcagttccattcctgttccaactcactactacagcatcatcaccagctgtctggatttcactcagcctgccgacaagtgtgacggccctctctctgtgtcctccttcatcctgcctcaccggcctgacaacgaggagagctgcaatagtccagaggatgaatcacaaagggtagaagaaagcatgaagacgcacaccgctagggtgcgatggacactggacatcggagcaccggacaacgagcccgcaagagacagcaagacgtgacacggacaccggtcacacgcaagatatgcacgcacagatatcagtgacgagattcgagctgtatgtgcatatgcagtacagttacttcagctgcttgtatatgtgtatattatcttggtgtca

SEQ ID NO: 435646 - DNA, 2328 bp, Homo sapiens
aaagcagtgcactccgtgaaggcaaagagaacacgctgcaaaaggctttccaagaatcctcgacatggcaaggaggagctcgttccagtcgtgtcagataatatccctgttcacttttgccgttggagtcaatatctgcttaggattcactgcacatcgaattaagagagcagaaggatgggaggaaggtcctcctacagtgctatcagactccccctggaccaacatctccggatcttgcaagggcaggtgctttgaacttcaagaggctggacctcctgattgtcgctgtgacaacttgtgtaagagctataccagttgctgccatgactttgatgagctgtgtttgaagacagcccgtggctgggagtgtactaaggacagatgtggagaagtcagaaatgaagaaaatgcctgtcactgctcagaggactgcttggccaggggagactgctgtaccaattaccaagtggtttgcaaaggagagtcgcattgggttgatgatgactgtgaggaaataaaggccgcagaatgccctgcagggtttgttcgccctccattaatcatcttctccgtggatggcttccgtgcatcatacatgaagaaaggcagcaaagtcatgcctaatattgaaaaactaaggtcttgtggcacacactctccctacatgaggccggtgtacccaactaaaacctttcctaacttatacactttggccactgggctatatccagaatcacatggaattgttggcaattcaatgtatgatcctgtatttgatgccacttttcatctgcgagggcgagagaaatttaatcatagatggtggggaggtcaaccgctatggattacagccaccaagcaaggggtgaaagctggaacattcttttggtctgttgtcatccctcacgagcggagaatattaaccatattgcagtggctcaccctgccagatcatgagaggccttcggtctatgccttctattctgagcaacctgatttctctggacacaaatatggccctttcggccctgagatgacaaatcctctgagggaaatcgacaaaattgtggggcaattaatggatggacgaatggaagatgtcacatgtgatagaactgagttcttgagtaattacctaactaatgtggatgatattactttagtgcctggaactctaggaagaattcgatccaaatttagcaacaatgctaaatatgaccccaaagccattattgccaatctcacgtgtaaaaaaccagatcagcactttaagccttacttgaaacagcaccttcccaaacgtttgcactatgccaacaacagaagaattgaggatatccatttattggtggaacgcagatggcatgttgcaaggaaacctttggatgtttataagaaaccatcaggaaaatgctttttccagggagaccacggatttgataacaaggtcaacagcatgcagactgtttttgtaggttatggcccaacatttaagtacaagactaaagtgcctccatttgaaaacattgaactttacaatgttatgtgtgatctcctgggattgaagccagctcctaataatgggacccatggaagtttgaatcatctcctgcgcactaataccttcaggccaaccatgccagaggaagttaccagacccaattatccagggattatgtaccttcagtctgattttgacctgggctgcacttgtgatgataaggtagagccaaagaacaagttggatgaactcaacaaacggcttcatacaaaagggtctacagaaggtaaggggtggttgcaaaataatcagataaggtttttctcgttttcgaaaatcgaaaaggcttcttatttacattatagtgtaagcacaatattgtttaaaattagaatttgtatttcaaagtgactttcatacctatctggcaaaggatattggtttattccatgtacacaagatgccagctgtgtaataaaaaaattccaatagcttttctcccccctcaatagcttttaagccctctgaaaagtacacaatccattttgtatctgatgagtcataagacactgtggggcactcctataaagggaatgatagtcacaatgataaataatagcagctggtgcctatcctgaaggtatctacctcgagagtcagtgtatatatagatatatatatattgtgatagggagagattcaccgaaggaatcaaatcagaactccctcctcatatgaaggatcatctcaagccctaactcttactttacgtacaatgataacgagcacgtattagtgaactttcgcaagcttatgatatgacc

SEQ ID NO: 435647 - DNA, 1074 bp, Homo sapiens
  misc_feature (1016)..(1016): n is a, c, g, or t
aaagcagtgcactccgtgaaggcaaagagaacacgctgcaaaaggctttccaagaatcctcgacatggcaaggaggagctcgttccagtcgtgtcagataatatccctgttcacttttgccgttggagtcaatatctgcttaggattcactgcacatcgaattaagagagcagaaggatgggaggaaggtcctcctacagtgctatcagactccccctggaccaacatctccggatcttgcaagggcaggtgctttgaacttcaagaggctggacctcctgattgtcgctgtgacaacttgtgtaagagctataccagttgctgccatgactttgatgagctgtgtttgaagacagcccgtggctgggagtgtactaaggacagatgtggagaagtcagaaatgaagaaaatgcctgtcactgctcagaggactgcttggccaggggagactgctgtaccaattaccaagtggtttgcaaaggagagtcgcattgggttgatgatgactgtgaggaaataaaggccgcagaatgccctgcagggtttgttcgccctccattaatcatcttctccgtggatggcttccgtgcatcatacatgaagaaaggcagcaaagtcatgcctaatattgaaaaactaaggtcttgtggcacacactctccctacatgaggccggtgtacccaactaaaacctttcctaacttatacactttggccactgggctatatccagaatcacatggaattgttggcaattcaatgtatgatcctgtatttgatgccacttttcatctgcgagggcgagagaaatttaatcatagatggtggggaggtcaaccgctatggattacagccaccaagcaaggggtgaaagctggaacattcttttggtctgttgtcatccctcacgagcggagaatattaaccatattgcagtggctcaccctgccagatcatgagaggccttcggtctatgccttctattctgagcaacctgatttctctggacacaatnttgtcgatttccctcagaggatttgtcatctcagggcgaaagggccatatttggtcga

SEQ ID NO: 435648 - DNA, 2901 bp, Homo sapiens
cagcttgcagtcaagaccccctaccggtgacacttgcgctcttcggggaggtaaacagcatttcctctcagctctgggttggaaaaagccgcagcagctgatgggcccgggaacccgaggccccgccccctaggtggtcctagcctttgcgcgtgcgcggcgtgtctgcgtgggcgcatgcgcataacggccgccatcttaacagcgcgttcccgttggcgtctgaggaacagcatctctgccttcctgttcacggtgaccttcgcttggtgtcctcctggcctcagcaacctgacaattctgtcgtgtcccgagagatggctaatgaatggcgcttgatgacagatgagtaatgcctgttgctgaaagattgacggatcatctttctcaagatgttttctgtcttcatgagtcaaaatttgaagaggaaaggatggtggctgggtggttgacaaattactctcaggactcagtgacctttgaggatgtggctgtggacttcacccaggaggagtggactttgctggatcaaactcagagaaacttatacagagatgtgatgctggagaactataagaatctagttgcagtagattgggagagtcatattaataccaaatggtcagcacctcagcagaattttttgcaggggaaaacatccagtgtggtggaaatgaattcagagtaaaagggagaatctcaatgaaataaatttggaaaacttctatgaaccatcattaattttcaccaacaggagagaaaccattttggagaggaactgtttgactttaaccaatgtgaaaaagccttgagtgaacactcatgccttaagactcacaggagaacttactttagaaagaaaacctgtgagtgtaatcaatgtgaaaaagccttcagaaaaccctctatctttactttacacaagaaaactgatatcggagaggaacttcctaactgtaatcaatgtgaaacagccttcagccaacatctacatcttgtttgcaagaaaactagccaaaatctacatcttgtttgcaagaaaactcacactcaagagaaaccatataaatgcagtgactgtgaaaaaggcttaccttcctcctcacacctcagagaatgtgtaagaatttatggtggagagagaccatatactcataaggagtatgtcgaaaccttttctcattctacagccctttttgtacacatgcaaactcaagatggagaaaaattctatgaatgtaaagcatgtgggaaacccttcactgagtcgtcatatcttactcaacatttaagaactcatagtagagtgttacctatagaacataagaaatttggcaaagcctttgctttttccccagatcttgctaaacatataagacttagaactagaggaaaacactatgtttgtaatgaatgtggcaaagaatttacttgtttctcaaaactcaacattcacataagggttcacactggagaaaaaccgtatgagtgcaacaaatgtgggaaagccttcactgattcatcaggtcttataaaacacaggcgaactcacactggagaaaagccttatgaatgtaaggaatgtgggaaagcttttgctaactcttcacatcttactgtacatatgagaactcacactggtgagaagccttatcaatgtaaggaatgtggaaaagcctttattaattcctcttcctttaaaagtcacatgcagactcatcctggtgtaaaaccctatgactgtcaacagtgtgggaaagccttcattcgatcctcatttcttattcgacatttgagaagtcacagtgcagaaaggccttttgaatgtgaggaatgtgggaaagcctttagatactcctcgcaccttagtcaacataaaagaatacatacaggggagaggccatataaatgtcaaaagtgtgggcaagccttcagtatctcatcaggccttacagtacacatgagaactcacactggtgaacggccctttgaatgtcaggaatgtgggaaagcctttactcggtccacatatcttattcgacatctaagaagtcatagtgtggagaaaccatataaggaatgtgggcaaacctttagtaattcctcatgccttactgaatgtgtgtgaattggggctgatacttggaaagaatgtggtaaagccactacttcctcacacttactgaacatgtactcattcatagtggcaatgtacacagtcataaggaatgtgggaagccttccttggtgtctcagatcttaacaattccaatagaagagaagacatatgaatgtaaggaatgtgggaaaatcttggctccttccataggccttactattcatgtgtctgtgcatcctaggaaacaaactgaacgtaggaaacctgtcgatgcttacatcttactgagtctgtttgaactcatgctggagagaaatgctatgaatgtgaggaaggtggaaaagctttcattattttcctcgggccttactgagcttgtgagcacattggatataaatgcacgtcctctggctgtaaggaatgtgttgaaacctttcactctgccttataccttaatattcagctgtgatctcacaagtgtgaaaaatcttatgaatgtaaaatgtgtggagattcttctttgtttttagcttccactttgggaacatgtcaaagcacacattgagaagtcccatgagtgaaagagatgttggaaagcccttgaacttggtcgttaggaaacatccacactgaagaggaacctgactgtatggaaggtcaaaaaggctgtattaatttacatgcaaaaagtcacactagaggaatgccatatcagaatgcttttggtaaatatacatgttttaaagaggttatatatcattaataaaaatatctagctggtc

SEQ ID NO: 435649 - DNA, 3288 bp, Homo sapiens
cagcttgcagtcaagaccccctaccggtgacacttgcgctcttcggggaggtaaacagcatttcctctcagctctgggttggaaaaagccgcagcagctgatgggcccgggaacccgaggccccgccccctaggtggtcctagcctttgcgcgtgcgcggcgtgtctgcgtgggcgcatgcgcataacggccgccatcttaacagcgcgttcccgttggcgtctgaggtaagtttttgtttctgggcggcgttcggtggtgtcccggtgcagccacgcgagagtagaagggtggaaaggggaggtgcccagtgaaatggagcctgtcccgtgcactttcgggcatttcgagcatcttgtgggctctcccaagtcgcggcccctcctctgagagccacagtcaggtctgtcctcaggggtcgaggcggctgcgctggggcctcggcccgggaggaggcggggggcacggcctttccattttccctgctcccctctgcagaagcctcatagggcccggcgcggcggctcacgcctgtcattcccagcgctttgggcggattgggtaggaggattacttgaggccaggagttcaagaccaggcagggcaacatagggagaccccccccccaaccatctctaatggaaaaaaaaaaaaaagtctccacatccagcgttgtgccttttctctataaggaacagcatctctgccttcctgttcacggtgaccttcgcttggtgtcctcctggcctcagcaacctgacaattctgtcgtgtcccgagagatggctaatgaatggcgcttgatgacagatgagtaatgcctgttgctgaaagattgacggatcatctttctcaagatgttttctgtcttcatgagtcaaaatttgaagaggaaaggatggtggctgggtggttgacaaattactctcaggactcagtgacctttgaggatgtggctgtggacttcacccaggaggagtggactttgctggatcaaactcagagaaacttatacagagatgtgatgctggagaactataagaatctagttgcagtagattgggagagtcatattaataccaaatggtcagcacctcagcagaattttttgcaggggaaaacatccagtgtggtggaaatggagagaaaccattttggagaggaactgtttgactttaaccaatgtgaaaaagccttgagtgaacactcatgccttaagactcacaggagaacttactttagaaagaaaacctgtgagtgtaatcaatgtgaaaaagccttcagaaaaccctctatctttactttacacaagaaaactgatatcggagaggaacttcctaactgtaatcaatgtgaaacagccttcagccaacatctacatcttgtttgcaagaaaactagccaaaatctacatcttgtttgcaagaaaactcacactcaagagaaaccatataaatgcagtgactgtgaaaaaggcttaccttcctcctcacacctcagagaatgtgtaagaatttatggtggagagagaccatatactcataaggagtatgtcgaaaccttttctcattctacagccctttttgtacacatgcaaactcaagatggagaaaaattctatgaatgtaaagcatgtgggaaacccttcactgagtcgtcatatcttactcaacatttaagaactcatagtagagtgttacctatagaacataagaaatttggcaaagcctttgctttttccccagatcttgctaaacatataagacttagaactagaggaaaacactatgtttgtaatgaatgtggcaaagaatttacttgtttctcaaaactcaacattcacataagggttcacactggagaaaaaccgtatgagtgcaacaaatgtgggaaagccttcactgattcatcaggtcttataaaacacaggcgaactcacactggagaaaagccttatgaatgtaaggaatgtgggaaagcttttgctaactcttcacatcttactgtacatatgagaactcacactggtgagaagccttatcaatgtaaggaatgtggaaaagcctttattaattcctcttcctttaaaagtcacatgcagactcatcctggtgtaaaaccctatgactgtcaacagtgtgggaaagccttcattcgatcctcatttcttattcgacatttgagaagtcacagtgcagaaaggccttttgaatgtgaggaatgtgggaaagcctttagatactcctcgcaccttagtcaacataaaagaatacatacaggggagaggccatataaatgtcaaaagtgtgggcaagccttcagtatctcatcaggccttacagtacacatgagaactcacactggtgaacggccctttgaatgtcaggaatgtgggaaagcctttactcggtccacatatcttattcgacatctaagaagtcatagtgtggagaaaccatataaggaatgtgggcaaacctttagtaattcctcatgccttactgaatgtgtgtgaattggggctgatacttggaaagaatgtggtaaagccactacttcctcacacttactgaacatgtactcattcatagtggcaatgtacacagtcataaggaatgtgggaagccttccttggtgtctcagatcttaacaattccaatagaagagaagacatatgaatgtaaggaatgtgggaaaatcttggctccttccataggccttactattcatgtgtctgtgcatcctaggaaacaaactgaacgtaggaaacctgtcgatgcttacatcttactgagtctgtttgaactcatgctggagagaaatgctatgaatgtgaggaaggtggaaaagctttcattattttcctcgggccttactgagcttgtgagcacattggatataaatgcacgtcctctggctgtaaggaatgtgttgaaacctttcactctgccttataccttaatattcagctgtgatctcacaagtgtgaaaaatcttatgaatgtaaaatgtgtggagattcttctttgtttttagcttccactttgggaacatgtcaaagcacacattgagaagtcccatgagtgaaagagatgttggaaagcccttgaacttggtcgttaggaaacatccacactgaagaggaacctgactgtatggaaggtcaaaaaggctgtattaatttacatgcaaaaagtcacactagaggaatgccatatcagaatgcttttggtaaatatacatgttttaaagaggttatatatcattaataaaaatatctagctggtc

SEQ ID NO: 435650 - DNA, 3334 bp, Homo sapiens
cagcttgcagtcaagaccccctaccggtgacacttgcgctcttcggggaggtaaacagcatttcctctcagctctgggttggaaaaagccgcagcagctgatgggcccgggaacccgaggccccgccccctaggtggtcctagcctttgcgcgtgcgcggcgtgtctgcgtgggcgcatgcgcataacggccgccatcttaacagcgcgttcccgttggcgtctgaggtaagtttttgtttctgggcggcgttcggtggtgtcccggtgcagccacgcgagagtagaagggtggaaaggggaggtgcccagtgaaatggagcctgtcccgtgcactttcgggcatttcgagcatcttgtgggctctcccaagtcgcggcccctcctctgagagccacagtcaggaacagcatctctgccttcctgttcacggtgaccttcgcttggtgtcctcctggcctcagcaacctgacaattctgtcgtgtcccggcaggagtgcagtggtgagatcacggttcactgcagcattgacctccctgggctcaggtgttgctcccacctcagtcttctgaatagcttggagtatagagagatggctaatgaatggcgcttgatgacagatgagtaatgcctgttgctgaaagattgacggtatgaggcaagactcccactactacttaatcaagaggaattgagattgacttacccataagttcagacagtgtctcgaagagactttgggaacaagatattcaggcacatttcactgttagactcacaggatgctggccattggtctttccctttgtgatcatctttctcaagatgttttctgtcttcatgagtcaaaatttgaagaggaaaggatggtggctgggtggttgacaaattactctcaggactcagtgacctttgaggatgtggctgtggacttcacccaggaggagtggactttgctggatcaaactcagagaaacttatacagagatgtgatgctggagaactataagaatctagttgcagtagattgggagagtcatattaataccaaatggtcagcacctcagcagaattttttgcaggggaaaacatccagtgtggtggaaatgaattcagagtaaaagggagaatctcaatgaaataaatttggaaaacttctatgaaccatcattaattttcaccaacaggagagaaaccattttggagaggaactgtttgactttaaccaatgtgaaaaagccttgagtgaacactcatgccttaagactcacaggagaacttactttagaaagaaaacctgtgagtgtaatcaatgtgaaaaagccttcagaaaaccctctatctttactttacacaagaaaactgatatcggagaggaacttcctaactgtaatcaatgtgaaacagccttcagccaacatctacatcttgtttgcaagaaaactagccaaaatctacatcttgtttgcaagaaaactcacactcaagagaaaccatataaatgcagtgactgtgaaaaaggcttaccttcctcctcacacctcagagaatgtgtaagaatttatggtggagagagaccatatactcataaggagtatgtcgaaaccttttctcattctacagccctttttgtacacatgcaaactcaagatggagaaaaattctatgaatgtaaagcatgtgggaaacccttcactgagtcgtcatatcttactcaacatttaagaactcatagtagagtgttacctatagaacataagaaatttggcaaagcctttgctttttccccagatcttgctaaacatataagacttagaactagaggaaaacactatgtttgtaatgaatgtggcaaagaatttacttgtttctcaaaactcaacattcacataagggttcacactggagaaaaaccgtatgagtgcaacaaatgtgggaaagccttcactgattcatcaggtcttataaaacacaggcgaactcacactggagaaaagccttatgaatgtaaggaatgtgggaaagcttttgctaactcttcacatcttactgtacatatgagaactcacactggtgagaagccttatcaatgtaaggaatgtggaaaagcctttattaattcctcttcctttaaaagtcacatgcagactcatcctggtgtaaaaccctatgactgtcaacagtgtgggaaagccttcattcgatcctcatttcttattcgacatttgagaagtcacagtgcagaaaggccttttgaatgtgaggaatgtgggaaagcctttagatactcctcgcaccttagtcaacataaaagaatacatacaggggagaggccatataaatgtcaaaagtgtgggcaagccttcagtatctcatcaggccttacagtacacatgagaactcacactggtgaacggccctttgaatgtcaggaatgtgggaaagcctttactcggtccacatatcttattcgacatctaagaagtcatagtgtggagaaaccatataaggaatgtgggcaaacctttagtaattcctcatgccttactgaatgtgtgtgaattggggctgatacttggaaagaatgtggtaaagccactacttcctcacacttactgaacatgtactcattcatagtggcaatgtacacagtcataaggaatgtgggaagccttccttggtgtctcagatcttaacaattccaatagaagagaagacatatgaatgtaaggaatgtgggaaaatcttggctccttccataggccttactattcatgtgtctgtgcatcctaggaaacaaactgaacgtaggaaacctgtcgatgcttacatcttactgagtctgtttgaactcatgctggagagaaatgctatgaatgtgaggaaggtggaaaagctttcattattttcctcgggccttactgagcttgtgagcacattggatataaatgcacgtcctctggctgtaaggaatgtgttgaaacctttcactctgccttataccttaatattcagctgtgatctcacaagtgtgaaaaatcttatgaatgtaaaatgtgtggagattcttctttgtttttagcttccactttgggaacatgtcaaagcacacattgagaagtcccatgagtgaaagagatgttggaaagcccttgaacttggtcgttaggaaacatccacactgaagaggaacctgactgtatggaaggtcaaaaaggctgtattaatttacatgcaaaaagtcacactagaggaatgccatatcagaatgcttttggtaaatatacatgttttaaagaggttatatatcattaataaaaatatctagctggtc

SEQ ID NO: 435651 - DNA, 4140 bp, Homo sapiens
cagcttgcagtcaagaccccctaccggtgacacttgcgctcttcggggaggtaaacagcatttcctctcagctctgggttggaaaaagccgcagcagctgatgggcccgggaacccgaggccccgccccctaggtggtcctagcctttgcgcgtgcgcggcgtgtctgcgtgggcgcatgcgcataacggccgccatcttaacagcgcgttcccgttggcgtctgaggtaagtttttgtttctgggcggcgttcggtggtgtcccggtgcagccacgcgagagtagaagggtggaaaggggaggtgcccagtgaaatggagcctgtcccgtgcactttcgggcatttcgagcatcttgtgggctctcccaagtcgcggcccctcctctgagagccacagtcaggaacagcatctctgccttcctgttcacggtgaccttcgcttggtgtcctcctggcctcagcaacctgacaattctgtcgtgtcccggcaggagtgcagtggtgagatcacggttcactgcagcattgacctccctgggctcaggtgttgctcccacctcagtcttctgaatagcttggagtatagagagatggctaatgaatggcgcttgatgacagatgagtaatgcctgttgctgaaagattgacggtatgaggcaagactcccactactacttaatcaagaggaattgagattgacttacccataagttcagacagtgtctcgaagagactttgggaacaagatattcaggcacatttcactgttagactcacaggatgctggccattggtctttccctttgtgatcatctttctcaagatgttttctgtcttcatgagtcaaaatttgaagaggaaaggatggtggctgggtggttgacaaattactctcaggactcagtgacctttgaggatgtggctgtggacttcacccaggaggagtggactttgctggatcaaactcagagaaacttatacagagatgtgatgctggagaactataagaatctagttgcagtagattgggagagtcatattaataccaaatggtcagcacctcagcagaattttttgcaggggaaaacatccagtgtggtggaaatgaattcagagtaaaagggagaatctcaatgaaataaatttggaaaacttctatgaaccatcattaattttcaccaacaggagagaaaccattttggagaggaactgtttgactttaaccaatgtgaaaaagccttgagtgaacactcatgccttaagactcacaggagaacttactttagaaagaaaacctgtgagtgtaatcaatgtgaaaaagccttcagaaaaccctctatctttactttacacaagaaaactgatatcggagaggaacttcctaactgtaatcaatgtgaaacagccttcagccaacatctacatcttgtttgcaagaaaactagccaaaatctacatcttgtttgcaagaaaactcacactcaagagaaaccatataaatgcagtgactgtgaaaaaggcttaccttcctcctcacacctcagagaatgtgtaagaatttatggtggagagagaccatatactcataaggagtatgtcgaaaccttttctcattctacagccctttttgtacacatgcaaactcaagatggagaaaaattctatgaatgtaaagcatgtgggaaacccttcactgagtcgtcatatcttactcaacatttaagaactcatagtagagtgttacctatagaacataagaaatttggcaaagcctttgctttttccccagatcttgctaaacatataagacttagaactagaggaaaacactatgtttgtaatgaatgtggcaaagaatttacttgtttctcaaaactcaacattcacataagggttcacactggagaaaaaccgtatgagtgcaacaaatgtgggaaagccttcactgattcatcaggtcttataaaacacaggcgaactcacactggagaaaagccttatgaatgtaaggaatgtgggaaagcttttgctaactcttcacatcttactgtacatatgagaactcacactggtgagaagccttatcaatgtaaggaatgtggaaaagcctttattaattcctcttcctttaaaagtcacatgcagactcatcctggtgtaaaaccctatgactgtcaacagtgtgggaaagccttcattcgatcctcatttcttattcgacatttgagaagtcacagtgcagaaaggccttttgaatgtgaggaatgtgggaaagcctttagatactcctcgcaccttagtcaacataaaagaatacatacaggggagaggccatataaatgtcaaaagtgtgggcaagccttcagtatctcatcaggccttacagtacacatgagaactcacactggtgaacggccctttgaatgtcaggaatgtgggaaagcctttactcggtccacatatcttattcgacatctaagaagtcatagtgtggagaaaccatataaggaatgtgggcaaacctttagtaattcctcatgccttactgaatgtgtgtgaattggggctgatacttggaaagaatgtggtaaagccactacttcctcacacttactgaacatgtactcattcatagtggcaatgtacacagtcataaggaatgtgggaagccttccttggtgtctcagatcttaacaattccaatagaagagaagacatatgaatgtaaggaatgtgggaaaatcttggctccttccataggccttactattcatgtgtctgtgcatcctaggaaacaaactgaacgtaggaaacctgtcgatgcttacatcttactgagtctgtttgaactcatgctggagagaaatgctatgaatgtgaggaaggtggaaaagctttcattattttcctcgggccttactgagcttgtgagcacattggatataaatgcacgtcctctggctgtaaggaatgtgttgaaacctttcactctgccttataccttaatattcagctgtgatctcacaagtgtgaaaaatcttatgaatgtaaaatgtgtggagattcttctttgtttttagcttccactttgggaacatgtcaaagcacacattgagaagtcccatgagtgaaagagatgttggaaagcccttgaacttggtcgttaggaaacatccacactgaagaggaacctgactgtatggaaggtcaaaaaggctgtattaatttacatgcaaaaagtcacactagaggaatgccatatcagaatgcttttggtaaatatacatgttttaaagaggttatatatcattaataaaaatatctagctggtctgaagatcctgagttatctcaattgttcacggttacagatggaactctttattattgaggagttccactctttcccccatttgtcactactacacttccctagtctttaaaacaattttaggctgggtgcagtggctcattcctgtaatcccagcactttgaaaggccgaagcgagtggatcatttgaggtcaggagttcgagaccagcctggccaacgtggtgaaaccccatctctactaaaaatacaaaaattagccaggcatggtggtacgtgcctgtaatcccagctactcgagaggttgaggcagaattgcttgaacccgggaggcggaagctgcagtgagctcagatcgcgccactgcactccagcctggatgatatggtaagaccatctcaaaaaaagaaaaaaaaattaaaatatcctcagagggttttttaatgaaaaacttagttataaggaattgaggaacatttaggggtacaaattttcacttattgcacacaagaaaattggtactggccaggcatgctggctcacaccttaattccagcaatttgggaggccaaggcagaaggatcacttgagcccaggagttcaagaccagcctgggcaatatagtgaaacctcatcttgacaaagaataaataagattaactgggtgtactggtttgtgcctgtagtcccagctatttaggaggctggggcaggaggattgcttgagcctggtcagggaggcagaggttgcagtgagccctgatcgtgccactacactctagcctgggcaacaggatgagaccctgtct

SEQ ID NO: 435652 - DNA, 3077 bp, Homo sapiens
cagcttgcagtcaagaccccctaccggtgacacttgcgctcttcggggaggtaaacagcatttcctctcagctctgggttggaaaaagccgcagcagctgatgggcccgggaacccgaggccccgccccctaggtggtcctagcctttgcgcgtgcgcggcgtgtctgcgtgggcgcatgcgcataacggccgccatcttaacagcgcgttcccgttggcgtctgaggtaagtttttgtttctgggcggcgttcggtggtgtcccggtgcagccacgcgagagtagaagggtggaaaggggaggtgcccagtgaaatggagcctgtcccgtgcactttcgggcatttcgagcatcttgtgggctctcccaagtcgcggcccctcctctgagagccacagtcaggaacagcatctctgccttcctgttcacggtgaccttcgcttggtgtcctcctggcctcagcaacctgacaattctgtcgtgtcccgagagatggctaatgaatggcgcttgatgacagatgagtaatgcctgttgctgaaagattgacggatcatctttctcaagatgttttctgtcttcatgagtcaaaatttgaagaggaaaggatggtggctgggtggttgacaaattactctcaggactcagtgacctttgaggatgtggctgtggacttcacccaggaggagtggactttgctggatcaaactcagagaaacttatacagagatgtgatgctggagaactataagaatctagttgcagtagattgggagagtcatattaataccaaatggtcagcacctcagcagaattttttgcaggggaaaacatccagtgtggtggaaatgaattcagagtaaaagggagaatctcaatgaaataaatttggaaaacttctatgaaccatcattaattttcaccaacaggagagaaaccattttggagaggaactgtttgactttaaccaatgtgaaaaagccttgagtgaacactcatgccttaagactcacaggagaacttactttagaaagaaaacctgtgagtgtaatcaatgtgaaaaagccttcagaaaaccctctatctttactttacacaagaaaactgatatcggagaggaacttcctaactgtaatcaatgtgaaacagccttcagccaacatctacatcttgtttgcaagaaaactagccaaaatctacatcttgtttgcaagaaaactcacactcaagagaaaccatataaatgcagtgactgtgaaaaaggcttaccttcctcctcacacctcagagaatgtgtaagaatttatggtggagagagaccatatactcataaggagtatgtcgaaaccttttctcattctacagccctttttgtacacatgcaaactcaagatggagaaaaattctatgaatgtaaagcatgtgggaaacccttcactgagtcgtcatatcttactcaacatttaagaactcatagtagagtgttacctatagaacataagaaatttggcaaagcctttgctttttccccagatcttgctaaacatataagacttagaactagaggaaaacactatgtttgtaatgaatgtggcaaagaatttacttgtttctcaaaactcaacattcacataagggttcacactggagaaaaaccgtatgagtgcaacaaatgtgggaaagccttcactgattcatcaggtcttataaaacacaggcgaactcacactggagaaaagccttatgaatgtaaggaatgtgggaaagcttttgctaactcttcacatcttactgtacatatgagaactcacactggtgagaagccttatcaatgtaaggaatgtggaaaagcctttattaattcctcttcctttaaaagtcacatgcagactcatcctggtgtaaaaccctatgactgtcaacagtgtgggaaagccttcattcgatcctcatttcttattcgacatttgagaagtcacagtgcagaaaggccttttgaatgtgaggaatgtgggaaagcctttagatactcctcgcaccttagtcaacataaaagaatacatacaggggagaggccatataaatgtcaaaagtgtgggcaagccttcagtatctcatcaggccttacagtacacatgagaactcacactggtgaacggccctttgaatgtcaggaatgtgggaaagcctttactcggtccacatatcttattcgacatctaagaagtcatagtgtggagaaaccatataaggaatgtgggcaaacctttagtaattcctcatgccttactgaatgtgtgtgaattggggctgatacttggaaagaatgtggtaaagccactacttcctcacacttactgaacatgtactcattcatagtggcaatgtacacagtcataaggaatgtgggaagccttccttggtgtctcagatcttaacaattccaatagaagagaagacatatgaatgtaaggaatgtgggaaaatcttggctccttccataggccttactattcatgtgtctgtgcatcctaggaaacaaactgaacgtaggaaacctgtcgatgcttacatcttactgagtctgtttgaactcatgctggagagaaatgctatgaatgtgaggaaggtggaaaagctttcattattttcctcgggccttactgagcttgtgagcacattggatataaatgcacgtcctctggctgtaaggaatgtgttgaaacctttcactctgccttataccttaatattcagctgtgatctcacaagtgtgaaaaatcttatgaatgtaaaatgtgtggagattcttctttgtttttagcttccactttgggaacatgtcaaagcacacattgagaagtcccatgagtgaaagagatgttggaaagcccttgaacttggtcgttaggaaacatccacactgaagaggaacctgactgtatggaaggtcaaaaaggctgtattaatttacatgcaaaaagtcacactagaggaatgccatatcagaatgcttttggtaaatatacatgttttaaagaggttatatatcattaataaaaatatctagctggtc

SEQ ID NO: 435653 - DNA, 2868 bp, Homo sapiens
aatgattgtactatcccactgtttactaattcagtctgactgtcatccatgctgatatgctttcattttgctgtgatagggagagaatgcacatgtgcttctcggaatttgtgctgtcactggagcatttatttgagtgtctataatgtattcagggttgtgctaaaacctgtcagtagagaacaataagaagaagtcacaatctagttgtgctgagatatattcagttaggtgaaagaggtgctcttcaagccatatgactagatgagatcaccggtgaatatgtacagacaggggagaagaaagtgaggaccatcaagtgataggagaccaaagagtcttgtcaaggcatgccaagacaaggtccctcattctccagtcaacatagtggagaacgtacttgcctgacgccagcatgtgtgtgatggtttaggactcagtgacctttgaggatgtggctgtggacttcacccaggaggagtggactttgctggatcaaactcagagaaacttatacagagatgtgatgctggagaactataagaatctagttgcagtagattgggagagtcatattaataccaaatggtcagcacctcagcagaattttttgcaggggaaaacatccagtgtggtggaaatgaattcagagtaaaagggagaatctcaatgaaataaatttggaaaacttctatgaaccatcattaattttcaccaacaggagagaaaccattttggagaggaactgtttgactttaaccaatgtgaaaaagccttgagtgaacactcatgccttaagactcacaggagaacttactttagaaagaaaacctgtgagtgtaatcaatgtgaaaaagccttcagaaaaccctctatctttactttacacaagaaaactgatatcggagaggaacttcctaactgtaatcaatgtgaaacagccttcagccaacatctacatcttgtttgcaagaaaactagccaaaatctacatcttgtttgcaagaaaactcacactcaagagaaaccatataaatgcagtgactgtgaaaaaggcttaccttcctcctcacacctcagagaatgtgtaagaatttatggtggagagagaccatatactcataaggagtatgtcgaaaccttttctcattctacagccctttttgtacacatgcaaactcaagatggagaaaaattctatgaatgtaaagcatgtgggaaacccttcactgagtcgtcatatcttactcaacatttaagaactcatagtagagtgttacctatagaacataagaaatttggcaaagcctttgctttttccccagatcttgctaaacatataagacttagaactagaggaaaacactatgtttgtaatgaatgtggcaaagaatttacttgtttctcaaaactcaacattcacataagggttcacactggagaaaaaccgtatgagtgcaacaaatgtgggaaagccttcactgattcatcaggtcttataaaacacaggcgaactcacactggagaaaagccttatgaatgtaaggaatgtgggaaagcttttgctaactcttcacatcttactgtacatatgagaactcacactggtgagaagccttatcaatgtaaggaatgtggaaaagcctttattaattcctcttcctttaaaagtcacatgcagactcatcctggtgtaaaaccctatgactgtcaacagtgtgggaaagccttcattcgatcctcatttcttattcgacatttgagaagtcacagtgcagaaaggccttttgaatgtgaggaatgtgggaaagcctttagatactcctcgcaccttagtcaacataaaagaatacatacaggggagaggccatataaatgtcaaaagtgtgggcaagccttcagtatctcatcaggccttacagtacacatgagaactcacactggtgaacggccctttgaatgtcaggaatgtgggaaagcctttactcggtccacatatcttattcgacatctaagaagtcatagtgtggagaaaccatataaggaatgtgggcaaacctttagtaattcctcatgccttactgaatgtgtgtgaattggggctgatacttggaaagaatgtggtaaagccactacttcctcacacttactgaacatgtactcattcatagtggcaatgtacacagtcataaggaatgtgggaagccttccttggtgtctcagatcttaacaattccaatagaagagaagacatatgaatgtaaggaatgtgggaaaatcttggctccttccataggccttactattcatgtgtctgtgcatcctaggaaacaaactgaacgtaggaaacctgtcgatgcttacatcttactgagtctgtttgaactcatgctggagagaaatgctatgaatgtgaggaaggtggaaaagctttcattattttcctcgggccttactgagcttgtgagcacattggatataaatgcacgtcctctggctgtaaggaatgtgttgaaacctttcactctgccttataccttaatattcagctgtgatctcacaagtgtgaaaaatcttatgaatgtaaaatgtgtggagattcttctttgtttttagcttccactttgggaacatgtcaaagcacacattgagaagtcccatgagtgaaagagatgttggaaagcccttgaacttggtcgttaggaaacatccacactgaagaggaacctgactgtatggaaggtcaaaaaggctgtattaatttacatgcaaaaagtcacactagaggaatgccatatcagaatgcttttggtaaatatacatgttttaaagaggttatatatcattaataaaaatatctagctggtc

SEQ ID NO: 435654 - DNA, 3105 bp, Homo sapiens
tgcagggtttgggcaacccaggcctgttgagttaacctttccgtacatcatttcatgacgatctcatggtcacgttggagaataagaagaacctcaggagtttaggtttgtgagtcagagtaacctgtattcatatcctggctcacactttctaattggtgatgttgggttaattagtgtctgagcttaggtttcctcaactaatatgatagtaacaaaaactgctttgataattatatgaacttatcctaccactgtttctggcacatgggtactaggtaaacgggatttgttattatttatgtccacgtggcataatactctagtggcactcacatgaacaacttcatcttctgcagagagatggctaatgaatggcgcttgatgacagatgagtaatgcctgttgctgaaagattgacggtatgaggcaagactcccactactacttaatcaagaggaattgagattgacttacccataagttcagacagtgtctcgaagagactttgggaacaagatattcaggcacatttcactgttagactcacaggatgctggccattggtctttccctttgtgatcatctttctcaagatgttttctgtcttcatgagtcaaaatttgaagaggaaaggatggtggctgggtggttgacaaattactctcaggactcagtgacctttgaggatgtggctgtggacttcacccaggaggagtggactttgctggatcaaactcagagaaacttatacagagatgtgatgctggagaactataagaatctagttgcagtagattgggagagtcatattaataccaaatggtcagcacctcagcagaattttttgcaggggaaaacatccagtgtggtggaaatgaattcagagtaaaagggagaatctcaatgaaataaatttggaaaacttctatgaaccatcattaattttcaccaacaggagagaaaccattttggagaggaactgtttgactttaaccaatgtgaaaaagccttgagtgaacactcatgccttaagactcacaggagaacttactttagaaagaaaacctgtgagtgtaatcaatgtgaaaaagccttcagaaaaccctctatctttactttacacaagaaaactgatatcggagaggaacttcctaactgtaatcaatgtgaaacagccttcagccaacatctacatcttgtttgcaagaaaactagccaaaatctacatcttgtttgcaagaaaactcacactcaagagaaaccatataaatgcagtgactgtgaaaaaggcttaccttcctcctcacacctcagagaatgtgtaagaatttatggtggagagagaccatatactcataaggagtatgtcgaaaccttttctcattctacagccctttttgtacacatgcaaactcaagatggagaaaaattctatgaatgtaaagcatgtgggaaacccttcactgagtcgtcatatcttactcaacatttaagaactcatagtagagtgttacctatagaacataagaaatttggcaaagcctttgctttttccccagatcttgctaaacatataagacttagaactagaggaaaacactatgtttgtaatgaatgtggcaaagaatttacttgtttctcaaaactcaacattcacataagggttcacactggagaaaaaccgtatgagtgcaacaaatgtgggaaagccttcactgattcatcaggtcttataaaacacaggcgaactcacactggagaaaagccttatgaatgtaaggaatgtgggaaagcttttgctaactcttcacatcttactgtacatatgagaactcacactggtgagaagccttatcaatgtaaggaatgtggaaaagcctttattaattcctcttcctttaaaagtcacatgcagactcatcctggtgtaaaaccctatgactgtcaacagtgtgggaaagccttcattcgatcctcatttcttattcgacatttgagaagtcacagtgcagaaaggccttttgaatgtgaggaatgtgggaaagcctttagatactcctcgcaccttagtcaacataaaagaatacatacaggggagaggccatataaatgtcaaaagtgtgggcaagccttcagtatctcatcaggccttacagtacacatgagaactcacactggtgaacggccctttgaatgtcaggaatgtgggaaagcctttactcggtccacatatcttattcgacatctaagaagtcatagtgtggagaaaccatataaggaatgtgggcaaacctttagtaattcctcatgccttactgaatgtgtgtgaattggggctgatacttggaaagaatgtggtaaagccactacttcctcacacttactgaacatgtactcattcatagtggcaatgtacacagtcataaggaatgtgggaagccttccttggtgtctcagatcttaacaattccaatagaagagaagacatatgaatgtaaggaatgtgggaaaatcttggctccttccataggccttactattcatgtgtctgtgcatcctaggaaacaaactgaacgtaggaaacctgtcgatgcttacatcttactgagtctgtttgaactcatgctggagagaaatgctatgaatgtgaggaaggtggaaaagctttcattattttcctcgggccttactgagcttgtgagcacattggatataaatgcacgtcctctggctgtaaggaatgtgttgaaacctttcactctgccttataccttaatattcagctgtgatctcacaagtgtgaaaaatcttatgaatgtaaaatgtgtggagattcttctttgtttttagcttccactttgggaacatgtcaaagcacacattgagaagtcccatgagtgaaagagatgttggaaagcccttgaacttggtcgttaggaaacatccacactgaagaggaacctgactgtatggaaggtcaaaaaggctgtattaatttacatgcaaaaagtcacactagaggaatgccatatcagaatgcttttggtaaatatacatgttttaaagaggttatatatcattaataaaaatatctagctggtc

SEQ ID NO: 435655 - DNA, 3465 bp, Homo sapiens
cagcttgcagtcaagaccccctaccggtgacacttgcgctcttcggggaggtaaacagcatttcctctcagctctgggttggaaaaagccgcagcagctgatgggcccgggaacccgaggccccgccccctaggtggtcctagcctttgcgcgtgcgcggcgtgtctgcgtgggcgcatgcgcataacggccgccatcttaacagcgcgttcccgttggcgtctgaggtaagtttttgtttctgggcggcgttcggtggtgtcccggtgcagccacgcgagagtagaagggtggaaaggggaggtgcccagtgaaatggagcctgtcccgtgcactttcgggcatttcgagcatcttgtgggctctcccaagtcgcggcccctcctctgagagccacagtcaggtctgtcctcaggggtcgaggcggctgcgctggggcctcggcccgggaggaggcggggggcacggcctttccattttccctgctcccctctgcagaagcctcatagggcccggcgcggcggctcacgcctgtcattcccagcgctttgggcggattgggtaggaggattacttgaggccaggagttcaagaccaggcagggcaacatagggagaccccccccccaaccatctctaatggaaaaaaaaaaaaaagtctccacatccagcgttgtgccttttctctataaggaacagcatctctgccttcctgttcacggtgaccttcgcttggtgtcctcctggcctcagcaacctgacaattctgtcgtgtcccggcaggagtgcagtggtgagatcacggttcactgcagcattgacctccctgggctcaggtgttgctcccacctcagtcttctgaatagcttggagtatagagagatggctaatgaatggcgcttgatgacagatgagtaatgcctgttgctgaaagattgacggatcatctttctcaagatgttttctgtcttcatgagtcaaaatttgaagaggaaaggatggtggctgggtggttgacaaattactctcaggactcagtgacctttgaggatgtggctgtggacttcacccaggaggagtggactttgctggatcaaactcagagaaacttatacagagatgtgatgctggagaactataagaatctagttgcagtagattgggagagtcatattaataccaaatggtcagcacctcagcagaattttttgcaggggaaaacatccagtgtggtggaaatgaattcagagtaaaagggagaatctcaatgaaataaatttggaaaacttctatgaaccatcattaattttcaccaacaggagagaaaccattttggagaggaactgtttgactttaaccaatgtgaaaaagccttgagtgaacactcatgccttaagactcacaggagaacttactttagaaagaaaacctgtgagtgtaatcaatgtgaaaaagccttcagaaaaccctctatctttactttacacaagaaaactgatatcggagaggaacttcctaactgtaatcaatgtgaaacagccttcagccaacatctacatcttgtttgcaagaaaactagccaaaatctacatcttgtttgcaagaaaactcacactcaagagaaaccatataaatgcagtgactgtgaaaaaggcttaccttcctcctcacacctcagagaatgtgtaagaatttatggtggagagagaccatatactcataaggagtatgtcgaaaccttttctcattctacagccctttttgtacacatgcaaactcaagatggagaaaaattctatgaatgtaaagcatgtgggaaacccttcactgagtcgtcatatcttactcaacatttaagaactcatagtagagtgttacctatagaacataagaaatttggcaaagcctttgctttttccccagatcttgctaaacatataagacttagaactagaggaaaacactatgtttgtaatgaatgtggcaaagaatttacttgtttctcaaaactcaacattcacataagggttcacactggagaaaaaccgtatgagtgcaacaaatgtgggaaagccttcactgattcatcaggtcttataaaacacaggcgaactcacactggagaaaagccttatgaatgtaaggaatgtgggaaagcttttgctaactcttcacatcttactgtacatatgagaactcacactggtgagaagccttatcaatgtaaggaatgtggaaaagcctttattaattcctcttcctttaaaagtcacatgcagactcatcctggtgtaaaaccctatgactgtcaacagtgtgggaaagccttcattcgatcctcatttcttattcgacatttgagaagtcacagtgcagaaaggccttttgaatgtgaggaatgtgggaaagcctttagatactcctcgcaccttagtcaacataaaagaatacatacaggggagaggccatataaatgtcaaaagtgtgggcaagccttcagtatctcatcaggccttacagtacacatgagaactcacactggtgaacggccctttgaatgtcaggaatgtgggaaagcctttactcggtccacatatcttattcgacatctaagaagtcatagtgtggagaaaccatataaggaatgtgggcaaacctttagtaattcctcatgccttactgaatgtgtgtgaattggggctgatacttggaaagaatgtggtaaagccactacttcctcacacttactgaacatgtactcattcatagtggcaatgtacacagtcataaggaatgtgggaagccttccttggtgtctcagatcttaacaattccaatagaagagaagacatatgaatgtaaggaatgtgggaaaatcttggctccttccataggccttactattcatgtgtctgtgcatcctaggaaacaaactgaacgtaggaaacctgtcgatgcttacatcttactgagtctgtttgaactcatgctggagagaaatgctatgaatgtgaggaaggtggaaaagctttcattattttcctcgggccttactgagcttgtgagcacattggatataaatgcacgtcctctggctgtaaggaatgtgttgaaacctttcactctgccttataccttaatattcagctgtgatctcacaagtgtgaaaaatcttatgaatgtaaaatgtgtggagattcttctttgtttttagcttccactttgggaacatgtcaaagcacacattgagaagtcccatgagtgaaagagatgttggaaagcccttgaacttggtcgttaggaaacatccacactgaagaggaacctgactgtatggaaggtcaaaaaggctgtattaatttacatgcaaaaagtcacactagaggaatgccatatcagaatgcttttggtaaatatacatgttttaaagaggttatatatcattaataaaaatatctagctggtc

SEQ ID NO: 435656 - DNA, 2276 bp, Homo sapiens
cgccatctcccatagctgtcgcctgcagctgagaaagggttgctgtcccagcaggccaggtccagggctgggtataagtaagcaagaagagggcctgggagaagagtctgacgagcaaggggaaggtagccaaggatggagtgaaatacagggtgacctgtgtttttcccctggctcctttggaaattatgggaaaaaatcaaataccaaggaagaaaaatctataatgaaattagatgtggatttctttttatgtattcagcttgggggcttatgatacttctagtacccaaagagatgcggtcttgctgtgttgcctaggctggtctcaaactcctgctctcaagtgatcctcctgcctcagcctcctgagtacatttatatttaaagtaattattgatggctctgcctgcttaggactctgcccagccaggaaggaaacctacaggaggaagaatggctgcagggtggctgacaacctggtcacagaactcagtaaccttccaggaagtggcagtggacttttcccaggaggagtgggcattgctggaccctgctcaaaaaaatctatacaaagatgtgatgctggagaactttaggaacctggcctcagtagggtatcagctctgcagacacagtctgatctccaaggtggatcaagaacagctgaagacagatgaaagaggaattttacaaggtgactgtgcagactgggaaactcaacttaaaccaaaagatacaattgctatgcagaacattcctgggggaaaaacatccaatggcataaacatgaactgtgtcagaactcactctggagagatgccctatgaatgcagtgactgtgggaaagccttcatttttcagtcttcccttaagaaacacatgagatctcatactggagagaagccttatgagtgtgatcactgtggaaaatcctttagccagagctctcatctgaatgtgcacaaaagaactcacactggagagaaaccctatgactgtaaggaatgtgggaaggctttcactgttccttcatcccttcagaaacatgtgagaacccacactggagagaaaccctatgaatgcagtgactgtggaaaagccttcattgatcagtcatcccttaagaaacacacacgctctcacactggagagaagccttatgagtgtaaccagtgtggaaagtccttcagcacaggctcttaccttattgtgcacaagagaactcacactggtgagaaaacctatgagtgtaaagaatgtgggaaggcctttaggaattcctcttgcctgagggtacacgtgagaactcacactggagagaagccttataaatgttttcagtgtgaaaaagcctttagcacaagcactaaccttataatgcacaagcgaatccacaatggccagaaactccatgaatgaaatgactcagggaagtgtttgttgcccctcatgcctcctttctcactttagaacatatattggagagaagccctgttatggtcacctggaaacagccttctggcccaactctggatgcctgttatactgggacaaaccttataaatgttatagctatgattgtttttatcagtgagtatttcattcttatatgtgtcacaactgtagatcctatgaatattttagttatcttttcagtttaattgcattgtgaacagaacacatggtcttcaatatgtagattctgtgtgacatagatttgaacataattgctggacactgactgatgtactgtggcagacagaactagttgctgtctcaatatccattcctcccttctttcttaaagtaataaaatttaccatttagttcaaaaaagcaatgtggacagttttcacccagcttcccttacagctgtgagcggccaaatatgttcacatccctagcccatgcaaagtaggcagaagtcactggatacagctgctaaggaagctcatggaaatgggaatatctcatctggtgtttttttcttaactatttgccctttgtcttgtcccttatttcctagaaaatatatacaccaagaggaggacagagaaaggatactaaatgaaacaacaggggagatacaatattatctggttgcactaatcctgtgctgcttatctctggatttcatgttacatgagaaaaattaactgccatgtggtttaaaccactcttgtgggaagttcctctttcagctgatttcagtcccaactgttacatctaataaatggtcaagttttaggaatcgttcaagtatggttgaaaaa

SEQ ID NO: 435657 - DNA, 3105 bp, Homo sapiens
cagcttgcagtcaagaccccctaccggtgacacttgcgctcttcggggaggtaaacagcatttcctctcagctctgggttggaaaaagccgcagcagctgatgggcccgggaacccgaggccccgccccctaggtggtcctagcctttgcgcgtgcgcggcgtgtctgcgtgggcgcatgcgcataacggccgccatcttaacagcgcgttcccgttggcgtctgaggtaagtttttgtttctgggcggcgttcggtggtgtcccggtgcagccacgcgagagtagaagggtggaaaggggaggtgcccagtgaaatggagcctgtcccgtgcactttcgggcatttcgagcatcttgtgggctctcccaagtcgcggcccctcctctgagagccacagtcaggtctgtcctcaggggtcgaggcggctgcgctggggcctcggcccgggaggaggcggggggcacggcctttccattttccctgctcccctctgcagaagcctcatagggcccggcgcggcggctcacgcctgtcattcccagcgctttgggcggattgggtaggaggattacttgaggccaggagttcaagaccaggcagggcaacatagggagaccccccccccaaccatctctaatggaaaaaaaaaaaaaagtctccacatccagcgttgtgccttttctctataaggaacagcatctctgccttcctgttcacggtgaccttcgcttggtgtcctcctggcctcagcaacctgacaattctgtcgtgtcccgggctgggtataagtaagcaagaagagggcctgggagaagagtctgacgagcaaggggaaggtagccaaggatggagtgaaatacagggtgacctgtgtttttcccctggctcctttggaaattatgggaaaaaatcaaataccaaggaagaaaaatctataatgaaattagatgtggatttctttttatgtattcagcttgggggcttatgatacttctagtacccaaagagatgcggtcttgctgtgttgcctaggctggtctcaaactcctgctctcaagtgatcctcctgcctcagcctcctgagtacatttatatttaaagtaattattgatggctctgcctgcttaggactctgcccagccaggaaggaaacctacaggaggaagaatggctgcagggtggctgacaacctggtcacagaactcagtaaccttccaggaagtggcagtggacttttcccaggaggagtgggcattgctggaccctgctcaaaaaaatctatacaaagatgtgatgctggagaactttaggaacctggcctcagtagggtatcagctctgcagacacagtctgatctccaaggtggatcaagaacagctgaagacagatgaaagaggaattttacaaggtgactgtgcagactgggaaactcaacttaaaccaaaagatacaattgctatgcagaacattcctgggggaaaaacatccaatggcataaacatgaatcctcatggaagagaattcctgtgaataaggtgaaagtgaaaaagcctctagtcaccacttactcccttttcaacaggcagaaaatcaacctggtgagcactccctggagtgtaaccattgtgggaaattcagaaagaacactcgctttatttgtacaagatattgcaagggagagaaatgctataaatatataaagtatagcaaagtcttcaaccatccctcaactcttaggagtcatgtgagcattcacattggagagaaaactcttgaatttactgattgtagaaaagctttcaatcaagagtcatccctcaggaaacacttaagaactcccacaggacagaagtttcaggagtatgagcaatgtgatatgtccttcagcctacactcttcctgctcagtacgtgagcaaatacctactggagagaaaggtgatgaatgcagtgactatggcaaaatatctccccttagtgtccacacaaaaactggtagtgtggaggagggtttggaatgtaatgaacatgagaaaactttcactgaccctttgtcccttcagaactgtgtcagaactcactctggagagatgccctatgaatgcagtgactgtgggaaagccttcatttttcagtcttcccttaagaaacacatgagatctcatactggagagaagccttatgagtgtgatcactgtggaaaatcctttagccagagctctcatctgaatgtgcacaaaagaactcacactggagagaaaccctatgactgtaaggaatgtgggaaggctttcactgttccttcatcccttcagaaacatgtgagaacccacactggagagaaaccctatgaatgcagtgactgtggaaaagccttcattgatcagtcatcccttaagaaacacacacgctctcacactggagagaagccttatgagtgtaaccagtgtggaaagtccttcagcacaggctcttaccttattgtgcacaagagaactcacactggtgagaaaacctatgagtgtaaagaatgtgggaaggcctttaggaattcctcttgcctgagggtacacgtgagaactcacactggagagaagccttataaatgttttcagtgtgaaaaagcctttagcacaagcactaaccttataatgcacaagcgaatccacaatggccagaaactccatgaatgaaatgactcagggaagtgtttgttgcccctcatgcctcctttctcactttagaacatatattggagagaagccctgttatggtcacctggaaacagccttctggcccaactctggatgcctgttatactgggacaaaccttataaatgttatagctatgattgtttttatcagtgagtatttcattcttatatgtgtcacaactgtagatcctatgaatattttagttatcttttcagtttaattgcattgtgaacagaacacatggtcttcaatatgtagattctgtgtgacatagatttgaacataattgctggacactgactgatgtactgtggcagacagaactagttgctgtctcaatatccattcctcccttctttcttaaagtaataaaatttaccatttagttc

SEQ ID NO: 435658 - DNA, 2580 bp, Homo sapiens
tgcagggtttgggcaacccaggcctgttgagttaacctttccgtacatcatttcatgacgatctcatggtcacgttggagaataagaagaacctcaggagtttaggtttgtgagtcagagtaacctgtattcatatcctggctcacactttctaattggtgatgttgggttaattagtgtctgagcttaggtttcctcaactaatatgatagtaacaaaaactgctttgataattatatgaacttatcctaccactgtttctggcacatgggtactaggtaaacgggatttgttattatttatgtccacgtggcataatactctagtggcactcacatgaacaacttcatcttctgcagagagatggctaatgaatggcgcttgatgacagatgagtaatgcctgttgctgaaagattgacggtatgaggcaagactcccactactacttaatcaagaggaattgagattgacttacccataagttcagacagtgtctcgaagagactttgggaacaagatattcaggcacatttcactgttagactcacaggatgctggccattggtctttccctttgtgatcatctttctcaagatgttttctgtcttcatgagtcaaaatttgaagaggaaaggatggtggctgggtggttgacaaattactctcagttgctttgattagaaagtttggctttgctgagatacgtagttggaaaagagagaagcattttcagtttcttcagtgtactagatggctgactgggaagattccagggtcccaacaggcttcagagttgcgaaggctctagagggctgggtataagtaagcaagaagagggcctgggagaagagtctgacgagcaaggggaaggtagccaaggatggagtgaaatacagggtgacctgtgtttttcccctggctcctttggaaattatgggaaaaaatcaaataccaaggaagaaaaatctataatgaaattagatgtggatttctttttatgtattcagcttgggggcttatgatacttctagtacccaaagagatgcggtcttgctgtgttgcctaggctggtctcaaactcctgctctcaagtgatcctcctgcctcagcctcctgagtacatttatatttaaagtaattattgatggctctgcctgcttaggactctgcccagccaggaaggaaacctacaggaggaagaatggctgcagggtggctgacaacctggtcacagaactcagtaaccttccaggaagtggcagtggacttttcccaggaggagtgggcattgctggaccctgctcaaaaaaatctatacaaagatgtgatgctggagaactttaggaacctggcctcagtagggtatcagctctgcagacacagtctgatctccaaggtggatcaagaacagctgaagacagatgaaagaggaattttacaaggtgactgtgcagactgggaaactcaacttaaaccaaaagatacaattgctatgcagaacattcctgggggaaaaacatccaatggcataaacatgaactgtgtcagaactcactctggagagatgccctatgaatgcagtgactgtgggaaagccttcatttttcagtcttcccttaagaaacacatgagatctcatactggagagaagccttatgagtgtgatcactgtggaaaatcctttagccagagctctcatctgaatgtgcacaaaagaactcacactggagagaaaccctatgactgtaaggaatgtgggaaggctttcactgttccttcatcccttcagaaacatgtgagaacccacactggagagaaaccctatgaatgcagtgactgtggaaaagccttcattgatcagtcatcccttaagaaacacacacgctctcacactggagagaagccttatgagtgtaaccagtgtggaaagtccttcagcacaggctcttaccttattgtgcacaagagaactcacactggtgagaaaacctatgagtgtaaagaatgtgggaaggcctttaggaattcctcttgcctgagggtacacgtgagaactcacactggagagaagccttataaatgttttcagtgtgaaaaagcctttagcacaagcactaaccttataatgcacaagcgaatccacaatggccagaaactccatgaatgaaatgactcagggaagtgtttgttgcccctcatgcctcctttctcactttagaacatatattggagagaagccctgttatggtcacctggaaacagccttctggcccaactctggatgcctgttatactgggacaaaccttataaatgttatagctatgattgtttttatcagtgagtatttcattcttatatgtgtcacaactgtagatcctatgaatattttagttatcttttcagtttaattgcattgtgaacagaacacatggtcttcaatatgtagattctgtgtgacatagatttgaacataattgctggacactgactgatgtactgtggcagacagaactagttgctgtctcaatatccattcctcccttctttcttaaagtaataaaatttaccatttagttc

SEQ ID NO: 435659 - DNA, 2345 bp, Homo sapiens
cagcttgcagtcaagaccccctaccggtgacacttgcgctcttcggggaggtaaacagcatttcctctcagctctgggttggaaaaagccgcagcagctgatgggcccgggaacccgaggccccgccccctaggtggtcctagcctttgcgcgtgcgcggcgtgtctgcgtgggcgcatgcgcataacggccgccatcttaacagcgcgttcccgttggcgtctgaggtaagtttttgtttctgggcggcgttcggtggtgtcccggtgcagccacgcgagagtagaagggtggaaaggggaggtgcccagtgaaatggagcctgtcccgtgcactttcgggcatttcgagcatcttgtgggctctcccaagtcgcggcccctcctctgagagccacagtcaggaacagcatctctgccttcctgttcacggtgaccttcgcttggtgtcctcctggcctcagcaacctgacaattctgtcgtgtcccgatcatctttctcaagatgttttctgtcttcatgagtcaaaatttgaagaggaaaggatggtggctgggtggttgacaaattactctcagttgctttgattagaaagtttggctttgctgagatacgtagttggaaaagagagaagcattttcagtttcttcagtgtactagatggctgactgggaagattccagggtcccaacaggcttcagagttgcgaaggctctagagggctgggtataagtaagcaagaagagggcctgggagaagagtctgacgagcaaggggaaggtagccaaggatggagtgaaatacaggagatgcggtcttgctgtgttgcctaggctggtctcaaactcctgctctcaagtgatcctcctgcctcagcctcctgagtacatttatatttaaagtaattattgatggctctgcctgcttaggactctgcccagccaggaaggaaacctacaggaggaagaatggctgcagggtggctgacaacctggtcacagaactcagtaaccttccaggaagtggcagtggacttttcccaggaggagtgggcattgctggaccctgctcaaaaaaatctatacaaagatgtgatgctggagaactttaggaacctggcctcagtagggtatcagctctgcagacacagtctgatctccaaggtggatcaagaacagctgaagacagatgaaagaggaattttacaaggtgactgtgcagactgggaaactcaacttaaaccaaaagatacaattgctatgcagaacattcctgggggaaaaacatccaatggcataaacatgaactgtgtcagaactcactctggagagatgccctatgaatgcagtgactgtgggaaagccttcatttttcagtcttcccttaagaaacacatgagatctcatactggagagaagccttatgagtgtgatcactgtggaaaatcctttagccagagctctcatctgaatgtgcacaaaagaactcacactggagagaaaccctatgactgtaaggaatgtgggaaggctttcactgttccttcatcccttcagaaacatgtgagaacccacactggagagaaaccctatgaatgcagtgactgtggaaaagccttcattgatcagtcatcccttaagaaacacacacgctctcacactggagagaagccttatgagtgtaaccagtgtggaaagtccttcagcacaggctcttaccttattgtgcacaagagaactcacactggtgagaaaacctatgagtgtaaagaatgtgggaaggcctttaggaattcctcttgcctgagggtacacgtgagaactcacactggagagaagccttataaatgttttcagtgtgaaaaagcctttagcacaagcactaaccttataatgcacaagcgaatccacaatggccagaaactccatgaatgaaatgactcagggaagtgtttgttgcccctcatgcctcctttctcactttagaacatatattggagagaagccctgttatggtcacctggaaacagccttctggcccaactctggatgcctgttatactgggacaaaccttataaatgttatagctatgattgtttttatcagtgagtatttcattcttatatgtgtcacaactgtagatcctatgaatattttagttatcttttcagtttaattgcattgtgaacagaacacatggtcttcaatatgtagattctgtgtgacatagatttgaacataattgctggacactgactgatgtactgtggcagacagaactagttgctgtctcaatatccattcctcccttctttcttaaagtaataaaatttaccatttagttc

SEQ ID NO: 435660 - DNA, 1998 bp, Homo sapiens
gaggaaaaagagaccttgtgcgaggcaaaactggagatgcaaagtaaaaagatgaggagtgctgaaaggggtgtcttgtacttagaatcctagggatccagctagggcggcagtcgtcagaggttgtaatggggactgatgaggtaattgcgtcgagggggaggttcgattttcatggtgtatgagaaaacgtcgagtatctacaagcaacctttcactgttattttcagggctgggtataagtaagcaagaagagggcctgggagaagagtctgacgagcaaggggaaggtagccaaggatggagtgaaatacagggtgacctgtgtttttcccctggctcctttggaaattatgggaaaaaatcaaataccaaggaagaaaaatctataatgaaattagatgtggatttctttttatgtattcagcttgggggcttatgatacttctagtacccaaagagatgcggtcttgctgtgttgcctaggctggtctcaaactcctgctctcaagtgatcctcctgcctcagcctcctgagtacatttatatttaaagtaattattgatggctctgcctgcttaggactctgcccagccaggaaggaaacctacaggaggaagaatggctgcagggtggctgacaacctggtcacagaactcagtaaccttccaggaagtggcagtggacttttcccaggaggagtgggcattgctggaccctgctcaaaaaaatctatacaaagatgtgatgctggagaactttaggaacctggcctcagtagggtatcagctctgcagacacagtctgatctccaaggtggatcaagaacagctgaagacagatgaaagaggaattttacaaggtgactgtgcagactgggaaactcaacttaaaccaaaagatacaattgctatgcagaacattcctgggggaaaaacatccaatggcataaacatgaactgtgtcagaactcactctggagagatgccctatgaatgcagtgactgtgggaaagccttcatttttcagtcttcccttaagaaacacatgagatctcatactggagagaagccttatgagtgtgatcactgtggaaaatcctttagccagagctctcatctgaatgtgcacaaaagaactcacactggagagaaaccctatgactgtaaggaatgtgggaaggctttcactgttccttcatcccttcagaaacatgtgagaacccacactggagagaaaccctatgaatgcagtgactgtggaaaagccttcattgatcagtcatcccttaagaaacacacacgctctcacactggagagaagccttatgagtgtaaccagtgtggaaagtccttcagcacaggctcttaccttattgtgcacaagagaactcacactggtgagaaaacctatgagtgtaaagaatgtgggaaggcctttaggaattcctcttgcctgagggtacacgtgagaactcacactggagagaagccttataaatgttttcagtgtgaaaaagcctttagcacaagcactaaccttataatgcacaagcgaatccacaatggccagaaactccatgaatgaaatgactcagggaagtgtttgttgcccctcatgcctcctttctcactttagaacatatattggagagaagccctgttatggtcacctggaaacagccttctggcccaactctggatgcctgttatactgggacaaaccttataaatgttatagctatgattgtttttatcagtgagtatttcattcttatatgtgtcacaactgtagatcctatgaatattttagttatcttttcagtttaattgcattgtgaacagaacacatggtcttcaatatgtagattctgtgtgacatagatttgaacataattgctggacactgactgatgtactgtggcagacagaactagttgctgtctcaatatccattcctcccttctttcttaaagtaataaaatttaccatttagttc

SEQ ID NO: 435661 - DNA, 1885 bp, Homo sapiens
aatctgtaaacctaggttaacacttgctggctcacagagaataaccacaagtaaacatctatgtaaatatgattttagagttaagtatttagtacataattcattcattcttcactcagtattagaaaaactgtattaaagaagccctttgctgggaaggaatagagccttggacagaggagtgagcttattcaactcgaaaaagctaatagggcaaaagtcatacgcacctactgaaaatggtacacatgtcagtcatgatcatgtgcttcctatatatggcagaatcctcatggaagagaattcctgtgaataaggtgaaagtgaaaaagcctctagtcaccacttactcccttttcaacaggcagaaaatcaacctggtgagcactccctggagtgtaaccattgtgggaaattcagaaagaacactcgctttatttgtacaagatattgcaagggagagaaatgctataaatatataaagtatagcaaagtcttcaaccatccctcaactcttaggagtcatgtgagcattcacattggagagaaaactcttgaatttactgattgtagaaaagctttcaatcaagagtcatccctcaggaaacacttaagaactcccacaggacagaagtttcaggagtatgagcaatgtgatatgtccttcagcctacactcttcctgctcagtacgtgagcaaatacctactggagagaaaggtgatgaatgcagtgactatggcaaaatatctccccttagtgtccacacaaaaactggtagtgtggaggagggtttggaatgtaatgaacatgagaaaactttcactgaccctttgtcccttcagaactgtgtcagaactcactctggagagatgccctatgaatgcagtgactgtgggaaagccttcatttttcagtcttcccttaagaaacacatgagatctcatactggagagaagccttatgagtgtgatcactgtggaaaatcctttagccagagctctcatctgaatgtgcacaaaagaactcacactggagagaaaccctatgactgtaaggaatgtgggaaggctttcactgttccttcatcccttcagaaacatgtgagaacccacactggagagaaaccctatgaatgcagtgactgtggaaaagccttcattgatcagtcatcccttaagaaacacacacgctctcacactggagagaagccttatgagtgtaaccagtgtggaaagtccttcagcacaggctcttaccttattgtgcacaagagaactcacactggtgagaaaacctatgagtgtaaagaatgtgggaaggcctttaggaattcctcttgcctgagggtacacgtgagaactcacactggagagaagccttataaatgttttcagtgtgaaaaagcctttagcacaagcactaaccttataatgcacaagcgaatccacaatggccagaaactccatgaatgaaatgactcagggaagtgtttgttgcccctcatgcctcctttctcactttagaacatatattggagagaagccctgttatggtcacctggaaacagccttctggcccaactctggatgcctgttatactgggacaaaccttataaatgttatagctatgattgtttttatcagtgagtatttcattcttatatgtgtcacaactgtagatcctatgaatattttagttatcttttcagtttaattgcattgtgaacagaacacatggtcttcaatatgtagattctgtgtgacatagatttgaacataattgctggacactgactgatgtactgtggcagacagaactagttgctgtctcaatatccattcctcccttctttcttaaagtaataaaatttaccatttagttc

SEQ ID NO: 435662 - DNA, 3060 bp, Homo sapiens
tgcagggtttgggcaacccaggcctgttgagttaacctttccgtacatcatttcatgacgatctcatggtcacgttggagaataagaagaacctcaggagtttaggtttgtgagtcagagtaacctgtattcatatcctggctcacactttctaattggtgatgttgggttaattagtgtctgagcttaggtttcctcaactaatatgatagtaacaaaaactgctttgataattatatgaacttatcctaccactgtttctggcacatgggtactaggtaaacgggatttgttattatttatgtccacgtggcataatactctagtggcactcacatgaacaacttcatcttctgcagagagatggctaatgaatggcgcttgatgacagatgagtaatgcctgttgctgaaagattgacggtatgaggcaagactcccactactacttaatcaagaggaattgagattgacttacccataagttcagacagtgtctcgaagagactttgggaacaagatattcaggcacatttcactgttagactcacaggatgctggccattggtctttccctttgtgatcatctttctcaagatgttttctgtcttcatgagtcaaaatttgaagaggaaaggatggtggctgggtggttgacaaattactctcagttgctttgattagaaagtttggctttgctgagatacgtagttggaaaagagagaagcattttcagtttcttcagtgtactagatggctgactgggaagattccagggtcccaacaggcttcagagttgcgaaggctctagagggctgggtataagtaagcaagaagagggcctgggagaagagtctgacgagcaaggggaaggtagccaaggatggagtgaaatacagggtgacctgtgtttttcccctggctcctttggaaattatgggaaaaaatcaaataccaaggaagaaaaatctataatgaaattagatgtggatttctttttatgtattcagcttgggggcttatgatacttctagtacccaaagagatgcggtcttgctgtgttgcctaggctggtctcaaactcctgctctcaagtgatcctcctgcctcagcctcctgagtacatttatatttaaagtaattattgatggctctgcctgcttaggactctgcccagccaggaaggaaacctacaggaggaagaatggctgcagggtggctgacaacctggtcacagaactcagtaaccttccaggaagtggcagtggacttttcccaggaggagtgggcattgctggaccctgctcaaaaaaatctatacaaagatgtgatgctggagaactttaggaacctggcctcagtagggtatcagctctgcagacacagtctgatctccaaggtggatcaagaacagctgaagacagatgaaagaggaattttacaaggtgactgtgcagactgggaaactcaacttaaaccaaaagatacaattgctatgcagaacattcctgggggaaaaacatccaatggcataaacatggcagaaaatcaacctggtgagcactccctggagtgtaaccattgtgggaaattcagaaagaacactcgctttatttgtacaagatattgcaagggagagaaatgctataaatatataaagtatagcaaagtcttcaaccatccctcaactcttaggagtcatgtgagcattcacattggagagaaaactcttgaatttactgattgtagaaaagctttcaatcaagagtcatccctcaggaaacacttaagaactcccacaggacagaagtttcaggagtatgagcaatgtgatatgtccttcagcctacactcttcctgctcagtacgtgagcaaatacctactggagagaaaggtgatgaatgcagtgactatggcaaaatatctccccttagtgtccacacaaaaactggtagtgtggaggagggtttggaatgtaatgaacatgagaaaactttcactgaccctttgtcccttcagaactgtgtcagaactcactctggagagatgccctatgaatgcagtgactgtgggaaagccttcatttttcagtcttcccttaagaaacacatgagatctcatactggagagaagccttatgagtgtgatcactgtggaaaatcctttagccagagctctcatctgaatgtgcacaaaagaactcacactggagagaaaccctatgactgtaaggaatgtgggaaggctttcactgttccttcatcccttcagaaacatgtgagaacccacactggagagaaaccctatgaatgcagtgactgtggaaaagccttcattgatcagtcatcccttaagaaacacacacgctctcacactggagagaagccttatgagtgtaaccagtgtggaaagtccttcagcacaggctcttaccttattgtgcacaagagaactcacactggtgagaaaacctatgagtgtaaagaatgtgggaaggcctttaggaattcctcttgcctgagggtacacgtgagaactcacactggagagaagccttataaatgttttcagtgtgaaaaagcctttagcacaagcactaaccttataatgcacaagcgaatccacaatggccagaaactccatgaatgaaatgactcagggaagtgtttgttgcccctcatgcctcctttctcactttagaacatatattggagagaagccctgttatggtcacctggaaacagccttctggcccaactctggatgcctgttatactgggacaaaccttataaatgttatagctatgattgtttttatcagtgagtatttcattcttatatgtgtcacaactgtagatcctatgaatattttagttatcttttcagtttaattgcattgtgaacagaacacatggtcttcaatatgtagattctgtgtgacatagatttgaacataattgctggacactgactgatgtactgtggcagacagaactagttgctgtctcaatatccattcctcccttctttcttaaagtaataaaatttaccatttagttc

SEQ ID NO: 435663 - DNA, 640 bp, Homo sapiens
ctgctcaaaaaaatctatacaaagatgtgatgctggagaactttaggaacctggcctcagtaggtaaggctggcctcatttcttcatttgtttatgtagcaaatagttcttaagcacatattatgttccagaatctgtggaaagaatagcaatacagtggttaaccccaaaatgaatggtccctgcccttgagggggcagtccagtggcttcccatgaaaatgcactgatttcattttctctatcactaatagcttaaggtaatttgcaatctgtgtctcatcttgtgtataggtttcaagggtcacttccatatagggcgtggaccatgctttttggttcttgtgaaagaaagagctcggctctgattgttttgttgttcctaaagctgcacttgactattttaataatcctttagttaaagccaaagtatggcaatcagttttgtggaatatttaattctcacacatttctcccacatccttgctttctgcgtgagcagggtatcagctctgcagacacagtctgatctccaaggtggatcaagaacagctgaagacagatgaaagaggaattttacaaggtgactgtgcaggtgagccttgggcagaacagggtgcagccttggccagtgagggtta

SEQ ID NO: 435664 - DNA, 715 bp, Homo sapiens
gaattggggcaaattttaaaaatattttagtaatatacataacatgctttttaaaaataacttttccacaatggcaacaaaataatgtggaaagagcgacatattgcatgcttttgcaaatctctttaatgtcttaagagcttaatagatgacagctgaattctcatacttgtttctacattttttgccattagttgctttgattagaaagtttggctttgctgagatacgtagttggaaaagagagaagcattttcaggtaattttggattttctttgatattacaccaaaactcaagaaatggtagtttctgaaagattagttgcaatatggaatgaaatcctgttaaggaattgtttctattctgttacattaaaattcatttgtttgtcttgcactatttttttcttttccttttatttatttatttatttatttttgagacagagtctcgctctgtcgcccaggctggaatgcagtggcgcaatctcggctcactgcaagctctgcctcccaggttcacaccattctcctgcctcagtctcccgagtagctggggctacaggctcccgccaccgcgcccggctaattttttgtatttttaatagagacggggtttcactgtgttagccaagatggtctcaatctcctgacctcgtgatccacctgcctcggcctccgaaagtgttgggattacaggcgtgaggcactgcg

SEQ ID NO: 435665 - DNA, 328 bp, Homo sapiens
gaaaaatcatgggtatcttctttcttagcaaagcttattatttaggtgtatctgcattcttggctctctgaggtatttttaaaaggtatgattttgtagttatgtggcttgtgttttaagagagaaggatcaacccttggaagttctacattctaatatgaatgtatgagaaaatgtatcttggtttttgttttgttggatttttgagacaaggtcttactctgttgcccaggcaggagtgcagtggtgagatcacggttcactgcagcattgacctccctgggctcaggtgttgctcccacctcagtcttctgaatagcttggagta

SEQ ID NO: 435666 - DNA, 517 bp, Homo sapiens
aagtgataggagaccaaagagtcttgtcaaggcatgccaagacaaggtccctcattctccagtcaacatagtggagaacgtacttgcctgacgccagcatgtgtgtgatggtttaggactcagtgacctttgaggatgtggctgtggacttcacccaggaggagtggactttgctggatcaaactcagagaaacttatacagagatgtgatgctggagaactataagaatctagttgcagtaggtaaggctggtaccattcttttcatttagtttttttctggaacaaatgtgtcttaagtaactatgttctagactctgcttgttaatgggctgcattggtaaacaggcgaaacattgtttccatctcatagaccttactgccttgtgatttttctgatgaaattgaagatctgttcattgttctagctttattttctccatggataaaagacttagagcttcttgaatatgtgtatgagcttaagcctgggtttcatgggaaggattgctagtcc

SEQ ID NO: 435667 - DNA, 801 bp, Homo sapiens
agaggaagattggaaattccttaaaatggaaaagcagcacaataaccttgagacatttgagactagtgtttttcacccaaaaataatctgtctcttggagagactatggatcatgagtttgacaaacactctaaacatccctcagaatatatttgtttacatatttccttcaacattcccatatgtatctcagatgtttttgataaataattcactcttgggccgttatcagctaagctctatttagaagccctctgaaagtaaagaatataacagaacttcctgcagtcactttgttccacttgaaaacactcaggtctgaaccatgccttgcaatgaaaatggcaggaacaaacagtttcaattatactaacttattttccatgtgtaacagaattcagagtaaaagggagaatctcaatgaaataaatttggaaaacttctatgaaccatcattaattttcaccaacaggagagaaaccattttggagaggaactgtttgactttaaccaatgtgaaaaagccttgagtgaacactcatgccttaagactcacaggagaacttactttagaaagaaaacctgtgagtgtaatcaatgtgaaaaagccttcagaaaaccctctatctttactttacacaagaaaactgatatcggagaggaacttcctaactgtaatcaatgtgaaacagccttcagccaacatctacatcttgtttgcaagaaaactagccaaaatctacatcttgtttgcaagaaaactcacactcaagagaaaccatataaatgcagtgactgtga

SEQ ID NO: 435668 - DNA, 2490 bp, Homo sapiens
actaagtgagaaattagaagtaattgttttataattaagttgctgggttttttttttaacaccttctaattcatcactttgtagggttatgcaagagtttctgaataaccattcttacatgtttatattttataaaaaccggctgcaagaaagattcagaaagaatacttagtaagtcatcatatgaaaaaccaacaaaaccatagagtgcagattttttcctaactataagtcacctcatagttgtccaaagccatgataatgatatctcttacaaattgacttctgtaacccccctagaaataacccttttccttatttgattttagtcatcaaacatagtatgatatgggaaaagtcagccatttaccagaaattatcttattttgattttaaaaactcatttctatatgtagttattgtaatgtctatttttttagacttaaagatttatagaagactatagttatctgatttgttattttgcatttttcattctgtaaatctttgcttatggcacattgtgctctctgttttccatggttttattcatttatctcctcctattttgaggggacaacatgggtagttaaatctttgtcaatagtattggagataacactaactgctattatcataacatcttcatttttactgcatgccaaaaccaatgcctgccaaacaaaatcttagacatcccaatataatatgttagttatatttctattcacatcattattgaaaatacccagctcagtgcctggcttaataaatgtttaattcccttacctactcttgctctatttttttatttgaaatggagatgagcaaaataacacattcatggctgaagcaattttttggacatttcttgttaccaaaagatctataatcaggacattgtttatgtaagttggacaaaaaaaattcttcccctttatgtccacccttcctatgattgcaagacaaaatttccctcctttacctcatccctataacatgggaggctgagaaaaatgaggggagatggaaccagatacaaggagatccaataagagaagcttatttaaatattgtgaaataaaggaagaaccaaagcatttttttaagtggggaatccttttgaacagttattatttatccatattattaacaacatcttttctgacaaaatccatcagatgaagtgtaaatggataatcttttaatggatctaaacctagaaagtttcacttactgttcatgtccgtgttccagaattgtgaaatggtgtgtggttttgctttccaagttcttctctgcctcctcttaattctctaattccatgtcttacagaagaatgagaaatttctttcttacttgagtatcatgctctaaaaaacttggcttcagtcacagaaacgctggctctcctgtgcttatattgaagccaactgcctttaattcttgggccctcttatatttttaaggtgcaaaatttgaagtctcagtcaccagacacaggttctatacaattaatgatgagctggagaagtaatatgtagctaatttttcaaaagcattgaatatactttccggaaagaaaacagaaattaaatattgccacatcttgccagaatcccatctgacaccttaactttgtcaggtttcctacaacttgctaatcaagttttatacattctaaatctccccagtttctttggggctggaagatgcaacttccatttaatagaaactttgaaatcttggggtaagggagcagtggggggactagggagaaggataagaaatagaattattgaaaagcccccaccagggaccttcctggccagaatatgcagagtaattcctgctggcttcacctttgaaagtccctcgaaactatgcagatgaaactgagtctgtttttgatattgtcagatgtattctaccttggaagtcccaacacctaaactggaattcttgtatttacatctcctccactgtcccccacaccacccctcaattcctgctgcccctgctaatgttaagcatttttctcttgttatcatcaggttcacattaaaaacagatacttacaaactgacttgaagcacagatacttttacgaatgtgataaaatattttcttaagaaaaggaaagaggatgtgggtcaaataaaacaccgcatggatgttgattggtgaatactggtgtaagaaaagggagctcaggaatttttattactgtatttgtaaatgagtttgaaggaatttgtaaatgccactggtacatttttaaggtgacacatttgctccttataaagttattaaaaattacagggtaagcttaaatgacgtttgccagtagttttactttatataatcaatattgatattgttgctgaactatgtaactttatgatgcatttttcagtcccttttcagagcaaatgcttttgcaatggtagtaatgtttagtttaaattgacttaataaattattacctga

SEQ ID NO: 435669 - DNA, 978 bp, Homo sapiens
  misc_feature (937)..(937): n is a, c, g, or t
actaagtgagaaattagaagtaattgttttataattaagttgctgggttttttttttaacaccttctaattcatcactttgtagggttatgcaagagtttctgaataaccattcttacatgtttatattttataaaaaccggctgcaagaaagattcagaaagaatacttagtaagtcatcatatgaaaaaccaacaaaaccatagagtgcagattttttcctaactataagtcacctcatagttgtccaaagccatgataatgatatctcttacaaattgacttctgtaacccccctagaaataacccttttccttatttgattttagtcatcaaacatagtatgatatgggaaaagtcagccatttaccagaaattatcttattttgattttaaaaactcatttctatatgtagttattgtaatgtctatttttttagacttaaagatttatagaagactatagttatctgatttgttattttgcatttttcattctgtaaatctttgcttatggcacattgtgctctctgttttccatggttttattcatttatctcctcctattttgaggggacaacatgggtagttaaatctttgtcaatagtattggagataacactaactgctattatcataacatcttcatttttactgcatgccaaaaccaatgcctgccaaacaaaatcttagacatcccaatataatatgttagttatatttctattcacatcattattgaaaatacccagctcagtgcctggcttaataaatgtttaattcccttacctactcttgctctatttttttatttgaaatggagatgagcaaaataacacattcatggctgaagcaattttttggacatttcttgttaccaaaagatctataatcaggatgatcctgagctgttcaaacaagctggtatataaacagncattgaaactcttttgcagagctgggaatttaaaagggaag

SEQ ID NO: 435670 - DNA, 349 bp, Homo sapiens
agctcaggaatttttattactgtatttgtaaatgagtttgaaggaatttgtaaatgccactggtacatttttaaggtgacacatttgctccttataaagttattaaaaattacagggtaagcttaaatgacgtttgccagtagttttactttatataatcaatattgatattgttgctgaactatgtaactttatgatgcatttttcagtcccttttcagagcaaatgcttttgcaatggtagtaatgtttagtttaaattgacttaataaattattacctgagcaatggtttttggagggtctttatatatgtatgtgaaacatgcattacatgaaaaatttaacttg

SEQ ID NO: 435671 - DNA, 1531 bp, Homo sapiens
ggctgaattgggccagagaggtctcattggctgaattcctgcaccggctcgtcggaggcgggacccaaagtaggctaggcctacggaagctgggtcttcttgctgtgaggtcgcgttccccagtgttacggagggtccttgaggcaggagtgaaaattgggtctgggggttagtcctggggtggaggtctgggcacgccgggtcggaccccctccatcttcggttttgcacaccccgctttccagcgcggagtcgcggcgggtagggcggcgtcgcgtgcgtgacgtcatccagcggcgcctcgcgaggctccagtggccttgacctcccgcggcgtgggaggctgcgcggcgatgctgcagttcgtccgggccggggcgcgggcctggcttcggcctaccggcagccagggcctgagttccctggcggaagaggcagcgcgtgcgaccgagaacccggagcaggtggcgagcgagggtctcccggagcccgtgctgcgcaaagtcgagctcccggtacccactcatcgacgcccagtgcaggcctgggtcgagtccttgcggggcttcgagcaggagcgcgtgggcctggccgacctgcaccccgatgttttcgccaccgcgcccaggctggacatactgcaccaggttgctatgtggcagaagaacttcaagagaattagctatgccaagaccaagacgagagccgaggtgcggggcggtggccggaagccttggccgcagaaaggcactgggcgggcccggcatggcagcatccgctctccgctctggcgaggaggaggtgttgcccatggcccccggggccccacaagttactactacatgctgcccatgaaggtgcgggcgctgggtctcaaagtggcactgaccgtcaagctggcccaggacgacctgcacatcatggactccctagagctgcccaccggagacccacagtacctgacagagctggcgcactaccgccgctggggggactccgtactcctcgtggacttaacacacgaggagatgccacagagcatcgtggaggccacctctaggcttaagaccttcaacttgatcccggctgttggcctaaatgtgcacagcatgctcaagcaccagacgctggtcctgacgctgcccaccgtcgccttcctggaggacaagctgctctggcaggactcacgttacagacccctctaccccttcagcctgccctacagcgacttcccccgacccctaccccacgctacccagggcccagcggccaccccgtaccactgttgatgtgaagcacctcttctgagccaggccgagcccctggccgacttgggagcctcaggcccacgcccacccttcgaggaaggtgtcacctggaccccttcattccacggaggaagctgaggccacagggagcggccatcgccattgggaaggggcgactccacggagagcccagacgggcttctgcatccattccctctttttgtttttaaaataaattgtatttttgaatcaaggaggataaa

SEQ ID NO: 435672 - DNA, 1399 bp, Homo sapiens
ggctgaattgggccagagaggtctcattggctgaattcctgcaccggctcgtcggaggcgggacccaaagtaggctaggcctacggaagctgggtcttcttgctgtgagccagcgcggagtcgcggcgggtagggcggcgtcgcgtgcgtgacgtcatccagcggcgcctcgcgaggctccagtggccttgacctcccgcggcgtgggaggctgcgcggcgatgctgcagttcgtccgggccggggcgcgggcctggcttcggcctaccggcagccagggcctgagttccctggcggaagaggcagcgcgtgcgaccgagaacccggagcaggtggcgagcgagggtctcccggagcccgtgctgcgcaaagtcgagctcccggtacccactcatcgacgcccagtgcaggcctgggtcgagtccttgcggggcttcgagcaggagcgcgtgggcctggccgacctgcaccccgatgttttcgccaccgcgcccaggctggacatactgcaccaggttgctatgtggcagaagaacttcaagagaattagctatgccaagaccaagacgagagccgaggtgcggggcggtggccggaagccttggccgcagaaaggcactgggcgggcccggcatggcagcatccgctctccgctctggcgaggaggaggtgttgcccatggcccccggggccccacaagttactactacatgctgcccatgaaggtgcgggcgctgggtctcaaagtggcactgaccgtcaagctggcccaggacgacctgcacatcatggactccctagagctgcccaccggagacccacagtacctgacagagctggcgcactaccgccgctggggggactccgtactcctcgtggacttaacacacgaggagatgccacagagcatcgtggaggccacctctaggcttaagaccttcaacttgatcccggctgttggcctaaatgtgcacagcatgctcaagcaccagacgctggtcctgacgctgcccaccgtcgccttcctggaggacaagctgctctggcaggactcacgttacagacccctctaccccttcagcctgccctacagcgacttcccccgacccctaccccacgctacccagggcccagcggccaccccgtaccactgttgatgtgaagcacctcttctgagccaggccgagcccctggccgacttgggagcctcaggcccacgcccacccttcgaggaaggtgtcacctggaccccttcattccacggaggaagctgaggccacagggagcggccatcgccattgggaaggggcgactccacggagagcccagacgggcttctgcatccattccctctttttgtttttaaaataaattgtatttttgaatcaaggaggataaa

SEQ ID NO: 435673 - DNA, 1920 bp, Homo sapiens
ggctgaattgggccagagaggtctcattggctgaattcctgcaccggctcgtcggaggcgggacccaaagtaggctaggcctacggaagctgggtcttcttgctgtgaggtcgcgttccccagtgttacggagggtccttgaggcaggagtgaaaattgggtctgggggttagtcctggggtggaggtctgggcacgccgggtcggaccccctccatcttcggttttgcacaccccgctttccagcgcggagtcgcggcgggtagggcggcgtcgcgtgcgtgacgtcatccagcggcgcctcgcgaggctccagtggccttgacctcccgcggcgtgggaggctgcgcggcgatgctgcagttcgtccgggccggggcgcgggcctggcttcggcctaccggcagccagggcctgagttccctggcggaagaggcagcgcgtgcgaccgagaacccggagcaggtggcgagcgagggtctcccggagcccgtgctgcgcaaagtcgagctcccggtacccactcatcgacgcccagtgcaggcctgggtcgagtccttgcggggcttcgagcaggagcgcgtgggcctggccgacctgcaccccgatgttttcgccaccgcgcccaggctggacatactgcaccaggttgctatgtggcagaagaacttcaagagaattagctatgccaagaccaagacgagagccgaggtgcggggcggtggccggaagccttggccgcagaaaggcactgggcgggcccggcatggcagcatccgctctccgctctggcgaggaggaggtgttgcccatggcccccggggccccacaagttactactacatgctgcccatgaaggtgcgggcgctgggtctcaaagtggcactgaccgtcaagctggcccaggacgacctgcacatcatggactccctagagctgcccaccggagacccacagtacctgacagagctggcgcactaccgccgctggggggactccgtactcctcgtggacttaacacacgaggagatgccacagagcatcgtggaggccacctctaggcttaagaccttcaacttgatcccggctgttggcctaaatgtgcacagcatgctcaagcaccagacgctggtcctgacgctgcccaccgtcgccttcctggaggacaagctgctctggcaggactcacgttacagacccctctaccccttcagcctgccctacagcgacttcccccgacccctaccccacgctacccagggcccagcggccaccccgtaccactgttgatgtgaagcacctcttctgagccaggccgagcccctggccgacttgggagcctcaggcccacgcccacccttcgaggaaggtgtcacctggaccccttcattccacggaggaagctgaggccacagggagcggccatcgccattgggaaggggcgactccacggagagcccagacgggcttctgcatccattccctctttttgtttttaaaataaattgtatttttgaatcaaggaggataaaaaaaaaaaaaaaataaaataaaaaaaaaaaaaaaaaaactaaaaaaataaaaaaatcctttataatatacacctctcggtcatcccccctaatcccaattttccctttcattctgactgtttcccattacatggccgcgctattacaacacctgtggtgcaaaacacttggggtacccactctattttccctttggccatattccccttttactcgtcgcgggcaatcctgaaaggccctcgcatatgggcctttccaaaatttgcgaccctttaaggggaatgggaacttttatgggtaatcctttcgttaaattggtggcaaccttttgtttaaacccttcactcttaatcaatgagccgccttctgatatatcctttttaacctcc

SEQ ID NO: 435674 - DNA, 2462 bp, Homo sapiens
ggctgaattgggccagagaggtctcattggctgaattcctgcaccggctcgtcggaggcgggacccaaagtaggctaggcctacggaagctgggtcttcttgctgtgaggtcgcgttccccagtgttacggagggtccttgaggcaggagtgaaaattgggtctgggggttagtcctggggtggaggtctgggcacgccgggtcggaccccctccatcttcggttttgcacaccccgctttccagcgcggagtcgcggcgggtagggcggcgtcgcgtgcgtgacgtcatccagcggcgcctcgcgaggctccagtggccttgacctcccgcggcgtgggaggctgcgcggcgatgctgcagttcgtccgggccggggcgcgggcctggcttcggcctaccggcagccagggcctgagttccctggcggaagaggcagcgcgtgcgaccgagaacccggagcaggtggcgagcgagggtctcccggagcccgtgctgcgcaaagtcgagctcccggtacccactcatcgacgcccagtgcaggcctgggtcgagtccttgcggggcttcgagcaggagcgcgtgggcctggccgacctgcaccccgatgttttcgccaccgcgcccaggctggacatactgcaccaggttgctatgtggcagaagaacttcaagagaattagctatgccaagaccaagacgagagccgaggtgcggggcggtggccggaagccttggccgcagaaaggcactgggcgggcccggcatggcagcatccgctctccgctctggcgaggaggaggtgttgcccatggcccccggggccccacaagttactactacatgctgcccatgaaggtgcgggcgctgggtctcaaagtggcactgaccgtcaagctggcccaggacgacctgcacatcatggactccctagagctgcccaccggagacccacagtacctgacagagctggcgcactaccgccgctggggggactccgtactcctcgtggacttaacacacgaggagatgccacagagcatcgtggaggccacctctaggcttaagaccttcaacttgatcccggctgttggtgagcaaagagcccaggcccctagagtgcgcatgtgcaggctccgctgttagaatcacagcggttcaaatccggcatctggtcgctgagtggcctcaggcagtgaccacgctcccggacccaaccttcagcttgcccaaagcaataatctttcctaaagaagtgcttggctggggatggtggctcacgcttgtaatcccagtactttgggaggccaaggcagtctgggcaatatagtgaggctcccatctgtactaaaaataaaaaagttaggcgtggcgatgtgcacctgtagtcccagctactcgggggctgagccaggcggatagcttgagctcagggggccaaggctgcagtgagtcatgatcgcaccactgcacccaaacctggggagagagctagactcttgtctcaaaaaaaaaaaaaaaaaaaaaaaaaaagctccaaagtcacctctgtcaaagccacagtctgttccttccacagccacaagatggcgacatgagcctaagtcaagtcctgtccctcaacccacgcccctcgctggcttccccacctctctcaggatgaaagcccaagtcatcagggtggcacgtcaggccctgcacgatgtgccccgtcacctccctgccctcccgtcatttgccctgggtctcccccaccagaatgggagccaggagtcccagccaggcacaggaccgagcctggctctcggtcagcaggtgatgagctgggagcagctccttggccagaggcttacaggcaacaagcggccaggcagggtctggccccgggctgctgggctcacaaagtcacactagaccacagtgacgatctctgtaagcacaaagggactccgatgtgggtggggtgaggagagaggcagccccggcctgaccggccccccgccccgcccccaccccgcccccaggcctaaatgtgcacagcatgctcaagcaccagacgctggtcctgacgctgcccaccgtcgccttcctggaggacaagctgctctggcaggactcacgttacagacccctctaccccttcagcctgccctacagcgacttcccccgacccctaccccacgctacccagggcccagcggccaccccgtaccactgttgatgtgaagcacctcttctgagccaggccgagcccctggccgacttgggagcctcaggcccacgcccacccttcgaggaaggtgtcacctggaccccttcattccacggaggaagctgaggccacagggagcggccatcgccattgggaaggggcgactccacggagagcccagacgggcttctgcatccattccctctttttgtttttaaaataaattgtatttttgaatcaaggaggataaa

SEQ ID NO: 435675 - DNA, 2851 bp, Homo sapiens
ggctgaattgggccagagaggtctcattggctgaattcctgcaccggctcgtcggaggcgggacccaaagtaggctaggcctacggaagctgggtcttcttgctgtgaggtcgcgttccccagtgttacggagggtccttgaggcaggagtgaaaattgggtctgggggttagtcctggggtggaggtctgggcacgccgggtcggaccccctccatcttcggttttgcacaccccgctttccagcgcggagtcgcggcgggtagggcggcgtcgcgtgcgtgacgtcatccagcggcgcctcgcgaggctccagtggccttgacctcccgcggcgtgggaggctgcgcggcgatgctgcagttcgtccgggccggggcgcgggcctggcttcggcctaccggcagccagggcctgagttccctggcggaagaggcagcgcgtgcgaccgagaacccggagcaggtggcgagcgagggtctcccggagcccgtgctgcgcaaagtcgagctcccggtacccactcatcgacgcccagtgcaggcctgggtcgagtccttgcggggcttcgagcaggagcgcgtgggcctggccgacctgcaccccgatgttttcgccaccgcgcccaggctggacatactgcaccaggttgctatgtggcagaagaacttcaagagaattagctatgccaagaccaagacgagagccgaggtgcggggcggtggccggaagccttggccgcagaaaggcactgggcgggcccggcatggcagcatccgctctccgctctggcgaggaggaggtgttgcccatggcccccggggccccacaagttactactacatgctgcccatgaaggtgcgggcgctgggtctcaaagtggcactgaccgtcaagctggcccaggacgacctgcacatcatggactccctagagctgcccaccggagacccacagtacctgacagagctggcgcactaccgccgctggggggactccgtactcctcgtggacttaacacacgaggagatgccacagagcatcgtggaggccacctctaggcttaagaccttcaacttgatcccggctgttggtgagcaaagagcccaggcccctagagtgcgcatgtgcaggctccgctgttagaatcacagcggttcaaatccggcatctggtcgctgagtggcctcaggcagtgaccacgctcccggacccaaccttcagcttgcccaaagcaataatctttcctaaagaagtgcttggctggggatggtggctcacgcttgtaatcccagtactttgggaggccaaggcagtctgggcaatatagtgaggctcccatctgtactaaaaataaaaaagttaggcgtggcgatgtgcacctgtagtcccagctactcgggggctgagccaggcggatagcttgagctcagggggccaaggctgcagtgagtcatgatcgcaccactgcacccaaacctggggagagagctagactcttgtctcaaaaaaaaaaaaaaaaaaaaaaaaaaagctccaaagtcacctctgtcaaagccacagtctgttccttccacagccacaagatggcgacatgagcctaagtcaagtcctgtccctcaacccacgcccctcgctggcttccccacctctctcaggatgaaagcccaagtcatcagggtggcacgtcaggccctgcacgatgtgccccgtcacctccctgccctcccgtcatttgccctgggtctcccccaccagaatgggagccaggagtcccagccaggcacaggaccgagcctggctctcggtcagcaggtgatgagctgggagcagctccttggccagaggcttacaggcaacaagcggccaggcagggtctggccccgggctgctgggctcacaaagtcacactagaccacagtgacgatctctgtaagcacaaagggactccgatgtgggtggggtgaggagagaggcagccccggcctgaccggccccccgccccgcccccaccccgcccccaggcctaaatgtgcacagcatgctcaagcaccagacgctggtcctgacgctgcccaccgtcgccttcctggaggacaagctgctctggcaggactcacgttacagacccctctaccccttcagcctgccctacagcgacttcccccgacccctaccccacgctacccagggcccagcggccaccccgtaccactgttgatgtgaagcacctcttctgagccaggccgagcccctggccgacttgggagcctcaggcccacgcccacccttcgaggaaggtgtcacctggaccccttcattccacggaggaagctgaggccacagggagcggccatcgccattgggaaggggcgactccacggagagcccagacgggcttctgcatccattccctctttttgtttttaaaataaattgtatttttgaatcaaggaggataaaaaaaaaaaaaaaataaaataaaaaaaaaaaaaaaaaaactaaaaaaataaaaaaatcctttataatatacacctctcggtcatcccccctaatcccaattttccctttcattctgactgtttcccattacatggccgcgctattacaacacctgtggtgcaaaacacttggggtacccactctattttccctttggccatattccccttttactcgtcgcgggcaatcctgaaaggccctcgcatatgggcctttccaaaatttgcgaccctttaaggggaatgggaacttttatgggtaatcctttcgttaaattggtggcaaccttttgtttaaacccttcactcttaatcaatgagccgccttctgatatatcctttttaacctcc

SEQ ID NO: 435676 - DNA, 1880 bp, Homo sapiens
ggctgaattgggccagagaggtctcattggctgaattcctgcaccggctcgtcggaggcgggacccaaagtaggctaggcctacggaagctgggtcttcttgctgtgaggtcgcgttccccagtgttacggagggtccttgaggcaggagtgaaaattgggtctgggggttagtcctggggtggaggtctgggcacgccgggtcggaccccctccatcttcggttttgcacaccccgctttccagcgcggagtcgcggcgggtagggcggcgtcgcgtgcgtgacgtcatccagcggcgcctcgcgaggctccagtggccttgacctcccgcggcgtgggaggctgcgcggcgatgctgcagttcgtccgggccggggcgcgggcctggcttcggcctaccggcagccagggcctgagttccctggcggaagaggcagcgcgtgcgaccgagaacccggagcaggtggcgagcgagggtctcccggagcccgtgctgcgcaaagtcgagctcccggtacccactcatcgacgcccagtgcaggcctgggtcgagtccttgcggggcttcgagcaggagcgcgtgggcctggccgacctgcaccccgatgttttcgccaccgcgcccaggctggacatactgcaccaggttgctatgtggcagaagaacttcaagagaattagctatgccaagaccaagacgagagccgaggtgcggggcggtggccggaagccttggccgcagaaaggcactgggcgggcccggcatggcagcatccgctctccgctctggcgaggaggaggtgttgcccatggcccccggggccccacaagttactactacatgctgcccatgaaggtgcgggcgctgggtctcaaagtggcactgaccgtcaagctggcccaggacgacctgcacatcatggactccctagagctgcccaccggagacccacagtacctgacagagctggcgcactaccgccgctggggggactccgtactcctcgtggacttaacacacgaggagatgccacagagcatcgtggaggccacctctaggcttaagaccttcaacttgatcccggctgttggtgagcaaagagcccaggcccctagagtgcgcatgtgcaggctccgctgttagaatcacagcggttcaaatccggcatctggtcgctgagtggcctcaggcagtgaccacgctcccggacccaaccttcagcttgcccaaagcaataatctttcctaaagaagtgcttggctggggatggtggctcacgcttgtaatcccagtactttgggaggccaaggcagtctgggcaatatagtgaggctcccatctgtactaaaaataaaaaagttaggcgtggcgatgtgcacctgtagtcccagctactcgggggctgagccaggcggatagcttgagctcagggggccaaggctgcagtgagtcatgatcgcaccactgcacccaaacctggggagagagctagactcttgtctcaaaaaaaaaaaaaaaaaaaaaaaaaaagctccaaagtcacctctgtcaaagccacagtctgttccttccacagccacaagatggcgacatgagcctaagtcaagtcctgtccctcaacccacgcccctcgctggcttccccacctcttctgagccaggccgagcccctggccgacttgggagcctcaggcccacgcccacccttcgaggaaggtgtcacctggaccccttcattccacggaggaagctgaggccacagggagcggccatcgccattgggaaggggcgactccacggagagcccagacgggcttctgcatccattccctctttttgtttttaaaataaattgtatttttgaatcaaggaggataaa

SEQ ID NO: 435677 - DNA, 1976 bp, Homo sapiens
ggctgaattgggccagagaggtctcattggctgaattcctgcaccggctcgtcggaggcgggacccaaagtaggctaggcctacggaagctgggtcttcttgctgtgaggtcgcgttccccagtgttacggagggtccttgaggcaggagtgaaaattgggtctgggggttagtcctggggtggaggtctgggcacgccgggtcggaccccctccatcttcggttttgcacaccccgctttccagcgcggagtcgcggcgggtagggcggcgtcgcgtgcgtgacgtcatccagcggcgcctcgcgaggctccagtggccttgacctcccgcggcgtgggaggctgcgcggcgatgctgcagttcgtccgggccggggcgcgggcctggcttcggcctaccggcagccagggcctgagttccctggcggaagaggcagcgcgtgcgaccgagaacccggagcaggtggcgagcgagggtctcccggagcccgtgctgcgcaaagtcgagctcccggtacccactcatcgacgcccagtgcaggcctgggtcgagtccttgcggggcttcgagcaggagcgcgtgggcctggccgacctgcaccccgatgttttcgccaccgcgcccaggctggacatactgcaccaggttgctatgtggcagaagaacttcaagagaattagctatgccaagaccaagacgagagccgaggtgcggggcggtggccggaagccttggccgcagaaaggcactgggcgggcccggcatggcagcatccgctctccgctctggcgaggaggaggtgttgcccatggcccccggggccccacaagttactactacatgctgcccatgaaggtgcgggcgctgggtctcaaagtggcactgaccgtcaagctggcccaggacgacctgcacatcatggactccctagagctgcccaccggagacccacagtacctgacagagctggcgcactaccgccgctggggggactccgtactcctcgtggacttaacacacgaggagatgccacagagcatcgtggaggccacctctaggcttaagaccttcaacttgatcccggctgttgccacaagatggcgacatgagcctaagtcaagtcctgtccctcaacccacgcccctcgctggcttccccacctctctcaggatgaaagcccaagtcatcagggtggcacgtcaggccctgcacgatgtgccccgtcacctccctgccctcccgtcatttgccctgggtctcccccaccagaatgggagccaggagtcccagccaggcacaggaccgagcctggctctcggtcagcaggtgatgagctgggagcagctccttggccagaggcttacaggcaacaagcggccaggcagggtctggccccgggctgctgggctcacaaagtcacactagaccacagtgacgatctctgtaagcacaaagggactccgatgtgggtggggtgaggagagaggcagccccggcctgaccggccccccgccccgcccccaccccgcccccaggcctaaatgtgcacagcatgctcaagcaccagacgctggtcctgacgctgcccaccgtcgccttcctggaggacaagctgctctggcaggactcacgttacagacccctctaccccttcagcctgccctacagcgacttcccccgacccctaccccacgctacccagggcccagcggccaccccgtaccactgttgatgtgaagcacctcttctgagccaggccgagcccctggccgacttgggagcctcaggcccacgcccacccttcgaggaaggtgtcacctggaccccttcattccacggaggaagctgaggccacagggagcggccatcgccattgggaaggggcgactccacggagagcccagacgggcttctgcatccattccctctttttgtttttaaaataaattgtatttttgaatcaaggaggataaa

SEQ ID NO: 435678 - DNA, 1318 bp, Homo sapiens
  misc_feature (1205)..(1205): n is a, c, g, or t
  misc_feature (1207)..(1207): n is a, c, g, or t
  misc_feature (1210)..(1210): n is a, c, g, or t
  misc_feature (1212)..(1213): n is a, c, g, or t
  misc_feature (1215)..(1215): n is a, c, g, or t
  misc_feature (1225)..(1225): n is a, c, g, or t
ggctgaattgggccagagaggtctcattggctgaattcctgcaccggctcgtcggaggcgggacccaaagtaggctaggcctacggaagctgggtcttcttgctgtgaggtcgcgttccccagtgttacggagggtccttgaggcaggagtgaaaattgggtctgggggttagtcctggggtggaggtctgggcacgccgggtcggaccccctccatcttcggttttgcacaccccgctttccagcgcggagtcgcggcgggtagggcggcgtcgcgtgcgtgacgtcatccagcggcgcctcgcgaggctccagtggccttgacctcccgcggcgtgggaggctgcgcggcgatgctgcagttcgtccgggccggggcgcgggcctggcttcggcctaccggcagccagggcctgagttccctggcggaagaggcagcgcgtgcgaccgagaacccggagcaggtggcgagcgagggtctcccggagcccgtgctgcgcaaagtcgagctcccggtacccactcatcgacgcccagtgcaggcctgggtcgagtccttgcggggcttcgagcaggagcgcgtgggcctggccgacctgcaccccgatgttttcgccaccgcgcccaggctggacatactgcaccaggttgctatgtggcagaagaacttcaagagaattagctatgccaagaccaagacgagagccgaggtgcggggcggtggccggaagccttggccgcagaaaggcactgggcgggcccggcatggcagcatccgctctccgctctggcgaggaggaggtgttgcccatggcccccggggccccacaagttactactacatgctgcccatgaaggtgcgggcgctgggtctcaaagtggcactgaccgtcaagctggcccaggacgacctgcacatcatggactccctagagctgcccaccggagacccacagtacctgacagagctggcgcactaccgccgctggggggactccgtactcctcgtggacttaacacacgaggagatgccacagagcatcgtggaggccacctctaggcttaagaccttcaacttgatcccggctgttggcctaaatgtgcacagcatgctcaagcaccagacgctggtcctgacgctgcccaccgtcgccttcctggaggacaagctgctctggcaggactcacgttacagaccccttggncnccntnnangctgattcantatggggggaggtgtattgaagtcctccagacaaccctcagatttgatgatttcctagtagaactcacagaaataaagagctgttatactgtg

SEQ ID NO: 435679 - DNA, 1274 bp, Homo sapiens
ggctgaattgggccagagaggtctcattggctgaattcctgcaccggctcgtcggaggcgggacccaaagtaggctaggcctacggaagctgggtcttcttgctgtgaggtcgcgttccccagtgttacggagggtccttgaggcaggagtgaaaattgggtctgggggttagtcctggggtggaggtctgggcacgccgggtcggaccccctccatcttcggttttgcacaccccgctttccagcgcggagtcgcggcgggtagggcggcgtcgcgtgcgtgacgtcatccagcggcgcctcgcgaggctccagtggccttgacctcccgcggcgtgggaggctgcgcggcgatgctgcagttcgtccgggccggggcgcgggcctggcttcggcctaccggcagccagggcctgagttccctggcggaagaggcagcgcgtgcgaccgagaacccggagcaggtggcgagcgagggtctcccggagcccgtgctgcgcaaagtcgagctcccggtacccactcatcgacgcccagtgcaggcctgggtcgagtccttgcggggcttcgagcaggagcgcgtgggcctggccgacctgcaccccgatgttttcgccaccgcgcccaggctggacatactgcaccaggttgctatgtggcagaagaacttcaagagaattagctatgccaagaccaagacgagagccgaggtgcggggcggtggccggaagccttggccgcagaaaggcactgggcgggcccggcatggcagcatccgctctccgctctggcgaggaggaggtgttgcccatggcccccggggccccacaagttactactacatgctgcccatgaaggtgcgggcgctgggtctcaaagtggcactgaccgtcaagctggcccaggacgacctgcacatcatggactccctagagctgcccaccggagacccacagtacctgacagagctggcgcactaccgccgctggggggactccgtactcctcgtggacttaacacacgaggagatgccacagagcatcgtggaggccacctctaggcttaagaccttcaacttgatcccggctgttggcctaaatgtgcacagcatgctcaagcaccagacgctggtcctgacgctgcccaccgtcgccttcctggaggacaagctgctctggcaggactcacgttacagaccccttcaagatggcgctggtggcttctgtgcgagtcccggcgcgcgtctgctccggcggggggccggtcccgggcgc

SEQ ID NO: 435680 - DNA, 2548 bp, Homo sapiens
ggctgaattgggccagagaggtctcattggctgaattcctgcaccggctcgtcggaggcgggacccaaagtaggctaggcctacggaagctgggtcttcttgctgtgaggtcgcgttccccagtgttacggagggtccttgaggcaggagtgaaaattgggtctgggggttagtcctggggtggaggtctgggcacgccgggtcggaccccctccatcttcggttttgcacaccccgctttccagcgcggagtcgcggcgggtagggcggcgtcgcgtgcgtgacgtcatccagcggcgcctcgcgaggctccagtggccttgacctcccgcggcgtgggaggctgcgcggcgatgctgcagttcgtccgggccggggcgcgggcctggcttcggcctaccggcagccagggcctgagttccctggcggaagaggcagcgcgtgcgaccgagaacccggagcaggtggcgagcgagggtctcccggagcccgtgctgcgcaaagtcgagctcccggtacccactcatcgacgcccagtgcaggcctgggtcgagtccttgcggggcttcgagcaggagcgcgtgggcctggccgacctgcaccccgatgttttcgccaccgcgcccaggctggacatactgcaccaggttgctatgtggcagaagaacttcaagagaattagctatgccaagaccaagacgagagccgaggtgcggggcggtggccggaagccttggccgcagaaaggcactgggcgggcccggcatggcagcatccgctctccgctctggcgaggaggaggtgttgcccatggcccccggggccccacaagttactactacatgctgcccatgaaggtgcgggcgctgggtctcaaagtggcactgaccgtcaagctggcccaggacgacctgcacatcatggactccctagagctgcccaccggagacccacagtacctgacagagctggcgcactaccgccgctggggggactccgtactcctcgtggacttgtgagggcacagggcagagcaggggcagggggccctgagctccgtactctgagggttcaacccccactccctggcctctcttacagaacacacgaggagatgccacagagcatcgtggaggccacctctaggcttaagaccttcaacttgatcccggctgttggtgagcaaagagcccaggcccctagagtgcgcatgtgcaggctccgctgttagaatcacagcggttcaaatccggcatctggtcgctgagtggcctcaggcagtgaccacgctcccggacccaaccttcagcttgcccaaagcaataatctttcctaaagaagtgcttggctggggatggtggctcacgcttgtaatcccagtactttgggaggccaaggcagtctgggcaatatagtgaggctcccatctgtactaaaaataaaaaagttaggcgtggcgatgtgcacctgtagtcccagctactcgggggctgagccaggcggatagcttgagctcagggggccaaggctgcagtgagtcatgatcgcaccactgcacccaaacctggggagagagctagactcttgtctcaaaaaaaaaaaaaaaaaaaaaaaaaaagctccaaagtcacctctgtcaaagccacagtctgttccttccacagccacaagatggcgacatgagcctaagtcaagtcctgtccctcaacccacgcccctcgctggcttccccacctctctcaggatgaaagcccaagtcatcagggtggcacgtcaggccctgcacgatgtgccccgtcacctccctgccctcccgtcatttgccctgggtctcccccaccagaatgggagccaggagtcccagccaggcacaggaccgagcctggctctcggtcagcaggtgatgagctgggagcagctccttggccagaggcttacaggcaacaagcggccaggcagggtctggccccgggctgctgggctcacaaagtcacactagaccacagtgacgatctctgtaagcacaaagggactccgatgtgggtggggtgaggagagaggcagccccggcctgaccggccccccgccccgcccccaccccgcccccaggcctaaatgtgcacagcatgctcaagcaccagacgctggtcctgacgctgcccaccgtcgccttcctggaggacaagctgctctggcaggactcacgttacagacccctctaccccttcagcctgccctacagcgacttcccccgacccctaccccacgctacccagggcccagcggccaccccgtaccactgttgatgtgaagcacctcttctgagccaggccgagcccctggccgacttgggagcctcaggcccacgcccacccttcgaggaaggtgtcacctggaccccttcattccacggaggaagctgaggccacagggagcggccatcgccattgggaaggggcgactccacggagagcccagacgggcttctgcatccattccctctttttgtttttaaaataaattgtatttttgaatcaaggaggataaa

SEQ ID NO: 435681 - DNA, 1223 bp, Homo sapiens
gcggagatgctgcagcacgtcctgagtcgaggctgccgtggatctggtgtctgcgctctagcgatcagtggagggatcgtgtaattcgccttggctggcatcgagcgcaatcagcagtgcgcaccggaggagacccgggagccaggtggcggagcagatggtctctcgcgagtgctcggtgcttgtgcaataggtctctgactcccggtacccactcatcgacgcccagtgcaggcctgggtcgagtccttgcggggcttcgagcaggagcgcgtgggcctggccgacctgcaccccgatgttttcgccaccgcgcccaggctggacatactgcaccaggttgctatgtggcagaagaacttcaagagaattagctatgccaagaccaagacgagagccgaggtgcggggcggtggccggaagccttggccgcagaaaggcactgggcgggcccggcatggcagcatccgctctccgctctggcgaggaggaggtgttgcccatggcccccggggccccacaagttactactacatgctgcccatgaaggtgcgggcgctgggtctcaaagtggcactgaccgtcaagctggcccaggacgacctgcacatcatggactccctagagctgcccaccggagacccacagtacctgacagagctggcgcactaccgccgctggggggactccgtactcctcgtggacttaacacacgaggagatgccacagagcatcgtggaggccacctctaggcttaagaccttcaacttgatcccggctgttggcctaaatgtgcacagcatgctcaagcaccagacgctggtcctgacgctgcccaccgtcgccttcctggaggacaagctgctctggcaggactcacgttacagacccctctaccccttcagcctgccctacagcgacttcccccgacccctaccccacgctacccagggcccagcggccaccccgtaccactgttgatgtgaagcacctcttctgagccaggccgagcccctggccgacttgggagcctcaggcccacgcccacccttcgaggaaggtgtcacctggaccccttcattccacggaggaagctgaggccacagggagcggccatcgccattgggaaggggcgactccacggagagcccagacgggcttctgcatccattccctctttttgtttttaaaataaattgtatttttgaatcaaggaggataaa

SEQ ID NO: 435682 - DNA, 2634 bp, Homo sapiens
ggctgaattgggccagagaggtctcattggctgaattcctgcaccggctcgtcggaggcgggacccaaagtaggctaggcctacggaagctgggtcttcttgctgtgaggtcgcgttccccagtgttacggagggtccttgaggcaggagtgaaaattgggtctgggggttagtcctggggtggaggtctgggcacgccgggtcggaccccctccatcttcggttttgcacaccccgctttccagcgcggagtcgcggcgggtagggcggcgtcgcgtgcgtgacgtcatccagcggcgcctcgcgaggctccagtggccttgacctcccgcggcgtgggaggctgcgcggcgatgctgcagttcgtccgggccggggcgcgggcctggcttcggcctaccggcagccaggtgaggccaggggctggaggcgtggtcgaaggatgaaatttgggggtgtccaggggtcgtctctcactttcgcccaacccttgcagggcctgagttccctggcggaagaggcagcgcgtgcgaccgagaacccggagcaggtggcgagcgagggtctcccggagcccgtgctgcgcaaagtcgagctcccggtacccactcatcgacgcccagtgcaggcctgggtcgagtccttgcggggcttcgagcaggagcgcgtgggcctggccgacctgcaccccgatgttttcgccaccgcgcccaggctggacatactgcaccaggttgctatgtggcagaagaacttcaagagaattagctatgccaagaccaagacgagagccgaggtgcggggcggtggccggaagccttggccgcagaaaggcactgggcgggcccggcatggcagcatccgctctccgctctggcgaggaggaggtgttgcccatggcccccggggccccacaagttactactacatgctgcccatgaaggtgcgggcgctgggtctcaaagtggcactgaccgtcaagctggcccaggacgacctgcacatcatggactccctagagctgcccaccggagacccacagtacctgacagagctggcgcactaccgccgctggggggactccgtactcctcgtggacttgtgagggcacagggcagagcaggggcagggggccctgagctccgtactctgagggttcaacccccactccctggcctctcttacagaacacacgaggagatgccacagagcatcgtggaggccacctctaggcttaagaccttcaacttgatcccggctgttggtgagcaaagagcccaggcccctagagtgcgcatgtgcaggctccgctgttagaatcacagcggttcaaatccggcatctggtcgctgagtggcctcaggcagtgaccacgctcccggacccaaccttcagcttgcccaaagcaataatctttcctaaagaagtgcttggctggggatggtggctcacgcttgtaatcccagtactttgggaggccaaggcagtctgggcaatatagtgaggctcccatctgtactaaaaataaaaaagttaggcgtggcgatgtgcacctgtagtcccagctactcgggggctgagccaggcggatagcttgagctcagggggccaaggctgcagtgagtcatgatcgcaccactgcacccaaacctggggagagagctagactcttgtctcaaaaaaaaaaaaaaaaaaaaaaaaaaagctccaaagtcacctctgtcaaagccacagtctgttccttccacagccacaagatggcgacatgagcctaagtcaagtcctgtccctcaacccacgcccctcgctggcttccccacctctctcaggatgaaagcccaagtcatcagggtggcacgtcaggccctgcacgatgtgccccgtcacctccctgccctcccgtcatttgccctgggtctcccccaccagaatgggagccaggagtcccagccaggcacaggaccgagcctggctctcggtcagcaggtgatgagctgggagcagctccttggccagaggcttacaggcaacaagcggccaggcagggtctggccccgggctgctgggctcacaaagtcacactagaccacagtgacgatctctgtaagcacaaagggactccgatgtgggtggggtgaggagagaggcagccccggcctgaccggccccccgccccgcccccaccccgcccccaggcctaaatgtgcacagcatgctcaagcaccagacgctggtcctgacgctgcccaccgtcgccttcctggaggacaagctgctctggcaggactcacgttacagacccctctaccccttcagcctgccctacagcgacttcccccgacccctaccccacgctacccagggcccagcggccaccccgtaccactgttgatgtgaagcacctcttctgagccaggccgagcccctggccgacttgggagcctcaggcccacgcccacccttcgaggaaggtgtcacctggaccccttcattccacggaggaagctgaggccacagggagcggccatcgccattgggaaggggcgactccacggagagcccagacgggcttctgcatccattccctctttttgtttttaaaataaattgtatttttgaatcaaggaggataaa

SEQ ID NO: 435683 - DNA, 1143 bp, Homo sapiens
ggctgaattgggccagagaggtctcattggctgaattcctgcaccggctcgtcggaggcgggacccaaagtaggctaggcctacggaagctgggtcttcttgctgtgaggtcgcgttccccagtgttacggagggtccttgaggcaggagtgaaaattgggtctgggggttagtcctggggtggaggtctgggcacgccgggtcggaccccctccatcttcggttttgcacaccccgctttccagcgcggagtcgcggcgggtagggcggcgtcgcgtgcgtgacgtcatccagcggcgcctcgcgaggctccagtggccttgacctcccgcggcgtgggaggctgcgcggcgatgctgcagttcgtccgggccggggcgcgggcctggcttcggcctaccggcagccagggcctgagttccctggcggaagaggcagcgcgtgcgaccgagaacccggagcaggtggcgagcgagggtctcccggagcccgtgctgcgcaaagtcgagctcccggtacccactcatcgacgcccagtgcaggcctgggtcgagtccttgcggggcttcgagcaggagcgcgtgggcctggccgacctgcaccccgatgttttcgccaccgcgcccaggctggacatactgcaccaggttgctatgtggcagaagaacttcaagagaattagctatgccaagaccaagacgagagccgaggtgcggggcggtggccggaagccttggccgcagaaaggcactgggcgggcccggcatggcagcatccgctctccgctctggcgaggaggaggtgttgcccatggcccccggggccccacaagttactactacatgctgcccatgaaggtgcgggcgctgggtctcaaacggccaccccgtaccactgttgatgtgaagcacctcttctgagccaggccgagcccctggccgacttgggagcctcaggcccacgcccacccttcgaggaaggtgtcacctggaccccttcattccacggaggaagctgaggccacagggagcggccatcgccattgggaaggggcgactccacggagagcccagacgggcttctgcatccattccctctttttgtttttaaaataaattgtatttttgaatcaaggaggataaa

SEQ ID NO: 435684 - DNA, 620 bp, Homo sapiens
ggctgaattgggccagagaggtctcattggctgaattcctgcaccggctcgtcggaggcgggacccaaagtaggctaggcctacggaagctgggtcttcttgctgtgaggtcgcgttccccagtgttacggagggtccttgaggcaggagtgaaaattgggtctgggggttagtcctggggtggaggtctgggcacgccgggtcggaccccctccatcttcggttttgcacaccccgctttccttcctggaggacaagctgctctggcaggactcacgttacagacccctctaccccttcagcctgccctacagcgacttcccccgacccctaccccacgctacccagggcccagcggccaccccgtaccactgttgatgtgaagcacctcttctgagccaggccgagcccctggccgacttgggagcctcaggcccacgcccacccttcgaggaaggtgtcacctggaccccttcattccacggaggaagctgaggccacagggagcggccatcgccattgggaaggggcgactccacggagagcccagacgggcttctgcatccattccctctttttgtttttaaaataaattgtatttttgaatcaaggaggataaa

SEQ ID NO: 435685 - DNA, 956 bp, Homo sapiens
ggctgaattgggccagagaggtctcattggctgaattcctgcaccggctcgtcggaggcgggacccaaagtaggctaggcctacggaagctgggtcttcttgctgtgaggtcgcgttccccagtgttacggagggtccttgaggcaggagtgaaaattgggtctgggggttagtcctggggtggaggtctgggcacgccgggtcggaccccctccatcttcggttttgcacaccccgctttccagcgcggagtcgcggcgggtagggcggcgtcgcgtgcgtgacgtcatccagcggcgcctcgcgaggctccagtggccttgacctcccgcggcgtgggaggctgcgcggcgatgctgcagttcgtccgggccggggcgcgggcctggcttcggcctaccggcagccagggcctgagttccctggcggaagaggcagcgcgtgcgaccgagaacccggagcaggtggcgagcgagggtctcccggagcccgtgctgcgcaaagtcgagctcccggtacccactcatcgacgcccagtgcaggcctgggtcgagtccttgcggggcttcgagcaggagcgcgtgggcctggccgacctgcaccccgatgttttcgccaccgcgcccaggtgagcgagggctgtaatggtgaactgagtggcagagggatgaagagcgggatttcaggagtcacgatgactttgggcttgtacccttgggaaagtgctgtatttctacagcctccgtttctccacctgtcaaaggggaatgatgacagtttcccctgctgtagcgctgtgtgagattgaagcctgagaggtgacatcatctaagggttagggagacagaattctggagcccgactgattaggttcaaatcctgccttcccctcttgtccctcagtgtccctattttgtcagcggtcgggaggttgctgtgatgaataaatgacttaa

SEQ ID NO: 435686 - DNA, 877 bp, Homo sapiens
  misc_feature (857)..(857): n is a, c, g, or t
ggctgaattgggccagagaggtctcattggctgaattcctgcaccggctcgtcggaggcgggacccaaagtaggctaggcctacggaagctgggtcttcttgctgtgaggtcgcgttccccagtgttacggagggtccttgaggcaggagtgaaaattgggtctgggggttagtcctggggtggaggtctgggcacgccgggtcggaccccctccatcttcggttttgcacaccccgctttccagcgcggagtcgcggcgggtagggcggcgtcgcgtgcgtgacgtcatccagcggcgcctcgcgaggctccagtggccttgacctcccgcggcgtgggaggctgcgcggcgatgctgcagttcgtccgggccggggcgcgggcctggcttcggcctaccggcagccaggggtcgtctctcactttcgcccaacccttgcagggcctgagttccctggcggaagaggcagcgcgtgcgaccgagaacccggagcaggtggcgagcgagggtctcccggagcccgtgctgcgcaaagtcgagctcccggtacccactcatcgacgcccagtgcaggcctgggtcgagtccttgcggggcttcgagcaggagcgcgtgggcctggccgacctgcaccccgatgttttcgccaccgcgcccaggctggacatactgcaccaggttgctatgtggcagaagaacttcaagagaattagctatgccaagaccaagacgagagccgaggtgcggggcggtggccggaagccttggccgcagaaaggcactgggcgggcccggcatggcagcatccgctctccgctctggcgaggaggaggtgtgcccatggcccccgggccncaacaaatttattaatttac

SEQ ID NO: 435687 - DNA, 553 bp, Homo sapiens
gatgaaatttgggggtgtccaggggtcgtctctcactttcgcccaacccttgcagggcctgagttccctggcggaagaggcagcgcgtgcgaccgagaacccggagcaggtggcgagcgagggtaaggcaaccggggtggctccaggaggggcggcgacagagaggtctgacccttgaccctaacctctgacccccgcaatcgctccaggtctcccggagcccgtgctgcgcaaagtcgagctcccggtacccactcatcgacgcccagtgcaggcctgggtcgagtccttgcggggcttcgagcaggagcgcgtgggcctggccgacctgcaccccgatgttttcgccaccgcgcccaggtgagcgagggctgtaatggtgaactgagtggcagagggatgaagagcgggatttcaggagtcacgatgactttgggcttgtacccttgggaaagtgctgtatttctacagcctccgtttctccacctgtcaaaggggaatgatgacagtttcccctgctgtagcgctgtgtgagattgaagcctgagaggtg

SEQ ID NO: 435688 - DNA, 860 bp, Homo sapiens
acgcgaggacgcaggaggaggagcccggagctgcagccaccggggagccaggcagcaaagcacctgctctgagtggccatggggaagcgatacttctgtgactactgcgaccgctccttccaggacaacctccacaaccgcaagaagcacctgaacgggctgcagcacctcaaggccaagaaggtctggtacgacatgttccgagatgcagctgccatcttgctggatgagcagaacaagcggccctgcaggaagtttctactgacaggccagtgcgactttggctccaactgcagattttcccacatgtcagagcgagacctgcaggagctgagcatccaggtggaggaggagaggcgagccagggagtggctactagatgctcctgagctccccgagggccatctggaggactggctggagaagagagccaagcggctgagctcagccccaagtagcagggctgaacccatcagaaccactgtcttccagtaccccgtgggctggccaccagttcaggagctgcctccatccctgcgggcacccccacctggggggtggcctctgcagcccagagtccagtggggctgagccccttgcccccgactgacccccacgtggtcacttttctcatcagtcacaataggaagccaagcccggttcctgctacgccccatggaggctccgagaccatctgcccagcctcactgaggctcaggacacggccacaccaagtgcagccctcgtcctgggtctgcaccgggcagctctcccctcactctcctccacctgcccccctgcttcttaagaagatgggggagaaaacttccaaatgtttataaagaaagtctgtcaccaca

SEQ ID NO: 435689 - DNA, 588 bp, Homo sapiens
tttaaaaaaaaatttagacaatgtttttttctgatttcaaaggcttgtgtgctcgtaaaacttttgagaaatataaaggagtaaaaaagtcacccataatggcaccactcagataggaccactgttaacattttgctgtgtcttccaggatttttttatgcatttatatattttatatatttttaaacaaaaatagtatcatgctatatacattattttataagctgctttttctccctatcacacagtatgtctttcctcatcagtgcatataaatctgccttaattcttacacaggccgcatggcattctctgctgtggacgtgcatatgtattgaatcagtcccccacaggtggacacgaaggttattcccattgtctcgcagctcaatgtctgcctgcaaccccgctatttccttgggctcagttcctagaggtgaggtcgctggctcaaacggtctgcctattttcgaggctctgccttccagaaaagtcatgcaggcagctgaccctccccacagccagggtggtgaggcaggtgggctgggggtggcataagcctgggctgtagtgcactcttattctccc

SEQ ID NO: 435690 - DNA, 975 bp, Homo sapiens
acgcgaggacgcaggaggaggagcccggagctgcagccaccggggagccagggtctctgtcacccaggctggagtgtagtggcgcaatctcagctggctggagccttgacctccttgggctcaagctatcctcccacctcagcctctcaaatagctgggactacaggcagcaaagcacctgctctgagtggccatggggaagcgatacttctgtgactactgcgaccgctccttccaggacaacctccacaaccgcaagaagcacctgaacgggctgcagcacctcaaggccaagaaggtctggtacgacatgttccgagatgcagctgccatcttgctggatgagcagaacaagcggccctgcaggaagtttctactgacaggccagtgcgactttggctccaactgcagattttcccacatgtcagagcgagacctgcaggagctgagcatccaggtggaggaggagaggcgagccagggagtggctactagatgctcctgagctccccgagggccatctggaggactggctggagaagagagccaagcggctgagctcagccccaagtagcagggctgaacccatcagaaccactgtcttccagtaccccgtgggctggccaccagttcaggagctgcctccatccctgcgggcacccccacctggggggtggcctctgcagcccagagtccagtggggctgagccccttgcccccgactgacccccacgtggtcacttttctcatcagtcacaataggaagccaagcccggttcctgctacgccccatggaggctccgagaccatctgcccagcctcactgaggctcaggacacggccacaccaagtgcagccctcgtcctgggtctgcaccgggcagctctcccctcactctcctccacctgcccccctgcttcttaagaagatgggggagaaaacttccaaatgtttataaagaaagtctgtcaccaca

SEQ ID NO: 435691 - DNA, 937 bp, Homo sapiens
acgcgaggacgcaggaggaggagcccggagctgcagccaccggggagccaggtaccttccgcgagacgtcgaggggcgagtcctagtctcttttctccgcactggaagacttgaacacttccttctctgcagcaaagcacctgctctgagtggccatggggaagcgatacttctgtgactactgcgaccgctccttccaggacaacctccacaaccgcaagaagcacctgaacgggctgcagcacctcaaggccaagaaggtctggtacgacatgttccgagatgcagctgccatcttgctggatgagcagaacaagcggccctgcaggaagtttctactgacaggccagtgcgactttggctccaactgcagattttcccacatgtcagagcgagacctgcaggagctgagcatccaggtggaggaggagaggcgagccagggagtggctactagatgctcctgagctccccgagggccatctggaggactggctggagaagagagccaagcggctgagctcagccccaagtagcagggctgaacccatcagaaccactgtcttccagtaccccgtgggctggccaccagttcaggagctgcctccatccctgcgggcacccccacctggggggtggcctctgcagcccagagtccagtggggctgagccccttgcccccgactgacccccacgtggtcacttttctcatcagtcacaataggaagccaagcccggttcctgctacgccccatggaggctccgagaccatctgcccagcctcactgaggctcaggacacggccacaccaagtgcagccctcgtcctgggtctgcaccgggcagctctcccctcactctcctccacctgcccccctgcttcttaagaagatgggggagaaaacttccaaatgtttataaagaaagtctgtcaccaca

SEQ ID NO: 435692 - DNA, 1022 bp, Homo sapiens
acgcgaggacgcaggaggaggagcccggagctgcagccaccggggagccaggtaccttccgcgagacgtcgaggggcgagtcctagtctcttttctccgcactggaagacttgaacacttccttctctggtctctgtcacccaggctggagtgtagtggcgcaatctcagctggctggagccttgacctccttgggctcaagctatcctcccacctcagcctctcaaatagctgggactacaggggaagcgatacttctgtgactactgcgaccgctccttccaggacaacctccacaaccgcaagaagcacctgaacgggctgcagcacctcaaggccaagaaggtctggtacgacatgttccgagatgcagctgccatcttgctggatgagcagaacaagcggccctgcaggaagtttctactgacaggccagtgcgactttggctccaactgcagattttcccacatgtcagagcgagacctgcaggagctgagcatccaggtggaggaggagaggcgagccagggagtggctactagatgctcctgagctccccgagggccatctggaggactggctggagaagagagccaagcggctgagctcagccccaagtagcagggctgaacccatcagaaccactgtcttccagtaccccgtgggctggccaccagttcaggagctgcctccatccctgcgggcacccccacctggggggtggcctctgcagcccagagtccagtggggctgagccccttgcccccgactgacccccacgtggtcacttttctcatcagtcacaataggaagccaagcccggttcctgctacgccccatggaggctccgagaccatctgcccagcctcactgaggctcaggacacggccacaccaagtgcagccctcgtcctgggtctgcaccgggcagctctcccctcactctcctccacctgcccccctgcttcttaagaagatgggggagaaaacttccaaatgtttataaagaaagtctgtcaccaca

SEQ ID NO: 435693 - DNA, 835 bp, Homo sapiens
tttaaaaaaaaatttagacaatgtttttttctgatttcaaaggcttgtgtgctcgtaaaacttttgagaaatataaaggagtaaaaaagtcacccataatggcaccactcagataggaccactgttaacattttgctgtgtcttccaggatttttttatgcatttatatattttatatatttttaaacaaaaatagtatcatgctatatacattattttataagctgctttttctccctatcacacagtatgtctttcctcatcagtgcatataaatctgccttaattcttacacaggccgcatggcattctctgctgtggacgtgcatatgtattgaatcagtcccccacaggtggacacgaaggttattcccattgtctcgcagctcaatgtctgcctgcaaccccgctatttccttgggctcagttcctagagggctgaacccatcagaaccactgtcttccagtaccccgtgggctggccaccagttcaggagctgcctccatccctgcgggcacccccacctggggggtggcctctgcagcccagagtccagtggggctgagccccttgcccccgactgacccccacgtggtcacttttctcatcagtcacaataggaagccaagcccggttcctgctacgccccatggaggctccgagaccatctgcccagcctcactgaggctcaggacacggccacaccaagtgcagccctcgtcctgggtctgcaccgggcagctctcccctcactctcctccacctgcccccctgcttcttaagaagatgggggagaaaacttccaaatgtttataaagaaagtctgtcaccaca

SEQ ID NO: 435694 - DNA, 1077 bp, Homo sapiens
acgcgaggacgcaggaggaggagcccggagctgcagccaccggggagccaggtaccttccgcgagacgtcgaggggcgagtcctagtctcttttctccgcactggaagacttgaacacttccttctctgcagcaaagcacctgctctgagtggccatggggaagcgatacttctgtgactactgcgaccgctccttccaggacaacctccacaaccgcaagaagcacctgaacgggctgcagcacctcaaggccaagaaggtctggtacgacatgttccgagatgcagctgccatcttgctggatgagcagaacaagcggccctgcaggaagtttctactgacaggccagtgcgactttggctccaactgcagattttcccacatgtcagagcgagacctgcaggagctgagcatccaggtggaggaggagaggcgagccagggagtggctactagatgctcctgagctccccgagggccatctggaggactggctggagaagagagccaagcggctgagctcagccccaagtagcagggctgaacccatcagaaccactgtcttccagtaccccgtgggctggccaccagttcaggagctgcctccatccctgcgggcacccccacctggggggtggcctctgcagcccagagtccagtggggctgagccccttgcccccgactgacccccacgtggtcacttttctcatcagtcacaataggaagccaagcccggttcctgctacgccccatggaggctccgagaccatctgcccagcctcactgaggctcaggacacggccacaccaagtgcagccctcgtcctgggtctgcaccgggcagctctcccctcactctcctccacctgcccccctgcttcttaagaagatgggggagaaaacttccaaatgtttataaagaaagtctgtcaccacaaaaaaaaaaaaacatgcacaaataaaaaaacaccggcggggactataagggggggggggaaaagggggtttaaaagggggcctgtgcccaatgtgtccgggccctttttgttcaaagggggaaattggcggggccccctg

SEQ ID NO: 435695 - DNA, 699 bp, Homo sapiens
acgcgaggacgcaggaggaggagcccggagctgcagccaccggggagccaggtaccttccgcgagacgtcgaggggcgagtcctagtctcttttctccgcactggaagacttgaacacttccttctctgcagcaaagcacctgctctgagtggccatggggaagcgatacttctgtgactactgcgaccgctccttccaggacaacctccacaaccgcaagaagcacctgaacgggctgcagcacctcaaggccaagaaggtctggtacgacatgttccgagatgcagctgccatcttgctggatgagcagaacaagcggccctgcaggaagtttctactgacaggccagtgcgactttggctccaactgcagattttcccacatgtcagagcgagacctgcaggagctgagcatccaggtggaggagaagagagccaagcggctgagctcagccccaagtagcagttctcatcagtcacaataggaagccaagcccggttcctgctacgccccatggaggctccgagaccatctgcccagcctcactgaggctcaggacacggccacaccaagtgcagccctcgtcctgggtctgcaccgggcagctctcccctcactctcctccacctgcccccctgcttcttaagaagatgggggagaaaacttccaaatgtttataaagaaagtctgtcaccaca

SEQ ID NO: 435696 - DNA, 1052 bp, Homo sapiens
acgcgaggacgcaggaggaggagcccggagctgcagccaccggggagccaggtaccttccgcgagacgtcgaggggcgagtcctagtctcttttctccgcactggaagacttgaacacttccttctctggtctctgtcacccaggctggagtgtagtggcgcaatctcagctggctggagccttgacctccttgggctcaagctatcctcccacctcagcctctcaaatagctgggactacaggcagcaaagcacctgctctgagtggccatggggaagcgatacttctgtgactactgcgaccgctccttccaggacaacctccacaaccgcaagaagcacctgaacgggctgcagcacctcaaggccaagaaggtctggtacgacatgttccgagatgcagctgccatcttgctggatgagcagaacaagcggccctgcaggaagtttctactgacaggccagtgcgactttggctccaactgcagattttcccacatgtcagagcgagacctgcaggagctgagcatccaggtggaggaggagaggcgagccagggagtggctactagatgctcctgagctccccgagggccatctggaggactggctggagaagagagccaagcggctgagctcagccccaagtagcagggctgaacccatcagaaccactgtcttccagtaccccgtgggctggccaccagttcaggagctgcctccatccctgcgggcacccccacctggggggtggcctctgcagcccagagtccagtggggctgagccccttgcccccgactgacccccacgtggtcacttttctcatcagtcacaataggaagccaagcccggttcctgctacgccccatggaggctccgagaccatctgcccagcctcactgaggctcaggacacggccacaccaagtgcagccctcgtcctgggtctgcaccgggcagctctcccctcactctcctccacctgcccccctgcttcttaagaagatgggggagaaaacttccaaatgtttataaagaaagtctgtcaccaca

SEQ ID NO: 435697 - DNA, 990 bp, Homo sapiens
tttcattaaggaggtggaggaggagaggcgagccaggagtggctactagatgctcctgagctccccgagggccatctggaggactggctggagaagagagccaagcggctgagctcagccccaagtagcagggctgaacccatcagaaccactgtcttccagtaccccgtgggctggccacgcagcaaagcacctgctctgagtggccatggggaagcgatacttctgtgactactgcgaccgctccttccaggacaacctccacaaccgcaagaagcacctgaacgggctgcagcacctcaaggccaagaaggtctggtacgacatgttccgagatgcagctgccatcttgctggatgagcagaacaagcggccctgcaggaagtttctactgacaggccagtgcgactttggctccaactgcagattttcccacatgtcagagcgagacctgcaggagctgagcatccaggtggaggaggagaggcgagccagggagtggctactagatgctcctgagctccccgagggccatctggaggactggctggagaagagagccaagcggctgagctcagccccaagtagcagggctgaacccatcagaaccactgtcttccagtaccccgtgggctggccaccagttcaggagctgcctccatccctgcgggcacccccacctggggggtggcctctgcagcccagagtccagtggggctgagccccttgcccccgactgacccccacgtggtcacttttctcatcagtcacaataggaagccaagcccggttcctgctacgccccatggaggctccgagaccatctgcccagcctcactgaggctcaggacacggccacaccaagtgcagccctcgtcctgggtctgcaccgggcagctctcccctcactctcctccacctgcccccctgcttcttaagaagatgggggagaaaacttccaaatgtttataaagaaagtctgtcaccaca

SEQ ID NO: 435698 - DNA, 1114 bp, Homo sapiens
acgcgaggacgcaggaggaggagcccggagctgcagccaccggggagccagggtctctgtcacccaggctggagtgtagtggcgcaatctcagctggctggagccttgacctccttgggctcaagctatcctcccacctcagcctctcaaatagctgggactacaggcagcaaagcacctgctctgagtggccatggggaagcgatacttctgtgactactgcgaccgctccttccaggacaacctccacaaccgcaagaagcacctgaacgggctgcagcacctcaaggccaagaaggtctggtacgacatgttccgagatgcagctgccatcttgctggatgagcagaacaagcggccctgcaggaagtttctactgacaggccagtgcgactttggctccaactgcagattttcccacatgtcagagcgagacctgcaggagctgagcatccaggtggaggaggagaggcgagccagggagtggctactagatgctcctgagctccccgagggccatctggaggactggctggagaagagagccaagcggctgagctcagccccaagtagcaggccgcatggcattctctgctgtggacgtgcatatgtattgaatcagtcccccacaggtggacacgaaggttattcccattgtctcgcagctcaatgtctgcctgcaaccccgctatttccttgggctcagttcctagagggctgaacccatcagaaccactgtcttccagtaccccgtgggctggccaccagttcaggagctgcctccatccctgcgggcacccccacctggggggtggcctctgcagcccagagtccagtggggctgagccccttgcccccgactgacccccacgtggtcacttttctcatcagtcacaataggaagccaagcccggttcctgctacgccccatggaggctccgagaccatctgcccagcctcactgaggctcaggacacggccacaccaagtgcagccctcgtcctgggtctgcaccgggcagctctcccctcactctcctccacctgcccccctgcttcttaagaagatgggggagaaaacttccaaatgtttataaagaaagtctgtcaccaca

SEQ ID NO: 435699 - DNA, 1151 bp, Homo sapiens
gcgccgcgggggttgcccgagcggcgctgcgggggctgacatgtcgtcccggcctgggcgcgaggacgtgggggctgcgggcgcgcggcggccgcgtgagccgccggagcaggagctgcagcgacgtcgggagcagaagcggcggcgacacgacgcgcagcagctgcagcagctcaagcacctggagtccttttacgaaaaacctcctcctgggcttatcaaggaagatgagactaagccagaagattgcataccagatgtaccaggcaatgaacacgccagggaatttctggctcatgcaccaactaaaggactttggatgccactggggaaagaagtcaaagttatgcagtgttggcgttgcaaacgctatggtcaccgaacgggtgacaaagaatgccctttctttatcaaaggcaaccaaaagttagagcagttcagagtggcacatgaagatcccatgtatgacatcatacgagacaataaacgacatgaaaaggacgtaaggatacagcagttaaaacagttactggaggattctacctcagatgaagataggagcagctccagttcctctgaaggtaaagagaaacacaagaaaaagaagaagaaagaaaagcataagaaaaggaagaaagaaaagaaaaagaagaaaaaacggaagcacaaatcttccaagtcaaatgagggttctgactcagagtgacaaggatgtgacttgttcaacattctcttctcaaacactgaccaaggaacagaggaagatgcagtcagagaaagcagcaggatagagacgccgagagaggagtatatgtgggtcacagcagtgagctcccacccgccttgcagtgaagatgtgaccccaggagagggagtgtctccttccaggtgctagctctggacagcagctgattttaggcaggaaagtttcttcatcgttgtcctccctgctggtcacatgagtttacgattcctttgaagtgtctcccacagggtggcaggactgggagaatctctgaggcgtgtcttccaggccctcccacagcttgtgccctccacagtgtggactcaggtcccatagacatcaggctggagtcttctctgttgttgagaataataaaagctcattatttattttttaaaaaaaagta

SEQ ID NO: 435700 - DNA, 741 bp, Homo sapiens
aaacacctcgccttcagaatttccttcccatcttgctgcctgtcccatctggagacttgcgtgctcagcattctgggtctcctctgggttcagtccctggatggaaataaggaaggcctggccagtcttagatggcaggtgccgctcagcacagggaggagaagcattctgctcttctcagttacgaaaaacctcctcctgggcttatcaaggaagatgagactaagccagaagattgcataccagatgtaccaggcaatgaacacgccagggaatttctggctcatgcaccaactaaaggactttggatgccactggggaaagaagtcaaagttatgcagtgttggcgttgcaaacgctatggtcaccgaacgggtgacaaagaatgccctttctttatcaaaggcaaccaaaagttagagcagttcagagtggcacatgaagatcccatgtatgacatcatacgagacaataaacgacatgaaaaggacgtaaggatacagcagttaaaacagttactggaggattctacctcagatgaagataggagcagctccagttcctctgaaggtaaagagaaacacaagaaaaagaagaagaaagaaaagcataaaaaaaaatagaaaaaaaaaaaccggggggtttttttggggggggggaaaaagggtttagagggggcgggagttttcggccttttttgaaaaggggaaaagggggcccaaggggggaaatgagggggcg

SEQ ID NO: 435701 - DNA, 367 bp, Homo sapiens
aagcagtaactctgaggagatctgacagctatgcagtcccgctccctggtacaggcatcgcgcctgcagctccctttctttatcaaaggcaaccaaaagttagagcagttcagagtggcacatgaagatcccatgtatgacatcatacgagacaataaacgacatgaaaaggacgtaaggatacagcagttaaaacagttactggaggattctacctcagatgaagataggagcagctccagttcctctgaaggtaaagagaaacacaagaaaaagaagaagaaagaaaagcatttgaagaaaagagggaagataaaggaaagaaaaacattttctgaggcatgccaacagtacaatcactacagcc

SEQ ID NO: 435702 - DNA, 711 bp, Homo sapiens
atattctgctgattctttatcttgagtaggtgaaactgttatcttacagaaatatttctcttttcgtttttaggttggcgttgcaaacgctatggtcaccgaacgggtgacaaagaatgccctttctttatcaaaggcaaccaaaagttagagcagttcagagtggtaagtaaagtccaagagtgtcaatttacatttatcagagatagtgaaaatcagtgaagcagaaagtcaccagtgaacttgaatggtcacataaaatacattcccagaagccctttgaccaaagtgtgtgctgttaactacatgcttattaaattacatttgtatgacaaattagctcttttacaaaaaaaaggaattcttattaaagtgatctttgtttgtaacttggaacagtgattttttttctgaaacagacattgttatctattcaaccgcactttttaaaatttactgtgtaaaaaagtcatgtttcatgactgaaatcagggatttaatttcccggtctttaaagagtacatgtctttaaactgtaagattaaagtgtccgtatattttttctttagatgacagttattccctgtatttttctttgtttttgaggtggcagtgttatagctctgtgattgctcctgcagagcagggctaccccaaagacagtgtgctgagagtagccatttcctgtatttttctaattggaaaatccat

SEQ ID NO: 435703 - DNA, 589 bp, Homo sapiens
gcgccgcgggggttgcccgagcggcgctgcgggggctgacatgtcgtcccggcctgggcgcgaggacgtgggggctgcgggcgcgcggcggccgcgtgagccgccggagcaggagctgcagcgacgtcgggagcagaagcggcggcgacacgacgcgcagcagctgcagcagctcaagcacctggagtccttttacgaaaaacctcctcctgggcttatcaaggaagatgagactaagccagaagattgcataccagatgtaccaggcaatgaacacgccagggaatttctggctcatgcaccaactaaaggactttggatgccactggggaaagaagtcaaagttatgcagtgtgagtgtgggagagtttccctaatccatgcaacttacatgcctcaatttacaaagagtgtttacttcttttatttaacttgttctcatcacagccctcttacagccaaggcacgttctccatcttctagataaggaagcatccaccccaccccccaccaccgtgccatgtgaagaagaaagagggctgtcatcttaagccaggaagaaagctctcaccacaaacccaccttgctg

SEQ ID NO: 435704 - DNA, 526 bp, Homo sapiens
aagcattctgctcttctcaggtgattgcttgtctgcaaaccagtgataaaagcttattgttgctaaaatctctgattaaaaatcctatagccccttttttgcagtaacttgatgtgttatgtttacattaacatggttgataaggttttgttttttgttttccagttacgaaaaacctcctcctgggcttatcaaggttagtgtgaagtttgtactcttggttattccacaagacatacttgtagactcagtaacttgttatgaaaaataattgcatgatgttaaatctccttttaccaaaagcctgtttcttttcctgcagatgaatgaggggtcataatttttagttttgtcacaagcctctgcctttgcagaaatttcatcagccatgtttcccttccctgaagaaccagtgcaggcccacgtggattccttggccatgcccctcttctctcttgctggggatggcatctctaagctccttttccttgtcggcctcacccggctcagcccctcggtccatcct

SEQ ID NO: 435705 - DNA, 254 bp, Homo sapiens
tactgcttttgaatgacatatttatctaagcaactgttgtaagttaaagctaaaactcactgttctttgatcaattttgaatgtttaggatacagcagttaaaacagttactggaggattctacctcagatgaagataggagcagctccagttcctctgaaggtaaagagaaacacaagaaaaagaagaagaaagaaaagcataagaaaaggaagaaagaaaagaaaaagaagaaaaaacggaagcacaaatct

SEQ ID NO: 435706 - DNA, 830 bp, Homo sapiens
aaggctaggtacgaggctggggttgaatcggcaccgaggattatctgcctggacctgtcagaggaaatgtcactgccaaagctggagtcgttcaacggccagcagaaaactgagcttccggtcacagagaacgtgcagacgattcccccgccatatgtggtccgcaccatccttgtctacagccgtccaccttgccagccccagttctccttgacggagcccatgaagaaaatgttccagtgcccatatttcttctttgacgttgtttacatccacaatggcactgaggagaaggaggaggagatgagttggaaggatatgtttgccttcatgggcagcctggataccaagggtaccagctacaagtatgaggtggcactggctgggccagccctggagttgcacaactgcatggcgaaactgttggcccaccccctgcagcggccttgccagagccatgcttcctacagcctgctggaggaggaggatgaagccattgaggttgaggccactgtctgaaccatccctgtacatctgcaccttcttgtgcaaggaagtccttggcctaaagccttggttctcaaactgggttccttgggacctccggggtgggggggttccaggaggcacgtagggtaccttgcagggtcctaggagggaaacccaggattccaggagggatcccaggaactgtgggcacccattttctgtgtctcccagcccatttccactcctagtttgtcatggataatttttgttcttccctgtgtgatttttgccatcaaaataaaaatttgagactcgttaagaagtccacgccaatcactttg

SEQ ID NO: 435707 - DNA, 1061 bp, Homo sapiens
tcactaatttttttaatccaatcacatttcatactttgctccagtgtagccaatcacattccaggtcccgccgcacccagctccaggcagctctcactccaaaccccacccccaacccagtttcagcctatcagtttccaagttctttctagcctcaaccagtttctgtctctgcttgttctgcagcccgctgaactacatttcctgatcagcgaggcgtcgggggctgcgccgtacaacttccggctgtaaagatggcggcttcctagtgagtcggcggctgatttagaaggaggttcaggctacggtgagccgaagaggtgggtggtgaaagcgtgtggggcccgttcctaggggcccagctccctttgccccaagagatccagctcctcgcctttcctggggcttccgcctttatttctggtttctcctgcagtgtagcctccatccttcttgctgccgctaaagccttgtttttcttagaggtgtggggactgcaaggcgctcaaagaccatcttgggaagcccgtgcctatttcccagatagacaaactgctccattcgcgtcctgtttctctccaaggggaaccacagtactaatattttgcttctccctcatgcagacacccgctagggacgagggtgtcctagaggttattattcccttattcaccaagacattttcagttttaggtaacagaaaaccctactcaatctggcttaaggaagaaaaggaagttggtggcttatagattgggtctaacaggagctgggtccaggtggtcagaattcgatctgcagttttctcggtggagaccatttcgctttttaccgaggcaaaaggggcccctcacagctctcaactttattctaccagctctgcaactctaatgagagtctcttttccttgatgacactgctagaagttgcagagctgccactcaatggcctgatttgggtcatgtgcccatccctgagccattttcagtggccagagagctgggatgtgctcactggccgagtaggggcatggggctagcactacgttaaaaaaaaaaaga

SEQ ID NO: 435708 - DNA, 979 bp, Homo sapiens
  misc_feature (979)..(979): n is a, c, g, or t
gccaggaactgtgggcacccattttctgtgtctcccagcccatttccactcctagtttgtcatgagtccttggcctaaagccttggttctcaaactgggttccttgggacctccggggtgggggggttccaggaggcacgtagggtaccttgcagggtcctaggagggaaacccaggattccaggagggatcccaggaactgtgggcacccattttctgtgtctcccagcccatttccactcctagtttgtcatggataatttttgttcttccctgtgtgatttttgccatcaaaataaaaatttgagactcgttaaaaaaaaaaaaaaaaaaaaaaaaaaaaacaaaaaaaaaaaaaaaaaaaaaaaaaaaaaaaaaaaaaaaaaaaaaaaaaaaaaaaaaaaaaaaaaaaaaaaaaaaaaagggggggggggggggaaaaatccggggcggggccccccacaagtggccgcccccccgccttttttgtagtggaaaacagacgcccccccctaaggatggagctattaaataaaaccggacgcggggcgcgggcgtcaacagcacgcggaggaggagagaacagcccgatcgcctgccgcgtctgcttgtggaggcggcccctgctcctgcgggggggacacgatctggcgggcgcaccgccccgcggatgtagcaggggcgcggcgggacataaaccccgcggggtgttcgaggggcacccccctacctagtgcgcgggcgaatatttgtctgtctttttattaaattaaggccgctctcaatataatcacgtgcttagcaatctagcagactgatatacaggacagcgcacacgtcaatgctgacacactacaagcagatgctaacaacagacaaatcagatctacgagcatggagcacgagacgcagacagaaaagacagtcagatacgtccgagactgttgctgccaccacattccatacacactacgcggan

SEQ ID NO: 435709 - DNA, 2266 bp, Homo sapiens
  misc_feature (1748)..(1748): n is a, c, g, or t
  misc_feature (1877)..(1877): n is a, c, g, or t
gcggagaagcaaacttaggctaggtacgaggctggtgtgcttcctagtgagtcggcggctgatttagaaggaggttcaggctacggtgagccgaagtacggggaggattctggcttcccctgtccgtgttccatctagccacacaggagccatggaagtggcagagcccagcagccccactgaagaggaggaggaggaagaggagcactcggcagagcctcggccccgcactcgctccaatcctgaaggggctgaggaccgggcagtaggggcacaggccagcgtgggcagccgcagcgagggtgagggtgaggccgccagtgctgatgatgggagcctcaacacttcaggagccggccctaagtcctggcaggtgcccccgccagcccctgaggtccaaattcggacaccaagggtcaactgtccagagaaagtgattatctgcctggacctgtcagaggaaatgtcactgccaaagctggagtcgttcaacggctccaaaaccaacgccctcaatgtctcccagaagatgattgagatgttcgtgcggacaaaacacaagatcgacaaaagccacgagtttgcactggtggtggtgaacgatgacacggcctggctgtctggcctgacctccgacccccgcgagctctgtagctgcctctatgatctggagacggcctcctgttccaccttcaatctggaaggacttttcagcctcatccagcagaaaactgagcttccggtcacagagaacgtgcagacgattcccccgccatatgtggtccgcaccatccttgtctacagccgtccaccttgccagccccagttctccttgacggagcccatgaagaaaatgttccagtgcccatatttcttctttgacgttgtttacatccacaatggcactgaggagaaggaggaggagatgagttggaaggatatgtttgccttcatgggcagcctggataccaagggtaccagctacaagtatgaggtggcactggctgggccagccctggagttgcacaactgcatggcgaaactgttggcccaccccctgcagcggccttgccagagccatgcttcctacagcctgctggaggaggaggatgaagccattgaggttgaggccactgtctgaaccatccctgtacatctgcaccttcttgtgcaaggaagtccttggcctaaagccttggttctcaaactgggttccttgggacctccggggtgggggggttccaggaggcacgtagggtaccttgcagggtcctaggagggaaacccaggattccaggagggatcccaggaactgtgggcacccattttctgtgtctcccagcccatttccactcctagtttgtcatggataatttttgttcttccctgtgtgatttttgccatcaaaataaaaatttgagactcgttaaaaaaaaaaaaaaaaaaaaaaaaaaaaaaaaggggggggggcccaaaagtttccccgggggggcccaatttcgcgtccccggtttttttggtccaagggggcccctatgggggggggttaataagagggggggcgccgctcgtttacacgacgtctcgggacaggtggcgaaaacccgtggcctacccggggcgacctttggcggaagaggaaccccctatactctgtgtgggtggcgcacatatggtgtcgccccaacacctcccctacagcaagaattttaagcgctccatagagggtacattactacaaccttttncaacgcggttattacggtgcgtttcacccccatcggcgcaaattaagcctcgcgcgctggaaagaaatttttgggcccaccggggacatattcattttgggtaacacaccttttttttttccgccgggnacctttgtcctgtaaaacaaaatcggcaccaaccacgacagcgccgaccgagcaccaacacccaggacaacaagcacaagaagatagccgcccagacgggcagaacaccgcgctacgagcggacgaaacaacacagtacccggtgacaagcggtaccacagacacacgcggcgcgcagggccgactaccccgaacggtcagtcctcgtacgccggacgccagagctcgtaggcgagagagagccaccgcggcacacgccgccgaagagcgaaggcgacagagcaggagcacgtaagccacggagagcaccgcacgaaagaacgtcagaccatggcccatcgccccgaccccaccgacagagggcacacgaacgaaccagaggtcgccgg

SEQ ID NO: 435710 - DNA, 1452 bp, Homo sapiens
gcggagaagcaaacttaggctaggtacgaggctggtgtgcttcctagtgagtcggcggctgatttagaaggaggttcaggctacggtgagccgaagtacggggaggattctggcttcccctgtccgtgttccatctagccacacaggagccatggaagtggcagagcccagcagccccactgaagaggaggaggaggaagaggagcactcggcagagcctcggccccgcactcgctccaatcctgaaggggctgaggaccgggcagtaggggcacaggccagcgtgggcagccgcagcgagggtgagggtgaggccgccagtgctgatgatgggagcctcaacacttcaggagccggccctaagtcctggcaggtgcccccgccagcccctgaggtccaaattcggacaccaagggtcaactgtccagagaaagtgattatctgcctggacctgtcagaggaaatgtcactgccaaagctggagtcgttcaacggctccaaaaccaacgccctcaatgtctcccagaagatgattgagatgttcgtgcggacaaaacacaagatcgacaaaagccacgagtttgcactggtggtggtgaacgatgacacggcctggctgtctggcctgacctccgacccccgcgagctctgtagctgcctctatgatctggagacggcctcctgttccaccttcaatctggaaggacttttcagcctcatccagcagaaaactgagcttccggtcacagagaacgtgcagacgattcccccgccatatgtggtccgcaccatccttgtctacagccgtccaccttgccagccccagttctccttgacggagcccatgaagaaaatgttccagtgcccatatttcttctttgacgttgtttacatccacaatggcactgaggagaaggaggaggagatgagttggaaggatatgtttgccttcatgggcagcctggataccaagggtaccagctacaagtatgaggtggcactggctgggccagccctggagttgcacaactgcatggcgaaactgttggcccaccccctgcagcggccttgccagagccatgcttcctacagcctgctggaggaggaggatgaagccattgaggttgaggccactgtctgaaccatccctgtacatctgcaccttcttgtgcaaggaagtccttggcctaaagccttggttctcaaactgggttccttgggacctccggggtgggggggttccaggaggcacgtagggtaccttgcagggtcctaggagggaaacccaggattccaggagggatcccaggaactgtgggcacccattttctgtgtctcccagcccatttccactcctagtttgtcatggataatttttgttcttccctgtgtgatttttgccatcaaaataaaaatttgagactcgttaagaagtccacgccaatcactttg

SEQ ID NO: 435711 - DNA, 2213 bp, Homo sapiens
  misc_feature (1695)..(1695): n is a, c, g, or t
  misc_feature (1824)..(1824): n is a, c, g, or t
taaatcggtcacggaggcgcggtccttagattagtatcgtgtcggtgtgactcttgaaggaggttcaggctacggtgagccgaagccacacaggagccatggaagtggcagagcccagcagccccactgaagaggaggaggaggaagaggagcactcggcagagcctcggccccgcactcgctccaatcctgaaggggctgaggaccgggcagtaggggcacaggccagcgtgggcagccgcagcgagggtgagggtgaggccgccagtgctgatgatgggagcctcaacacttcaggagccggccctaagtcctggcaggtgcccccgccagcccctgaggtccaaattcggacaccaagggtcaactgtccagagaaagtgattatctgcctggacctgtcagaggaaatgtcactgccaaagctggagtcgttcaacggctccaaaaccaacgccctcaatgtctcccagaagatgattgagatgttcgtgcggacaaaacacaagatcgacaaaagccacgagtttgcactggtggtggtgaacgatgacacggcctggctgtctggcctgacctccgacccccgcgagctctgtagctgcctctatgatctggagacggcctcctgttccaccttcaatctggaaggacttttcagcctcatccagcagaaaactgagcttccggtcacagagaacgtgcagacgattcccccgccatatgtggtccgcaccatccttgtctacagccgtccaccttgccagccccagttctccttgacggagcccatgaagaaaatgttccagtgcccatatttcttctttgacgttgtttacatccacaatggcactgaggagaaggaggaggagatgagttggaaggatatgtttgccttcatgggcagcctggataccaagggtaccagctacaagtatgaggtggcactggctgggccagccctggagttgcacaactgcatggcgaaactgttggcccaccccctgcagcggccttgccagagccatgcttcctacagcctgctggaggaggaggatgaagccattgaggttgaggccactgtctgaaccatccctgtacatctgcaccttcttgtgcaaggaagtccttggcctaaagccttggttctcaaactgggttccttgggacctccggggtgggggggttccaggaggcacgtagggtaccttgcagggtcctaggagggaaacccaggattccaggagggatcccaggaactgtgggcacccattttctgtgtctcccagcccatttccactcctagtttgtcatggataatttttgttcttccctgtgtgatttttgccatcaaaataaaaatttgagactcgttaaaaaaaaaaaaaaaaaaaaaaaaaaaaaaaaggggggggggcccaaaagtttccccgggggggcccaatttcgcgtccccggtttttttggtccaagggggcccctatgggggggggttaataagagggggggcgccgctcgtttacacgacgtctcgggacaggtggcgaaaacccgtggcctacccggggcgacctttggcggaagaggaaccccctatactctgtgtgggtggcgcacatatggtgtcgccccaacacctcccctacagcaagaattttaagcgctccatagagggtacattactacaaccttttncaacgcggttattacggtgcgtttcacccccatcggcgcaaattaagcctcgcgcgctggaaagaaatttttgggcccaccggggacatattcattttgggtaacacaccttttttttttccgccgggnacctttgtcctgtaaaacaaaatcggcaccaaccacgacagcgccgaccgagcaccaacacccaggacaacaagcacaagaagatagccgcccagacgggcagaacaccgcgctacgagcggacgaaacaacacagtacccggtgacaagcggtaccacagacacacgcggcgcgcagggccgactaccccgaacggtcagtcctcgtacgccggacgccagagctcgtaggcgagagagagccaccgcggcacacgccgccgaagagcgaaggcgacagagcaggagcacgtaagccacggagagcaccgcacgaaagaacgtcagaccatggcccatcgccccgaccccaccgacagagggcacacgaacgaaccagaggtcgccgg

SEQ ID NO: 435712 - DNA, 2202 bp, Homo sapiens
  misc_feature (1684)..(1684): n is a, c, g, or t
  misc_feature (1813)..(1813): n is a, c, g, or t
agggaaacattggctggtcaggctgggttaatcggacgaggattaaaggaggttcaggctacggtgagccgaagccacacaggagccatggaagtggcagagcccagcagccccactgaagaggaggaggaggaagaggagcactcggcagagcctcggccccgcactcgctccaatcctgaaggggctgaggaccgggcagtaggggcacaggccagcgtgggcagccgcagcgagggtgagggtgaggccgccagtgctgatgatgggagcctcaacacttcaggagccggccctaagtcctggcaggtgcccccgccagcccctgaggtccaaattcggacaccaagggtcaactgtccagagaaagtgattatctgcctggacctgtcagaggaaatgtcactgccaaagctggagtcgttcaacggctccaaaaccaacgccctcaatgtctcccagaagatgattgagatgttcgtgcggacaaaacacaagatcgacaaaagccacgagtttgcactggtggtggtgaacgatgacacggcctggctgtctggcctgacctccgacccccgcgagctctgtagctgcctctatgatctggagacggcctcctgttccaccttcaatctggaaggacttttcagcctcatccagcagaaaactgagcttccggtcacagagaacgtgcagacgattcccccgccatatgtggtccgcaccatccttgtctacagccgtccaccttgccagccccagttctccttgacggagcccatgaagaaaatgttccagtgcccatatttcttctttgacgttgtttacatccacaatggcactgaggagaaggaggaggagatgagttggaaggatatgtttgccttcatgggcagcctggataccaagggtaccagctacaagtatgaggtggcactggctgggccagccctggagttgcacaactgcatggcgaaactgttggcccaccccctgcagcggccttgccagagccatgcttcctacagcctgctggaggaggaggatgaagccattgaggttgaggccactgtctgaaccatccctgtacatctgcaccttcttgtgcaaggaagtccttggcctaaagccttggttctcaaactgggttccttgggacctccggggtgggggggttccaggaggcacgtagggtaccttgcagggtcctaggagggaaacccaggattccaggagggatcccaggaactgtgggcacccattttctgtgtctcccagcccatttccactcctagtttgtcatggataatttttgttcttccctgtgtgatttttgccatcaaaataaaaatttgagactcgttaaaaaaaaaaaaaaaaaaaaaaaaaaaaaaaaggggggggggcccaaaagtttccccgggggggcccaatttcgcgtccccggtttttttggtccaagggggcccctatgggggggggttaataagagggggggcgccgctcgtttacacgacgtctcgggacaggtggcgaaaacccgtggcctacccggggcgacctttggcggaagaggaaccccctatactctgtgtgggtggcgcacatatggtgtcgccccaacacctcccctacagcaagaattttaagcgctccatagagggtacattactacaaccttttncaacgcggttattacggtgcgtttcacccccatcggcgcaaattaagcctcgcgcgctggaaagaaatttttgggcccaccggggacatattcattttgggtaacacaccttttttttttccgccgggnacctttgtcctgtaaaacaaaatcggcaccaaccacgacagcgccgaccgagcaccaacacccaggacaacaagcacaagaagatagccgcccagacgggcagaacaccgcgctacgagcggacgaaacaacacagtacccggtgacaagcggtaccacagacacacgcggcgcgcagggccgactaccccgaacggtcagtcctcgtacgccggacgccagagctcgtaggcgagagagagccaccgcggcacacgccgccgaagagcgaaggcgacagagcaggagcacgtaagccacggagagcaccgcacgaaagaacgtcagaccatggcccatcgccccgaccccaccgacagagggcacacgaacgaaccagaggtcgccgg

SEQ ID NO: 435713 - DNA, 2224 bp, Homo sapiens
  misc_feature (1706)..(1706): n is a, c, g, or t
  misc_feature (1835)..(1835): n is a, c, g, or t
gcggagaagcaaacttaggctaggtacgaggctggtgtgcttcctagtgagtcggcggctgatttagaaggaggttcaggctacggtgagccgaagccacacaggagccatggaagtggcagagcccagcagccccactgaagaggaggaggaggaagaggagcactcggcagagcctcggccccgcactcgctccaatcctgaaggggctgaggaccgggcagtaggggcacaggccagcgtgggcagccgcagcgagggtgagggtgaggccgccagtgctgatgatgggagcctcaacacttcaggagccggccctaagtcctggcaggtgcccccgccagcccctgaggtccaaattcggacaccaagggtcaactgtccagagaaagtgattatctgcctggacctgtcagaggaaatgtcactgccaaagctggagtcgttcaacggctccaaaaccaacgccctcaatgtctcccagaagatgattgagatgttcgtgcggacaaaacacaagatcgacaaaagccacgagtttgcactggtggtggtgaacgatgacacggcctggctgtctggcctgacctccgacccccgcgagctctgtagctgcctctatgatctggagacggcctcctgttccaccttcaatctggaaggacttttcagcctcatccagcagaaaactgagcttccggtcacagagaacgtgcagacgattcccccgccatatgtggtccgcaccatccttgtctacagccgtccaccttgccagccccagttctccttgacggagcccatgaagaaaatgttccagtgcccatatttcttctttgacgttgtttacatccacaatggcactgaggagaaggaggaggagatgagttggaaggatatgtttgccttcatgggcagcctggataccaagggtaccagctacaagtatgaggtggcactggctgggccagccctggagttgcacaactgcatggcgaaactgttggcccaccccctgcagcggccttgccagagccatgcttcctacagcctgctggaggaggaggatgaagccattgaggttgaggccactgtctgaaccatccctgtacatctgcaccttcttgtgcaaggaagtccttggcctaaagccttggttctcaaactgggttccttgggacctccggggtgggggggttccaggaggcacgtagggtaccttgcagggtcctaggagggaaacccaggattccaggagggatcccaggaactgtgggcacccattttctgtgtctcccagcccatttccactcctagtttgtcatggataatttttgttcttccctgtgtgatttttgccatcaaaataaaaatttgagactcgttaaaaaaaaaaaaaaaaaaaaaaaaaaaaaaaaggggggggggcccaaaagtttccccgggggggcccaatttcgcgtccccggtttttttggtccaagggggcccctatgggggggggttaataagagggggggcgccgctcgtttacacgacgtctcgggacaggtggcgaaaacccgtggcctacccggggcgacctttggcggaagaggaaccccctatactctgtgtgggtggcgcacatatggtgtcgccccaacacctcccctacagcaagaattttaagcgctccatagagggtacattactacaaccttttncaacgcggttattacggtgcgtttcacccccatcggcgcaaattaagcctcgcgcgctggaaagaaatttttgggcccaccggggacatattcattttgggtaacacaccttttttttttccgccgggnacctttgtcctgtaaaacaaaatcggcaccaaccacgacagcgccgaccgagcaccaacacccaggacaacaagcacaagaagatagccgcccagacgggcagaacaccgcgctacgagcggacgaaacaacacagtacccggtgacaagcggtaccacagacacacgcggcgcgcagggccgactaccccgaacggtcagtcctcgtacgccggacgccagagctcgtaggcgagagagagccaccgcggcacacgccgccgaagagcgaaggcgacagagcaggagcacgtaagccacggagagcaccgcacgaaagaacgtcagaccatggcccatcgccccgaccccaccgacagagggcacacgaacgaaccagaggtcgccgg

SEQ ID NO: 435714 - DNA, 2381 bp, Homo sapiens
  misc_feature (1863)..(1863): n is a, c, g, or t
  misc_feature (1992)..(1992): n is a, c, g, or t
gcggagaagcaaacttaggctaggtacgaggctggtgtgcttcctagtgagtcggcggctgatttagaaggaggttcaggctacggtgagccgaaggctggtctcgaacttccaacctcaggtgatccacctgcctcggcctcccaaagtgctgggattacaggcatgagccaccgtgcccgaccgtaaccaaatgtttttaaaactccaatacggggaggattctggcttcccctgtccgtgttccatctagccacacaggagccatggaagtggcagagcccagcagccccactgaagaggaggaggaggaagaggagcactcggcagagcctcggccccgcactcgctccaatcctgaaggggctgaggaccgggcagtaggggcacaggccagcgtgggcagccgcagcgagggtgagggtgaggccgccagtgctgatgatgggagcctcaacacttcaggagccggccctaagtcctggcaggtgcccccgccagcccctgaggtccaaattcggacaccaagggtcaactgtccagagaaagtgattatctgcctggacctgtcagaggaaatgtcactgccaaagctggagtcgttcaacggctccaaaaccaacgccctcaatgtctcccagaagatgattgagatgttcgtgcggacaaaacacaagatcgacaaaagccacgagtttgcactggtggtggtgaacgatgacacggcctggctgtctggcctgacctccgacccccgcgagctctgtagctgcctctatgatctggagacggcctcctgttccaccttcaatctggaaggacttttcagcctcatccagcagaaaactgagcttccggtcacagagaacgtgcagacgattcccccgccatatgtggtccgcaccatccttgtctacagccgtccaccttgccagccccagttctccttgacggagcccatgaagaaaatgttccagtgcccatatttcttctttgacgttgtttacatccacaatggcactgaggagaaggaggaggagatgagttggaaggatatgtttgccttcatgggcagcctggataccaagggtaccagctacaagtatgaggtggcactggctgggccagccctggagttgcacaactgcatggcgaaactgttggcccaccccctgcagcggccttgccagagccatgcttcctacagcctgctggaggaggaggatgaagccattgaggttgaggccactgtctgaaccatccctgtacatctgcaccttcttgtgcaaggaagtccttggcctaaagccttggttctcaaactgggttccttgggacctccggggtgggggggttccaggaggcacgtagggtaccttgcagggtcctaggagggaaacccaggattccaggagggatcccaggaactgtgggcacccattttctgtgtctcccagcccatttccactcctagtttgtcatggataatttttgttcttccctgtgtgatttttgccatcaaaataaaaatttgagactcgttaaaaaaaaaaaaaaaaaaaaaaaaaaaaaaaaggggggggggcccaaaagtttccccgggggggcccaatttcgcgtccccggtttttttggtccaagggggcccctatgggggggggttaataagagggggggcgccgctcgtttacacgacgtctcgggacaggtggcgaaaacccgtggcctacccggggcgacctttggcggaagaggaaccccctatactctgtgtgggtggcgcacatatggtgtcgccccaacacctcccctacagcaagaattttaagcgctccatagagggtacattactacaaccttttncaacgcggttattacggtgcgtttcacccccatcggcgcaaattaagcctcgcgcgctggaaagaaatttttgggcccaccggggacatattcattttgggtaacacaccttttttttttccgccgggnacctttgtcctgtaaaacaaaatcggcaccaaccacgacagcgccgaccgagcaccaacacccaggacaacaagcacaagaagatagccgcccagacgggcagaacaccgcgctacgagcggacgaaacaacacagtacccggtgacaagcggtaccacagacacacgcggcgcgcagggccgactaccccgaacggtcagtcctcgtacgccggacgccagagctcgtaggcgagagagagccaccgcggcacacgccgccgaagagcgaaggcgacagagcaggagcacgtaagccacggagagcaccgcacgaaagaacgtcagaccatggcccatcgccccgaccccaccgacagagggcacacgaacgaaccagaggtcgccgg

SEQ ID NO: 435715 - DNA, 2615 bp, Homo sapiens
  misc_feature (2097)..(2097): n is a, c, g, or t
  misc_feature (2226)..(2226): n is a, c, g, or t
gcggagaagcaaacttaggctaggtacgaggctggtgtgcttcctagtgagtcggcggctgatttagaaggaggttcaggctacggtgagccgaagtacggggaggattctggcttcccctgtccgtgttccatctagccacacaggagccatggaagtggcagagcccagcagccccactgaagaggaggaggaggaagaggagcactcggcagagcctcggccccgcactcgctccaatcctgaaggggctgaggaccgggcagtaggggcacaggccagcgtgggcagccgcagcgagggtgagggtgaggccgccagtgctgatgatgggagcctcaacacttcaggagccggccctaagtcctggcaggtgcccccgccagcccctgaggtccaaattcggacaccaagggtcaactgtccagagaaagtgattatctgcctggacctgtcagaggaaatgtcactgccaaagctggagtcgttcaacggctccaaaaccaacgccctcaatgtctcccagaagatgattgagatgttcgtgcggacaaaacacaagatcgacaaaagccacgagtttgcactggtggtggtgaacgatgacacggcctggctgtctggcctgacctccgacccccgcgagctctgtagctgcctctatgatctggagacggcctcctgttccaccttcaatctggaaggacttttcagcctcatccagcagaaaactgagcttccggtcacagagaacgtgcagacgattcccccgccatatgtggtccgcaccatccttgtctacagccgtccaccttgccagccccagttctccttgacggagcccatgaagaaaatgttccagtgcccatatttcttctttgacgttgtttacatccacaatggcactgaggagaaggaggaggagatgagttggaagagacggggtttcactgtgttggccgggatggtcttgatctcctgaccttgtgatctgcccgcctcagcctcccaaagtgctgggattacaggcgtgagccaccgcgcccggcccacactggggactctttgggggccatgactgggacctcttcagatccttaacactgggtccatggcggggaatgtttgctgaatgtgtgaatggtttctgcttggcaaactcctcttcaccctttagaacccaccccagatgtcccctcttctgagaagccctccagggatatgaagggcctgttggggtaacctctgcctgaacagcccttcactgacccccgcctccccggcaggatatgtttgccttcatgggcagcctggataccaagggtaccagctacaagtatgaggtggcactggctgggccagccctggagttgcacaactgcatggcgaaactgttggcccaccccctgcagcggccttgccagagccatgcttcctacagcctgctggaggaggaggatgaagccattgaggttgaggccactgtctgaaccatccctgtacatctgcaccttcttgtgcaaggaagtccttggcctaaagccttggttctcaaactgggttccttgggacctccggggtgggggggttccaggaggcacgtagggtaccttgcagggtcctaggagggaaacccaggattccaggagggatcccaggaactgtgggcacccattttctgtgtctcccagcccatttccactcctagtttgtcatggataatttttgttcttccctgtgtgatttttgccatcaaaataaaaatttgagactcgttaaaaaaaaaaaaaaaaaaaaaaaaaaaaaaaaggggggggggcccaaaagtttccccgggggggcccaatttcgcgtccccggtttttttggtccaagggggcccctatgggggggggttaataagagggggggcgccgctcgtttacacgacgtctcgggacaggtggcgaaaacccgtggcctacccggggcgacctttggcggaagaggaaccccctatactctgtgtgggtggcgcacatatggtgtcgccccaacacctcccctacagcaagaattttaagcgctccatagagggtacattactacaaccttttncaacgcggttattacggtgcgtttcacccccatcggcgcaaattaagcctcgcgcgctggaaagaaatttttgggcccaccggggacatattcattttgggtaacacaccttttttttttccgccgggnacctttgtcctgtaaaacaaaatcggcaccaaccacgacagcgccgaccgagcaccaacacccaggacaacaagcacaagaagatagccgcccagacgggcagaacaccgcgctacgagcggacgaaacaacacagtacccggtgacaagcggtaccacagacacacgcggcgcgcagggccgactaccccgaacggtcagtcctcgtacgccggacgccagagctcgtaggcgagagagagccaccgcggcacacgccgccgaagagcgaaggcgacagagcaggagcacgtaagccacggagagcaccgcacgaaagaacgtcagaccatggcccatcgccccgaccccaccgacagagggcacacgaacgaaccagaggtcgccgg

SEQ ID NO: 435716 - DNA, 2140 bp, Homo sapiens
  misc_feature (1622)..(1622): n is a, c, g, or t
  misc_feature (1751)..(1751): n is a, c, g, or t
gcggagaagcaaacttaggctaggtacgaggctggtgtgcttcctagtgagtcggcggctgatttagaaggaggttcaggctacggtgagccgaagccacacaggagccatggaagtggcagagcccagcagccccactgaagaggaggaggaggaagaggagcactcggcagagcctcggccccgcactcgctccaatcctgaaggggctgaggaccgggcagtaggggcacaggccagcgtgggcagccgcagcgagggtgagggtgaggccgccagtgctgatgatgggagcctcaacacttcaggaattatctgcctggacctgtcagaggaaatgtcactgccaaagctggagtcgttcaacggctccaaaaccaacgccctcaatgtctcccagaagatgattgagatgttcgtgcggacaaaacacaagatcgacaaaagccacgagtttgcactggtggtggtgaacgatgacacggcctggctgtctggcctgacctccgacccccgcgagctctgtagctgcctctatgatctggagacggcctcctgttccaccttcaatctggaaggacttttcagcctcatccagcagaaaactgagcttccggtcacagagaacgtgcagacgattcccccgccatatgtggtccgcaccatccttgtctacagccgtccaccttgccagccccagttctccttgacggagcccatgaagaaaatgttccagtgcccatatttcttctttgacgttgtttacatccacaatggcactgaggagaaggaggaggagatgagttggaaggatatgtttgccttcatgggcagcctggataccaagggtaccagctacaagtatgaggtggcactggctgggccagccctggagttgcacaactgcatggcgaaactgttggcccaccccctgcagcggccttgccagagccatgcttcctacagcctgctggaggaggaggatgaagccattgaggttgaggccactgtctgaaccatccctgtacatctgcaccttcttgtgcaaggaagtccttggcctaaagccttggttctcaaactgggttccttgggacctccggggtgggggggttccaggaggcacgtagggtaccttgcagggtcctaggagggaaacccaggattccaggagggatcccaggaactgtgggcacccattttctgtgtctcccagcccatttccactcctagtttgtcatggataatttttgttcttccctgtgtgatttttgccatcaaaataaaaatttgagactcgttaaaaaaaaaaaaaaaaaaaaaaaaaaaaaaaaggggggggggcccaaaagtttccccgggggggcccaatttcgcgtccccggtttttttggtccaagggggcccctatgggggggggttaataagagggggggcgccgctcgtttacacgacgtctcgggacaggtggcgaaaacccgtggcctacccggggcgacctttggcggaagaggaaccccctatactctgtgtgggtggcgcacatatggtgtcgccccaacacctcccctacagcaagaattttaagcgctccatagagggtacattactacaaccttttncaacgcggttattacggtgcgtttcacccccatcggcgcaaattaagcctcgcgcgctggaaagaaatttttgggcccaccggggacatattcattttgggtaacacaccttttttttttccgccgggnacctttgtcctgtaaaacaaaatcggcaccaaccacgacagcgccgaccgagcaccaacacccaggacaacaagcacaagaagatagccgcccagacgggcagaacaccgcgctacgagcggacgaaacaacacagtacccggtgacaagcggtaccacagacacacgcggcgcgcagggccgactaccccgaacggtcagtcctcgtacgccggacgccagagctcgtaggcgagagagagccaccgcggcacacgccgccgaagagcgaaggcgacagagcaggagcacgtaagccacggagagcaccgcacgaaagaacgtcagaccatggcccatcgccccgaccccaccgacagagggcacacgaacgaaccagaggtcgccgg

SEQ ID NO: 435717 - DNA, 2573 bp, Homo sapiens
  misc_feature (2055)..(2055): n is a, c, g, or t
  misc_feature (2184)..(2184): n is a, c, g, or t
gcggagaagcaaacttaggctaggtacgaggctggtgtgcttcctagtgagtcggcggctgatttagaaggaggttcaggctacggtgagccgaagccacacaggagccatggaagtggcagagcccagcagccccactgaagaggaggaggaggaagaggagcactcggcagagcctcggccccgcactcgctccaatcctgaaggggctgaggaccgggcagtaggggcacaggccagcgtgggcagccgcagcgagggtgagggtgaggccgccagtgctgatgatgggagcctcaacacttcaggagccggccctaagtcctggcaggtgcccccgccagcccctgaggtccaaattcggacaccaagggtcaactgtccagagaaagtgattatctgcctggacctgtcagaggaaatgtcactgccaaagctggagtcgttcaacggctccaaaaccaacgccctcaatgtctcccagaagatgattgagatgttcgtgcggacaaaacacaagatcgacaaaagccacgagtttgcactggtggtggtgaacgatgacacggcctggctgtctggcctgacctccgacccccgcgagctctgtagctgcctctatgatctggagacggcctcctgttccaccttcaatctggaaggacttttcagcctcatccagcagaaaactgagcttccggtcacagagaacgtgcagacgattcccccgccatatgtggtccgcaccatccttgtctacagccgtccaccttgccagccccagttctccttgacggagcccatgaagaaaatgttccagtgcccatatttcttctttgacgttgtttacatccacaatggcactgaggagaaggaggaggagatgagttggaagagacggggtttcactgtgttggccgggatggtcttgatctcctgaccttgtgatctgcccgcctcagcctcccaaagtgctgggattacaggcgtgagccaccgcgcccggcccacactggggactctttgggggccatgactgggacctcttcagatccttaacactgggtccatggcggggaatgtttgctgaatgtgtgaatggtttctgcttggcaaactcctcttcaccctttagaacccaccccagatgtcccctcttctgagaagccctccagggatatgaagggcctgttggggtaacctctgcctgaacagcccttcactgacccccgcctccccggcaggatatgtttgccttcatgggcagcctggataccaagggtaccagctacaagtatgaggtggcactggctgggccagccctggagttgcacaactgcatggcgaaactgttggcccaccccctgcagcggccttgccagagccatgcttcctacagcctgctggaggaggaggatgaagccattgaggttgaggccactgtctgaaccatccctgtacatctgcaccttcttgtgcaaggaagtccttggcctaaagccttggttctcaaactgggttccttgggacctccggggtgggggggttccaggaggcacgtagggtaccttgcagggtcctaggagggaaacccaggattccaggagggatcccaggaactgtgggcacccattttctgtgtctcccagcccatttccactcctagtttgtcatggataatttttgttcttccctgtgtgatttttgccatcaaaataaaaatttgagactcgttaaaaaaaaaaaaaaaaaaaaaaaaaaaaaaaaggggggggggcccaaaagtttccccgggggggcccaatttcgcgtccccggtttttttggtccaagggggcccctatgggggggggttaataagagggggggcgccgctcgtttacacgacgtctcgggacaggtggcgaaaacccgtggcctacccggggcgacctttggcggaagaggaaccccctatactctgtgtgggtggcgcacatatggtgtcgccccaacacctcccctacagcaagaattttaagcgctccatagagggtacattactacaaccttttncaacgcggttattacggtgcgtttcacccccatcggcgcaaattaagcctcgcgcgctggaaagaaatttttgggcccaccggggacatattcattttgggtaacacaccttttttttttccgccgggnacctttgtcctgtaaaacaaaatcggcaccaaccacgacagcgccgaccgagcaccaacacccaggacaacaagcacaagaagatagccgcccagacgggcagaacaccgcgctacgagcggacgaaacaacacagtacccggtgacaagcggtaccacagacacacgcggcgcgcagggccgactaccccgaacggtcagtcctcgtacgccggacgccagagctcgtaggcgagagagagccaccgcggcacacgccgccgaagagcgaaggcgacagagcaggagcacgtaagccacggagagcaccgcacgaaagaacgtcagaccatggcccatcgccccgaccccaccgacagagggcacacgaacgaaccagaggtcgccgg

SEQ ID NO: 435718 - DNA, 2225 bp, Homo sapiens
  misc_feature (811)..(811): n is a, c, g, or t
  misc_feature (1707)..(1707): n is a, c, g, or t
  misc_feature (1836)..(1836): n is a, c, g, or t
taaatcggtcacggaggcgcggtccttagattagtatcgtgtcggtgtgactcttgaaggaggttcaggctacggtgagccgaagccacacaggagccatggaagtggcagagcccagcagccccactgaagaggaggaggaggaagaggagcactcggcagagcctcggccccgcactcgctccaatcctgaaggggctgaggaccgggcagtaggggcacaggccagcgtgggcagccgcagcgagggtgagggtgaggccgccagtgctgatgatgggagcctcaacacttcaggagccggccctaagtcctggcaggtgcccccgccagcccctgaggtccaaattcggacaccaagggtcaactgtccagagaaagtgattatctgcctggacctgtcagaggaaatgtcactgccaaagctggagtcgttcaacggctccaaaaccaacgccctcaatgtctcccagaagatgattgagatgttcgtgcggacaaaacacaagatcgacaaaagccacgagtttgcactggtggtggtgaacgatgacacggcctggctgtctggcctgacctccgacccccgcgagctctgtagctgcctctatgatctggagacggcctcctgttccaccttcaatctggaaggacttttcagcctcatccagcagaaaactgagcttccggtcacagagaacgtgcagacgattcccccgccatatgtggtccgcaccatccttgtctacagccgtccaccttgccagccccagttctccttgacggagcccatgaagaaatggttccaggngccgcattatttcttgggttggacgcatgtgtaacaatccacaattggcatctgaggagaacgaggaggagaattgagctggaaggatatgtttgccttcatgggcagcctggataccaagggtaccagctacaagtatgaggtggcactggctgggccagccctggagttgcacaactgcatggcgaaactgttggcccaccccctgcagcggccttgccagagccatgcttcctacagcctgctggaggaggaggatgaagccattgaggttgaggccactgtctgaaccatccctgtacatctgcaccttcttgtgcaaggaagtccttggcctaaagccttggttctcaaactgggttccttgggacctccggggtgggggggttccaggaggcacgtagggtaccttgcagggtcctaggagggaaacccaggattccaggagggatcccaggaactgtgggcacccattttctgtgtctcccagcccatttccactcctagtttgtcatggataatttttgttcttccctgtgtgatttttgccatcaaaataaaaatttgagactcgttaaaaaaaaaaaaaaaaaaaaaaaaaaaaaaaaggggggggggcccaaaagtttccccgggggggcccaatttcgcgtccccggtttttttggtccaagggggcccctatgggggggggttaataagagggggggcgccgctcgtttacacgacgtctcgggacaggtggcgaaaacccgtggcctacccggggcgacctttggcggaagaggaaccccctatactctgtgtgggtggcgcacatatggtgtcgccccaacacctcccctacagcaagaattttaagcgctccatagagggtacattactacaaccttttncaacgcggttattacggtgcgtttcacccccatcggcgcaaattaagcctcgcgcgctggaaagaaatttttgggcccaccggggacatattcattttgggtaacacaccttttttttttccgccgggnacctttgtcctgtaaaacaaaatcggcaccaaccacgacagcgccgaccgagcaccaacacccaggacaacaagcacaagaagatagccgcccagacgggcagaacaccgcgctacgagcggacgaaacaacacagtacccggtgacaagcggtaccacagacacacgcggcgcgcagggccgactaccccgaacggtcagtcctcgtacgccggacgccagagctcgtaggcgagagagagccaccgcggcacacgccgccgaagagcgaaggcgacagagcaggagcacgtaagccacggagagcaccgcacgaaagaacgtcagaccatggcccatcgccccgaccccaccgacagagggcacacgaacgaaccagaggtcgccgg

SEQ ID NO: 435719 - DNA, 2248 bp, Homo sapiens
  misc_feature (1730)..(1730): n is a, c, g, or t
  misc_feature (1859)..(1859): n is a, c, g, or t
gcggagaagcaaacttaggctaggtacgaggctggtgtgcttcctagtgagtcggcggctgatttagaaggaggttcaggctacggtgagccgaagccacacaggagccatggaagtggcagagcccagcagccccactgaagaggaggaggaggaagaggagcactcggcagagcctcggccccgcactcgctccaatcctgaaggggctgaggaccgggcagtaggggcacaggccagcgtgggcagccgcagcgagggtgagggtgaggccgccagtgctgatgatgggagcctcaacacttcaggagccggccctaagtcctggcaggtgcccccgccagcccctgaggtccaaattcggacaccaagggtcaactgtccagagaaagtgattatctgcctggacctgtcagaggaaatgtcactgccaaagctggagtcgttcaacggctccaaaaccaacgccctcaatgtctcccagaagatgattgagatgttcgtgcggacaaaacacaagatcgacaaaagccacgagtttgcactggtggtggtgaacgatgacacggcctggctgtctggcctgacctccgacccccgcgagctctgtagctgcctctatgatctggagacggcctcctgttccaccttcaccttctccttagcacccccaccagatctggaaggacttttcagcctcatccagcagaaaactgagcttccggtcacagagaacgtgcagacgattcccccgccatatgtggtccgcaccatccttgtctacagccgtccaccttgccagccccagttctccttgacggagcccatgaagaaaatgttccagtgcccatatttcttctttgacgttgtttacatccacaatggcactgaggagaaggaggaggagatgagttggaaggatatgtttgccttcatgggcagcctggataccaagggtaccagctacaagtatgaggtggcactggctgggccagccctggagttgcacaactgcatggcgaaactgttggcccaccccctgcagcggccttgccagagccatgcttcctacagcctgctggaggaggaggatgaagccattgaggttgaggccactgtctgaaccatccctgtacatctgcaccttcttgtgcaaggaagtccttggcctaaagccttggttctcaaactgggttccttgggacctccggggtgggggggttccaggaggcacgtagggtaccttgcagggtcctaggagggaaacccaggattccaggagggatcccaggaactgtgggcacccattttctgtgtctcccagcccatttccactcctagtttgtcatggataatttttgttcttccctgtgtgatttttgccatcaaaataaaaatttgagactcgttaaaaaaaaaaaaaaaaaaaaaaaaaaaaaaaaggggggggggcccaaaagtttccccgggggggcccaatttcgcgtccccggtttttttggtccaagggggcccctatgggggggggttaataagagggggggcgccgctcgtttacacgacgtctcgggacaggtggcgaaaacccgtggcctacccggggcgacctttggcggaagaggaaccccctatactctgtgtgggtggcgcacatatggtgtcgccccaacacctcccctacagcaagaattttaagcgctccatagagggtacattactacaaccttttncaacgcggttattacggtgcgtttcacccccatcggcgcaaattaagcctcgcgcgctggaaagaaatttttgggcccaccggggacatattcattttgggtaacacaccttttttttttccgccgggnacctttgtcctgtaaaacaaaatcggcaccaaccacgacagcgccgaccgagcaccaacacccaggacaacaagcacaagaagatagccgcccagacgggcagaacaccgcgctacgagcggacgaaacaacacagtacccggtgacaagcggtaccacagacacacgcggcgcgcagggccgactaccccgaacggtcagtcctcgtacgccggacgccagagctcgtaggcgagagagagccaccgcggcacacgccgccgaagagcgaaggcgacagagcaggagcacgtaagccacggagagcaccgcacgaaagaacgtcagaccatggcccatcgccccgaccccaccgacagagggcacacgaacgaaccagaggtcgccgg

SEQ ID NO: 435720 - DNA, 2162 bp, Homo sapiens
  misc_feature (1644)..(1644): n is a, c, g, or t
  misc_feature (1773)..(1773): n is a, c, g, or t
gcggagaagcaaacttaggctaggtacgaggctggtgtgcttcctagtgagtcggcggctgatttagaaggaggttcaggctacggtgagccgaagtacggggaggattctggcttcccctgtccgtgttccatctagccacacaggagccatggaagtggcagagcccagcagccccactgaagaggaggaggaggaagaggagcactcggcagagcctcggccccgcactcgctccaatcctgaaggggctgaggaccgggcagtaggggcacaggccagcgtgggcagccgcagcgagggtgagggtgaggccgccagtgctgatgatgggagcctcaacacttcaggagccggccctaagtcctggcaggtgcccccgccagcccctgaggtccaaattcggacaccaagggtcaactgtccagagaaagtgattatctgcctggacctgtcagaggaaatgtcactgccaaagctggagtcgttcaacggctccaaaaccaacgccctcaatgtctcccagaagatgattgagatgttcgtgcggacaaaacacaagatcgacaaaagccacgagtttgcactggtggtggtgaacgatgacacggcctggccagcagaaaactgagcttccggtcacagagaacgtgcagacgattcccccgccatatgtggtccgcaccatccttgtctacagccgtccaccttgccagccccagttctccttgacggagcccatgaagaaaatgttccagtgcccatatttcttctttgacgttgtttacatccacaatggcactgaggagaaggaggaggagatgagttggaaggatatgtttgccttcatgggcagcctggataccaagggtaccagctacaagtatgaggtggcactggctgggccagccctggagttgcacaactgcatggcgaaactgttggcccaccccctgcagcggccttgccagagccatgcttcctacagcctgctggaggaggaggatgaagccattgaggttgaggccactgtctgaaccatccctgtacatctgcaccttcttgtgcaaggaagtccttggcctaaagccttggttctcaaactgggttccttgggacctccggggtgggggggttccaggaggcacgtagggtaccttgcagggtcctaggagggaaacccaggattccaggagggatcccaggaactgtgggcacccattttctgtgtctcccagcccatttccactcctagtttgtcatggataatttttgttcttccctgtgtgatttttgccatcaaaataaaaatttgagactcgttaaaaaaaaaaaaaaaaaaaaaaaaaaaaaaaaggggggggggcccaaaagtttccccgggggggcccaatttcgcgtccccggtttttttggtccaagggggcccctatgggggggggttaataagagggggggcgccgctcgtttacacgacgtctcgggacaggtggcgaaaacccgtggcctacccggggcgacctttggcggaagaggaaccccctatactctgtgtgggtggcgcacatatggtgtcgccccaacacctcccctacagcaagaattttaagcgctccatagagggtacattactacaaccttttncaacgcggttattacggtgcgtttcacccccatcggcgcaaattaagcctcgcgcgctggaaagaaatttttgggcccaccggggacatattcattttgggtaacacaccttttttttttccgccgggnacctttgtcctgtaaaacaaaatcggcaccaaccacgacagcgccgaccgagcaccaacacccaggacaacaagcacaagaagatagccgcccagacgggcagaacaccgcgctacgagcggacgaaacaacacagtacccggtgacaagcggtaccacagacacacgcggcgcgcagggccgactaccccgaacggtcagtcctcgtacgccggacgccagagctcgtaggcgagagagagccaccgcggcacacgccgccgaagagcgaaggcgacagagcaggagcacgtaagccacggagagcaccgcacgaaagaacgtcagaccatggcccatcgccccgaccccaccgacagagggcacacgaacgaaccagaggtcgccgg

SEQ ID NO: 435721 - DNA, 2229 bp, Homo sapiens
  misc_feature (1711)..(1711): n is a, c, g, or t
  misc_feature (1840)..(1840): n is a, c, g, or t
gcggagaagcaaacttaggctaggtacgaggctggtgtgcttcctagtgagtcggcggctgatttagaaggaggttcaggctacggtgagccgaagtacggggaggattctggcttcccctgtccgtgttccatctagccacacaggagccatggaagtggcagagcccagcagccccactgaagaggaggaggaggaagaggagcactcggcagagcctcggccccgcactcgctccaatcctgaaggggctgaggaccgggcagtaggggcacaggccagcgtgggcagccgcagcgagggtgagggtgaggccgccagtgctgatgatgggagcctcaacacttcaggagccggccctaagtcctggcaggtgcccccgccagcccctgaggtccaaattcggacaccaagggtcaactgtccagagaaagtgattatctgcctggacctgtcagaggaaatgtcactgccaaagctggagtcgttcaacggctccaaaaccaacgccctcaatgtctcccagaagatgattgagatgttcgtgcggacaaaacacaagatcgacaaaagccacgagtttgcactggtggtggtgaacgatgacacggcctggctgtctggcctgacctccgacccccgcgagctctgtagctgcctctatgatctggagacggcctcctgttccaccttcaatctggaaggacttttcagcctcatccagcagaaaactgagcttccggtcacagagaacgtgcagacgattcccccgccatatgtggtccgcaccatccttgtctacagccgtccaccttgccagccccagttctccttgacggagcccatgaagaaaatgttccagtgcccatatttcttctttgacgttgtttacatccacaatggcactgaggagaaggaggaggagatgagttggaaggatatgtttgccttcatgggcagcctggataccaagggtaccagctacaagtatgaggtggcactggctgggccagccctggagttgcacaactgcatggcgaaactgttggcccaccccctgcagcggccttgccagagccatgcttcctacagcctgctggaggaggaggatgaagccattgaggttgaggccactgtctgaaccatccctgtacatctgcaccttcttgtgcaaggaagtccttggcctaaagccttggttctcccaggaggcacgtagggtaccttgcagggtcctaggagggaaacccaggattccaggagggatcccaggaactgtgggcacccattttctgtgtctcccagcccatttccactcctagtttgtcatggataatttttgttcttccctgtgtgatttttgccatcaaaataaaaatttgagactcgttaaaaaaaaaaaaaaaaaaaaaaaaaaaaaaaaggggggggggcccaaaagtttccccgggggggcccaatttcgcgtccccggtttttttggtccaagggggcccctatgggggggggttaataagagggggggcgccgctcgtttacacgacgtctcgggacaggtggcgaaaacccgtggcctacccggggcgacctttggcggaagaggaaccccctatactctgtgtgggtggcgcacatatggtgtcgccccaacacctcccctacagcaagaattttaagcgctccatagagggtacattactacaaccttttncaacgcggttattacggtgcgtttcacccccatcggcgcaaattaagcctcgcgcgctggaaagaaatttttgggcccaccggggacatattcattttgggtaacacaccttttttttttccgccgggnacctttgtcctgtaaaacaaaatcggcaccaaccacgacagcgccgaccgagcaccaacacccaggacaacaagcacaagaagatagccgcccagacgggcagaacaccgcgctacgagcggacgaaacaacacagtacccggtgacaagcggtaccacagacacacgcggcgcgcagggccgactaccccgaacggtcagtcctcgtacgccggacgccagagctcgtaggcgagagagagccaccgcggcacacgccgccgaagagcgaaggcgacagagcaggagcacgtaagccacggagagcaccgcacgaaagaacgtcagaccatggcccatcgccccgaccccaccgacagagggcacacgaacgaaccagaggtcgccgg

SEQ ID NO: 435722 - DNA, 2120 bp, Homo sapiens
  misc_feature (1602)..(1602): n is a, c, g, or t
  misc_feature (1731)..(1731): n is a, c, g, or t
gcggagaagcaaacttaggctaggtacgaggctggtgtgcttcctagtgagtcggcggctgatttagaaggaggttcaggctacggtgagccgaagccacacaggagccatggaagtggcagagcccagcagccccactgaagaggaggaggaggaagaggagcactcggcagagcctcggccccgcactcgctccaatcctgaaggggctgaggaccgggcagtaggggcacaggccagcgtgggcagccgcagcgagggtgagggtgaggccgccagtgctgatgatgggagcctcaacacttcaggagccggccctaagtcctggcaggtgcccccgccagcccctgaggtccaaattcggacaccaagggtcaactgtccagagaaagtgattatctgcctggacctgtcagaggaaatgtcactgccaaagctggagtcgttcaacggctccaaaaccaacgccctcaatgtctcccagaagatgattgagatgttcgtgcggacaaaacacaagatcgacaaaagccacgagtttgcactggtggtggtgaacgatgacacggcctggccagcagaaaactgagcttccggtcacagagaacgtgcagacgattcccccgccatatgtggtccgcaccatccttgtctacagccgtccaccttgccagccccagttctccttgacggagcccatgaagaaaatgttccagtgcccatatttcttctttgacgttgtttacatccacaatggcactgaggagaaggaggaggagatgagttggaaggatatgtttgccttcatgggcagcctggataccaagggtaccagctacaagtatgaggtggcactggctgggccagccctggagttgcacaactgcatggcgaaactgttggcccaccccctgcagcggccttgccagagccatgcttcctacagcctgctggaggaggaggatgaagccattgaggttgaggccactgtctgaaccatccctgtacatctgcaccttcttgtgcaaggaagtccttggcctaaagccttggttctcaaactgggttccttgggacctccggggtgggggggttccaggaggcacgtagggtaccttgcagggtcctaggagggaaacccaggattccaggagggatcccaggaactgtgggcacccattttctgtgtctcccagcccatttccactcctagtttgtcatggataatttttgttcttccctgtgtgatttttgccatcaaaataaaaatttgagactcgttaaaaaaaaaaaaaaaaaaaaaaaaaaaaaaaaggggggggggcccaaaagtttccccgggggggcccaatttcgcgtccccggtttttttggtccaagggggcccctatgggggggggttaataagagggggggcgccgctcgtttacacgacgtctcgggacaggtggcgaaaacccgtggcctacccggggcgacctttggcggaagaggaaccccctatactctgtgtgggtggcgcacatatggtgtcgccccaacacctcccctacagcaagaattttaagcgctccatagagggtacattactacaaccttttncaacgcggttattacggtgcgtttcacccccatcggcgcaaattaagcctcgcgcgctggaaagaaatttttgggcccaccggggacatattcattttgggtaacacaccttttttttttccgccgggnacctttgtcctgtaaaacaaaatcggcaccaaccacgacagcgccgaccgagcaccaacacccaggacaacaagcacaagaagatagccgcccagacgggcagaacaccgcgctacgagcggacgaaacaacacagtacccggtgacaagcggtaccacagacacacgcggcgcgcagggccgactaccccgaacggtcagtcctcgtacgccggacgccagagctcgtaggcgagagagagccaccgcggcacacgccgccgaagagcgaaggcgacagagcaggagcacgtaagccacggagagcaccgcacgaaagaacgtcagaccatggcccatcgccccgaccccaccgacagagggcacacgaacgaaccagaggtcgccgg

SEQ ID NO: 435723 - DNA, 2041 bp, Homo sapiens
  misc_feature (1523)..(1523): n is a, c, g, or t
  misc_feature (1652)..(1652): n is a, c, g, or t
gcggagaagcaaacttaggctaggtacgaggctggtgtgcttcctagtgagtcggcggctgatttagaaggaggttcaggctacggtgagccgaagtacggggaggattctggcttcccctgtccgtgttccatctagccacacaggagccatggaagtggcagagcccagcagccccactgaagaggaggaggaggaagaggagcactcggcagagcctcggccccgcactcgctccaatcctgaaggggctgaggaccgggcagtaggggcacaggccagcgtgggcagccgcagcgagggtgagggtgaggccgccagtgctgatgatgggagcctcaacacttcaggagccggccctaagtcctggcaggtgcccccgccagcccctgaggtccaaattcggacaccaagggtcaactgtccagagaaagtgattatctgcctggacctgtcagaggaaatgtcactgccaaagctggagtcgttcaacggccagcagaaaactgagcttccggtcacagagaacgtgcagacgattcccccgccatatgtggtccgcaccatccttgtctacagccgtccaccttgccagccccagttctccttgacggagcccatgaagaaaatgttccagtgcccatatttcttctttgacgttgtttacatccacaatggcactgaggagaaggaggaggagatgagttggaaggatatgtttgccttcatgggcagcctggataccaagggtaccagctacaagtatgaggtggcactggctgggccagccctggagttgcacaactgcatggcgaaactgttggcccaccccctgcagcggccttgccagagccatgcttcctacagcctgctggaggaggaggatgaagccattgaggttgaggccactgtctgaaccatccctgtacatctgcaccttcttgtgcaaggaagtccttggcctaaagccttggttctcaaactgggttccttgggacctccggggtgggggggttccaggaggcacgtagggtaccttgcagggtcctaggagggaaacccaggattccaggagggatcccaggaactgtgggcacccattttctgtgtctcccagcccatttccactcctagtttgtcatggataatttttgttcttccctgtgtgatttttgccatcaaaataaaaatttgagactcgttaaaaaaaaaaaaaaaaaaaaaaaaaaaaaaaaggggggggggcccaaaagtttccccgggggggcccaatttcgcgtccccggtttttttggtccaagggggcccctatgggggggggttaataagagggggggcgccgctcgtttacacgacgtctcgggacaggtggcgaaaacccgtggcctacccggggcgacctttggcggaagaggaaccccctatactctgtgtgggtggcgcacatatggtgtcgccccaacacctcccctacagcaagaattttaagcgctccatagagggtacattactacaaccttttncaacgcggttattacggtgcgtttcacccccatcggcgcaaattaagcctcgcgcgctggaaagaaatttttgggcccaccggggacatattcattttgggtaacacaccttttttttttccgccgggnacctttgtcctgtaaaacaaaatcggcaccaaccacgacagcgccgaccgagcaccaacacccaggacaacaagcacaagaagatagccgcccagacgggcagaacaccgcgctacgagcggacgaaacaacacagtacccggtgacaagcggtaccacagacacacgcggcgcgcagggccgactaccccgaacggtcagtcctcgtacgccggacgccagagctcgtaggcgagagagagccaccgcggcacacgccgccgaagagcgaaggcgacagagcaggagcacgtaagccacggagagcaccgcacgaaagaacgtcagaccatggcccatcgccccgaccccaccgacagagggcacacgaacgaaccagaggtcgccgg

SEQ ID NO: 435724 - DNA, 2168 bp, Homo sapiens
  misc_feature (1650)..(1650): n is a, c, g, or t
  misc_feature (1779)..(1779): n is a, c, g, or t
gcggagaagcaaacttaggctaggtacgaggctggtgtgcttcctagtgagtcggcggctgatttagaaggaggttcaggctacggtgagccgaagccacacaggagccatggaagtggcagagcccagcagccccactgaagaggaggaggaggaagaggagcactcggcagagcctcggccccgcactcgctccaatcctgaaggggctgaggaccgggcagtaggggcacaggccagcgtgggcagccgcagcgagggtgagggtgaggccgccagtgctgatgatgggagcctcaacacttcaggagccggccctaagtcctggcaggtgcccccgccagcccctgaggtccaaattcggacaccaagggtcaactgtccagagaaagtgattatctgcctggacctgtcagaggaaatgtcactgccaaagctggagtcgttcaacggctccaaaaccaacgccctcaatgtctcccagaagatgattgagatgttcgtgcggacaaaacacaagatcgacaaaagccacgagtttgcactggtggtggtgaacgatgacacggcctggctgtctggcctgacctccgacccccgcgagctctgtagctgcctctatgatctggagacggcctcctgttccaccttcaaacgtgcagacgattcccccgccatatgtggtccgcaccatccttgtctacagccgtccaccttgccagccccagttctccttgacggagcccatgaagaaaatgttccagtgcccatatttcttctttgacgttgtttacatccacaatggcactgaggagaaggaggaggagatgagttggaaggatatgtttgccttcatgggcagcctggataccaagggtaccagctacaagtatgaggtggcactggctgggccagccctggagttgcacaactgcatggcgaaactgttggcccaccccctgcagcggccttgccagagccatgcttcctacagcctgctggaggaggaggatgaagccattgaggttgaggccactgtctgaaccatccctgtacatctgcaccttcttgtgcaaggaagtccttggcctaaagccttggttctcaaactgggttccttgggacctccggggtgggggggttccaggaggcacgtagggtaccttgcagggtcctaggagggaaacccaggattccaggagggatcccaggaactgtgggcacccattttctgtgtctcccagcccatttccactcctagtttgtcatggataatttttgttcttccctgtgtgatttttgccatcaaaataaaaatttgagactcgttaaaaaaaaaaaaaaaaaaaaaaaaaaaaaaaaggggggggggcccaaaagtttccccgggggggcccaatttcgcgtccccggtttttttggtccaagggggcccctatgggggggggttaataagagggggggcgccgctcgtttacacgacgtctcgggacaggtggcgaaaacccgtggcctacccggggcgacctttggcggaagaggaaccccctatactctgtgtgggtggcgcacatatggtgtcgccccaacacctcccctacagcaagaattttaagcgctccatagagggtacattactacaaccttttncaacgcggttattacggtgcgtttcacccccatcggcgcaaattaagcctcgcgcgctggaaagaaatttttgggcccaccggggacatattcattttgggtaacacaccttttttttttccgccgggnacctttgtcctgtaaaacaaaatcggcaccaaccacgacagcgccgaccgagcaccaacacccaggacaacaagcacaagaagatagccgcccagacgggcagaacaccgcgctacgagcggacgaaacaacacagtacccggtgacaagcggtaccacagacacacgcggcgcgcagggccgactaccccgaacggtcagtcctcgtacgccggacgccagagctcgtaggcgagagagagccaccgcggcacacgccgccgaagagcgaaggcgacagagcaggagcacgtaagccacggagagcaccgcacgaaagaacgtcagaccatggcccatcgccccgaccccaccgacagagggcacacgaacgaaccagaggtcgccgg

SEQ ID NO: 435725 - DNA, 2416 bp, Homo sapiens
  misc_feature (1898)..(1898): n is a, c, g, or t
  misc_feature (2027)..(2027): n is a, c, g, or t
gcggagaagcaaacttaggctaggtacgaggctggtgtgcttcctagtgagtcggcggctgatttagaaggaggttcaggctacggtgagccgaagtacggggaggattctggcttcccctgtccgtgttccatctagccacacaggagccatggaagtggcagagcccagcagccccactgaagaggaggaggaggaagaggagcactcggcagagcctcggccccgcactcgctccaatcctgaaggggctgaggaccgggcagtaggggcacaggccagcgtgggcagccgcagcgagggtgagggtgaggccgccagtgctgatgatgggagcctcaacacttcaggagccggccctaagtcctggcaggtgcccccgccagcccctgaggtccaaattcggacaccaagggtcaactgtccagagaaagtgattatctgcctggacctgtcagaggaaatgtcactgccaaagctggagtcgttcaacggctccaaaaccaacgccctcaatgtctcccagaagatgattgagatgttcgtgcggacaaaacacaagatcgacaaaagccacgagtttgcactggtggtggtgaacgatgacacggcctggctgtctggcctgacctccgacccccgcgagctctgtagctgcctctatgatctggagacggcctcctgttccaccttcaccacaatggcactgaggagaaggaggaggagatgagttggaagagacggggtttcactgtgttggccgggatggtcttgatctcctgaccttgtgatctgcccgcctcagcctcccaaagtgctgggattacaggcgtgagccaccgcgcccggcccacactggggactctttgggggccatgactgggacctcttcagatccttaacactgggtccatggcggggaatgtttgctgaatgtgtgaatggtttctgcttggcaaactcctcttcaccctttagaacccaccccagatgtcccctcttctgagaagccctccagggatatgaagggcctgttggggtaacctctgcctgaacagcccttcactgacccccgcctccccggcaggatatgtttgccttcatgggcagcctggataccaagggtaccagctacaagtatgaggtggcactggctgggccagccctggagttgcacaactgcatggcgaaactgttggcccaccccctgcagcggccttgccagagccatgcttcctacagcctgctggaggaggaggatgaagccattgaggttgaggccactgtctgaaccatccctgtacatctgcaccttcttgtgcaaggaagtccttggcctaaagccttggttctcaaactgggttccttgggacctccggggtgggggggttccaggaggcacgtagggtaccttgcagggtcctaggagggaaacccaggattccaggagggatcccaggaactgtgggcacccattttctgtgtctcccagcccatttccactcctagtttgtcatggataatttttgttcttccctgtgtgatttttgccatcaaaataaaaatttgagactcgttaaaaaaaaaaaaaaaaaaaaaaaaaaaaaaaaggggggggggcccaaaagtttccccgggggggcccaatttcgcgtccccggtttttttggtccaagggggcccctatgggggggggttaataagagggggggcgccgctcgtttacacgacgtctcgggacaggtggcgaaaacccgtggcctacccggggcgacctttggcggaagaggaaccccctatactctgtgtgggtggcgcacatatggtgtcgccccaacacctcccctacagcaagaattttaagcgctccatagagggtacattactacaaccttttncaacgcggttattacggtgcgtttcacccccatcggcgcaaattaagcctcgcgcgctggaaagaaatttttgggcccaccggggacatattcattttgggtaacacaccttttttttttccgccgggnacctttgtcctgtaaaacaaaatcggcaccaaccacgacagcgccgaccgagcaccaacacccaggacaacaagcacaagaagatagccgcccagacgggcagaacaccgcgctacgagcggacgaaacaacacagtacccggtgacaagcggtaccacagacacacgcggcgcgcagggccgactaccccgaacggtcagtcctcgtacgccggacgccagagctcgtaggcgagagagagccaccgcggcacacgccgccgaagagcgaaggcgacagagcaggagcacgtaagccacggagagcaccgcacgaaagaacgtcagaccatggcccatcgccccgaccccaccgacagagggcacacgaacgaaccagaggtcgccgg

SEQ ID NO: 435726 - DNA, 2197 bp, Homo sapiens
  misc_feature (1679)..(1679): n is a, c, g, or t
  misc_feature (1808)..(1808): n is a, c, g, or t
gcggagaagcaaacttaggctaggtacgaggctggtgtgcttcctagtgagtcggcggctgatttagaaggaggttcaggctacggtgagccgaagtacggggaggattctggcttcccctgtccgtgttccatctagccacacaggagccatggaagtggcagagcccagcagccccactgaagaggaggaggaggaagaggagcactcggcagagcctcggccccgcactcgctccaatcctgaaggggctgaggaccgggcagtaggggcacaggccagcgtgggcagccgcagcgagggtgagggtgaggccgccagtgctgatgatgggagcctcaacacttcaggagccggccctaagtcctggcaggtgcccccgccagcccctgaggtccaaattcggacaccaagggtcaactgtccagagaaagtgattatctgcctggacctgtcagaggaaatgtcactgccaaagctggagtcgttcaacggctccaaaaccaacgccctcaatgtctcccagaagatgattgagatgttcgtgcggacaaaacacaagatcgacaaaagccacgagtttgcactggtggtggtgaacgatgacacggcctggctgtctggcctgacctccgacccccgcgagctctgtagctgcctctatgatctggagacggcctcctgttccaccttcaggcggggaatgtttgctgaatgtgtgaatggtttctgcttggcaaactcctcttcaccctttagaacccaccccagatgtcccctcttctgagaagccctccagggatatgaagggcctgttggggtaacctctgcctgaacagcccttcactgacccccgcctccccggcaggatatgtttgccttcatgggcagcctggataccaagggtaccagctacaagtatgaggtggcactggctgggccagccctggagttgcacaactgcatggcgaaactgttggcccaccccctgcagcggccttgccagagccatgcttcctacagcctgctggaggaggaggatgaagccattgaggttgaggccactgtctgaaccatccctgtacatctgcaccttcttgtgcaaggaagtccttggcctaaagccttggttctcaaactgggttccttgggacctccggggtgggggggttccaggaggcacgtagggtaccttgcagggtcctaggagggaaacccaggattccaggagggatcccaggaactgtgggcacccattttctgtgtctcccagcccatttccactcctagtttgtcatggataatttttgttcttccctgtgtgatttttgccatcaaaataaaaatttgagactcgttaaaaaaaaaaaaaaaaaaaaaaaaaaaaaaaaggggggggggcccaaaagtttccccgggggggcccaatttcgcgtccccggtttttttggtccaagggggcccctatgggggggggttaataagagggggggcgccgctcgtttacacgacgtctcgggacaggtggcgaaaacccgtggcctacccggggcgacctttggcggaagaggaaccccctatactctgtgtgggtggcgcacatatggtgtcgccccaacacctcccctacagcaagaattttaagcgctccatagagggtacattactacaaccttttncaacgcggttattacggtgcgtttcacccccatcggcgcaaattaagcctcgcgcgctggaaagaaatttttgggcccaccggggacatattcattttgggtaacacaccttttttttttccgccgggnacctttgtcctgtaaaacaaaatcggcaccaaccacgacagcgccgaccgagcaccaacacccaggacaacaagcacaagaagatagccgcccagacgggcagaacaccgcgctacgagcggacgaaacaacacagtacccggtgacaagcggtaccacagacacacgcggcgcgcagggccgactaccccgaacggtcagtcctcgtacgccggacgccagagctcgtaggcgagagagagccaccgcggcacacgccgccgaagagcgaaggcgacagagcaggagcacgtaagccacggagagcaccgcacgaaagaacgtcagaccatggcccatcgccccgaccccaccgacagagggcacacgaacgaaccagaggtcgccgg

SEQ ID NO: 435727 - DNA, 2277 bp, Homo sapiens
  misc_feature (442)..(442): n is a, c, g, or t
  misc_feature (453)..(453): n is a, c, g, or t
  misc_feature (532)..(532): n is a, c, g, or t
  misc_feature (538)..(538): n is a, c, g, or t
  misc_feature (548)..(549): n is a, c, g, or t
  misc_feature (551)..(551): n is a, c, g, or t
  misc_feature (554)..(554): n is a, c, g, or t
  misc_feature (556)..(556): n is a, c, g, or t
  misc_feature (558)..(558): n is a, c, g, or t
  misc_feature (562)..(563): n is a, c, g, or t
  misc_feature (565)..(565): n is a, c, g, or t
  misc_feature (568)..(568): n is a, c, g, or t
  misc_feature (573)..(574): n is a, c, g, or t
  misc_feature (578)..(579): n is a, c, g, or t
  misc_feature (582)..(582): n is a, c, g, or t
  misc_feature (584)..(584): n is a, c, g, or t
  misc_feature (588)..(588): n is a, c, g, or t
  misc_feature (604)..(604): n is a, c, g, or t
  misc_feature (614)..(614): n is a, c, g, or t
  misc_feature (624)..(624): n is a, c, g, or t
  misc_feature (629)..(629): n is a, c, g, or t
  misc_feature (633)..(633): n is a, c, g, or t
  misc_feature (675)..(675): n is a, c, g, or t
  misc_feature (684)..(684): n is a, c, g, or t
  misc_feature (727)..(727): n is a, c, g, or t
  misc_feature (729)..(729): n is a, c, g, or t
  misc_feature (733)..(733): n is a, c, g, or t
  misc_feature (736)..(736): n is a, c, g, or t
  misc_feature (773)..(773): n is a, c, g, or t
  misc_feature (791)..(791): n is a, c, g, or t
  misc_feature (797)..(797): n is a, c, g, or t
  misc_feature (808)..(808): n is a, c, g, or t
  misc_feature (810)..(812): n is a, c, g, or t
  misc_feature (841)..(841): n is a, c, g, or t
  misc_feature (843)..(843): n is a, c, g, or t
  misc_feature (1759)..(1759): n is a, c, g, or t
  misc_feature (1888)..(1888): n is a, c, g, or t
gcggagaagcaaacttaggctaggtacgaggctggtgtgcttcctagtgagtcggcggctgatttagaaggaggttcaggctacggtgagccgaagtacggggaggattctggcttcccctgtccgtgttccatctagccacacaggagccatggaagtggcagagcccagcagccccactgaagaggaggaggaggaagaggagcactcggcagagcctcggccccgcactcgctccaatcctgaaggggctgaggaccgggcagtaggggcacaggccagcgtgggcagccgcagcgagggtgagggtgaggccgccagtgctgatgatgggagcctcaacacttcaggagccggccctaagtcctggcaggtgcccccgccagcccctgaggtccaaattcggacaccaagggtcaactgtccagagaaagtgattatntgaatgcgcanatgtaagaggaaatgtaaatgcaaaagctgcgcagtagcttcaaagcgataaaaaacaaacgcccctctaatgtctccncagaanatgctttcanntnttncntnctcnnanaanaaaanngcgnncgngncgcngggcgcgcgctggggngggtgcaagntgaaaaggcntggangtanggaatgaaataaaaaaaaagagagatatgtagatgaatatangatatgganaaggaataatgttaaaaattaaatatggaaggaattttaagantnatanagnagaaaaatgagattaaggtaaaagagaaagtgaagangattaaaaagaaatatgngggggnggaaaataatngnnnaaagaagtaaaaattgaaagaaaaagttntnattgaaggagaaatgaagaaaatgttccagtgcccatatttcttctttgacgttgtttacatccacaatggcactgaggagaaggaggaggagatgagttggaaggatatgtttgccttcatgggcagcctggataccaagggtaccagctacaagtatgaggtggcactggctgggccagccctggagttgcacaactgcatggcgaaactgttggcccaccccctgcagcggccttgccagagccatgcttcctacagcctgctggaggaggaggatgaagccattgaggttgaggccactgtctgaaccatccctgtacatctgcaccttcttgtgcaaggaagtccttggcctaaagccttggttctcaaactgggttccttgggacctccggggtgggggggttccaggaggcacgtagggtaccttgcagggtcctaggagggaaacccaggattccaggagggatcccaggaactgtgggcacccattttctgtgtctcccagcccatttccactcctagtttgtcatggataatttttgttcttccctgtgtgatttttgccatcaaaataaaaatttgagactcgttaaaaaaaaaaaaaaaaaaaaaaaaaaaaaaaaggggggggggcccaaaagtttccccgggggggcccaatttcgcgtccccggtttttttggtccaagggggcccctatgggggggggttaataagagggggggcgccgctcgtttacacgacgtctcgggacaggtggcgaaaacccgtggcctacccggggcgacctttggcggaagaggaaccccctatactctgtgtgggtggcgcacatatggtgtcgccccaacacctcccctacagcaagaattttaagcgctccatagagggtacattactacaaccttttncaacgcggttattacggtgcgtttcacccccatcggcgcaaattaagcctcgcgcgctggaaagaaatttttgggcccaccggggacatattcattttgggtaacacaccttttttttttccgccgggnacctttgtcctgtaaaacaaaatcggcaccaaccacgacagcgccgaccgagcaccaacacccaggacaacaagcacaagaagatagccgcccagacgggcagaacaccgcgctacgagcggacgaaacaacacagtacccggtgacaagcggtaccacagacacacgcggcgcgcagggccgactaccccgaacggtcagtcctcgtacgccggacgccagagctcgtaggcgagagagagccaccgcggcacacgccgccgaagagcgaaggcgacagagcaggagcacgtaagccacggagagcaccgcacgaaagaacgtcagaccatggcccatcgccccgaccccaccgacagagggcacacgaacgaaccagaggtcgccgg

SEQ ID NO: 435728 - DNA, 1009 bp, Homo sapiens
gcggagaagcaaacttaggctaggtacgaggctggtgtgcttcctagtgagtcggcggctgatttagaaggaggttcaggctacggtgagccgaagtacggggaggattctggcttcccctgtccgtgttccatctagccacacaggagccatggaagtggcagagcccagcagccccactgaagaggaggaggaggaagaggagcactcggcagagcctcggccccgcactcgctccaatcctgaaggggctgaggaccgggcagtaggggcacaggccagcgtgggcagccgcagcgagggtgagggtgaggccgccagtgctgatgatgggagcctcaacacttcaggagccggccctaagtcctggcaggtgcccccgccagcccctgaggtccaaattcggacaccaagggtcaactgtccagagaaagtgattatctgcctggacctgtcagaggaaatgtcactgccaaagctggagtcgttcaacggctccaaaaccaacgccctcaatgtctcccagaagatgattgagatgttcgtgcggacaaaacacaagatcgacaaaagccacgagtttgcactggtggtggtgaacgatgacacggcctggctgtctggcctgacctccgacccccgcgagctctgtagctgcctctatgatctggagacggcctcctgttccaccttcaatctggaaggacttttcagcctcatccagcagaaaactgagcttccggtcacagagaacgtgcagacgattcccccgccatatgtggtccgcaccatccttgtctacagccgtccaccttgccagccccagttctccttgacggagcccatgaagaaaatgttccagtgcccatatttcttctttgacgttgtttacatccacaatggcactgaggagaaggaggaggagatgagttggaaggaggctgaggcaggagaatcgcttgaacccgggaggcagaggttgcggtgagccgagatcgtgccgttgcac

SEQ ID NO: 435729 - DNA, 1915 bp, Homo sapiens
  misc_feature (1397)..(1397): n is a, c, g, or t
  misc_feature (1526)..(1526): n is a, c, g, or t
gcggagaagcaaacttaggctaggtacgaggctggtgtgcttcctagtgagtcggcggctgatttagaaggaggttcaggctacggtgagccgaagtacggggaggattctggcttcccctgtccgtgttccatctagccacacaggagccatggaagtggcagagcccagcagccccactgaagaggaggaggaggaagaggagcactcggcagagcctcggccccgcactcgctccaatcctgaaggggctgaggaccgggcagtaggggcacaggccagcgtgggcagccgcagcgagggtgagggtgaggccgccagtgctgatgatgggagcctcaacacttcaggagccggccctaagtcctggcaggtgcccccgccagcccctgaggtccaaattcggacaccaagggtcaactgtccagagaaagtgattatctgcctggacctgtcagaggaaatgtcactgccaaagctggagtcgttcaacggctccaaaaccaacgccctcaatgtctcccagaagatgattgagatgttcgtgcggacaaaacacaagatcgacaaaagccacgagtttgcactggtggtggtgaacgatgacacggcctggctgtctggcctgacctccgacccccgcgagctctgtagctgcctctatgatctggagacggcctcctgttccaccttcaatctggaaggacttttcagcctcatccagcagaaaactgagcttccggtcacagagaacgtgcagacgattcccccgccatatgtggtccgcaccatccttgtctacagccgtccaccttgccagccccagagtccttggcctaaagccttggttctcaaactgggttccttgggacctccggggtgggggggttccaggaggcacgtagggtaccttgcagggtcctaggagggaaacccaggattccaggagggatcccaggaactgtgggcacccattttctgtgtctcccagcccatttccactcctagtttgtcatggataatttttgttcttccctgtgtgatttttgccatcaaaataaaaatttgagactcgttaaaaaaaaaaaaaaaaaaaaaaaaaaaaaaaaggggggggggcccaaaagtttccccgggggggcccaatttcgcgtccccggtttttttggtccaagggggcccctatgggggggggttaataagagggggggcgccgctcgtttacacgacgtctcgggacaggtggcgaaaacccgtggcctacccggggcgacctttggcggaagaggaaccccctatactctgtgtgggtggcgcacatatggtgtcgccccaacacctcccctacagcaagaattttaagcgctccatagagggtacattactacaaccttttncaacgcggttattacggtgcgtttcacccccatcggcgcaaattaagcctcgcgcgctggaaagaaatttttgggcccaccggggacatattcattttgggtaacacaccttttttttttccgccgggnacctttgtcctgtaaaacaaaatcggcaccaaccacgacagcgccgaccgagcaccaacacccaggacaacaagcacaagaagatagccgcccagacgggcagaacaccgcgctacgagcggacgaaacaacacagtacccggtgacaagcggtaccacagacacacgcggcgcgcagggccgactaccccgaacggtcagtcctcgtacgccggacgccagagctcgtaggcgagagagagccaccgcggcacacgccgccgaagagcgaaggcgacagagcaggagcacgtaagccacggagagcaccgcacgaaagaacgtcagaccatggcccatcgccccgaccccaccgacagagggcacacgaacgaaccagaggtcgccgg

SEQ ID NO: 435730 - DNA, 1888 bp, Homo sapiens
  misc_feature (1370)..(1370): n is a, c, g, or t
  misc_feature (1499)..(1499): n is a, c, g, or t
gcggagaagcaaacttaggctaggtacgaggctggtgtgcttcctagtgagtcggcggctgatttagaaggaggttcaggctacggtgagccgaagtacggggaggattctggcttcccctgtccgtgttccatctagccacacaggagccatggaagtggcagagcccagcagccccactgaagaggaggaggaggaagaggagcactcggcagagcctcggccccgcactcgctccaatcctgaaggggctgaggaccgggcagtaggggcacaggccagcgtgggcagccgcagcgagggtgagggtgaggccgccagtgctgatgatgggagcctcaacacttcaggagccggccctaagtcctggcaggtgcccccgccagcccctgaggtccaaattcggacaccaagggtcaactgtccagagaaagtgattatctgcctggacctgtcagaggaaatgtcactgccaaagctggagtcgttcaacggctccaaaaccaacgccctcaatgtctcccagaagatgattgagatgttcgtgcggacaaaacacaagatcgacaaaagccacgagtttgcactggtggtggtgaacgatgacacggcctggctgtctggcctgacctccgacccccgcgagctctgtagctgcctctatgatctggagacggcctcctgttccaccttcaatctggaaggacttttcagcctcatccagcagaaaactgagcttccggtcacagagaacgtgcagacgattcccccgccatatgtggtccgcaccatccttgtctacagccgtccaccttgccagccccagaaactgggttccttgggacctccggggtgggggggttccaggaggcacgtagggtaccttgcagggtcctaggagggaaacccaggattccaggagggatcccaggaactgtgggcacccattttctgtgtctcccagcccatttccactcctagtttgtcatggataatttttgttcttccctgtgtgatttttgccatcaaaataaaaatttgagactcgttaaaaaaaaaaaaaaaaaaaaaaaaaaaaaaaaggggggggggcccaaaagtttccccgggggggcccaatttcgcgtccccggtttttttggtccaagggggcccctatgggggggggttaataagagggggggcgccgctcgtttacacgacgtctcgggacaggtggcgaaaacccgtggcctacccggggcgacctttggcggaagaggaaccccctatactctgtgtgggtggcgcacatatggtgtcgccccaacacctcccctacagcaagaattttaagcgctccatagagggtacattactacaaccttttncaacgcggttattacggtgcgtttcacccccatcggcgcaaattaagcctcgcgcgctggaaagaaatttttgggcccaccggggacatattcattttgggtaacacaccttttttttttccgccgggnacctttgtcctgtaaaacaaaatcggcaccaaccacgacagcgccgaccgagcaccaacacccaggacaacaagcacaagaagatagccgcccagacgggcagaacaccgcgctacgagcggacgaaacaacacagtacccggtgacaagcggtaccacagacacacgcggcgcgcagggccgactaccccgaacggtcagtcctcgtacgccggacgccagagctcgtaggcgagagagagccaccgcggcacacgccgccgaagagcgaaggcgacagagcaggagcacgtaagccacggagagcaccgcacgaaagaacgtcagaccatggcccatcgccccgaccccaccgacagagggcacacgaacgaaccagaggtcgccgg

SEQ ID NO: 435731 - DNA, 1564 bp, Homo sapiens
  misc_feature (1046)..(1046): n is a, c, g, or t
  misc_feature (1175)..(1175): n is a, c, g, or t
gcggagaagcaaacttaggctaggtacgaggctggtgtgcttcctagtgagtcggcggctgatttagaaggaggttcaggctacggtgagccgaagccacacaggagccatggaagtggcagagcccagcagccccactgaagaggaggaggaggaagaggagcactcggcagagcctcggccccgcactcgctccaatcctgaaggggctgaggaccgggcagtaggggcacaggccagccccctgaggtccaaattcggacaccaagggtcaactgtccagagaaagtgattatctgcctggacctgtcagaggaaatgtcactgccaaagctggagtcgttcaacggctccaaaaccaacgccctcaatgtctcccagaagatgattgagatgttcgtgcggacaaaacacaagatcgacaaaagccactgtctgaaccatccctgtacatctgcaccttcttgtgcaaggaagtccttggcctaaagccttggttctcaaactgggttccttgggacctccggggtgggggggttccaggaggcacgtagggtaccttgcagggtcctaggagggaaacccaggattccaggagggatcccaggaactgtgggcacccattttctgtgtctcccagcccatttccactcctagtttgtcatggataatttttgttcttccctgtgtgatttttgccatcaaaataaaaatttgagactcgttaaaaaaaaaaaaaaaaaaaaaaaaaaaaaaaaggggggggggcccaaaagtttccccgggggggcccaatttcgcgtccccggtttttttggtccaagggggcccctatgggggggggttaataagagggggggcgccgctcgtttacacgacgtctcgggacaggtggcgaaaacccgtggcctacccggggcgacctttggcggaagaggaaccccctatactctgtgtgggtggcgcacatatggtgtcgccccaacacctcccctacagcaagaattttaagcgctccatagagggtacattactacaaccttttncaacgcggttattacggtgcgtttcacccccatcggcgcaaattaagcctcgcgcgctggaaagaaatttttgggcccaccggggacatattcattttgggtaacacaccttttttttttccgccgggnacctttgtcctgtaaaacaaaatcggcaccaaccacgacagcgccgaccgagcaccaacacccaggacaacaagcacaagaagatagccgcccagacgggcagaacaccgcgctacgagcggacgaaacaacacagtacccggtgacaagcggtaccacagacacacgcggcgcgcagggccgactaccccgaacggtcagtcctcgtacgccggacgccagagctcgtaggcgagagagagccaccgcggcacacgccgccgaagagcgaaggcgacagagcaggagcacgtaagccacggagagcaccgcacgaaagaacgtcagaccatggcccatcgccccgaccccaccgacagagggcacacgaacgaaccagaggtcgccgg

SEQ ID NO: 435732 - DNA, 771 bp, Homo sapiens
  misc_feature (695)..(695): n is a, c, g, or t
  misc_feature (715)..(715): n is a, c, g, or t
  misc_feature (741)..(741): n is a, c, g, or t
gcggagaagcaaacttaggctaggtacgaggctggtgtgcttcctagtgagtcggcggctgatttagaaggaggttcaggctacggtgagccgaagtacggggaggattctggcttcccctgtccgtgttccatctagccacacaggagccatggaagtggcagagcccagcagccccactgaagaggaggaggaggaagaggagcactcggcagagcctcggccccgcactcgctccaatcctgaaggggctgaggaccgggcagtaggggcacaggccagcgtgggcagccgcagcgagggtgagggtgaggccgccagtgctgatgatgggagcctcaacacttcaggagccggccctaagtcctggcaggtgcccccgccagcccctgaggtccaaattcggacaccaagggtcaactgtccagagaaagtgattatctgcctggacctgtcagaggaaatgtcactgccaaagctggagtcgttcaacggctccaaaaccaacgccctcaatgtctcccagaagatgattgagatgttcgtgcggacaaaacacaagatcgacaaaagccacgagtttgcactggtggtggtgaacgatgacacggcctggccagcagaaaactgagcttccggtcacagagaacgtgcagacgattcccccgccatatgtggtccgcaccactgcactncagcctggggcaacagagtnagacttcgtctcaaaaaataaattanattaggagcagccttgtaactgtttttacc

SEQ ID NO: 435733 - DNA, 839 bp, Homo sapiens
gcggagaagcaaacttaggctaggtacgaggctggtgtgcttcctagtgagtcggcggctgatttagaaggaggttcaggctacggtgagccgaagaggtgggtggtgaaagcgtgtggggcccgttcctaggggcccagctccctttgccccaagagatccagctcctcgcctttcctggggcttccgcctttatttctggtttctcctgcagtgtagcctccatccttcttgctgccgctaaagccttgtttttcttagaggtgtggggactgcaaggcgctcaaagaccatcttgggaagcccgtgcctatttcccagatagacaaactgctccattcgcgtcctgtttctctccaaggggaaccacagtactaatattttgcttctccctcatgcagacacccgctagggacgagggtgtcctagaggttattattcccttattcaccaagacattttcagttttaggtaacagaaaaccctactcaatctggcttaaggaagaaaaggaagttggtggcttatagattgggtctaacaggagctgggtccaggtggtcagaattcgatctgcagttttctcggtggagaccatttcgctttttaccgaggcaaaaggggcccctcacagctctcaactttattctaccagctctgcaactctaatgagagtctcttttccttgatgacactgctagaagttgcagagctgccactcaatggcctgatttgggtcatgtgcccatccctgagccattttcagtggccagagagctgggatgtgctcactggccgagtaggggcatggggctagcactacgttaaaaaaaaaaaga

SEQ ID NO: 435734 - DNA, 425 bp, Homo sapiens
tcagctcactgcaacctccgccttctgggttcaagcaattctctgactcagcctcctgagtagctgggattacaggcactcgccaccacgcctggctaatttttttgtatttttagtagagatggggtttcaccatcttgaccaggctggtgttgaactcctgacctcgtgatccacctgcctcagcctcccaaagtactggaattacaggcgtgagccactgtgcccggccctgagggaaccttaattcccctgtactctctgcctccccagctccaaaaccaacgccctcaatgtctcccagaagatgattgagatgttcgtgcggacaaaacacaagatcgacaaaagccacgagtttgcactggtggtggtgaacgatgacacggcctgggtgaggctgcggcaggcgctgggtgccctgg

SEQ ID NO: 435735 - DNA, 1962 bp, Homo sapiens
  misc_feature (1444)..(1444): n is a, c, g, or t
  misc_feature (1573)..(1573): n is a, c, g, or t
gcggagaagcaaacttaggctaggtacgaggctggtgtgcttcctagtgagtcggcggctgatttagaaggaggttcaggctacggtgagccgaagtacggggaggattctggcttcccctgtccgtgttccatctagccacacaggagccatggaagtggcagagcccagcagccccactgaagaggaggaggaggaagaggagcactcggcagagcctcggccccgcactcgctccaatcctgaaggggctgaggaccgggcagtaggggcacaggccagcgtgggcagccgcagcgagggtgagggtgaggccgccagtgctgatgatgggagcctcaacacttcaggagccggccctaagtcctggcaggtgcccccgccagcccctgaggtccaaattcggacaccaagggtcaactgtccagagaaagtgattatctgcctggacctgtcagaggaaatgtcactgccaaagctggagtcgttcaacggctccaaaaccaacgccctcaatgtctcccagaagatgattgagatgttcgtgcggacaaaacacaagatcgacaaaagccacgagtttgcactggtggtggtgaacgatgacacggcctggctgtctggcctgacctccgacccccgcgagctctgtagctgcctctatgatctggagacggcctcctgttccaccttcaatctggaaggacttttcagcctcatccagcagaaaactgagcttccggtcacagagaacgtgcagacgattcccccgccatatgtggtccgcaccatccttgtctacagccgtccaccttgccagccccagttctccttgacggagcccatgaagaaaatgttccagtgcccatatttcttctttgacgttgtttacatccacaatggcactgaggagaaggaggaggagatgagttggaagccaggaggcacgtagggtaccttgcagggtcctaggagggaaacccaggattccaggagggatcccaggaactgtgggcacccattttctgtgtctcccagcccatttccactcctagtttgtcatggataatttttgttcttccctgtgtgatttttgccatcaaaataaaaatttgagactcgttaaaaaaaaaaaaaaaaaaaaaaaaaaaaaaaaggggggggggcccaaaagtttccccgggggggcccaatttcgcgtccccggtttttttggtccaagggggcccctatgggggggggttaataagagggggggcgccgctcgtttacacgacgtctcgggacaggtggcgaaaacccgtggcctacccggggcgacctttggcggaagaggaaccccctatactctgtgtgggtggcgcacatatggtgtcgccccaacacctcccctacagcaagaattttaagcgctccatagagggtacattactacaaccttttncaacgcggttattacggtgcgtttcacccccatcggcgcaaattaagcctcgcgcgctggaaagaaatttttgggcccaccggggacatattcattttgggtaacacaccttttttttttccgccgggnacctttgtcctgtaaaacaaaatcggcaccaaccacgacagcgccgaccgagcaccaacacccaggacaacaagcacaagaagatagccgcccagacgggcagaacaccgcgctacgagcggacgaaacaacacagtacccggtgacaagcggtaccacagacacacgcggcgcgcagggccgactaccccgaacggtcagtcctcgtacgccggacgccagagctcgtaggcgagagagagccaccgcggcacacgccgccgaagagcgaaggcgacagagcaggagcacgtaagccacggagagcaccgcacgaaagaacgtcagaccatggcccatcgccccgaccccaccgacagagggcacacgaacgaaccagaggtcgccgg

SEQ ID NO: 435736 - DNA, 1974 bp, Homo sapiens
  misc_feature (1456)..(1456): n is a, c, g, or t
  misc_feature (1585)..(1585): n is a, c, g, or t
gcggagaagcaaacttaggctaggtacgaggctggtgtgcttcctagtgagtcggcggctgatttagaaggaggttcaggctacggtgagccgaagtacggggaggattctggcttcccctgtccgtgttccatctagccacacaggagccatggaagtggcagagcccagcagccccactgaagaggaggaggaggaagaggagcactcggcagagcctcggccccgcactcgctccaatcctgaaggggctgaggaccgggcagtaggggcacaggccagcgtgggcagccgcagcgagggtgagggtgaggccgccagtgctgatgatgggagcctcaacacttcaggagccggccctaagtcctggcaggtgcccccgccagcccctgaggtccaaattcggacaccaagggtcaactgtccagagaaagtgattatctgcctggacctgtcagaggaaatgtcactgccaaagctggagtcgttcaacggctccaaaaccaacgccctcaatgtctcccagaagatgattgagatgttcgtgcggacaaaacacaagatcgacaaaagccacgagtttgcactggtggtggtgaacgatgacacggcctggctgtctggcctgacctccgacccccgcgagctctgtagctgcctctatgatctggagacggcctcctgttccaccttcaatctggaaggacttttcagcctcatccagcagaaaactgagcttccggtcacagagtgttggcccaccccctgcagcggccttgccagagccatgcttcctacagcctgctggaggaggaggatgaagccattgaggttgaggccactgtctgaaccatccctgtacatctgcaccttcttgtgcaaggaagtccttggcctaaagccttggttctcaaactgggttccttgggacctccggggtgggggggttccaggaggcacgtagggtaccttgcagggtcctaggagggaaacccaggattccaggagggatcccaggaactgtgggcacccattttctgtgtctcccagcccatttccactcctagtttgtcatggataatttttgttcttccctgtgtgatttttgccatcaaaataaaaatttgagactcgttaaaaaaaaaaaaaaaaaaaaaaaaaaaaaaaaggggggggggcccaaaagtttccccgggggggcccaatttcgcgtccccggtttttttggtccaagggggcccctatgggggggggttaataagagggggggcgccgctcgtttacacgacgtctcgggacaggtggcgaaaacccgtggcctacccggggcgacctttggcggaagaggaaccccctatactctgtgtgggtggcgcacatatggtgtcgccccaacacctcccctacagcaagaattttaagcgctccatagagggtacattactacaaccttttncaacgcggttattacggtgcgtttcacccccatcggcgcaaattaagcctcgcgcgctggaaagaaatttttgggcccaccggggacatattcattttgggtaacacaccttttttttttccgccgggnacctttgtcctgtaaaacaaaatcggcaccaaccacgacagcgccgaccgagcaccaacacccaggacaacaagcacaagaagatagccgcccagacgggcagaacaccgcgctacgagcggacgaaacaacacagtacccggtgacaagcggtaccacagacacacgcggcgcgcagggccgactaccccgaacggtcagtcctcgtacgccggacgccagagctcgtaggcgagagagagccaccgcggcacacgccgccgaagagcgaaggcgacagagcaggagcacgtaagccacggagagcaccgcacgaaagaacgtcagaccatggcccatcgccccgaccccaccgacagagggcacacgaacgaaccagaggtcgccgg

SEQ ID NO: 435737 - DNA, 1805 bp, Homo sapiens
  misc_feature (1287)..(1287): n is a, c, g, or t
  misc_feature (1416)..(1416): n is a, c, g, or t
gcggagaagcaaacttaggctaggtacgaggctggtgtgcttcctagtgagtcggcggctgatttagaaggaggttcaggctacggtgagccgaagtacggggaggattctggcttcccctgtccgtgttccatctagccacacaggagccatggaagtggcagagcccagcagccccactgaagaggaggaggaggaagaggagcactcggcagagcctcggccccgcactcgctccaatcctgaaggggctgaggaccgggcagtaggggcacaggccagcgtgggcagccgcagcgagggtgagggtgaggccgccagtgctgatgatgggagcctcaacacttcaggagccggccctaagtcctggcaggtgcccccgccagcccctgaggtccaaattcggacaccaagggtcaactgtccagagaaagtgattatctgcctggacctgtcagaggaaatgtcactgccaaagctggagtcgttcaacggctccaaaaccaacgccctcaatgtctcccagaagatgattgagatgttcgtgcggacaaaacacaagatcgacaaaagccacgagtttgcactggtggtggtgaacgatgacacggcctggccatgcttcctacagcctgctggaggaggaggatgaagccattgaggttgaggccactgtctgaaccatccctgtacatctgcaccttcttgtgcaaggaagtccttggcctaaagccttggttctcaaactgggttccttgggacctccggggtgggggggttccaggaggcacgtagggtaccttgcagggtcctaggagggaaacccaggattccaggagggatcccaggaactgtgggcacccattttctgtgtctcccagcccatttccactcctagtttgtcatggataatttttgttcttccctgtgtgatttttgccatcaaaataaaaatttgagactcgttaaaaaaaaaaaaaaaaaaaaaaaaaaaaaaaaggggggggggcccaaaagtttccccgggggggcccaatttcgcgtccccggtttttttggtccaagggggcccctatgggggggggttaataagagggggggcgccgctcgtttacacgacgtctcgggacaggtggcgaaaacccgtggcctacccggggcgacctttggcggaagaggaaccccctatactctgtgtgggtggcgcacatatggtgtcgccccaacacctcccctacagcaagaattttaagcgctccatagagggtacattactacaaccttttncaacgcggttattacggtgcgtttcacccccatcggcgcaaattaagcctcgcgcgctggaaagaaatttttgggcccaccggggacatattcattttgggtaacacaccttttttttttccgccgggnacctttgtcctgtaaaacaaaatcggcaccaaccacgacagcgccgaccgagcaccaacacccaggacaacaagcacaagaagatagccgcccagacgggcagaacaccgcgctacgagcggacgaaacaacacagtacccggtgacaagcggtaccacagacacacgcggcgcgcagggccgactaccccgaacggtcagtcctcgtacgccggacgccagagctcgtaggcgagagagagccaccgcggcacacgccgccgaagagcgaaggcgacagagcaggagcacgtaagccacggagagcaccgcacgaaagaacgtcagaccatggcccatcgccccgaccccaccgacagagggcacacgaacgaaccagaggtcgccgg

SEQ ID NO: 435738 - DNA, 397 bp, Homo sapiens
  misc_feature (211)..(211): n is a, c, g, or t
  misc_feature (214)..(214): n is a, c, g, or t
  misc_feature (216)..(216): n is a, c, g, or t
  misc_feature (280)..(280): n is a, c, g, or t
  misc_feature (291)..(291): n is a, c, g, or t
  misc_feature (310)..(310): n is a, c, g, or t
  misc_feature (312)..(312): n is a, c, g, or t
gcggagaagcaaacttaggctaggtacgaggctggtgtgcttcctagtgagtcggcggctgatttagaaggaggttcaggctacggtgagccgaagtacggggaggattctggcttcccctgtccgtgttccatctagccacacaggagccatggaagtggcagagcccagcagccccactgaagaggaggagtcgtgccgaattcggcangcntnaaggctgcgttggggtgaggccctcacttcatccggcgactagcaccgcgtccggcagcgccancctacactcgnccgcgccatggcctctgtntncgagcttcgcctgcatctactcggccctcattctgcacgacgatgaggtgacaatcacggaggataagatcaattgccctcatta

SEQ ID NO: 435739 - DNA, 540 bp, Homo sapiens
tgacagctgacccaggtgctacacagaagtggattcagtgaatctaggaagacagcagcagacaggattccaggaaccagtgtttgatgaagctaggactgaggagcaagcgagcaagcagcagttcgtggtgaagataggaaaagagtccagcagcacctatcctggctcttggtcctggcctgcagccaagtgctgttcctagcctgaggcttgagacaggtggggttggctcctcaccaaccccagttccgtcccatcctgagggcaagatcctgggctcataggcagtccctttcacttccttgtcttgctccctgctatgctggagatgaatgtgactaaaagggccatcttgctggcttaatgtgtggctggagagaccagcctggagacaatgtggcaaaatggggcgcttcatccagtctgtctaagccctgtcgacttggggaggtgatttctttcctggttctatatgtgaagcaaaataaatgttttaaaattaaaagcaaaaaaacaaaatgaaaaatgaaacactga

SEQ ID NO: 435740 - DNA, 828 bp, Homo sapiens
tttccgcagttaggggctgctatttcaacgcagggagataaaaagaaaaaaacacttgctcttctaccccgctaaaaacactcatcctagggagcacgccagcatttgcagcgttcggggcagggccactcggcctgcggccgttgcactggctggaagctggcaggcgatcacggttgattggctcgggtgcggtccaagggcagcaacgccttcggcgggccgcctagggtgattggctgctgcagcccaccccctagccggtttggtgggcggcgaagcctggattggtggagctaagagctggctcagtttcagcgctggctcttcgtgcatggcagagatggcgactgcgactcggctgctggggtggcgtgtggcgagctggaggctgcggccgccgcttgccggcttcgtttcccagcgggcccactcgcttttgcccgtggacgatgcaatcaatgggctaagcgaggagcagaggcagcttcgtcagaccatggctaagttccttcaggagcacctggcccccaaggcccaggagatcgatcgcagcaatgagttcaagaacctgcgagaattttggaagcagctggggaacctgggcgtattgggcatcacagcccctgttcagtatggcggctccggcctgggctacctggagcatgtgctggtgatggaggagatatcccgagcttccggagcagtggggctcagttacggtgcccactccaacctctgcatcaaccagcttgtacgcaatgggaatgaggcccagaaagagaagtatctcccgaaggtgaggaaatggaaatgtaatacacgcta

SEQ ID NO: 435741 - DNA, 4378 bp, Homo sapiens
tttccgcagttaggggctgctatttcaacgcagggagataaaaagaaaaaaacacttgctcttctaccccgctaaaaacactcatcctagggagcacgccagcatttgcagcgttcggggcagggccactcggcctgcggccgttgcactggctggaagctggcaggcgatcacggttgattggctcgggtgcggtccaagggcagcaacgccttcggcgggccgcctagggtgattggctgctgcagcccaccccctagccggtttggtgggcggcgaagcctggattggtggagctaagagctggctcagtttcagcgctggctcttcgtgcatggcagagatggcgactgcgactcggctgctggggtggcgtgtggcgagctggaggctgcggccgccgcttgccggcttcgtttcccagcgggcccactcgcttttgcccgtggacgatgcaatcaatgggctaagcgaggagcagaggcagcttcgtcagaccatggctaagttccttcaggagcacctggcccccaaggcccaggagatcgatcgcagcaatgagttcaagaacctgcgagaattttggaagcagctggggaacctgggcgtattgggcatcacagcccctgttcagtatggcggctccggcctgggctacctggagcatgtgctggtgatggaggagatatcccgagcttccggagcagtggggctcagttacggtgcccactccaacctctgcatcaaccagcttgtacgcaatgggaatgaggcccagaaagagaagtatctcccgaagctgatcagtggtgagtacatcggagccctggccatgagtgagcccaatgcaggctctgatgttgtctctatgaagctcaaagcggaaaagaaaggaaatcactacatcctgaatggcaacaagttctggatcactaatggccctgatgctgacgtcctgattgtctatgccaagacagatctggctgctgtgccagcttctcggggcatcacagccttcattgtggagaagggtatgcctggctttagcacctctaagaagctggacaagctggggatgaggggctctaacacctgtgagctaatctttgaagactgcaagattcctgctgccaacatcctgggccatgagaataagggtgtctacgtgctgatgagtgggctggacctggagcggctggtgctggccggggggcctcttgggctcatgcaagcggtcctggaccacaccattccctacctgcacgtgagggaagcctttggccagaagatcggccacttccagttgatgcaggggaagatggctgacatgtacacccgcctcatggcgtgtcggcagtatgtctacaatgtcgccaaggcctgcgatgagggccattgcactgctaaggactgtgcaggtgtgattctttactcagctgagtgtgccacacaggtagccctggacggcattcagtgttttggtggcaatggctacatcaatgactttcccatgggccgctttcttcgagatgccaagctgtatgagataggggctgggaccagcgaggtgaggcggctggtcatcggcagagccttcaatgcagactttcactagtcctgagacccttcgcccccttttcctgcacctagtggcctttcttgggaagtagagatgtggcggctttcccaccctgcccacagcaggccctcctgcccagctgctcttgtcagccctctggcctctggatgaggttgagttctccacaacagctcccaagcatcatgggcctcgcagccgggcctgtgccacggctagtgttgtgtgatttaaaatggactcagcaggaagcatattgtctggggattgttgggacaggttttggtgactctgtgcccttgctctctaacttctgagcccacctcccagggtaggcacctgggggcatgcaggtgcccacctcccagggtaggcacctgggggcatgcaggtacccacctctttctcttgggtgaggctctggcaaggagatctctctgctcaagcacagcagaatcatggcccctctccatgaattggaacttggtacaggttaagtatccctaatcctgaaatctgaaacacttgtggttccaagcattttggataaggcaaattcaactttcagtctcttttctgggggaaaaaaataataaacctagcctagccaggcgtggtggctcatgcttgtaatcccagcacttcaggaggctgagatgggtggatcacctgaggtcaggagttcaagaccagcctggccaacatgtggaaacctcgcctcaactaaaaatagaaaaaaattagttgggcatggtggtgggcacctgtaatcccagctacttcaggaggctgaggcaggagaattacttgaacccaggaggcggacgttgcagtgagccgagcttgtgccattgcactccagcctgggcgacaagagcaaaactcttcaaaaaacaaaacaaaacaaaaaaaccctggcccttgtttcttccagtttctagaggtatcagctcctagcagcttatgaacacatatgcttgcttggccaggcaaggtggtgtgtgcctgtaatcccagcactttgggaggccaaggcaggtggatcacttgcagtcaggagttcaagaccagcctgtccaacgtggtgaaaccccatctctactaaaaatacaaaaattagccaggggtggtggtgcacgtctgtaatcccagctactcaggaggctgaggcaggagaatcacttgaacccgggaggtggaggttgcaatgagccaatatgacaccgctgcagtccagcctgggccatagagtgagactctgtctcaaaaaaggaaagaaaaataggctgggcacagtgactcatgcctgtaatcccaacactttgggaggccgaggcaggtggatcacgaggtcaggagttcaagaccagcctggccaagatggtaaaacctcgtctctactaaaaatacaaaaattagccaggtgtggtggcaggctcctgtaatcccagttacacagaagactgaggcaggagaatcgcttgaacgcaggaggcagaggttgcaggagctgagatcgcgccattgcactccagcctgggcaacagagtgagactctgtctcaaaaaataataataaaataaatgaacacacatgctgctgagtccgcaggggggcagagcagaggacagcgtgcttttgtgtactgttggaagactggctcctcctgtacagcacctctgagcccttgtgcaccgccctgccacgggcaccatccagtcctggccgtgtgaccacccacagctgactgggcagcaggcacaggccctacccgagcaggccggagttggctcgcatgactccagctgaggctgcctgtgtacatttctccagataccctatggctaattttgttataactgcacagtggctgctgccattttgtattaaatatattgtgaaacaaacctatctggggagaagcaatctacttgccgctgcttcctgtctggatccagcttgtgtccttggagagtggctggcccaggtcctattcctgtcctccagcccgttctttcatgagggacaggaaggtaaaatcagcccttaggagagaggtctcagcctccctttcccagatctcccagtgagttttaaaggaagcagggagcccagagtgctaagttcttacagccagaaggaagcttatagatttctgaaaaccgcccctttgtttttaaaaagatcaacacaatttgactttctcaaggtcaaaacgaactagaatccagatctgctcatggcaaaaatgggggtgttctgagaattccagctttgggccgcactgtacagcagtctggatagagtgtgatctgagaagggaatgggtctgggttgttccaccccttccgagttccaaaaagagggaactggttttcttggttctcagcccagcagcacctatcctggctcttggtcctggcctgcagccaagtgctgttcctagcctgaggcttgagacaggtggggttggctcctcaccaaccccagttccgtcccatcctgagggcaagatcctgggctcataggcagtccctttcacttccttgtcttgctccctgctatgctggagatgaatgtgactaaaagggccatcttgctggcttaatgtgtggctggagagaccagcctggagacaatgtggcaaaatggggcgcttcatccagtctgtctaagccctgtcgacttggggaggtgatttctttcctggttctatatgtgaagcaaaataaatgttttaaaattaaaagcaaaaaaacaaaatgaaaaatgaaacactga

SEQ ID NO: 435742 - DNA, 4796 bp, Homo sapiens
tttccgcagttaggggctgctatttcaacgcagggagataaaaagaaaaaaacacttgctcttctaccccgctaaaaacactcatcctagggagcacgccagcatttgcagcgttcggggcagggccactcggcctgcggccgttgcactggctggaagctggcaggcgatcacggttgattggctcgggtgcggtccaagggcagcaacgccttcggcgggccgcctagggtgattggctgctgcagcccaccccctagccggtttggtgggcggcgaagcctggattggtggagctaagagctggctcagtttcagcgctggctcttcgtgcatggcagagatggcgactgcgactcggctgctggggtggcgtgtggcgagctggaggctgcggccgccgcttgccggcttcgtttcccagcgggcccactcgcttttgcccgtggacgatgcaatcaatgggctaagcgaggagcagaggcagcttcgtcagaccatggctaagttccttcaggagcacctggcccccaaggcccaggagatcgatcgcagcaatgagttcaagaacctgcgagaattttggaagcagctggggaacctgggcgtattgggcatcacagcccctgttcagtatggcggctccggcctgggctacctggagcatgtgctggtgatggaggagatatcccgagcttccggagcagtggggctcagttacggtgcccactccaacctctgcatcaaccagcttgtacgcaatgggaatgaggcccagaaagagaagtatctcccgaagctgatcagtggtgagtacatcggagccctggccatgagtgagcccaatgcaggctctgatgttgtctctatgaagctcaaagcggaaaagaaaggaaatcactacatcctgaatggcaacaagttctggatcactaatggccctgatgctgacgtcctgattgtctatgccaagacagatctggctgctgtgccagcttctcggggcatcacagccttcattgtggagaagggtatgcctggctttagcacctctaagaagctggacaagctggggatgaggggctctaacacctgtgagctaatctttgaagactgcaagattcctgctgccaacatcctgggccatgagaataagggtgtctacgtgctgatgagtgggctggacctggagcggctggtgctggccggggggcctcttgggtaagtgtgagaggcttgagggaagctgggctctgtcggcctcctcggcaggtgacccaccatgagcagcagcagccttccccttgcggggccaaagggagctgcctcttggccctgctctctcctgggagatgaaaggaacctcctcttcccatgttgaatttcttcccacagtggggaaatatcattaagtaacagacaaaaggcctgaggagcagggtggcttactcggctgtgaaacgacacctgggctgtcacgcccctgcacctctggccagtcagtgccgtaactgtggcaagactttctgaagttgcttttctcctccctgggattctggccttcccacgctagcattttgccaccacacccggtggtgggatgaggaggtgcccacggggcctttctcctttctgacaggctcatgcaagcggtcctggaccacaccattccctacctgcacgtgagggaagcctttggccagaagatcggccacttccagttgatgcaggggaagatggctgacatgtacacccgcctcatggcgtgtcggcagtatgtctacaatgtcgccaaggcctgcgatgagggccattgcactgctaaggactgtgcaggtgtgattctttactcagctgagtgtgccacacaggtagccctggacggcattcagtgttttggtggcaatggctacatcaatgactttcccatgggccgctttcttcgagatgccaagctgtatgagataggggctgggaccagcgaggtgaggcggctggtcatcggcagagccttcaatgcagactttcactagtcctgagacccttcgcccccttttcctgcacctagtggcctttcttgggaagtagagatgtggcggctttcccaccctgcccacagcaggccctcctgcccagctgctcttgtcagccctctggcctctggatgaggttgagttctccacaacagctcccaagcatcatgggcctcgcagccgggcctgtgccacggctagtgttgtgtgatttaaaatggactcagcaggaagcatattgtctggggattgttgggacaggttttggtgactctgtgcccttgctctctaacttctgagcccacctcccagggtaggcacctgggggcatgcaggtgcccacctcccagggtaggcacctgggggcatgcaggtacccacctctttctcttgggtgaggctctggcaaggagatctctctgctcaagcacagcagaatcatggcccctctccatgaattggaacttggtacaggttaagtatccctaatcctgaaatctgaaacacttgtggttccaagcattttggataaggcaaattcaactttcagtctcttttctgggggaaaaaaataataaacctagcctagccaggcgtggtggctcatgcttgtaatcccagcacttcaggaggctgagatgggtggatcacctgaggtcaggagttcaagaccagcctggccaacatgtggaaacctcgcctcaactaaaaatagaaaaaaattagttgggcatggtggtgggcacctgtaatcccagctacttcaggaggctgaggcaggagaattacttgaacccaggaggcggacgttgcagtgagccgagcttgtgccattgcactccagcctgggcgacaagagcaaaactcttcaaaaaacaaaacaaaacaaaaaaaccctggcccttgtttcttccagtttctagaggtatcagctcctagcagcttatgaacacatatgcttgcttggccaggcaaggtggtgtgtgcctgtaatcccagcactttgggaggccaaggcaggtggatcacttgcagtcaggagttcaagaccagcctgtccaacgtggtgaaaccccatctctactaaaaatacaaaaattagccaggggtggtggtgcacgtctgtaatcccagctactcaggaggctgaggcaggagaatcacttgaacccgggaggtggaggttgcaatgagccaatatgacaccgctgcagtccagcctgggccatagagtgagactctgtctcaaaaaaggaaagaaaaataggctgggcacagtgactcatgcctgtaatcccaacactttgggaggccgaggcaggtggatcacgaggtcaggagttcaagaccagcctggccaagatggtaaaacctcgtctctactaaaaatacaaaaattagccaggtgtggtggcaggctcctgtaatcccagttacacagaagactgaggcaggagaatcgcttgaacgcaggaggcagaggttgcaggagctgagatcgcgccattgcactccagcctgggcaacagagtgagactctgtctcaaaaaataataataaaataaatgaacacacatgctgctgagtccgcaggggggcagagcagaggacagcgtgcttttgtgtactgttggaagactggctcctcctgtacagcacctctgagcccttgtgcaccgccctgccacgggcaccatccagtcctggccgtgtgaccacccacagctgactgggcagcaggcacaggccctacccgagcaggccggagttggctcgcatgactccagctgaggctgcctgtgtacatttctccagataccctatggctaattttgttataactgcacagtggctgctgccattttgtattaaatatattgtgaaacaaacctatctggggagaagcaatctacttgccgctgcttcctgtctggatccagcttgtgtccttggagagtggctggcccaggtcctattcctgtcctccagcccgttctttcatgagggacaggaaggtaaaatcagcccttaggagagaggtctcagcctccctttcccagatctcccagtgagttttaaaggaagcagggagcccagagtgctaagttcttacagccagaaggaagcttatagatttctgaaaaccgcccctttgtttttaaaaagatcaacacaatttgactttctcaaggtcaaaacgaactagaatccagatctgctcatggcaaaaatgggggtgttctgagaattccagctttgggccgcactgtacagcagtctggatagagtgtgatctgagaagggaatgggtctgggttgttccaccccttccgagttccaaaaagagggaactggttttcttggttctcagcccagcagcacctatcctggctcttggtcctggcctgcagccaagtgctgttcctagcctgaggcttgagacaggtggggttggctcctcaccaaccccagttccgtcccatcctgagggcaagatcctgggctcataggcagtccctttcacttccttgtcttgctccctgctatgctggagatgaatgtgactaaaagggccatcttgctggcttaatgtgtggctggagagaccagcctggagacaatgtggcaaaatggggcgcttcatccagtctgtctaagccctgtcgacttggggaggtgatttctttcctggttctatatgtgaagcaaaataaatgttttaaaattaaaagcaaaaaaacaaaatgaaaaatgaaacactga

SEQ ID NO: 435743 - DNA, 4340 bp, Homo sapiens
tttccgcagttaggggctgctatttcaacgcagggagataaaaagaaaaaaacacttgctcttctaccccgctaaaaacactcatcctagggagcacgccagcatttgcagcgttcggggcagggccactcggcctgcggccgttgcactggctggaagctggcaggcgatcacggttgattggctcgggtgcggtccaagggcagcaacgccttcggcgggccgcctagggtgattggctgctgcagcccaccccctagccggtttggtgggcggcgaagcctggattggtggagctaagagctggctcagtttcagcgctggctcttcgtgcatggcagagatggcgactgcgactcggctgctggggtggcgtgtggcgagctggaggctgcggccgccgcttgccggcttcgtttcccagcgggcccactcgcttttgcccgtggacgatgcaatcaatgggctaagcgaggagcagaggcagcttcgtcagaccatggctaagttccttcaggagcacctggcccccaaggcccaggagatcgatcgcagcaatgagttcaagaacctgcgagaattttggaagcagctggggaacctgggcgtattgggcatcacagcccctgttcagtatggcggctccggcctgggctacctggagcatgtgctggtgatggaggagatatcccgagcttccggagcagtggggctcagttacggtgcccactccaacctctgcatcaaccagcttgtacgcaatgggaatgaggcccagaaagagaagtatctcccgaagctgatcagtggtgagtacatcggagccctggccatgagtgagcccaatgcaggctctgatgttgtctctatgaagctcaaagcggaaaagaaaggaaatcactacatcctgaatggcaacaagttctggatcactaatggccctgatgctgacgtcctgattgtctatgccaagacagatctggctgctgtgccagcttctcggggcatcacagccttcattgtggagaagggtatgcctggctttagcacctctaagaagctggacaagctggggatgaggggctctaacacctgtgagctaatctttgaagactgcaagattcctgctgccaacatcctgggccatgagaataagggtgtctacgtgctgatgagtgggctggacctggagcggctggtgctggccggggggcctcttgggctcatgcaagcggtcctggaccacaccattccctacctgcacgtgagggaagcctttggccagaagatcggccacttccagttgatgcaggggaagatggctgacatgtacacccgcctcatggcgtgtcggcagtatgtctacaatgtcgccaaggcctgcgatgagggccattgcactgctaaggactgtgcaggtgtgattctttactcagctgagtgtgccacacaggtagccctggacggcattcagtgttttggtggcaatggctacatcaatgactttcccatgggccgctttcttcgagatgccaagctgtatgagataggggctgggaccagcgaggtgaggcggctggtcatcggcagagccttcaatgcagactttcactagtcctgagacccttcgcccccttttcctgcacctagtggcctttcttgggaagtagagatgtggcggctttcccaccctgcccacagcaggccctcctgcccagctgctcttgtcagccctctggcctctggatgaggttgagttctccacaacagctcccaagcatcatgggcctcgcagccgggcctgtgccacggctagtgttgtgtgatttaaaatggactcagcaggaagcatattgtctggggattgttgggacaggttttggtgactctgtgcccttgctctctaacttctgagcccacctcccagggtaggcacctgggggcatgcaggtacccacctctttctcttgggtgaggctctggcaaggagatctctctgctcaagcacagcagaatcatggcccctctccatgaattggaacttggtacaggttaagtatccctaatcctgaaatctgaaacacttgtggttccaagcattttggataaggcaaattcaactttcagtctcttttctgggggaaaaaaataataaacctagcctagccaggcgtggtggctcatgcttgtaatcccagcacttcaggaggctgagatgggtggatcacctgaggtcaggagttcaagaccagcctggccaacatgtggaaacctcgcctcaactaaaaatagaaaaaaattagttgggcatggtggtgggcacctgtaatcccagctacttcaggaggctgaggcaggagaattacttgaacccaggaggcggacgttgcagtgagccgagcttgtgccattgcactccagcctgggcgacaagagcaaaactcttcaaaaaacaaaacaaaacaaaaaaaccctggcccttgtttcttccagtttctagaggtatcagctcctagcagcttatgaacacatatgcttgcttggccaggcaaggtggtgtgtgcctgtaatcccagcactttgggaggccaaggcaggtggatcacttgcagtcaggagttcaagaccagcctgtccaacgtggtgaaaccccatctctactaaaaatacaaaaattagccaggggtggtggtgcacgtctgtaatcccagctactcaggaggctgaggcaggagaatcacttgaacccgggaggtggaggttgcaatgagccaatatgacaccgctgcagtccagcctgggccatagagtgagactctgtctcaaaaaaggaaagaaaaataggctgggcacagtgactcatgcctgtaatcccaacactttgggaggccgaggcaggtggatcacgaggtcaggagttcaagaccagcctggccaagatggtaaaacctcgtctctactaaaaatacaaaaattagccaggtgtggtggcaggctcctgtaatcccagttacacagaagactgaggcaggagaatcgcttgaacgcaggaggcagaggttgcaggagctgagatcgcgccattgcactccagcctgggcaacagagtgagactctgtctcaaaaaataataataaaataaatgaacacacatgctgctgagtccgcaggggggcagagcagaggacagcgtgcttttgtgtactgttggaagactggctcctcctgtacagcacctctgagcccttgtgcaccgccctgccacgggcaccatccagtcctggccgtgtgaccacccacagctgactgggcagcaggcacaggccctacccgagcaggccggagttggctcgcatgactccagctgaggctgcctgtgtacatttctccagataccctatggctaattttgttataactgcacagtggctgctgccattttgtattaaatatattgtgaaacaaacctatctggggagaagcaatctacttgccgctgcttcctgtctggatccagcttgtgtccttggagagtggctggcccaggtcctattcctgtcctccagcccgttctttcatgagggacaggaaggtaaaatcagcccttaggagagaggtctcagcctccctttcccagatctcccagtgagttttaaaggaagcagggagcccagagtgctaagttcttacagccagaaggaagcttatagatttctgaaaaccgcccctttgtttttaaaaagatcaacacaatttgactttctcaaggtcaaaacgaactagaatccagatctgctcatggcaaaaatgggggtgttctgagaattccagctttgggccgcactgtacagcagtctggatagagtgtgatctgagaagggaatgggtctgggttgttccaccccttccgagttccaaaaagagggaactggttttcttggttctcagcccagcagcacctatcctggctcttggtcctggcctgcagccaagtgctgttcctagcctgaggcttgagacaggtggggttggctcctcaccaaccccagttccgtcccatcctgagggcaagatcctgggctcataggcagtccctttcacttccttgtcttgctccctgctatgctggagatgaatgtgactaaaagggccatcttgctggcttaatgtgtggctggagagaccagcctggagacaatgtggcaaaatggggcgcttcatccagtctgtctaagccctgtcgacttggggaggtgatttctttcctggttctatatgtgaagcaaaataaatgttttaaaattaaaagcaaaaaaacaaaatgaaaaatgaaacactga

SEQ ID NO: 435744 - DNA, 4329 bp, Homo sapiens
tttccgcagttaggggctgctatttcaacgcagggagataaaaagaaaaaaacacttgctcttctaccccgctaaaaacactcatcctagggagcacgccagcatttgcagcgttcggggcagggccactcggcctgcggccgttgcactggctggaagctggcaggcgatcacggttgattggctcgggtgcggtccaagggcagcaacgccttcggcgggccgcctagggtgattggctgctgcagcccaccccctagccggtttggtgggcggcgaagcctggattggtggagctaagagctggctcagtttcagcgctggctcttcgtgcatggcagagatggcgactgcgactcggctgctggggtggcgtgtggcgagctggaggctgcggccgccgcttgccggcttcgtttcccagcgggcccactcgcttttgcccgtggacgatgcaatcaatgggctaagcgaggagcagaggcagcttcgtcagaccatggctaagttccttcaggagcacctggcccccaaggcccaggagatcgatcgcagcaatgagttcaagaacctgcgagaattttggaagcagctggggaacctgggcgtattgggcatcacagcccctgttcagtatggcggctccggcctgggctacctggagcatgtgctggtgatggaggagatatcccgagcttccggagcagtggggctcagttacggtgcccactccaacctctgcatcaaccagcttgtacgcaatgggaatgaggcccagaaagagaagtatctcccgaagctgatcagtggtgagtacatcggagccctggccatgagtgagcccaatgcaggctctgatgttgtctctatgaagctcaaagcggaaaagaaaggaaatcactacatcctgaatggcaacaagttctggatcactaatggccctgatgctgacgtcctgattgtctatgccaagacagatctggctgctgtgccagcttctcggggcatcacagccttcattgtggagaagggtatgcctggctttagcacctctaagaagctggacaagctggggatgaggggctctaacacctgtgagctaatctttgaagactgcaagattcctgctgccaacatcctgggccatgagaataagggtgtctacgtgctgatgagtgggctggacctggagcggctggtgctggccggggggcctcttgggctcatgcaagcggtcctggaccacaccattccctacctgcacgtgagggaagcctttggccagaagatcggccacttccagttgatgcaggggaagatggctgacatgtacacccgcctcatggcgtgtcggcagtatgtctacaatgtcgccaaggcctgcgatgagggccattgcactgctaaggactgtgcaggtgtgattctttactcagctgagtgtgccacacaggtagccctggacggcattcagtgttttggtggcaatggctacatcaatgactttcccatgggccgctttcttcgagatgccaagctgtatgagataggggctgggaccagcgaggtgaggcggctggtcatcggcagagccttcaatgcagactttcactagtcctgagacccttcgcccccttttcctgcacctagtggcctttcttgggaagtagagatgtggcggctttcccaccctgcccacagcaggccctcctgcccagctgctcttgtcagccctctggcctctggatgaggttgagttctccacaacagctcccaagcatcatgggcctcgcagccgggcctgtgccacggctagtgttgtgtgatttaaaatggactcagcaggaagcatattgtctggggattgttgggacaggttttggtgactctgtgcccttgctctctaacttctgagcccacctcccagggtaggcacctgggggcatgcaggtgcccacctcccagggtaggcacctgggggcatgcaggtacccacctctttctcttgggtgaggctctggcaaggagatctctctgctcaagcacagcagaatcatggcccctctccatgaattggaacttggtacaggttaagtatccctaatcctgaaatctgaaacacttgtggttccaagcattttggataaggcaaattcaactttcagtctcttttctgggggaaaaaaataataaacctagcctagccaggcgtggtggctcatgcttgtaatcccagcacttcaggaggctgagatgggtggatcacctgaggtcaggagttcaagaccagcctggccaacatgtggaaacctcgcctcaactaaaaatagaaaaaaattagttgggcatggtggtgggcacctgtaatcccagctacttcaggaggctgaggcaggagaattacttgaacccaggaggcggacgttgcagtgagccgagcttgtgccattgcactccagcctgggcgacaagagcaaaactcttcaaaaaacaaaacaaaacaaaaaaaccctggcccttgtttcttccagtttctagaggtatcagctcctagcagcttatgaacacatatgcttgcttggccaggcaaggtggtgtgtgcctgtaatcccagcactttgggaggccaaggcaggtggatcacttgcagtcaggagttcaagaccagcctgtccaacgtggtgaaaccccatctctactaaaaatacaaaaattagccaggggtggtggtgcacgtctgtaatcccagctactcaggaggctgaggcaggagaatcacttgaacccgggaggtggaggttgcaatgagccaatatgacaccgctgcagtccagcctgggccatagagtgagactctgtctcaaaaaaggaaagaaaaataggctgggcacagtgactcatgcctgtaatcccaacactttgggaggccgaggcaggtggatcacgaggtcaggagttcaagaccagcctggccaagatggtaaaacctcgtctctactaaaaatacaaaaattagccaggtgtggtggcaggctcctgtaatcccagttacacagaagactgaggcaggagaatcgcttgaacgcaggaggcagaggttgcaggagctgagatcgcgccattgcactccagcctgggcaacagagtgagactctgtctcaaaaaataataataaaataaatgaacacacatgctgctgagtccgcaggggggcagagcagaggacagcgtgcttttgtgtactgttggaagactggctcctcctgtacagcacctctgagcccttgtgcaccgccctgccacgggcaccatccagtcctggccgtgtgaccacccacagctgactgggcagcaggcacaggccctacccgagcaggccggagttggctcgcatgactccagctgaggctgcctgtgtacatttctccagataccctatggctaattttgttataactgcacagtggctgctgccattttgtattaaatatattgtgaaacaaacctatctggggagaagcaatctacttgccgctgcttcctgtctggatccagcttgtgtccttggagagtggctggcccaggtcctattcctgtcctccagcccgttctttcatgagggacaggaaggtaaaatcagcccttaggagagaggtctcagcctccctttcccagatctcccagtgagttttaaaggaagcagggagcccagagtgctaagttcttacagccagaaggaagcttatagatttctgaaaaccgcccctttgtttttaaaaagatcaacacaatttgactttctcaaggtcaaaacgaactagaatccagatctgctcatggcaaaaatgggggtgttctgagaattccagctttgggccgcactgtacagcagtctggatagagtgtgatctgagaagggaatgggtctgggttgttccaccccttccgagttccaaaaagagggaactggttttcttggttctcagcccagcagcacctatcctggctcttggtcctggcctgcagccaagtgctgttcctagcctgaggcttgagacaggtggggttggctcctcaccaaccccagttccgtcccatcctgagggcaagatcctgggctcataggcagtccctttcacttccttgtcttgctccctgctatgctggagatgaatgtgactaaaagggccatcttgctggcttaatgtgtggctggagagaccagcctggaccccatgtgcacacatgcagcgcgtctttcgatcattccccgtcctgccgacttggcgagcgattcattcctgcttcaggaccctctcggtaccgagc

SEQ ID NO: 435745 - DNA, 3930 bp, Homo sapiens
tttccgcagttaggggctgctatttcaacgcagggagataaaaagaaaaaaacacttgctcttctaccccgctaaaaacactcatcctagggagcacgccagcatttgcagcgttcggggcagggccactcggcctgcggccgttgcactggctggaagctggcaggcgatcacggttgattggctcgggtgcggtccaagggcagcaacgccttcggcgggccgcctagggtgattggctgctgcagcccaccccctagccggtttggtgggcggcgaagcctggattggtggagctaagagctggctcagtttcagcgctggctcttcgtgcatggcagagatggcgactgcgactcggctgctggggtggcgtgtggcgagctggaggctgcggccgccgcttgccggcttcgtttcccagcgggcccactcgcttttgcccgtggacgatgcaatcaatgggctaagcgaggagcagaggcagcttcgtcagaccatggctaagttccttcaggagcacctggcccccaaggcccaggagatcgatcgcagcaatgagttcaagaacctgcgagaattttggaagcagctggggaacctgggcgtattgggcatcacagcccctgttcagtatggcggctccggcctgggctacctggagcatgtgctggtgatggaggagatatcccgagcttccggagcagtggggctcagttacggtgcccactccaacctctgcatcaaccagcttgtacgcaatgggaatgaggcccagaaagagaagtatctcccgaagctgatcagtggtgagtacatcggagccctggccatgagtgagcccaatgcaggctctgatgttgtctctatgaagctcaaagcggaaaagaaaggaaatcactacatcctgaatggcaacaagttctggatcactaatggccctgatgctgacgtcctgattgtctatgccaagacagatctggctgctgtgccagcttctcggggcatcacagccttcattgtggagaagggtatgcctggctttagcacctctaagaagctggacaagctggggatgaggggctctaacacctgtgagctaatctttgaagactgcaagattcctgctgccaacatcctgggccatgagaataagggtgtctacgtgctgatgagtgggctggacctggagcggctggtgctggccggggggcctcttgggctcatgcaagcggtcctggaccacaccattccctacctgcacgtgagggaagcctttggccagaagatcggccacttccagttgatgcaggggaagatggctgacatgtacacccgcctcatggcgtgtcggcagtatgtctacaatgtcgccaaggcctgcgatgagggccattgcactgctaaggactgtgcaggtgtgattctttactcagctgagtgtgcccttgctctctaacttctgagcccacctcccagggtaggcacctgggggcatgcaggtgcccacctcccagggtaggcacctgggggcatgcaggtacccacctctttctcttgggtgaggctctggcaaggagatctctctgctcaagcacagcagaatcatggcccctctccatgaattggaacttggtacaggttaagtatccctaatcctgaaatctgaaacacttgtggttccaagcattttggataaggcaaattcaactttcagtctcttttctgggggaaaaaaataataaacctagcctagccaggcgtggtggctcatgcttgtaatcccagcacttcaggaggctgagatgggtggatcacctgaggtcaggagttcaagaccagcctggccaacatgtggaaacctcgcctcaactaaaaatagaaaaaaattagttgggcatggtggtgggcacctgtaatcccagctacttcaggaggctgaggcaggagaattacttgaacccaggaggcggacgttgcagtgagccgagcttgtgccattgcactccagcctgggcgacaagagcaaaactcttcaaaaaacaaaacaaaacaaaaaaaccctggcccttgtttcttccagtttctagaggtatcagctcctagcagcttatgaacacatatgcttgcttggccaggcaaggtggtgtgtgcctgtaatcccagcactttgggaggccaaggcaggtggatcacttgcagtcaggagttcaagaccagcctgtccaacgtggtgaaaccccatctctactaaaaatacaaaaattagccaggggtggtggtgcacgtctgtaatcccagctactcaggaggctgaggcaggagaatcacttgaacccgggaggtggaggttgcaatgagccaatatgacaccgctgcagtccagcctgggccatagagtgagactctgtctcaaaaaaggaaagaaaaataggctgggcacagtgactcatgcctgtaatcccaacactttgggaggccgaggcaggtggatcacgaggtcaggagttcaagaccagcctggccaagatggtaaaacctcgtctctactaaaaatacaaaaattagccaggtgtggtggcaggctcctgtaatcccagttacacagaagactgaggcaggagaatcgcttgaacgcaggaggcagaggttgcaggagctgagatcgcgccattgcactccagcctgggcaacagagtgagactctgtctcaaaaaataataataaaataaatgaacacacatgctgctgagtccgcaggggggcagagcagaggacagcgtgcttttgtgtactgttggaagactggctcctcctgtacagcacctctgagcccttgtgcaccgccctgccacgggcaccatccagtcctggccgtgtgaccacccacagctgactgggcagcaggcacaggccctacccgagcaggccggagttggctcgcatgactccagctgaggctgcctgtgtacatttctccagataccctatggctaattttgttataactgcacagtggctgctgccattttgtattaaatatattgtgaaacaaacctatctggggagaagcaatctacttgccgctgcttcctgtctggatccagcttgtgtccttggagagtggctggcccaggtcctattcctgtcctccagcccgttctttcatgagggacaggaaggtaaaatcagcccttaggagagaggtctcagcctccctttcccagatctcccagtgagttttaaaggaagcagggagcccagagtgctaagttcttacagccagaaggaagcttatagatttctgaaaaccgcccctttgtttttaaaaagatcaacacaatttgactttctcaaggtcaaaacgaactagaatccagatctgctcatggcaaaaatgggggtgttctgagaattccagctttgggccgcactgtacagcagtctggatagagtgtgatctgagaagggaatgggtctgggttgttccaccccttccgagttccaaaaagagggaactggttttcttggttctcagcccagcagcacctatcctggctcttggtcctggcctgcagccaagtgctgttcctagcctgaggcttgagacaggtggggttggctcctcaccaaccccagttccgtcccatcctgagggcaagatcctgggctcataggcagtccctttcacttccttgtcttgctccctgctatgctggagatgaatgtgactaaaagggccatcttgctggcttaatgtgtggctggagagaccagcctggagacaatgtggcaaaatggggcgcttcatccagtctgtctaagccctgtcgacttggggaggtgatttctttcctggttctatatgtgaagcaaaataaatgttttaaaattaaaagcaaaaaaacaaaatgaaaaatgaaacactga

SEQ ID NO: 435746 - DNA, 4883 bp, Homo sapiens
tttccgcagttaggggctgctatttcaacgcagggagataaaaagaaaaaaacacttgctcttctaccccgctaaaaacactcatcctagggagcacgccagcatttgcagcgttcggggcagggccactcggcctgcggccgttgcactggctggaagctggcaggcgatcacggttgattggctcgggtgcggtccaagggcagcaacgccttcggcgggccgcctagggtgattggctgctgcagcccaccccctagccggtttggtgggcggcgaagcctggattggtggagctaagagctggctcagtttcagcgctggctcttcgtgcatggcagagatggcgactgcgactcggctgctggggtggcgtgtggcgagctggaggctgcggccgccgcttgccggcttcgtttcccagcgggcccactcgcttttgcccgtggacgatgcaatcaatgggctaagcgaggagcagaggcagcttcgtcagaccatggctaagttccttcaggagcacctggcccccaaggcccaggagatcgatcgcagcaatgagttcaagaacctgcgagtgagttgggaggcccgggcagtcgggggcagtcagggagtggggctgagctgcactgctgcctggaagagctcacacagttttctggaattttggaagcagctggggaacctgggcgtattgggcatcacagcccctgttcagtatggcggctccggcctgggctacctggagcatgtgctggtgatggaggagatatcccgagcttccggagcagtggggctcagttacggtgcccactccaacctctgcatcaaccagcttgtacgcaatgggaatgaggcccagaaagagaagtatctcccgaagctgatcagtggtgagtacatcggagccctggccatgagtgagcccaatgcaggctctgatgttgtctctatgaagctcaaagcggaaaagaaaggaaatcactacatcctgaatggcaacaagttctggatcactaatggccctgatgctgacgtcctgattgtctatgccaagacagatctggctgctgtgccagcttctcggggcatcacagccttcattgtggagaagggtatgcctggctttagcacctctaagaagctggacaagctggggatgaggggctctaacacctgtgagctaatctttgaagactgcaagattcctgctgccaacatcctgggccatgagaataagggtgtctacgtgctgatgagtgggctggacctggagcggctggtgctggccggggggcctcttgggtaagtgtgagaggcttgagggaagctgggctctgtcggcctcctcggcaggtgacccaccatgagcagcagcagccttccccttgcggggccaaagggagctgcctcttggccctgctctctcctgggagatgaaaggaacctcctcttcccatgttgaatttcttcccacagtggggaaatatcattaagtaacagacaaaaggcctgaggagcagggtggcttactcggctgtgaaacgacacctgggctgtcacgcccctgcacctctggccagtcagtgccgtaactgtggcaagactttctgaagttgcttttctcctccctgggattctggccttcccacgctagcattttgccaccacacccggtggtgggatgaggaggtgcccacggggcctttctcctttctgacaggctcatgcaagcggtcctggaccacaccattccctacctgcacgtgagggaagcctttggccagaagatcggccacttccagttgatgcaggggaagatggctgacatgtacacccgcctcatggcgtgtcggcagtatgtctacaatgtcgccaaggcctgcgatgagggccattgcactgctaaggactgtgcaggtgtgattctttactcagctgagtgtgccacacaggtagccctggacggcattcagtgttttggtggcaatggctacatcaatgactttcccatgggccgctttcttcgagatgccaagctgtatgagataggggctgggaccagcgaggtgaggcggctggtcatcggcagagccttcaatgcagactttcactagtcctgagacccttcgcccccttttcctgcacctagtggcctttcttgggaagtagagatgtggcggctttcccaccctgcccacagcaggccctcctgcccagctgctcttgtcagccctctggcctctggatgaggttgagttctccacaacagctcccaagcatcatgggcctcgcagccgggcctgtgccacggctagtgttgtgtgatttaaaatggactcagcaggaagcatattgtctggggattgttgggacaggttttggtgactctgtgcccttgctctctaacttctgagcccacctcccagggtaggcacctgggggcatgcaggtgcccacctcccagggtaggcacctgggggcatgcaggtacccacctctttctcttgggtgaggctctggcaaggagatctctctgctcaagcacagcagaatcatggcccctctccatgaattggaacttggtacaggttaagtatccctaatcctgaaatctgaaacacttgtggttccaagcattttggataaggcaaattcaactttcagtctcttttctgggggaaaaaaataataaacctagcctagccaggcgtggtggctcatgcttgtaatcccagcacttcaggaggctgagatgggtggatcacctgaggtcaggagttcaagaccagcctggccaacatgtggaaacctcgcctcaactaaaaatagaaaaaaattagttgggcatggtggtgggcacctgtaatcccagctacttcaggaggctgaggcaggagaattacttgaacccaggaggcggacgttgcagtgagccgagcttgtgccattgcactccagcctgggcgacaagagcaaaactcttcaaaaaacaaaacaaaacaaaaaaaccctggcccttgtttcttccagtttctagaggtatcagctcctagcagcttatgaacacatatgcttgcttggccaggcaaggtggtgtgtgcctgtaatcccagcactttgggaggccaaggcaggtggatcacttgcagtcaggagttcaagaccagcctgtccaacgtggtgaaaccccatctctactaaaaatacaaaaattagccaggggtggtggtgcacgtctgtaatcccagctactcaggaggctgaggcaggagaatcacttgaacccgggaggtggaggttgcaatgagccaatatgacaccgctgcagtccagcctgggccatagagtgagactctgtctcaaaaaaggaaagaaaaataggctgggcacagtgactcatgcctgtaatcccaacactttgggaggccgaggcaggtggatcacgaggtcaggagttcaagaccagcctggccaagatggtaaaacctcgtctctactaaaaatacaaaaattagccaggtgtggtggcaggctcctgtaatcccagttacacagaagactgaggcaggagaatcgcttgaacgcaggaggcagaggttgcaggagctgagatcgcgccattgcactccagcctgggcaacagagtgagactctgtctcaaaaaataataataaaataaatgaacacacatgctgctgagtccgcaggggggcagagcagaggacagcgtgcttttgtgtactgttggaagactggctcctcctgtacagcacctctgagcccttgtgcaccgccctgccacgggcaccatccagtcctggccgtgtgaccacccacagctgactgggcagcaggcacaggccctacccgagcaggccggagttggctcgcatgactccagctgaggctgcctgtgtacatttctccagataccctatggctaattttgttataactgcacagtggctgctgccattttgtattaaatatattgtgaaacaaacctatctggggagaagcaatctacttgccgctgcttcctgtctggatccagcttgtgtccttggagagtggctggcccaggtcctattcctgtcctccagcccgttctttcatgagggacaggaaggtaaaatcagcccttaggagagaggtctcagcctccctttcccagatctcccagtgagttttaaaggaagcagggagcccagagtgctaagttcttacagccagaaggaagcttatagatttctgaaaaccgcccctttgtttttaaaaagatcaacacaatttgactttctcaaggtcaaaacgaactagaatccagatctgctcatggcaaaaatgggggtgttctgagaattccagctttgggccgcactgtacagcagtctggatagagtgtgatctgagaagggaatgggtctgggttgttccaccccttccgagttccaaaaagagggaactggttttcttggttctcagcccagcagcacctatcctggctcttggtcctggcctgcagccaagtgctgttcctagcctgaggcttgagacaggtggggttggctcctcaccaaccccagttccgtcccatcctgagggcaagatcctgggctcataggcagtccctttcacttccttgtcttgctccctgctatgctggagatgaatgtgactaaaagggccatcttgctggcttaatgtgtggctggagagaccagcctggagacaatgtggcaaaatggggcgcttcatccagtctgtctaagccctgtcgacttggggaggtgatttctttcctggttctatatgtgaagcaaaataaatgttttaaaattaaaagcaaaaaaacaaaatgaaaaatgaaacactga

SEQ ID NO: 435747 - DNA, 5175 bp, Homo sapiens
tttccgcagttaggggctgctatttcaacgcagggagataaaaagaaaaaaacacttgctcttctaccccgctaaaaacactcatcctagggagcacgccagcatttgcagcgttcggggcagggccactcggcctgcggccgttgcactggctggaagctggcaggcgatcacggttgattggctcgggtgcggtccaagggcagcaacgccttcggcgggccgcctagggtgattggctgctgcagcccaccccctagccggtttggtgggcggcgaagcctggattggtggagctaagagctggctcagtttcagcgctggctcttcgtgcatggcagagatggcgactgcgactcggctgctggggtggcgtgtggcgagctggaggctgcggccgccgcttgccggcttcgtttcccagcgggcccactcgcttttgcccgtggacgatgcaatcaatgggctaagcgaggagcagaggcaggtgaggagactgacccccttcctggccccaaggcctccttcctgcctggtccccaaggcctccttcctgcctggtccccatcggcccagcgcccacccagccttggcttttgcccgtgggccgttgggagcgccagcgcgggggcgggacgcggggcctccgacctcgggtccagtcctctgacctcggcctcacgtctgtggagtgaagatttgagaccgtgggacagtactgctggaagtagagaggaggagtcgaggctgggagagctcctgagagactgatggtgttttggtggaggattggccaggctacctaccgcttgtggcacaagggccctcaatctgtatgtagttcacttacacctgaacaggctgagcttcgtcagaccatggctaagttccttcaggagcacctggcccccaaggcccaggagatcgatcgcagcaatgagttcaagaacctgcgagaattttggaagcagctggggaacctgggcgtattgggcatcacagcccctgttcagtatggcggctccggcctgggctacctggagcatgtgctggtgatggaggagatatcccgagcttccggagcagtggggctcagttacggtgcccactccaacctctgcatcaaccagcttgtacgcaatgggaatgaggcccagaaagagaagtatctcccgaagctgatcagtggtgagtacatcggagccctggccatgagtgagcccaatgcaggctctgatgttgtctctatgaagctcaaagcggaaaagaaaggaaatcactacatcctgaatggcaacaagttctggatcactaatggccctgatgctgacgtcctgattgtctatgccaagacagatctggctgctgtgccagcttctcggggcatcacagccttcattgtggagaagggtatgcctggctttagcacctctaagaagctggacaagctggggatgaggggctctaacacctgtgagctaatctttgaagactgcaagattcctgctgccaacatcctgggccatgagaataagggtgtctacgtgctgatgagtgggctggacctggagcggctggtgctggccggggggcctcttgggtaagtgtgagaggcttgagggaagctgggctctgtcggcctcctcggcaggtgacccaccatgagcagcagcagccttccccttgcggggccaaagggagctgcctcttggccctgctctctcctgggagatgaaaggaacctcctcttcccatgttgaatttcttcccacagtggggaaatatcattaagtaacagacaaaaggcctgaggagcagggtggcttactcggctgtgaaacgacacctgggctgtcacgcccctgcacctctggccagtcagtgccgtaactgtggcaagactttctgaagttgcttttctcctccctgggattctggccttcccacgctagcattttgccaccacacccggtggtgggatgaggaggtgcccacggggcctttctcctttctgacaggctcatgcaagcggtcctggaccacaccattccctacctgcacgtgagggaagcctttggccagaagatcggccacttccagttgatgcaggggaagatggctgacatgtacacccgcctcatggcgtgtcggcagtatgtctacaatgtcgccaaggcctgcgatgagggccattgcactgctaaggactgtgcaggtgtgattctttactcagctgagtgtgccacacaggtagccctggacggcattcagtgttttggtggcaatggctacatcaatgactttcccatgggccgctttcttcgagatgccaagctgtatgagataggggctgggaccagcgaggtgaggcggctggtcatcggcagagccttcaatgcagactttcactagtcctgagacccttcgcccccttttcctgcacctagtggcctttcttgggaagtagagatgtggcggctttcccaccctgcccacagcaggccctcctgcccagctgctcttgtcagccctctggcctctggatgaggttgagttctccacaacagctcccaagcatcatgggcctcgcagccgggcctgtgccacggctagtgttgtgtgatttaaaatggactcagcaggaagcatattgtctggggattgttgggacaggttttggtgactctgtgcccttgctctctaacttctgagcccacctcccagggtaggcacctgggggcatgcaggtgcccacctcccagggtaggcacctgggggcatgcaggtacccacctctttctcttgggtgaggctctggcaaggagatctctctgctcaagcacagcagaatcatggcccctctccatgaattggaacttggtacaggttaagtatccctaatcctgaaatctgaaacacttgtggttccaagcattttggataaggcaaattcaactttcagtctcttttctgggggaaaaaaataataaacctagcctagccaggcgtggtggctcatgcttgtaatcccagcacttcaggaggctgagatgggtggatcacctgaggtcaggagttcaagaccagcctggccaacatgtggaaacctcgcctcaactaaaaatagaaaaaaattagttgggcatggtggtgggcacctgtaatcccagctacttcaggaggctgaggcaggagaattacttgaacccaggaggcggacgttgcagtgagccgagcttgtgccattgcactccagcctgggcgacaagagcaaaactcttcaaaaaacaaaacaaaacaaaaaaaccctggcccttgtttcttccagtttctagaggtatcagctcctagcagcttatgaacacatatgcttgcttggccaggcaaggtggtgtgtgcctgtaatcccagcactttgggaggccaaggcaggtggatcacttgcagtcaggagttcaagaccagcctgtccaacgtggtgaaaccccatctctactaaaaatacaaaaattagccaggggtggtggtgcacgtctgtaatcccagctactcaggaggctgaggcaggagaatcacttgaacccgggaggtggaggttgcaatgagccaatatgacaccgctgcagtccagcctgggccatagagtgagactctgtctcaaaaaaggaaagaaaaataggctgggcacagtgactcatgcctgtaatcccaacactttgggaggccgaggcaggtggatcacgaggtcaggagttcaagaccagcctggccaagatggtaaaacctcgtctctactaaaaatacaaaaattagccaggtgtggtggcaggctcctgtaatcccagttacacagaagactgaggcaggagaatcgcttgaacgcaggaggcagaggttgcaggagctgagatcgcgccattgcactccagcctgggcaacagagtgagactctgtctcaaaaaataataataaaataaatgaacacacatgctgctgagtccgcaggggggcagagcagaggacagcgtgcttttgtgtactgttggaagactggctcctcctgtacagcacctctgagcccttgtgcaccgccctgccacgggcaccatccagtcctggccgtgtgaccacccacagctgactgggcagcaggcacaggccctacccgagcaggccggagttggctcgcatgactccagctgaggctgcctgtgtacatttctccagataccctatggctaattttgttataactgcacagtggctgctgccattttgtattaaatatattgtgaaacaaacctatctggggagaagcaatctacttgccgctgcttcctgtctggatccagcttgtgtccttggagagtggctggcccaggtcctattcctgtcctccagcccgttctttcatgagggacaggaaggtaaaatcagcccttaggagagaggtctcagcctccctttcccagatctcccagtgagttttaaaggaagcagggagcccagagtgctaagttcttacagccagaaggaagcttatagatttctgaaaaccgcccctttgtttttaaaaagatcaacacaatttgactttctcaaggtcaaaacgaactagaatccagatctgctcatggcaaaaatgggggtgttctgagaattccagctttgggccgcactgtacagcagtctggatagagtgtgatctgagaagggaatgggtctgggttgttccaccccttccgagttccaaaaagagggaactggttttcttggttctcagcccagcagcacctatcctggctcttggtcctggcctgcagccaagtgctgttcctagcctgaggcttgagacaggtggggttggctcctcaccaaccccagttccgtcccatcctgagggcaagatcctgggctcataggcagtccctttcacttccttgtcttgctccctgctatgctggagatgaatgtgactaaaagggccatcttgctggcttaatgtgtggctggagagaccagcctggagacaatgtggcaaaatggggcgcttcatccagtctgtctaagccctgtcgacttggggaggtgatttctttcctggttctatatgtgaagcaaaataaatgttttaaaattaaaagcaaaaaaacaaaatgaaaaatgaaacactga

SEQ ID NO: 435748 - DNA, 3328 bp, Homo sapiens
tttccgcagttaggggctgctatttcaacgcagggagataaaaagaaaaaaacacttgctcttctaccccgctaaaaacactcatcctagggagcacgccagcatttgcagcgttcggggcagggccactcggcctgcggccgttgcactggctggaagctggcaggcgatcacggttgattggctcgggtgcggtccaagggcagcaacgccttcggcgggccgcctagggtgattggctgctgcagcccaccccctagccggtttggtgggcggcgaagcctggattggtggagctaagagctggctcagtttcagcgctggctcttcgtgcatggcagagatggcgactgcgactcggctgctggggtggcgtgtggcgagctggaggctgcggccgccgcttgccggcttcgtttcccagcgggcccactcgcttttgcccgtggacgatgcaatcaatgggctaagcgaggagcagaggcagcttcgtcagaccatggctaagttccttcaggagcacctggcccccaaggcccaggagatcgatcgcagcaatgagttcaagaacctgcgagaattttggaagcagctggggaacctgggcgtattgggcatcacagcccctgttcagtatggcggctccggcctgggctacctggagcatgtgctggtgatggaggagatatcccgagcttccggagcagtggggctcagttacggtgcccactccaacctctgcatcaaccagcttgtacgcaatgggaatgaggcccagaaagagaagtatctcccgaagctgatcagtggtgagtacatcggagccctggccatgagtgagcccaatgcaggctctgatgttgtctctatgaagctcaaagcggaaaagaaaggaaatcactacatcctgaatggcaacaagttctggatcactaatggccctgatgctgacgtcctgattgtctatgccaagacagatctggctgctgtgccagcttctcggggcatcacagccttcattgtggagaagggtatgcctggctttagcacctctaagaagctggacaagctggggatgaggggctctaacacctgtgagctaatctttgaagactgcaagattcctgctgccaacatcctgggccatgagaataagggtgtctacgtgctgatgagtgggctggacctggagcggctggtgctggccggggggcctcttgggctcatgcaagcggtcctggaccacaccattccctacctgcacgtgagggaagcctttggccagaagatcggccacttccagttgatgcaggggaagatggctgacatgtacacccgcctcatggcgtgtcggcagtatgtctacaatgtcgccaaggcctgcgatgagggccattgcactgctaaggactgtgcaggtgtgattctttactcagctgagtgtgccacacaggtagccctggacggcattcagtgttttgtttctagaggtatcagctcctagcagcttatgaacacatatgcttgcttggccaggcaaggtggtgtgtgcctgtaatcccagcactttgggaggccaaggcaggtggatcacttgcagtcaggagttcaagaccagcctgtccaacgtggtgaaaccccatctctactaaaaatacaaaaattagccaggggtggtggtgcacgtctgtaatcccagctactcaggaggctgaggcaggagaatcacttgaacccgggaggtggaggttgcaatgagccaatatgacaccgctgcagtccagcctgggccatagagtgagactctgtctcaaaaaaggaaagaaaaataggctgggcacagtgactcatgcctgtaatcccaacactttgggaggccgaggcaggtggatcacgaggtcaggagttcaagaccagcctggccaagatggtaaaacctcgtctctactaaaaatacaaaaattagccaggtgtggtggcaggctcctgtaatcccagttacacagaagactgaggcaggagaatcgcttgaacgcaggaggcagaggttgcaggagctgagatcgcgccattgcactccagcctgggcaacagagtgagactctgtctcaaaaaataataataaaataaatgaacacacatgctgctgagtccgcaggggggcagagcagaggacagcgtgcttttgtgtactgttggaagactggctcctcctgtacagcacctctgagcccttgtgcaccgccctgccacgggcaccatccagtcctggccgtgtgaccacccacagctgactgggcagcaggcacaggccctacccgagcaggccggagttggctcgcatgactccagctgaggctgcctgtgtacatttctccagataccctatggctaattttgttataactgcacagtggctgctgccattttgtattaaatatattgtgaaacaaacctatctggggagaagcaatctacttgccgctgcttcctgtctggatccagcttgtgtccttggagagtggctggcccaggtcctattcctgtcctccagcccgttctttcatgagggacaggaaggtaaaatcagcccttaggagagaggtctcagcctccctttcccagatctcccagtgagttttaaaggaagcagggagcccagagtgctaagttcttacagccagaaggaagcttatagatttctgaaaaccgcccctttgtttttaaaaagatcaacacaatttgactttctcaaggtcaaaacgaactagaatccagatctgctcatggcaaaaatgggggtgttctgagaattccagctttgggccgcactgtacagcagtctggatagagtgtgatctgagaagggaatgggtctgggttgttccaccccttccgagttccaaaaagagggaactggttttcttggttctcagcccagcagcacctatcctggctcttggtcctggcctgcagccaagtgctgttcctagcctgaggcttgagacaggtggggttggctcctcaccaaccccagttccgtcccatcctgagggcaagatcctgggctcataggcagtccctttcacttccttgtcttgctccctgctatgctggagatgaatgtgactaaaagggccatcttgctggcttaatgtgtggctggagagaccagcctggagacaatgtggcaaaatggggcgcttcatccagtctgtctaagccctgtcgacttggggaggtgatttctttcctggttctatatgtgaagcaaaataaatgttttaaaattaaaagcaaaaaaacaaaatgaaaaatgaaacactga

SEQ ID NO: 435749 - DNA, 4706 bp, Homo sapiens
tttccgcagttaggggctgctatttcaacgcagggagataaaaagaaaaaaacacttgctcttctaccccgctaaaaacactcatcctagggagcacgccagcatttgcagcgttcggggcagggccactcggcctgcggccgttgcactggctggaagctggcaggcgatcacggttgattggctcgggtgcggtccaagggcagcaacgccttcggcgggccgcctagggtgattggctgctgcagcccaccccctagccggtttggtgggcggcgaagcctggattggtggagctaagagctggctcagtttcagcgctggctcttcgtgcatggcagagatggcgactgcgactcggctgctggggtggcgtgtggcgagctggaggctgcggccgccgcttgccggcttcgtttcccagcgggcccactcgcttttgcccgtggacgatgcaatcaatgggctaagcgaggagcagaggcaggaattttggaagcagctggggaacctgggcgtattgggcatcacagcccctgttcagtatggcggctccggcctgggctacctggagcatgtgctggtgatggaggagatatcccgagcttccggagcagtggggctcagttacggtgcccactccaacctctgcatcaaccagcttgtacgcaatgggaatgaggcccagaaagagaagtatctcccgaagctgatcagtggtgagtacatcggagccctggccatgagtgagcccaatgcaggctctgatgttgtctctatgaagctcaaagcggaaaagaaaggaaatcactacatcctgaatggcaacaagttctggatcactaatggccctgatgctgacgtcctgattgtctatgccaagacagatctggctgctgtgccagcttctcggggcatcacagccttcattgtggagaagggtatgcctggctttagcacctctaagaagctggacaagctggggatgaggggctctaacacctgtgagctaatctttgaagactgcaagattcctgctgccaacatcctgggccatgagaataagggtgtctacgtgctgatgagtgggctggacctggagcggctggtgctggccggggggcctcttgggtaagtgtgagaggcttgagggaagctgggctctgtcggcctcctcggcaggtgacccaccatgagcagcagcagccttccccttgcggggccaaagggagctgcctcttggccctgctctctcctgggagatgaaaggaacctcctcttcccatgttgaatttcttcccacagtggggaaatatcattaagtaacagacaaaaggcctgaggagcagggtggcttactcggctgtgaaacgacacctgggctgtcacgcccctgcacctctggccagtcagtgccgtaactgtggcaagactttctgaagttgcttttctcctccctgggattctggccttcccacgctagcattttgccaccacacccggtggtgggatgaggaggtgcccacggggcctttctcctttctgacaggctcatgcaagcggtcctggaccacaccattccctacctgcacgtgagggaagcctttggccagaagatcggccacttccagttgatgcaggggaagatggctgacatgtacacccgcctcatggcgtgtcggcagtatgtctacaatgtcgccaaggcctgcgatgagggccattgcactgctaaggactgtgcaggtgtgattctttactcagctgagtgtgccacacaggtagccctggacggcattcagtgttttggtggcaatggctacatcaatgactttcccatgggccgctttcttcgagatgccaagctgtatgagataggggctgggaccagcgaggtgaggcggctggtcatcggcagagccttcaatgcagactttcactagtcctgagacccttcgcccccttttcctgcacctagtggcctttcttgggaagtagagatgtggcggctttcccaccctgcccacagcaggccctcctgcccagctgctcttgtcagccctctggcctctggatgaggttgagttctccacaacagctcccaagcatcatgggcctcgcagccgggcctgtgccacggctagtgttgtgtgatttaaaatggactcagcaggaagcatattgtctggggattgttgggacaggttttggtgactctgtgcccttgctctctaacttctgagcccacctcccagggtaggcacctgggggcatgcaggtgcccacctcccagggtaggcacctgggggcatgcaggtacccacctctttctcttgggtgaggctctggcaaggagatctctctgctcaagcacagcagaatcatggcccctctccatgaattggaacttggtacaggttaagtatccctaatcctgaaatctgaaacacttgtggttccaagcattttggataaggcaaattcaactttcagtctcttttctgggggaaaaaaataataaacctagcctagccaggcgtggtggctcatgcttgtaatcccagcacttcaggaggctgagatgggtggatcacctgaggtcaggagttcaagaccagcctggccaacatgtggaaacctcgcctcaactaaaaatagaaaaaaattagttgggcatggtggtgggcacctgtaatcccagctacttcaggaggctgaggcaggagaattacttgaacccaggaggcggacgttgcagtgagccgagcttgtgccattgcactccagcctgggcgacaagagcaaaactcttcaaaaaacaaaacaaaacaaaaaaaccctggcccttgtttcttccagtttctagaggtatcagctcctagcagcttatgaacacatatgcttgcttggccaggcaaggtggtgtgtgcctgtaatcccagcactttgggaggccaaggcaggtggatcacttgcagtcaggagttcaagaccagcctgtccaacgtggtgaaaccccatctctactaaaaatacaaaaattagccaggggtggtggtgcacgtctgtaatcccagctactcaggaggctgaggcaggagaatcacttgaacccgggaggtggaggttgcaatgagccaatatgacaccgctgcagtccagcctgggccatagagtgagactctgtctcaaaaaaggaaagaaaaataggctgggcacagtgactcatgcctgtaatcccaacactttgggaggccgaggcaggtggatcacgaggtcaggagttcaagaccagcctggccaagatggtaaaacctcgtctctactaaaaatacaaaaattagccaggtgtggtggcaggctcctgtaatcccagttacacagaagactgaggcaggagaatcgcttgaacgcaggaggcagaggttgcaggagctgagatcgcgccattgcactccagcctgggcaacagagtgagactctgtctcaaaaaataataataaaataaatgaacacacatgctgctgagtccgcaggggggcagagcagaggacagcgtgcttttgtgtactgttggaagactggctcctcctgtacagcacctctgagcccttgtgcaccgccctgccacgggcaccatccagtcctggccgtgtgaccacccacagctgactgggcagcaggcacaggccctacccgagcaggccggagttggctcgcatgactccagctgaggctgcctgtgtacatttctccagataccctatggctaattttgttataactgcacagtggctgctgccattttgtattaaatatattgtgaaacaaacctatctggggagaagcaatctacttgccgctgcttcctgtctggatccagcttgtgtccttggagagtggctggcccaggtcctattcctgtcctccagcccgttctttcatgagggacaggaaggtaaaatcagcccttaggagagaggtctcagcctccctttcccagatctcccagtgagttttaaaggaagcagggagcccagagtgctaagttcttacagccagaaggaagcttatagatttctgaaaaccgcccctttgtttttaaaaagatcaacacaatttgactttctcaaggtcaaaacgaactagaatccagatctgctcatggcaaaaatgggggtgttctgagaattccagctttgggccgcactgtacagcagtctggatagagtgtgatctgagaagggaatgggtctgggttgttccaccccttccgagttccaaaaagagggaactggttttcttggttctcagcccagcagcacctatcctggctcttggtcctggcctgcagccaagtgctgttcctagcctgaggcttgagacaggtggggttggctcctcaccaaccccagttccgtcccatcctgagggcaagatcctgggctcataggcagtccctttcacttccttgtcttgctccctgctatgctggagatgaatgtgactaaaagggccatcttgctggcttaatgtgtggctggagagaccagcctggagacaatgtggcaaaatggggcgcttcatccagtctgtctaagccctgtcgacttggggaggtgatttctttcctggttctatatgtgaagcaaaataaatgttttaaaattaaaagcaaaaaaacaaaatgaaaaatgaaacactga

SEQ ID NO: 435750 - DNA, 3499 bp, Homo sapiens
tttccgcagttaggggctgctatttcaacgcagggagataaaaagaaaaaaacacttgctcttctaccccgctaaaaacactcatcctagggagcacgccagcatttgcagcgttcggggcagggccactcggcctgcggccgttgcactggctggaagctggcaggcgatcacggttgattggctcgggtgcggtccaagggcagcaacgccttcggcgggccgcctagggtgattggctgctgcagcccaccccctagccggtttggtgggcggcgaagcctggattggtggagctaagagctggctcagtttcagcgctggctcttcgtgcatggcagagatggcgactgcgactcggctgctggggtggcgtgtggcgagctggaggctgcggccgccgcttgccggcttcgtttcccagcgggcccactcgcttttgcccgtggacgatgcaatcaatgggctaagcgaggagcagaggcagcttcgtcagaccatggctaagttccttcaggagcacctggcccccaaggcccaggagatcgatcgcagcaatgagttcaagaacctgcgagaattttggaagcagctggggaacctgggcgtattgggcatcacagcccctgttcagtatggcggctccggcctgggctacctggagcatgtgctggtgatggaggagatatcccgagcttccggagcagtggggctcagttacggtgcccactccaacctctgcatcaaccagcttgtacgcaatgggaatgaggcccagaaagagaagtatctcccgaagctgatcagtggtgagtacatcggagccctggccatgagtgagcccaatgcaggctctgatgttgtctctatgaagctcaaagcggaaaagaaaggaaatcactacatcctgaatggcaacaagttctggatcactaatggccctgatgctgacgtcctgattgtctatgccaagacagatctggctgctgtgccagcttctcggggcatcacagccttcattgtggagaagggtatgcctggctttagcacctctaagaagctggacaagctggggatgaggggctctaacacctgtgagctaatctttgaagactgcaagattcctgctgccaacatcctgggccatgagaataagggtgtctacgtgctgatgagtgggctggacctggagcggctggtgctggccggggggcctcttgggctcatgcaagcggtcctggaccacaccattccctacctgcacgtgagggaagcctttggccagaagatcggccacttccagttgatgcaggggaagatggctgacatgtacacccgcctcatggcgtgtcggcagtatgtctacaatgtcgccaaggcctgcgatgagggccattgcactgctaaggactgtgcaggtgtgattctttactcagctgagtgtgccacacaggtagccctggacggcattcagtgttttggtggcaatggctacatcaatgactttcccatgggccgctttcttcgagatgccaagctgtatgagataggggctgggaccagcgaggtgaggcggctggtcatcggcagagccttcaatgcagactttcactagtcctgagacccttcgcccccttttcctgcacctagtggcctttcttgggaagtagagatgtggcggctttcccaccctgcccacagcaggccctcctgcccagctgctcttgtcagccctctggcctctggatgaggttgagttctccacaacagctcccaagcatcatgggcctcgcagccgggcctgtgccacggctagtgttgtgtgatttaaaatggactcagcaggaagcatattgtctggggattgttgggacaggttttggtgactctgtgcccttgctctctaacttctgagcccacctcccagggtaggcacctgggggcatgcaggtgcccacctcccagggtaggcacctgggggcatgcaggtacccacctctttctcttgggtgaggctctggcaaggagatctctctgctcaagcacagcagaatcatggcccctctccatgaattggaacttggtacaggttaagtatccctaatcctgaaatctgaaacacttgtggttccaagcattttggataaggcaaattcaactttcagtctcttttctgggggaaaaaaataataaacctagcctagccaggcgtggtggctcatgcttgtaatcccagcacttcaggaggctgagatgggtggatcacctgaggtcaggagttcaagaccagcctggccaacatgtggaaacctcgcctcaactaaaaatagaaaaaaattagttgggcatggtggtgggcacctgtaatcccagctacttcaggaggctgaggcaggagaattacttgaacccaggaggcggacgttgcagtgagccgagcttgtgccattgcactccagcctgggcgacaagagcaaaactcttcaaaaaacaaaacaaaacaaaaaaaccctggcccttgtttcttccagtttctagaggtatcagctcctagcagcttatgaacacatatgcttgcttggccaggcaaggtggtgtgtgcctgtaatcccagcactttgggaggccaaggcaggtggatcacttgcagtcaggagttcaagaccagcctgtccaacgtggtgaaaccccatctctactaaaaatacaaaaattagccaggggtggtggtgcacgtctgtaatcccagctactcaggaggctgaggcaggagaatcacttgaacccgggaggtggaggttgcaatgagccaatatgacaccgctgcagtccagcctgggccatagagtgagactctgtctcaaaaaaggaaagaaaaataggctgggcacagtgactcatgcctgtaatcccaacactttgggaggccgaggcaggtggatcacgaggtcaggagttcaagaccagcctggccaagatggtaaaacctcgtctctactaaaaatacaaaaattagccaggtgtggtggcaggctcctgtaatcccagttacacagaagactgaggcaggagaatcgcttgaacgcaggaggcagaggttgcaggagctgagatcgcgccattgcactccagcctgggcaacagagtgagactctgtctcaaaaaataataataaaataaatgaacacacatgctgctgagtccgcaggggggcagagcagaggacagcgtgcttttgtgtactgttggaagactggctcctcctgtacagcacctctgagcccttgtgcaccgccctgccacgggcaccatccagtcctggccgtgtgaccacccacagctgactgggcagcaggcacaggccctacccgagcaggccggagttggctcgcatgactccagctgaggctgcctgtgtacatttctccagataccctatggctaattttgttataactgcacagtggctgctgccattttgtattaaatatattgtgaa

SEQ ID NO: 435751 - DNA, 4165 bp, Homo sapiens
tccgctttgagcttcatagagacaacatcagagcctgcattgggctcactcatggccagggctccgatgtactcaccactgctcagttacggtgcccactccaacctctgcatcaaccagcttgtacgcaatgggaatgaggcccagaaagagaagtatctcccgaagctgatcagtggtgagtacatcggagccctggccatgagtgagcccaatgcaggctctgatgttgtctctatgaagctcaaagcggaaaagaaaggaaatcactacatcctgaatggcaacaagttctggatcactaatggccctgatgctgacgtcctgattgtctatgccaagacagatctggctgctgtgccagcttctcggggcatcacagccttcattgtggagaagggtatgcctggctttagcacctctaagaagctggacaagctggggatgaggggctctaacacctgtgagctaatctttgaagactgcaagattcctgctgccaacatcctgggccatgagaataagggtgtctacgtgctgatgagtgggctggacctggagcggctggtgctggccggggggcctcttgggtaagtgtgagaggcttgagggaagctgggctctgtcggcctcctcggcaggtgacccaccatgagcagcagcagccttccccttgcggggccaaagggagctgcctcttggccctgctctctcctgggagatgaaaggaacctcctcttcccatgttgaatttcttcccacagtggggaaatatcattaagtaacagacaaaaggcctgaggagcagggtggcttactcggctgtgaaacgacacctgggctgtcacgcccctgcacctctggccagtcagtgccgtaactgtggcaagactttctgaagttgcttttctcctccctgggattctggccttcccacgctagcattttgccaccacacccggtggtgggatgaggaggtgcccacggggcctttctcctttctgacaggctcatgcaagcggtcctggaccacaccattccctacctgcacgtgagggaagcctttggccagaagatcggccacttccagttgatgcaggggaagatggctgacatgtacacccgcctcatggcgtgtcggcagtatgtctacaatgtcgccaaggcctgcgatgagggccattgcactgctaaggactgtgcaggtgtgattctttactcagctgagtgtgccacacaggtagccctggacggcattcagtgttttggtggcaatggctacatcaatgactttcccatgggccgctttcttcgagatgccaagctgtatgagataggggctgggaccagcgaggtgaggcggctggtcatcggcagagccttcaatgcagactttcactagtcctgagacccttcgcccccttttcctgcacctagtggcctttcttgggaagtagagatgtggcggctttcccaccctgcccacagcaggccctcctgcccagctgctcttgtcagccctctggcctctggatgaggttgagttctccacaacagctcccaagcatcatgggcctcgcagccgggcctgtgccacggctagtgttgtgtgatttaaaatggactcagcaggaagcatattgtctggggattgttgggacaggttttggtgactctgtgcccttgctctctaacttctgagcccacctcccagggtaggcacctgggggcatgcaggtgcccacctcccagggtaggcacctgggggcatgcaggtacccacctctttctcttgggtgaggctctggcaaggagatctctctgctcaagcacagcagaatcatggcccctctccatgaattggaacttggtacaggttaagtatccctaatcctgaaatctgaaacacttgtggttccaagcattttggataaggcaaattcaactttcagtctcttttctgggggaaaaaaataataaacctagcctagccaggcgtggtggctcatgcttgtaatcccagcacttcaggaggctgagatgggtggatcacctgaggtcaggagttcaagaccagcctggccaacatgtggaaacctcgcctcaactaaaaatagaaaaaaattagttgggcatggtggtgggcacctgtaatcccagctacttcaggaggctgaggcaggagaattacttgaacccaggaggcggacgttgcagtgagccgagcttgtgccattgcactccagcctgggcgacaagagcaaaactcttcaaaaaacaaaacaaaacaaaaaaaccctggcccttgtttcttccagtttctagaggtatcagctcctagcagcttatgaacacatatgcttgcttggccaggcaaggtggtgtgtgcctgtaatcccagcactttgggaggccaaggcaggtggatcacttgcagtcaggagttcaagaccagcctgtccaacgtggtgaaaccccatctctactaaaaatacaaaaattagccaggggtggtggtgcacgtctgtaatcccagctactcaggaggctgaggcaggagaatcacttgaacccgggaggtggaggttgcaatgagccaatatgacaccgctgcagtccagcctgggccatagagtgagactctgtctcaaaaaaggaaagaaaaataggctgggcacagtgactcatgcctgtaatcccaacactttgggaggccgaggcaggtggatcacgaggtcaggagttcaagaccagcctggccaagatggtaaaacctcgtctctactaaaaatacaaaaattagccaggtgtggtggcaggctcctgtaatcccagttacacagaagactgaggcaggagaatcgcttgaacgcaggaggcagaggttgcaggagctgagatcgcgccattgcactccagcctgggcaacagagtgagactctgtctcaaaaaataataataaaataaatgaacacacatgctgctgagtccgcaggggggcagagcagaggacagcgtgcttttgtgtactgttggaagactggctcctcctgtacagcacctctgagcccttgtgcaccgccctgccacgggcaccatccagtcctggccgtgtgaccacccacagctgactgggcagcaggcacaggccctacccgagcaggccggagttggctcgcatgactccagctgaggctgcctgtgtacatttctccagataccctatggctaattttgttataactgcacagtggctgctgccattttgtattaaatatattgtgaaacaaacctatctggggagaagcaatctacttgccgctgcttcctgtctggatccagcttgtgtccttggagagtggctggcccaggtcctattcctgtcctccagcccgttctttcatgagggacaggaaggtaaaatcagcccttaggagagaggtctcagcctccctttcccagatctcccagtgagttttaaaggaagcagggagcccagagtgctaagttcttacagccagaaggaagcttatagatttctgaaaaccgcccctttgtttttaaaaagatcaacacaatttgactttctcaaggtcaaaacgaactagaatccagatctgctcatggcaaaaatgggggtgttctgagaattccagctttgggccgcactgtacagcagtctggatagagtgtgatctgagaagggaatgggtctgggttgttccaccccttccgagttccaaaaagagggaactggttttcttggttctcagcccagcagcacctatcctggctcttggtcctggcctgcagccaagtgctgttcctagcctgaggcttgagacaggtggggttggctcctcaccaaccccagttccgtcccatcctgagggcaagatcctgggctcataggcagtccctttcacttccttgtcttgctccctgctatgctggagatgaatgtgactaaaagggccatcttgctggcttaatgtgtggctggagagaccagcctggagacaatgtggcaaaatggggcgcttcatccagtctgtctaagccctgtcgacttggggaggtgatttctttcctggttctatatgtgaagcaaaataaatgttttaaaattaaaagcaaaaaaacaaaatgaaaaatgaaacactga

SEQ ID NO: 435752 - DNA, 3184 bp, Homo sapiens
tttccgcagttaggggctgctatttcaacgcagggagataaaaagaaaaaaacacttgctcttctaccccgctaaaaacactcatcctagggagcacgccagcatttgcagcgttcggggcagggccactcggcctgcggccgttgcactggctggaagctggcaggcgatcacggttgattggctcgggtgcggtccaagggcagcaacgccttcggcgggccgcctagggtgattggctgctgcagcccaccccctagccggtttggtgggcggcgaagcctggattggtggagctaagagctggctcagtttcagcgctggctcttcgtgcatggcagagatggcgactgcgactcggctgctggggtggcgtgtggcgagctggaggctgcggccgccgcttgccggcttcgtttcccagcgggcccactcgcttttgcccgtggacgatgcaatcaatgggctaagcgaggagcagaggcagcttcgtcagaccatggctaagttccttcaggagcacctggcccccaaggcccaggagatcgatcgcagcaatgagttcaagaacctgcgagaattttggaagcagctggggaacctgggcgtattgggcatcacagcccctgttcagtatggcggctccggcctgggctacctggagcatgtgctggtgatggaggagatatcccgagcttccggagcagtggggctcagttacggtgcccactccaacctctgcatcaaccagcttgtacgcaatgggaatgaggcccagaaagagaagtatctcccgaagctgatcagtggtgagtacatcggagccctggccatgagtgagcccaatgcaggctctgatgttgtctctatgaagctcaaagcggaaaagaaaggaaatcactacatcctgaatggcaacaagttctggatcactaatggccctgatgctgacgtcctgattgtctatgccaagacagatctggctgctgtgccagcttctcggggcatcacagccttcattgtggagaagggtatgcctggctttagcacctctaagaagctggacaagctggggatgaggggctctaacacctgtgagctaatctttgaagactgcaagattcctgctgccaacatcctgggccatgagaataagggtgtctacgtgctgatgagtgggctggacctggagcggctggtgctggccggggggcctcttgggctcatgcaagcggtcctggaccacaccattccctacctgcacgtgagggaagcctttggccagaagatcggccacttccagttgatgcaggggaagatggctgacatgtacacccgcctcatggcgtgtcggcagtatgtctacaatgtcgccaaggcctgcgatgagggccattgcactgctaaggactgtgcaggtgtgattctttactcagctgagtgtgccacacaggtagccctggacggcattcagtgttttggtggcaatggctacatcaatgactttcccatgggccgctttcttcgagatgccaagctgtatgagataggggctgggaccagcgaggtgaggcggctggtcatcggcagagccttcaatgcagactttcactagtcctgagacccttcgcccccttttcctgcacctagtggcctttcttgggaagtagagatgtggcggctttcccaccctgcccacagcaggccctcctgcccagctgctcttgtcagccctctggcctctggatgaggttgagttctccacaacagctcccaagcatcatgggcctcgcagccgggcctgtgccacggctagtgttgtgtgatttaaaatggactcagcaggaagcatattgtctggggattgttgggacaggttttggtgactctgtgcccttgctctctaacttctgagcccacctcccagggtaggcacctgggggcatgcaggtgcccacctcccagggtaggcacctgggggcatgcaggtacccacctctttctcttgggtgaggctctggcaaggagatctctctgctcaagcacagcagaatcatggcccctctccatgaattggaacttggtacaggttaagtatccctaatcctgaaatctgaaacacttgtggttccaagcattttggataaggcaaattcaactttcagtctcttttctgggggaaaaaaataataaacctagcctagccaggcgtggtggctcatgcttgtaatcccagcacttcaggaggctgagatgggtggatcacctgaggtcaggagttcaagaccagcctggccaacatgtggaaacctcgcctcaactaaaaatagaaaaaaattagttgggcatggtggtgggcacctgtaatcccagctacttcaggaggctgaggcaggagaattacttgaacccaggaggcggacgttgcagtgagccgagcttgtgccattgcactccagcctgggcgacaagagcaaaactcttcaaaaaacaaaacaaaacaaaaaaaccctggcccttgtttcttccagtttctagaggtatcagctcctagcagcttatgaacacatatgcttgcttggccaggcaaggtggtgtgtgcctgtaatcccagcactttgggaggccaaggcaggtggatcacttgcagtcaggagttcaagaccagcctgtccaacgtggtgaaaccccatctctactaaaaatacaaaaattagccaggggtggtggtgcacgtctgtaatcccagctactcaggaggctgaggcaggagaatcacttgaacccgggaggtggaggttgcaatgagccaatatgacaccgctgcagtccagcctgggccatagagtgagactctgtctcaaaaaaggaaagaaaaataggctgggcacagtgactcatgcctgtaatcccaacactttgggaggccgaggcaggtggatcacgaggtcaggagttcaagaccagcctggccaagatggtaaaacctcgtctctactaaaaatacaaaaattagccaggtgtggtggcaggctcctgtaatcccagctactcaggaggctgaggcagcagaattgcttgaacccaggaggcagagtttgcagtgagccaagatcacaccactgcactccagcttggacgacagagcgagactctgtctcaaaaaataataggccaggcatgg

SEQ ID NO: 435753 - DNA, 3439 bp, Homo sapiens
gttgtgccatgctgctctgtcatgtttggtacgtgaatcgtccctttgtgcagcctatctatgctatgtgggctacctgcccgttagtagtcacctagggtatccaatcagctgtcctgatatcagagtgcctgtgttcaagtaactcttattttgctcagtggccccagattgcaagagtagtgatgctggcatgtcataatagttctattttagtatttgttattattgttgatctgttactatgcctagctcataaattaaactttctcataagtatgtatgtatagggaaaaaaacaacatatatatgggtttcggttctatctacggtttcaggcatccactggggtcttggaatgtatcctccaaggataaggaaggactagtgtattccccacacccctccctcttgctaccttttgctgcttttctttaatcaccctctcctcctgtggcctgtttctatatacttggcattctgtttgctttctttgttttgtcaatcacttcctttcttctctgcccaaaccctggttgcaggtggcaatggctacatcaatgactttcccatgggccgctttcttcgagatgccaagctgtatgagataggggctgggaccagcgaggtgaggcggctggtcatcggcagagccttcaatgcagactttcactagtcctgagacccttcgcccccttttcctgcacctagtggcctttcttgggaagtagagatgtggcggctttcccaccctgcccacagcaggccctcctgcccagctgctcttgtcagccctctggcctctggatgaggttgagttctccacaacagctcccaagcatcatgggcctcgcagccgggcctgtgccacggctagtgttgtgtgatttaaaatggactcagcaggaagcatattgtctggggattgttgggacaggttttggtgactctgtgcccttgctctctaacttctgagcccacctcccagggtaggcacctgggggcatgcaggtgcccacctcccagggtaggcacctgggggcatgcaggtacccacctctttctcttgggtgaggctctggcaaggagatctctctgctcaagcacagcagaatcatggcccctctccatgaattggaacttggtacaggttaagtatccctaatcctgaaatctgaaacacttgtggttccaagcattttggataaggcaaattcaactttcagtctcttttctgggggaaaaaaataataaacctagcctagccaggcgtggtggctcatgcttgtaatcccagcacttcaggaggctgagatgggtggatcacctgaggtcaggagttcaagaccagcctggccaacatgtggaaacctcgcctcaactaaaaatagaaaaaaattagttgggcatggtggtgggcacctgtaatcccagctacttcaggaggctgaggcaggagaattacttgaacccaggaggcggacgttgcagtgagccgagcttgtgccattgcactccagcctgggcgacaagagcaaaactcttcaaaaaacaaaacaaaacaaaaaaaccctggcccttgtttcttccagtttctagaggtatcagctcctagcagcttatgaacacatatgcttgcttggccaggcaaggtggtgtgtgcctgtaatcccagcactttgggaggccaaggcaggtggatcacttgcagtcaggagttcaagaccagcctgtccaacgtggtgaaaccccatctctactaaaaatacaaaaattagccaggggtggtggtgcacgtctgtaatcccagctactcaggaggctgaggcaggagaatcacttgaacccgggaggtggaggttgcaatgagccaatatgacaccgctgcagtccagcctgggccatagagtgagactctgtctcaaaaaaggaaagaaaaataggctgggcacagtgactcatgcctgtaatcccaacactttgggaggccgaggcaggtggatcacgaggtcaggagttcaagaccagcctggccaagatggtaaaacctcgtctctactaaaaatacaaaaattagccaggtgtggtggcaggctcctgtaatcccagttacacagaagactgaggcaggagaatcgcttgaacgcaggaggcagaggttgcaggagctgagatcgcgccattgcactccagcctgggcaacagagtgagactctgtctcaaaaaataataataaaataaatgaacacacatgctgctgagtccgcaggggggcagagcagaggacagcgtgcttttgtgtactgttggaagactggctcctcctgtacagcacctctgagcccttgtgcaccgccctgccacgggcaccatccagtcctggccgtgtgaccacccacagctgactgggcagcaggcacaggccctacccgagcaggccggagttggctcgcatgactccagctgaggctgcctgtgtacatttctccagataccctatggctaattttgttataactgcacagtggctgctgccattttgtattaaatatattgtgaaacaaacctatctggggagaagcaatctacttgccgctgcttcctgtctggatccagcttgtgtccttggagagtggctggcccaggtcctattcctgtcctccagcccgttctttcatgagggacaggaaggtaaaatcagcccttaggagagaggtctcagcctccctttcccagatctcccagtgagttttaaaggaagcagggagcccagagtgctaagttcttacagccagaaggaagcttatagatttctgaaaaccgcccctttgtttttaaaaagatcaacacaatttgactttctcaaggtcaaaacgaactagaatccagatctgctcatggcaaaaatgggggtgttctgagaattccagctttgggccgcactgtacagcagtctggatagagtgtgatctgagaagggaatgggtctgggttgttccaccccttccgagttccaaaaagagggaactggttttcttggttctcagcccagcagcacctatcctggctcttggtcctggcctgcagccaagtgctgttcctagcctgaggcttgagacaggtggggttggctcctcaccaaccccagttccgtcccatcctgagggcaagatcctgggctcataggcagtccctttcacttccttgtcttgctccctgctatgctggagatgaatgtgactaaaagggccatcttgctggcttaatgtgtggctggagagaccagcctggagacaatgtggcaaaatggggcgcttcatccagtctgtctaagccctgtcgacttggggaggtgatttctttcctggttctatatgtgaagcaaaataaatgttttaaaattaaaagcaaaaaaacaaaatgaaaaatgaaacactga

SEQ ID NO: 435754 - DNA, 3435 bp, Homo sapiens
tttcacacccacgggctctatgtcgcaccataggctctatgtcacaaccacaggctctatctcacacccacgggctctgtctcacacctacgggctctgtctcacacccacgggctctatctcacacccatgggtctctatctcacacccacgggctctatgtcacaaccagaggctctatctcacacccatgggctctatctcacgtccatctgaccctcttaagatgggtcagatggaccgatggttgggctggtgctggccggggggcctcttgggctcatgcaagcggtcctggaccacaccattccctacctgcacgtgagggaagcctttggccagaagatcggccacttccagttgatgcaggggaagatggctgacatgtacacccgcctcatggcgtgtcggcagtatgtctacaatgtcgccaaggcctgcgatgagggccattgcactgctaaggactgtgcaggtgtgattctttactcagctgagtgtgccacacaggtagccctggacggcattcagtgttttggtggcaatggctacatcaatgactttcccatgggccgctttcttcgagatgccaagctgtatgagataggggctgggaccagcgaggtgaggcggctggtcatcggcagagccttcaatgcagactttcactagtcctgagacccttcgcccccttttcctgcacctagtggcctttcttgggaagtagagatgtggcggctttcccaccctgcccacagcaggccctcctgcccagctgctcttgtcagccctctggcctctggatgaggttgagttctccacaacagctcccaagcatcatgggcctcgcagccgggcctgtgccacggctagtgttgtgtgatttaaaatggactcagcaggaagcatattgtctggggattgttgggacaggttttggtgactctgtgcccttgctctctaacttctgagcccacctcccagggtaggcacctgggggcatgcaggtgcccacctcccagggtaggcacctgggggcatgcaggtacccacctctttctcttgggtgaggctctggcaaggagatctctctgctcaagcacagcagaatcatggcccctctccatgaattggaacttggtacaggttaagtatccctaatcctgaaatctgaaacacttgtggttccaagcattttggataaggcaaattcaactttcagtctcttttctgggggaaaaaaataataaacctagcctagccaggcgtggtggctcatgcttgtaatcccagcacttcaggaggctgagatgggtggatcacctgaggtcaggagttcaagaccagcctggccaacatgtggaaacctcgcctcaactaaaaatagaaaaaaattagttgggcatggtggtgggcacctgtaatcccagctacttcaggaggctgaggcaggagaattacttgaacccaggaggcggacgttgcagtgagccgagcttgtgccattgcactccagcctgggcgacaagagcaaaactcttcaaaaaacaaaacaaaacaaaaaaaccctggcccttgtttcttccagtttctagaggtatcagctcctagcagcttatgaacacatatgcttgcttggccaggcaaggtggtgtgtgcctgtaatcccagcactttgggaggccaaggcaggtggatcacttgcagtcaggagttcaagaccagcctgtccaacgtggtgaaaccccatctctactaaaaatacaaaaattagccaggggtggtggtgcacgtctgtaatcccagctactcaggaggctgaggcaggagaatcacttgaacccgggaggtggaggttgcaatgagccaatatgacaccgctgcagtccagcctgggccatagagtgagactctgtctcaaaaaaggaaagaaaaataggctgggcacagtgactcatgcctgtaatcccaacactttgggaggccgaggcaggtggatcacgaggtcaggagttcaagaccagcctggccaagatggtaaaacctcgtctctactaaaaatacaaaaattagccaggtgtggtggcaggctcctgtaatcccagttacacagaagactgaggcaggagaatcgcttgaacgcaggaggcagaggttgcaggagctgagatcgcgccattgcactccagcctgggcaacagagtgagactctgtctcaaaaaataataataaaataaatgaacacacatgctgctgagtccgcaggggggcagagcagaggacagcgtgcttttgtgtactgttggaagactggctcctcctgtacagcacctctgagcccttgtgcaccgccctgccacgggcaccatccagtcctggccgtgtgaccacccacagctgactgggcagcaggcacaggccctacccgagcaggccggagttggctcgcatgactccagctgaggctgcctgtgtacatttctccagataccctatggctaattttgttataactgcacagtggctgctgccattttgtattaaatatattgtgaaacaaacctatctggggagaagcaatctacttgccgctgcttcctgtctggatccagcttgtgtccttggagagtggctggcccaggtcctattcctgtcctccagcccgttctttcatgagggacaggaaggtaaaatcagcccttaggagagaggtctcagcctccctttcccagatctcccagtgagttttaaaggaagcagggagcccagagtgctaagttcttacagccagaaggaagcttatagatttctgaaaaccgcccctttgtttttaaaaagatcaacacaatttgactttctcaaggtcaaaacgaactagaatccagatctgctcatggcaaaaatgggggtgttctgagaattccagctttgggccgcactgtacagcagtctggatagagtgtgatctgagaagggaatgggtctgggttgttccaccccttccgagttccaaaaagagggaactggttttcttggttctcagcccagcagcacctatcctggctcttggtcctggcctgcagccaagtgctgttcctagcctgaggcttgagacaggtggggttggctcctcaccaaccccagttccgtcccatcctgagggcaagatcctgggctcataggcagtccctttcacttccttgtcttgctccctgctatgctggagatgaatgtgactaaaagggccatcttgctggcttaatgtgtggctggagagaccagcctggagacaatgtggcaaaatggggcgcttcatccagtctgtctaagccctgtcgacttggggaggtgatttctttcctggttctatatgtgaagcaaaataaatgttttaaaattaaaagcaaaaaaacaaaatgaaaaatgaaacactga

SEQ ID NO: 435755 - DNA, 3249 bp, Homo sapiens
gcgacggggctaccgtggttttatcagtgcaaatcgtccagataggtccacttagcctgctccggccgttgtgccgggcatttggcaaaccaagcgtgctgggccacccagtcgcacccgactgaaggggccttggccaggagacggcacttccagtgatgcaggggaacctggccgaccgtggtccccgcctcaagtgcatgctcgccattaggtctacaagttccccagcccctgcgatgagggcccattgcacgtgctataggaactgcgcagggttgtggatttcctttaactcaggctgcacgtgtgcgcaacacagggtagccctggacggcattcagtgattttggtggcaatggctacatcaatgactttcccatgggccgctttcttcgagatgccaagctgtatgagataggggctgggaccagcgaggtgaggcggctggtcatcggcagagccttcaatgcagactttcactagtcctgagacccttcgcccccttttcctgcacctagtggcctttcttgggaagtagagatgtggcggctttcccaccctgcccacagcaggccctcctgcccagctgctcttgtcagccctctggcctctggatgaggttgagttctccacaacagctcccaagcatcatgggcctcgcagccgggcctgtgccacggctagtgttgtgtgatttaaaatggactcagcaggaagcatattgtctggggattgttgggacaggttttggtgactctgtgcccttgctctctaacttctgagcccacctcccagggtaggcacctgggggcatgcaggtgcccacctcccagggtaggcacctgggggcatgcaggtacccacctctttctcttgggtgaggctctggcaaggagatctctctgctcaagcacagcagaatcatggcccctctccatgaattggaacttggtacaggttaagtatccctaatcctgaaatctgaaacacttgtggttccaagcattttggataaggcaaattcaactttcagtctcttttctgggggaaaaaaataataaacctagcctagccaggcgtggtggctcatgcttgtaatcccagcacttcaggaggctgagatgggtggatcacctgaggtcaggagttcaagaccagcctggccaacatgtggaaacctcgcctcaactaaaaatagaaaaaaattagttgggcatggtggtgggcacctgtaatcccagctacttcaggaggctgaggcaggagaattacttgaacccaggaggcggacgttgcagtgagccgagcttgtgccattgcactccagcctgggcgacaagagcaaaactcttcaaaaaacaaaacaaaacaaaaaaaccctggcccttgtttcttccagtttctagaggtatcagctcctagcagcttatgaacacatatgcttgcttggccaggcaaggtggtgtgtgcctgtaatcccagcactttgggaggccaaggcaggtggatcacttgcagtcaggagttcaagaccagcctgtccaacgtggtgaaaccccatctctactaaaaatacaaaaattagccaggggtggtggtgcacgtctgtaatcccagctactcaggaggctgaggcaggagaatcacttgaacccgggaggtggaggttgcaatgagccaatatgacaccgctgcagtccagcctgggccatagagtgagactctgtctcaaaaaaggaaagaaaaataggctgggcacagtgactcatgcctgtaatcccaacactttgggaggccgaggcaggtggatcacgaggtcaggagttcaagaccagcctggccaagatggtaaaacctcgtctctactaaaaatacaaaaattagccaggtgtggtggcaggctcctgtaatcccagttacacagaagactgaggcaggagaatcgcttgaacgcaggaggcagaggttgcaggagctgagatcgcgccattgcactccagcctgggcaacagagtgagactctgtctcaaaaaataataataaaataaatgaacacacatgctgctgagtccgcaggggggcagagcagaggacagcgtgcttttgtgtactgttggaagactggctcctcctgtacagcacctctgagcccttgtgcaccgccctgccacgggcaccatccagtcctggccgtgtgaccacccacagctgactgggcagcaggcacaggccctacccgagcaggccggagttggctcgcatgactccagctgaggctgcctgtgtacatttctccagataccctatggctaattttgttataactgcacagtggctgctgccattttgtattaaatatattgtgaaacaaacctatctggggagaagcaatctacttgccgctgcttcctgtctggatccagcttgtgtccttggagagtggctggcccaggtcctattcctgtcctccagcccgttctttcatgagggacaggaaggtaaaatcagcccttaggagagaggtctcagcctccctttcccagatctcccagtgagttttaaaggaagcagggagcccagagtgctaagttcttacagccagaaggaagcttatagatttctgaaaaccgcccctttgtttttaaaaagatcaacacaatttgactttctcaaggtcaaaacgaactagaatccagatctgctcatggcaaaaatgggggtgttctgagaattccagctttgggccgcactgtacagcagtctggatagagtgtgatctgagaagggaatgggtctgggttgttccaccccttccgagttccaaaaagagggaactggttttcttggttctcagcccagcagcacctatcctggctcttggtcctggcctgcagccaagtgctgttcctagcctgaggcttgagacaggtggggttggctcctcaccaaccccagttccgtcccatcctgagggcaagatcctgggctcataggcagtccctttcacttccttgtcttgctccctgctatgctggagatgaatgtgactaaaagggccatcttgctggcttaatgtgtggctggagagaccagcctggagacaatgtggcaaaatggggcgcttcatccagtctgtctaagccctgtcgacttggggaggtgatttctttcctggttctatatgtgaagcaaaataaatgttttaaaattaaaagcaaaaaaacaaaatgaaaaatgaaacactga

SEQ ID NO: 435756 - DNA, 2021 bp, Homo sapiens
  misc_feature (15)..(15): n is a, c, g, or t
atcctacacacaganaattgcttatgagtatcacattaccgctcttggttatcagttaacaaaggctgctaatgaacagcatcgttactcgtgccgaattcggcacgaggacaagagcaaaactcttcaaaaaacaaaacaaaacaaaaaaaccctggcccttgtttcttccagtttctagaggtatcagctcctagcagcttatgaacacatatgcttgcttggccaggcaaggtggtgtgtgcctgtaatcccagcactttgggaggccaaggcaggtggatcacttgcagtcaggagttcaagaccagcctgtccaacgtggtgaaaccccatctctactaaaaatacaaaaattagccaggggtggtggtgcacgtctgtaatcccagctactcaggaggctgaggcaggagaatcacttgaacccgggaggtggaggttgcaatgagccaatatgacaccgctgcagtccagcctgggccatagagtgagactctgtctcaaaaaaggaaagaaaaataggctgggcacagtgactcatgcctgtaatcccaacactttgggaggccgaggcaggtggatcacgaggtcaggagttcaagaccagcctggccaagatggtaaaacctcgtctctactaaaaatacaaaaattagccaggtgtggtggcaggctcctgtaatcccagttacacagaagactgaggcaggagaatcgcttgaacgcaggaggcagaggttgcaggagctgagatcgcgccattgcactccagcctgggcaacagagtgagactctgtctcaaaaaataataataaaataaatgaacacacatgctgctgagtccgcaggggggcagagcagaggacagcgtgcttttgtgtactgttggaagactggctcctcctgtacagcacctctgagcccttgtgcaccgccctgccacgggcaccatccagtcctggccgtgtgaccacccacagctgactgggcagcaggcacaggccctacccgagcaggccggagttggctcgcatgactccagctgaggctgcctgtgtacatttctccagataccctatggctaattttgttataactgcacagtggctgctgccattttgtattaaatatattgtgaaacaaacctatctggggagaagcaatctacttgccgctgcttcctgtctggatccagcttgtgtccttggagagtggctggcccaggtcctattcctgtcctccagcccgttctttcatgagggacaggaaggtaaaatcagcccttaggagagaggtctcagcctccctttcccagatctcccagtgagttttaaaggaagcagggagcccagagtgctaagttcttacagccagaaggaagcttatagatttctgaaaaccgcccctttgtttttaaaaagatcaacacaatttgactttctcaaggtcaaaacgaactagaatccagatctgctcatggcaaaaatgggggtgttctgagaattccagctttgggccgcactgtacagcagtctggatagagtgtgatctgagaagggaatgggtctgggttgttccaccccttccgagttccaaaaagagggaactggttttcttggttctcagcccagcagcacctatcctggctcttggtcctggcctgcagccaagtgctgttcctagcctgaggcttgagacaggtggggttggctcctcaccaaccccagttccgtcccatcctgagggcaagatcctgggctcataggcagtccctttcacttccttgtcttgctccctgctatgctggagatgaatgtgactaaaagggccatcttgctggcttaatgtgtggctggagagaccagcctggagacaatgtggcaaaatggggcgcttcatccagtctgtctaagccctgtcgacttggggaggtgatttctttcctggttctatatgtgaagcaaaataaatgttttaaaattaaaagcaaaaaaacaaaatgaaaaatgaaacactga

SEQ ID NO: 435757 - DNA, 1988 bp, Homo sapiens
tttccgcagttaggggctgctatttcaacgcagggagataaaaagaaaaaaacacttgctcttctaccccgctaaaaacactcatcctagggagcacgccagcatttgcagcgttcggggcagggccactcggcctgcggccgttgcactggctggaagctggcaggcgatcacggttgattggctcgggtgcggtccaagggcagcaacgccttcggcgggccgcctagggtgattggctgctgcagcccaccccctagccggtttggtgggcggcgaagcctggattggtggagctaagagctggctcagtttcagcgctggctcttcgtgcatggcagagatggcgactgcgactcggctgctggggtggcgtgtggcgagctggaggctgcggccgccgcttgccggcttcgtttcccagcgggcccactcgcttttgcccgtggacgatgcaatcaatgggctaagcgaggagcagaggcagcttcgtcagaccatggctaagttccttcaggagcacctggcccccaaggcccaggagatcgatcgcagcaatgagttcaagaacctgcgagaattttggaagcagctggggaacctgggcgtattgggcatcacagcccctgttcagtatggcggctccggcctgggctacctggagcatgtgctggtgatggaggagatatcccgagcttccggagcagtggggctcagttacggtgcccactccaacctctgcatcaaccagcttgtacgcaatgggaatgaggcccagaaagagaagtatctcccgaagctgatcagtggtgagtacatcggagccctggccatgagtgagcccaatgcaggctctgatgttgtctctatgaagctcaaagcggaaaagaaaggaaatcactacatcctgaatggcaacaagttctggatcactaatggccctgatgctgacgtcctgattgtctatgccaagacagatctggctgctgtgccagcttctcggggcatcacagccttcattgtggagaagggtatgcctggctttagcacctctaagaagctggacaagctggggatgaggggctctaacacctgtgagctaatctttgaagactgcaagattcctgctgccaacatcctgggccatgagaataagggtgtctacgtgctgatgagtgggctggacctggagcggctggtgctggccggggggcctcttgggctcatgcaagcggtcctggaccacaccattccctacctgcacgtgagggaagcctttggccagaagatcggccacttccagttgatgcaggggaagatggctgacatgtacacccgcctcatggcgtgtcggcagtatgtctacaatgtcgccaaggcctgcgatgagggccattgcactgctaaggactgtgcaggtgtgattctttactcagctgagtgtgccacacaggtagccctggacggcattcagtgttttggtggcaatggctacatcaatgactttcccatgggccgctttcttcgagatgccaagctgtatgagataggggctgggaccagcgaggtgaggcggctggtcatcggcagagccttcaatgcagactttcactagtcctgagacccttcgcccccttttcctgcacctagtggcctttcttgggaagtagagatgtggcggctttcccaccctgcccacagcaggccctcctgcccagctgctcttgtcagccctctggcctctggatgaggttgagttctccacaacagctcccaagcatcatgggcctcgcagccgggcctgtgccacggctagtgttgtgtgatttaaaatggactcacaggcacaggccctacccgagcaggccggagttggctcgcatgactccagctgaggctgcctgtgtacatttctccagataccctatggctaattttgttataactgcacagtggctgctgccattttgtattaaatatattgtgaa

SEQ ID NO: 435758 - DNA, 2023 bp, Homo sapiens
tttccgcagttaggggctgctatttcaacgcagggagataaaaagaaaaaaacacttgctcttctaccccgctaaaaacactcatcctagggagcacgccagcatttgcagcgttcggggcagggccactcggcctgcggccgttgcactggctggaagctggcaggcgatcacggttgattggctcgggtgcggtccaagggcagcaacgccttcggcgggccgcctagggtgattggctgctgcagcccaccccctagccggtttggtgggcggcgaagcctggattggtggagctaagagctggctcagtttcagcgctggctcttcgtgcatggcagagatggcgactgcgactcggctgctggggtggcgtgtggcgagctggaggctgcggccgccgcttgccggcttcgtttcccagcgggcccactcgcttttgcccgtggacgatgcaatcaatgggctaagcgaggagcagaggcagcttcgtcagaccatggctaagttccttcaggagcacctggcccccaaggcccaggagatcgatcgcagcaatgagttcaagaacctgcgagaattttggaagcagctggggaacctgggcgtattgggcatcacagcccctgttcagtatggcggctccggcctgggctacctggagcatgtgctggtgatggaggagatatcccgagcttccggagcagtggggctcagttacggtgcccactccaacctctgcatcaaccagcttgtacgcaatgggaatgaggcccagaaagagaagtatctcccgaagctgatcagtggtgagtacatcggagccctggccatgagtgagcccaatgcaggctctgatgttgtctctatgaagctcaaagcggaaaagaaaggaaatcactacatcctgaatggcaacaagttctggatcactaatggccctgatgctgacgtcctgattgtctatgccaagacagatctggctgctgtgccagcttctcggggcatcacagccttcattgtggagaagggtatgcctggctttagcacctctaagaagctggacaagctggggatgaggggctctaacacctgtgagctaatctttgaagactgcaagattcctgctgccaacatcctgggccatgagaataagggtgtctacgtgctgatgagtgggctggacctggagcggctggtgctggccggggggcctcttgggctcatgcaagcggtcctggaccacaccattccctacctgcacgtgagggaagcctttggccagaagatcggccacttccagttgatgcaggggaagatggctgacatgtacacccgcctcatggcgtgtcggcagtatgtctacaatgtcgccaaggcctgcgatgagggccattgcactgctaaggactgtgcaggtgtgattctttactcagctgagtgtgccacacaggtagccctggacggcattcagtgttttgggcagaccttttccgcccaacacccacctgggagggagggcgagacccgaggtcagacgtccctggagcaggtgagcactgcgagggaactgagatgcaagatcctcctgcctgaactcacaccccgcgtgctgctcccccaactcgcctcttggatctcagaccagaagcttcctttcctcaaaatccttctatgttctccaacgtctttgggacagagctccttggcagggtttacaaagcttaggtggccctacccacttctccagcctcatctgctgcctcacccctataccacagctctgcacctttgctgaaactggtactcggcgcttggggtgtcctcatctttcccctacctatggcagcctgcccgaagagtgcctgctccttcaggctccgctctcggcttagccccttcttggaacgtccccgcacctcaccccagccccttccaggggcagaccctggcagccttccctcgtcctcagcagccattacgtgttgctgtcataaagttatcactctgtattctgtctact

SEQ ID NO: 435759 - DNA, 1852 bp, Homo sapiens
tttccgcagttaggggctgctatttcaacgcagggagataaaaagaaaaaaacacttgctcttctaccccgctaaaaacactcatcctagggagcacgccagcatttgcagcgttcggggcagggccactcggcctgcggccgttgcactggctggaagctggcaggcgatcacggttgattggctcgggtgcggtccaagggcagcaacgccttcggcgggccgcctagggtgattggctgctgcagcccaccccctagccggtttggtgggcggcgaagcctggattggtggagctaagagctggctcagtttcagcgctggctcttcgtgcatggcagagatggcgactgcgactcggctgctggggtggcgtgtggcgagctggaggctgcggccgccgcttgccggcttcgtttcccagcgggcccactcgcttttgcccgtggacgatgcaatcaatgggctaagcgaggagcagaggcagcttcgtcagaccatggctaagttccttcaggagcacctggcccccaaggcccaggagatcgatcgcagcaatgagttcaagaacctgcgagaattttggaagcagctggggaacctgggcgtattgggcatcacagcccctgttcagtatggcggctccggcctgggctacctggagcatgtgctggtgatggaggagatatcccgagcttccggagcagtggggctcagttacggtgcccactccaacctctgcatcaaccagcttgtacgcaatgggaatgaggcccagaaagagaagtatctcccgaagctgatcagtggtgagtacatcggagccctggccatgagtgagcccaatgcaggctctgatgttgtctctatgaagctcaaagcggaaaagaaaggaaatcactacatcctgaatggcaacaagttctggatcactaatggccctgatgctgacgtcctgattgtctatgccaagacagatctggctgctgtgccagcttctcggggcatcacagccttcattgtggagaagggtatgcctggctttagcacctctaagaagctggacaagctggggatgaggggctctaacacctgtgagctaatctttgaagactgcaagattcctgctgccaacatcctgggccatgagaataagggtgtctacgtgctgatgagtgggctggacctggagcggctggtgctggccggggggcctcttgggctcatgcaagcggtcctggaccacaccattccctacctgcacgtgagggaagcctttggccagaagatcggccacttccagttgatgcaggggaagatggctgacatgtacacccgcctcatggcgtgtcggcagtatgtctacaatgtcgccaaggcctgcgatgagggccattgcactgctaaggactgtgcaggtgtgattctttactcagctgagtgtgccacacaggtagccctggacggcattcagtgttttggccatgcccctcaacccttcctctacactgaaccagtgaactatcaagctccccgcaaattcttcagtggctcccagcacctgtaagatctaaggcttggcaaggcaaatatgactctgatccccctgggccttccccttctgctgcttccctccttccctgctgaatgttcgtgttcttgttgcaaggagtcctcactgccatgtttctcatccctgtgcctttggtctggggcagctctggaagtccttccagcccttcaaactttctcttgcttcctcatctctaaagcctcaggccagggcctgcctccttcaggaagacctctcttctccaaccttccctcattcctctgtctccatctcatccat

SEQ ID NO: 435760 - DNA, 1906 bp, Homo sapiens
tttccgcagttaggggctgctatttcaacgcagggagataaaaagaaaaaaacacttgctcttctaccccgctaaaaacactcatcctagggagcacgccagcatttgcagcgttcggggcagggccactcggcctgcggccgttgcactggctggaagctggcaggcgatcacggttgattggctcgggtgcggtccaagggcagcaacgccttcggcgggccgcctagggtgattggctgctgcagcccaccccctagccggtttggtgggcggcgaagcctggattggtggagctaagagctggctcagtttcagcgctggctcttcgtgcatggcagagatggcgactgcgactcggctgctggggtggcgtgtggcgagctggaggctgcggccgccgcttgccggcttcgtttcccagcgggcccactcgcttttgcccgtggacgatgcaatcaatgggctaagcgaggagcagaggcagcttcgtcagaccatggctaagttccttcaggagcacctggcccccaaggcccaggagatcgatcgcagcaatgagttcaagaacctgcgagaattttggaagcagctggggaacctgggcgtattgggcatcacagcccctgttcagtatggcggctccggcctgggctacctggagcatgtgctggtgatggaggagatatcccgagcttccggagcagtggggctcagttacggtgcccactccaacctctgcatcaaccagcttgtacgcaatgggaatgaggcccagaaagagaagtatctcccgaagctgatcagtggtgagtacatcggagccctggccatgagtgagcccaatgcaggctctgatgttgtctctatgaagctcaaagcggaaaagaaaggaaatcactacatcctgaatggcaacaagttctggatcactaatggccctgatgctgacgtcctgattgtctatgccaagacagatctggctgctgtgccagcttctcggggcatcacagccttcattgtggagaagggtatgcctggctttagcacctctaagaagctggacaagctggggatgaggggctctaacacctgtgagctaatctttgaagactgcaagattcctgctgccaacatcctgggccatgagaataagggtgtctacgtgctgatgagtgggctggacctggagcggctggtgctggccggggggcctcttgggctcatgcaagcggtcctggaccacaccattccctacctgcacgtgagggaagcctttggccagaagatcggccacttccagcctgggtccatggatcttggagtgtgttcagtaaacatctgctcctggggcaataatgaagggcagaccttttccgcccaacacccacctgggagggagggcgagacccgaggtcagacgtccctggagcaggtgagcactgcgagggaactgagatgcaagatcctcctgcctgaactcacaccccgcgtgctgctcccccaactcgcctcttggatctcagaccagaagcttcctttcctcaaaatccttctatgttctccaacgtctttgggacagagctccttggcagggtttacaaagcttaggtggccctacccacttctccagcctcatctgctgcctcacccctataccacagctctgcacctttgctgaaactggtactcggcgcttggggtgtcctcatctttcccctacctatggcagcctgcccgaagagtgcctgctccttcaggctccgctctcggcttagccccttcttggaacgtccccgcacctcaccccagccccttccaggggcagaccctggcagccttccctcgtcctcagcagccattacgtgttgctgtcataaagttatcactctgtattctgtctact

SEQ ID NO: 435761 - DNA, 1218 bp, Homo sapiens
tttccgcagttaggggctgctatttcaacgcagggagataaaaagaaaaaaacacttgctcttctaccccgctaaaaacactcatcctagggagcacgccagcatttgcagcgttcggggcagggccactcggcctgcggccgttgcactggctggaagctggcaggcgatcacggttgattggctcgggtgcggtccaagggcagcaacgccttcggcgggccgcctagggtgattggctgctgcagcccaccccctagccggtttggtgggcggcgaagcctggattggtggagctaagagctggctcagtttcagcgctggctcttcgtgcatggcagagatggcgactgcgactcggctgctggggtggcgtgtggcgagctggaggctgcggccgccgcttgccggcttcgtttcccagcgggcccactcgcttttgcccgtggacgatgcaatcaatgggctaagcgaggagcagaggcagcttcgtcagaccatggctaagttccttcaggagcacctggcccccaaggcccaggagatcgatcgcagcaatgagttcaagaacctgcgagaattttggaagcagctggggaacctgggcgtattgggcatcacagcccctgttcagtatggcggctccggcctgggctacctggagcatgtgctggtgatggaggagatatcccgagcttccggagcagtggggctcagttacggtgcccactccaacctctgcatcaaccagcttgtacgcaatgggaatgaggcccagaaagagaagtatctcccgaagctgatcagtggtgagtacatcggagccctggccatgagtgagcccaatgcaggctctgatgttgtctctatgaagctcaaagcggaaaagaaaggaaatcactacatcctgaatggcaacaagttctggatcactaatggccctgatgctgacgtcctgattgtctatgccaagacagatctggctgctgtgccagcttctcggggcatcacagccttcattgtggagaagggtatgcctggctttagcacctctaagaagctggacaagctggggatgaggggctctaacacctgtgagctaatctttgaagactgcaagattcctggtaagtagcaccgggaatcggggagcccctctcctgacccccttccaggctgatctggctgttctcaagttgagaaagcctctgggttaga

SEQ ID NO: 435762 - DNA, 560 bp, Homo sapiens
acacggattctgggagggctgcctatcttagcgagtgagggaggagtggagcatgggggtctctccatttcttccccggggaaagagatggtagagctcctggttggcaggcaggagccgctggggttgtggacagcgctaaaagagggctctctttcccctagggcagaccttttccgcccaacacccacctgggagggagggcgagacccgaggtcagacgtccctggagcaggtgagcactgcgagggaactgagatgcaagatcctcctgcctgaactcacaccccgcgtgctgctcccccaactcgcctcttggatctcagaccagaagcttcctttcctcaaaatccttctatgttctccaacgtctttgggacagagctccttggcagggtttacaaagcttaggtggccctacccacttctccagcctcatctgctgcctcacccctataccacagctctgcacctttgctgaaactggtactcggcgcttggggtgtcctcatctttcccctacctatggcagcctgcccgaagagtgcctgctccttcag

SEQ ID NO: 435763 - DNA, 659 bp, Homo sapiens
ctctggcttatcaggactccatagttctccaacagagaaatcttgaaaaggactgaccagtttttgcagttctaaaaccatggcccatggttcagtgacattcagggatgtggccatagacttctcacaggaagaatgggaattcctggatcctgctcagagggacttatatagggatgtaatgtgggagaactacagcaacttcatttcactagcaggaccttccatttctaaaccagatgtgattaccttattggatgaagaaaggaaggaacctgggatggttgtgagggaagggacaagaagatactgccctggtgagtgagggctgagcaggcattgagaaatcactactgcaggtaatagctaaactgattagggtggaggcacacccttgagatgttggggtctctcttcaaaaagcccctggcctatggaggcagggcttgggacttgaagcaaattaagatcttttaagcctggactagcaaaggaactttctattgatcttgaatgcaacactgtttctcatctttcatatttctatcctactttaaagagaagaactattcctggtagaagaaaaaataaataaatataagagcagaaatcagcaaaatagaaaagaaataaagaaaattaataaagccaaaaattga

SEQ ID NO: 435764 - DNA, 5648 bp, Homo sapiens
  misc_feature (3316)..(3316): n is a, c, g, or t
  misc_feature (3485)..(3485): n is a, c, g, or t
  misc_feature (3501)..(3501): n is a, c, g, or t
  misc_feature (3757)..(3757): n is a, c, g, or t
  misc_feature (3761)..(3761): n is a, c, g, or t
  misc_feature (3810)..(3810): n is a, c, g, or t
  misc_feature (3815)..(3815): n is a, c, g, or t
  misc_feature (3839)..(3839): n is a, c, g, or t
  misc_feature (3871)..(3871): n is a, c, g, or t
ctctggcttatcaggactccatagttctccaacagagaaatcttgaaaaggactgaccagtttttgcagttctaaaaccatggcccatggttcagtgacattcagggatgtggccatagacttctcacaggaagaatgggaattcctggatcctgctcagagggacttatatagggatgtaatgtgggagaactacagcaacttcatttcactagcaggaccttccatttctaaaccagatgtgattaccttattggatgaagaaaggaaggaacctgggatggttgtgagggaagggacaagaagatactgccctgatttggagtccagatacaggaccaatactttatctccagaaaaggacatttatgaaatatattcatttcagtgggatataatggaaagaattaaaagctatagccttcagggttccatttttaggaatgattgggaatgcaaaagcaagattgagggggaaaaggaacaacaagagggatattttgggcaagtgaaaattacctctgaaaaaatgaccacttacaaaaggcacaattttcttactgagtatcagatcgttcataatggagaaaaggtgtatgagtgtaaggagtgtaggaagacctttattcgtcgctcaacacttagtcaacacctgagaattcatactggtgagaaaccttataagtgtaaggaatgtgggcaggcctttagacagcgtgcacatcttattcgacatcacaaacttcacaccggtgagaaaccctatgaatgtaaggagtgtgggaaggcctttacagtgctccaagaacttactcaacatcagagacttcatacgggtgaaaaaccctatgaatgtaaggaatgtggaaaggcctttagagtacatcagcaactggctcgacatcagagaattcacactggtgagaaaccctatgaatgtaaggactgtggaaagacctttagacagtgtacacaccttacacgccatcagagacttcatactgctgaaaagctctatgaatgtaaggaatgtgggaaagccttcgtatgtggtccagaccttagagtacatcagaaaattcattttggtgagaaaccctatgaatgtaaggagtgtggaaaggcttttagaatatgccaacaacttactgttcatcagagtattcatactggtgagaaaccctacgaatgtaaggaatgtgggaagacttttagattaagacaacaactagttcgccatcagagaatacatactcgtgagaaaccctatgaatgtatggaatgttggaagacctttagtagttactcacagcttatttcacaccagagcattcatattggtgagagaccctatgaatgtgaagagtgtggaaaggcctttagactgctctcacaacttactcagcatcaaagtattcacactggtgagaaaccttatgaatgtaaggaatgtagaaaaccttttagactgctctcacaacttacccaacatcagagtattcacactggtgagaaaccttatgaatgtaaggaatgtggtaaggcttttagactttattcatttcttactcaacaccagagaattcatactggtgagaagccctacaagtgtaaggagtgtaagaaggcctttagacagcattcacaccttactcagcatcagaagattcataatggaatttaatagaagaaagccttcaaatgtatatgatgttacagaacatcagaaaattcatttttgagaaaatgtgtttcatgctcaattccaagcataataaattttatattagagaaagaatatgttgatttaaaagccttccaacaccatttaaacatggtttatcttcagcaaattcctatgagagaataatgtaatgaatgtaggaaaatctttagccttatctgtcattatctccctttctccacttgattaccagtttgatttattggacaagatactaagcttctgtgcctcattttgctgacttgtaaaatggtaataatagtacttatatgtattagttatttattgctgcgtaataaattaccacagacttagtagcataaaataacatataattatatcttataatttggatcaggagtataggcatgacttagttgggtcctctgcttcagggtctcttgcaaggctacagatttcagccagggctgaggtctcatctgaaggctcaactggggaaggatccacatccagactaacatagttgttacccaatgtatttccgtgaggcctgttgcattgagattctcagtttctagctggctgttggctgaacgctgactgcagctcctggccacaatagcctcatcaacatggctgcttgcttcatcaaggcatgcaagccaaaagggaggacagtctgctagcaagatggaagttaccatcttgtgtaatctaatcatggaagtaacattccctcaccttctactggtagaagtaagttactaggatagtccacactcaagagaacgggatgatacaagagtgtgaataagtcctggagacaggaccactggggggcctgtttagagtcagcctgccacactgtggaataggattgttgcaaggagtaagtagttaatacttggaggaatcacagtcatatagcatgtattctgtaaatattatctgtaattgttattattgtcattagtattagtgaattcacgtaaaaggaagatctgtagacataataaatgtagaaatgcctcctgtcacctctcagaaattattaaacataatttattctaggtaaaatttagattgtagtgaatgtaggaagttcttcagcacttgagctgcattagaaatttcatgccaaaaatgaatttcatgaatgtgaggtcactagtaatacagctgttgaagaattagagggaaataggaaatgattttcccataattccagaaagcaaaaggcttacaatccctgttgtctgaccacagtttaaaattaattagaaactatcaaaaatgtggcttaaaagaaattaaccacctaggaatttaatattgttgtgtatatttatgtgtgtgtataaaactcctgtgggaaagaaacaaaacatcattctataagtcagtatacttttggatgctcaaaatgccatatcttcaaccagtaggagttgtttcaagttgagtttttgatgtgatcccaccaataatttgatagtttacttgattgtggctgcataatttggtaacctatgaaagatgctagagcaccaatgtataatttttttgagacagggtgtcactttgtcccccaggctggagtgcagtggtacnagcacagttcactgtaccctgttcctcctgggctcaagtgattcttccacctaaattttttttttttttttagagaaagggtctcactatgttgcccaggctggtcttgaacttctgggctcaagtgatcctccctccttggcctccaaaggtgctggggttacaggtntgagccaccacacccngcccaactcattattcttgaaatcaataaatcagaggaaaaattgtcatttagtttccttttcccatgtgaaccaaatttcagggtcaccagaagttcatcaaattcaaatgaatttggcctggcacaggggtcacacctgtaatcccagcactttgggaggacaaggtgggtggatcacttgaggccaggagtttgagaccaacctggttaacatggtgaaaccctgtctgtactaaaaatacaaaatttagccnggcntggtggcacacacctgtagtcccaggctgaggtgggaggatcacttgancccangaggcagagtttgcagtgagctgngatcgtgccactgcactccagcctgggtgacngagtgagaccctgtctcaaaaaaaaaatttgttttttgaatgggtttttcttttttgaagaagtctaataaatctagaaggaattagaggattagaaaaatcaccattttctagaccttaatggaataatgggtccagaaaacatgatcttcaatgggtactacaactaataggtgaaatattttatagcgagatttttatggtggatctatcaaactggccacctctgaaccctttgatctgttttaaccttaataaaaatgggtctatcagacaacacacttcctgacgtaatgcaataggaagtccacaccaccatctacaaagccttattgctggaataatgaactgaaagcagacagggactagatgaacagtatatggtcatcccttggtatccatggggaattggttccaggatcctccactgatggtaaaatctgaggatgctcaagtcccttgtataaaatggcatagtatgtatttgcatattacctactcacatcttcctgtatactttaaattatctttagatcacttatacctatcacaatgtaaatactatgtaaatagttgttatactgtatttttcaatttgcattatttttattgtattttatttttattgtttttttttgagtattttctatttgagattggttgaatctgcacatatggagggctggctataaagggcaccacaaggaagaagccaaacagatccagaatgtgtgaaattctacagagcaaattacctgatttcttcaactaacaggtagcatgaaaatacaaggggaagggcaaccattaacagattaaaagagacttaaagagacatatcaactaaattcagtatgttggcattacttggacctggtttgaacaaaacataaaaagccattttggagacagtgagggaagtgtggacatggactaaatattaaatgatatttacatatattaatttggttagggattatgtcagtgtgattataaaaaataaaagatcgtatgatatgagatacatactatgaaatgaagatagacacatttggattaaaatattctagcaaaagaaataattggcaaagagagctggaaactaaattggcaacatgttgataatttaagtggagtgttttgttcatggagacttattgttctaatatttctacttttgtatgtgtttgaaatttcaataataaaatgtttaaaatcaaaaccaaaattatagactatgtagaaatgaatgacagtgagatgcctgcacatctaaccttgtcagatataatcaaagttctgttcagtgacaaattaatgccctgtaatgtggtaaggaaatcttatttgtggatacagtcttcatcttcttcacttacccacagcagcaacaccaggcctgtcacacagatgaatgtgttgagggaatgaataagtatttccgtcaagaaaaaggaaacaacaaaataaaaccaacccaagtaaagaacagccaagtggccaggtgcggtggctcatgcctgtaatcccagcactttgggaggccatggcaggtggatcacctgaggtcgggattttgagaccagcctgaccaacactgagaaaccccatctctattaaagatacaaaattagccaggcatggtggtgcatgcctgtaatcccagctacttgggaggctaaggcaggagaatcacttgaatccaggaggcggagtttgtggtgagttgagatcgcgccactgcactccagcctgggtaacagagcaagagtctgtc

SEQ ID NO: 435765 - DNA, 5407 bp, Homo sapiens
  misc_feature (3316)..(3316): n is a, c, g, or t
  misc_feature (3485)..(3485): n is a, c, g, or t
  misc_feature (3501)..(3501): n is a, c, g, or t
  misc_feature (3757)..(3757): n is a, c, g, or t
  misc_feature (3761)..(3761): n is a, c, g, or t
  misc_feature (3810)..(3810): n is a, c, g, or t
  misc_feature (3815)..(3815): n is a, c, g, or t
  misc_feature (3839)..(3839): n is a, c, g, or t
  misc_feature (3871)..(3871): n is a, c, g, or t
ctctggcttatcaggactccatagttctccaacagagaaatcttgaaaaggactgaccagtttttgcagttctaaaaccatggcccatggttcagtgacattcagggatgtggccatagacttctcacaggaagaatgggaattcctggatcctgctcagagggacttatatagggatgtaatgtgggagaactacagcaacttcatttcactagcaggaccttccatttctaaaccagatgtgattaccttattggatgaagaaaggaaggaacctgggatggttgtgagggaagggacaagaagatactgccctgatttggagtccagatacaggaccaatactttatctccagaaaaggacatttatgaaatatattcatttcagtgggatataatggaaagaattaaaagctatagccttcagggttccatttttaggaatgattgggaatgcaaaagcaagattgagggggaaaaggaacaacaagagggatattttgggcaagtgaaaattacctctgaaaaaatgaccacttacaaaaggcacaattttcttactgagtatcagatcgttcataatggagaaaaggtgtatgagtgtaaggagtgtaggaagacctttattcgtcgctcaacacttagtcaacacctgagaattcatactggtgagaaaccttataagtgtaaggaatgtgggcaggcctttagacagcgtgcacatcttattcgacatcacaaacttcacaccggtgagaaaccctatgaatgtaaggagtgtgggaaggcctttacagtgctccaagaacttactcaacatcagagacttcatacgggtgaaaaaccctatgaatgtaaggaatgtggaaaggcctttagagtacatcagcaactggctcgacatcagagaattcacactggtgagaaaccctatgaatgtaaggactgtggaaagacctttagacagtgtacacaccttacacgccatcagagacttcatactgctgaaaagctctatgaatgtaaggaatgtgggaaagccttcgtatgtggtccagaccttagagtacatcagaaaattcattttggtgagaaaccctatgaatgtaaggagtgtggaaaggcttttagaatatgccaacaacttactgttcatcagagtattcatactggtgagaaaccctacgaatgtaaggaatgtgggaagacttttagattaagacaacaactagttcgccatcagagaatacatactcgtgagaaaccctatgaatgtatggaatgttggaagacctttagtagttactcacagcttatttcacaccagagcattcatattggtgagagaccctatgaatgtgaagagtgtggaaaggcctttagactgctctcacaacttactcagcatcaaagtattcacactggtgagaaaccttatgaatgtaaggaatgtagaaaaccttttagactgctctcacaacttacccaacatcagagtattcacactggtgagaaaccttatgaatgtaaggaatgtggtaaggcttttagactttattcatttcttactcaacaccagagaattcatactggtgagaagccctacaagtgtaaggagtgtaagaaggcctttagacagcattcacaccttactcagcatcagaagattcataatggaatttaatagaagaaagccttcaaatgtatatgatgttacagaacatcagaaaattcatttttgagaaaatgtgtttcatgctcaattccaagcataataaattttatattagagaaagaatatgttgatttaaaagccttccaacaccatttaaacatggtttatcttcagcaaattcctatgagagaataatgtaatgaatgtaggaaaatctttagccttatctgtcattatctccctttctccacttgattaccagtttgatttattggacaagatactaagcttctgtgcctcattttgctgacttgtaaaatggtaataatagtacttatatgtattagttatttattgctgcgtaataaattaccacagacttagtagcataaaataacatataattatatcttataatttggatcaggagtataggcatgacttagttgggtcctctgcttcagggtctcttgcaaggctacagatttcagccagggctgaggtctcatctgaaggctcaactggggaaggatccacatccagactaacatagttgttacccaatgtatttccgtgaggcctgttgcattgagattctcagtttctagctggctgttggctgaacgctgactgcagctcctggccacaatagcctcatcaacatggctgcttgcttcatcaaggcatgcaagccaaaagggaggacagtctgctagcaagatggaagttaccatcttgtgtaatctaatcatggaagtaacattccctcaccttctactggtagaagtaagttactaggatagtccacactcaagagaacgggatgatacaagagtgtgaataagtcctggagacaggaccactggggggcctgtttagagtcagcctgccacactgtggaataggattgttgcaaggagtaagtagttaatacttggaggaatcacagtcatatagcatgtattctgtaaatattatctgtaattgttattattgtcattagtattagtgaattcacgtaaaaggaagatctgtagacataataaatgtagaaatgcctcctgtcacctctcagaaattattaaacataatttattctaggtaaaatttagattgtagtgaatgtaggaagttcttcagcacttgagctgcattagaaatttcatgccaaaaatgaatttcatgaatgtgaggtcactagtaatacagctgttgaagaattagagggaaataggaaatgattttcccataattccagaaagcaaaaggcttacaatccctgttgtctgaccacagtttaaaattaattagaaactatcaaaaatgtggcttaaaagaaattaaccacctaggaatttaatattgttgtgtatatttatgtgtgtgtataaaactcctgtgggaaagaaacaaaacatcattctataagtcagtatacttttggatgctcaaaatgccatatcttcaaccagtaggagttgtttcaagttgagtttttgatgtgatcccaccaataatttgatagtttacttgattgtggctgcataatttggtaacctatgaaagatgctagagcaccaatgtataatttttttgagacagggtgtcactttgtcccccaggctggagtgcagtggtacnagcacagttcactgtaccctgttcctcctgggctcaagtgattcttccacctaaattttttttttttttttagagaaagggtctcactatgttgcccaggctggtcttgaacttctgggctcaagtgatcctccctccttggcctccaaaggtgctggggttacaggtntgagccaccacacccngcccaactcattattcttgaaatcaataaatcagaggaaaaattgtcatttagtttccttttcccatgtgaaccaaatttcagggtcaccagaagttcatcaaattcaaatgaatttggcctggcacaggggtcacacctgtaatcccagcactttgggaggacaaggtgggtggatcacttgaggccaggagtttgagaccaacctggttaacatggtgaaaccctgtctgtactaaaaatacaaaatttagccnggcntggtggcacacacctgtagtcccaggctgaggtgggaggatcacttgancccangaggcagagtttgcagtgagctgngatcgtgccactgcactccagcctgggtgacngagtgagaccctgtctcaaaaaaaaaatttgttttttgaatgggtttttcttttttgaagaagtctaataaatctagaaggaattagaggattagaaaaatcaccattttctagaccttaatggaataatgggtccagaaaacatgatcttcaatgggtactacaactaataggtgaaatattttatagcgagatttttatggtggatctatcaaactggccacctctgaaccctttgatctgttttaaccttaataaaaatgggtctatcagacaacacacttcctgacgtaatgcaataggaagtccacaccaccatctacaaagccttattgctggaataatgaactgaaagcagacagggactagatgaacagtatatggtcatcccttggtatccatggggaattggttccaggatcctccactgatggtaaaatctgaggatgctcaagtcccttgtataaaatggcatagtatgtatttgcatattacctactcacatcttcctgtatactttaaattatctttagatcacttatacctatcacaatgtaaatactatgtaaatagttgttatactgtatttttcaatttgcattatttttattgtattttatttttattgtttttttttgagtattttctatttgagattggttgaatctgcacatatggagggctggctataaagggcaccacaaggaagaagccaaacagatccagaatgtgtgaaattctacagagcaaattacctgatttcttcaactaacaggtagcatgaaaatacaaggggaagggcaaccattaacagattaaaatattctagcaaaagaaataattggcaaagagagctggaaactaaattggcaacatgttgataatttaagtggagtgttttgttcatggagacttattgttctaatatttctacttttgtatgtgtttgaaatttcaataataaaatgtttaaaatcaaaaccaaaattatagactatgtagaaatgaatgacagtgagatgcctgcacatctaaccttgtcagatataatcaaagttctgttcagtgacaaattaatgccctgtaatgtggtaaggaaatcttatttgtggatacagtcttcatcttcttcacttacccacagcagcaacaccaggcctgtcacacagatgaatgtgttgagggaatgaataagtatttccgtcaagaaaaaggaaacaacaaaataaaaccaacccaagtaaagaacagccaagtggccaggtgcggtggctcatgcctgtaatcccagcactttgggaggccatggcaggtggatcacctgaggtcgggattttgagaccagcctgaccaacactgagaaaccccatctctattaaagatacaaaattagccaggcatggtggtgcatgcctgtaatcccagctacttgggaggctaaggcaggagaatcacttgaatccaggaggcggagtttgtggtgagttgagatcgcgccactgcactccagcctgggtaacagagcaagagtctgtc

SEQ ID NO: 435766 - DNA, 1807 bp, Homo sapiens
agggatcccaccccttctctgtgttttcactctgaagctctacacaactttacacctgaatgaacgccaaacctctatggatatataaagggaagcttgaggaggaatttcacagttacagtgcagaagcagaggcaaaagaattaaccagctcttcagtcaagcaaatcctctactcaccatgcttcctcctgccattcatttctatctccttccccttgcatgcatcctaatgaaaagctgtttggcttttaaaaatgatgccacagaaatcctttattcacatgtggttaaacctgttccagcacaccccagcagcaacagcacgttgaatcaagccagaaatggaggcaggcatttcagtaacactggactggatcggaacactcgggttcaagtgggttgccgggaactgcgttccaccaaatacatctctgatggccagtgcaccagcatcagccctctgaaggagctggtgtgtgctggcgagtgcttgcccctgccagtgctccctaactggattggaggaggctatggaacaaagtactggagcaggaggagctcccaggagtggcggtgtgtcaatgacaaaacccgtacccagagaatccagctgcagtgccaagatggcagcacacgcacctacaaaatcacagtagtcactgcctgcaagtgcaagaggtacacccggcagcacaacgagtccagtcacaactttgagagcatgtcacctgccaagccagtccagcatcacagagagcggaaaagagccagcaaatccagcaagcacagcatgagttagaactcagactcccataactagacttactagtaaccatctgctttacagatttgattgcttggaagactcaagcctgccactgctgttttctcacttgaaagtatatgctttctgctttgatcaaacccagcaagctgtcttaagtatcaggaccttctttgggaatagtttttccttttcaagtttttcaagatgtaggtatatccatgaatgcaatttgcatttaaattccacgtatcctgtagttttaattcctcattgttcttaaaagactgttgatactataaacatcagtgaatcattatattttaaaacagaaaagggcttctcagataccctccatctactggcccatcccctctcctaaacaaaactccttcaaaacaggttaaaaaaaatatgttgtcatgaatcttcacagtaacatttcagaaaggtgcttttttggtactcttcatgggaacagtttagcagccatgagtgatcttcctttgaaagagaatgaaagaccctgtgacatttcacttcaaaaataagccctgtagctctttacggtcgcatagtataaaattataccctgcatgctgaccctcgcttggaatggaatgccagaaatgcatggcagcagctaataagtaaagctgattaactatttatttgtcaatgttattatttaatgagctttcacatgtgatttgtttcaaaactttaattttttaatgttttgaaactttttcatggacctaaatattttcctatatgatttgtggttgattagaaatatgaaatacatgttgtagatatgtaaaatgaatattttagtctccttattacatatatgttcatggtgaactttatcaatagtatggatctttttaaatcaataagatgctttgtaaagttgaaataagtaatactttcttgtttaatctgtgcaatcagaaggtgtcttgaccttcaattcaattggtttcttttaacaaaaataaacactgctaaaagtta

SEQ ID NO: 435767 - DNA, 1795 bp, Homo sapiens
aacgcagttcccggcaacccacttgaacccgagtgttccgatccagtccagtgttactgaaatgcctgcctccatttctggcttgattcaacgagctgttgctgctggggtgtgctggaacagcaaaagaattaaccagctcttcagtcaagcaaatcctctactcaccatgcttcctcctgccattcatttctatctccttccccttgcatgcatcctaatgaaaagctgtttggcttttaaaaatgatgccacagaaatcctttattcacatgtggttaaacctgttccagcacaccccagcagcaacagcacgttgaatcaagccagaaatggaggcaggcatttcagtaacactggactggatcggaacactcgggttcaagtgggttgccgggaactgcgttccaccaaatacatctctgatggccagtgcaccagcatcagccctctgaaggagctggtgtgtgctggcgagtgcttgcccctgccagtgctccctaactggattggaggaggctatggaacaaagtactggagcaggaggagctcccaggagtggcggtgtgtcaatgacaaaacccgtacccagagaatccagctgcagtgccaagatggcagcacacgcacctacaaaatcacagtagtcactgcctgcaagtgcaagaggtacacccggcagcacaacgagtccagtcacaactttgagagcatgtcacctgccaagccagtccagcatcacagagagcggaaaagagccagcaaatccagcaagcacagcatgagttagaactcagactcccataactagacttactagtaaccatctgctttacagatttgattgcttggaagactcaagcctgccactgctgttttctcacttgaaagtatatgctttctgctttgatcaaacccagcaagctgtcttaagtatcaggaccttctttgggaatagtttttccttttcaagtttttcaagatgtaggtatatccatgaatgcaatttgcatttaaattccacgtatcctgtagttttaattcctcattgttcttaaaagactgttgatactataaacatcagtgaatcattatattttaaaacagaaaagggcttctcagataccctccatctactggcccatcccctctcctaaacaaaactccttcaaaacaggttaaaaaaaatatgttgtcatgaatcttcacagtaacatttcagaaaggtgcttttttggtactcttcatgggaacagtttagcagccatgagtgatcttcctttgaaagagaatgaaagaccctgtgacatttcacttcaaaaataagccctgtagctctttacggtcgcatagtataaaattataccctgcatgctgaccctcgcttggaatggaatgccagaaatgcatggcagcagctaataagtaaagctgattaactatttatttgtcaatgttattatttaatgagctttcacatgtgatttgtttcaaaactttaattttttaatgttttgaaactttttcatggacctaaatattttcctatatgatttgtggttgattagaaatatgaaatacatgttgtagatatgtaaaatgaatattttagtctccttattacatatatgttcatggtgaactttatcaatagtatggatctttttaaatcaataagatgctttgtaaagttgaaataagtaatactttcttgtttaatctgtgcaatcagaaggtgtcttgaccttcaattcaattggtttcttttaacaaaaataaacactgctaaaagtta

SEQ ID NO: 435768 - DNA, 1873 bp, Homo sapiens
agggatcccaccccttctctgtgttttcactctgaagctctacacaactttacacctgaatgaacgccaaacctctatggatatataaagggaagcttgaggaggaatttcacagttacagtgcagaagcagaggcaaaagaattaaccagctcttcagtcaagcaaatcctctactcaccatgcttcctcctgccattcatttctatctccttccccttgcatgcatcctaatgaaaagctgtttggcttttaaaaatgatgccacagaaatcctttattcacatgtggttaaacctgttccagcacaccccagcagcaacagcacgttgaatcaagccagaaatggaggcaggcatttcagtaacactggactggatcggaacactcgggttcaagtgggttgccgggaactgcgttccaccaaatacatctctgatggccagtgcaccagcatcagccctctgaaggagctggtgtgtgctggcgagtgcttgcccctgccagtgctccctaactggattggaggaggctatggaacaaagtactggagcaggaggagctcccaggagtggcggtgtgtcaatgacaaaacccgtacccagagaatccagctgcagtgccaagatggcagcacacgcacctacaaaatcacagtagtcactgcctgcaagtgcaagaggtacacccggcagcacaacgagtccagtcacaactttgagagcatgtcacctgccaagccagtccagcatcacagagagcggaaaagagccagcaaatccagcaagcacagcatgagttagaactcagactcccataactagacttactagtaaccatctgctttacagatttgattgcttggaagactcaagcctgccactgctgttttctcacttgaaagtatatgctttctgctttgatcaaacccagcaagctgtcttaagtatcaggaccttctttgggaatagtttttccttttcaagtttttcaagatgtaggtatatccatgaatgcaatttgcatttaaattccacgtatcctgtagttttaattcctcattgttcttaaaagactgttgatactataaacatcagtgaatcattatattttaaaacagaaaagggcttctcagataccctccatctactggcccatcccctctcctaaacaaaactccttcaaaacaggttaaaaaaaatatgttgtcatgaatcttcacagtaacatttcagaaaggtgcttttttggtactcttcatgggaacagtttagcagccatgagtgatcttcctttgaaagagaatgaaagaccctgtgacatttcacttcaaaaataagccctgtagctctttacggtcgcatagtataaaattataccctgcatgctgaccctcgcttggaatggaatgccagaaatgcatggcagcagctaataagtaaagctgattaactatttatttgtcaatgttattatttaatgagctttcacatgtgatttgtttcaaaactttaattttttaatgttttgaaactttttcatggacctaaatattttcctatatgatttgtggttgattagaaatatgaaatacatgttgtagatatgtaaaatgaatattttagtctccttattacatatatgttcatggtgaactttatcaatagtatggatctttttaaatcaataagatgctttgtaaagttgaaataagtaatactttcttgtttaatctgtgcaatcagaaggtgtcttgaccttcaattcaattggtttcttttaacaaaaataaacactgctaaaagttattgttgttgcctctaacatgtataaagggtgcaaaaattgtagaataaatgtataagggtaattgc

SEQ ID NO: 435769 - DNA, 1753 bp, Homo sapiens
agggatcccaccccttctctgtgttttcactctgaagctctacacaactttacacctgaatgaacgccaaacctctatggatatataaagggaagcttgaggaggaatttcacagttacagtgcagaagcagaggcaaaagaattaaccagctcttcagtcaagcaaatcctctactcaccatgcttcctcctgccattcatttctatctccttccccttgcatgcatcctaatgaaaagctgtttggcttttaaaaatgatgccacagaaatcctttattcacatgtggttaaacctgttccagcacaccccagcagcaacagcacgttgaatcaagccagaaatggaggcaggcatttcagtaacactggactggatcggaacactcgggttcaagtgggttgccgggaactgcgttccaccaaatacatctctgatggccagtgcaccagcatcagccctctgaaggagctggtgtgtgctggcgagtgcttgcccctgccagtgctccctaactggattggaggaggctatggaacaaagtactggagcaggaggagctcccaggagtggcggtgtgtcaatgactacaaaatcacagtagtcactgcctgcaagtgcaagaggtacacccggcagcacaacgagtccagtcacaactttgagagcatgtcacctgccaagccagtccagcatcacagagagcggaaaagagccagcaaatccagcaagcacagcatgagttagaactcagactcccataactagacttactagtaaccatctgctttacagatttgattgcttggaagactcaagcctgccactgctgttttctcacttgaaagtatatgctttctgctttgatcaaacccagcaagctgtcttaagtatcaggaccttctttgggaatagtttttccttttcaagtttttcaagatgtaggtatatccatgaatgcaatttgcatttaaattccacgtatcctgtagttttaattcctcattgttcttaaaagactgttgatactataaacatcagtgaatcattatattttaaaacagaaaagggcttctcagataccctccatctactggcccatcccctctcctaaacaaaactccttcaaaacaggttaaaaaaaatatgttgtcatgaatcttcacagtaacatttcagaaaggtgcttttttggtactcttcatgggaacagtttagcagccatgagtgatcttcctttgaaagagaatgaaagaccctgtgacatttcacttcaaaaataagccctgtagctctttacggtcgcatagtataaaattataccctgcatgctgaccctcgcttggaatggaatgccagaaatgcatggcagcagctaataagtaaagctgattaactatttatttgtcaatgttattatttaatgagctttcacatgtgatttgtttcaaaactttaattttttaatgttttgaaactttttcatggacctaaatattttcctatatgatttgtggttgattagaaatatgaaatacatgttgtagatatgtaaaatgaatattttagtctccttattacatatatgttcatggtgaactttatcaatagtatggatctttttaaatcaataagatgctttgtaaagttgaaataagtaatactttcttgtttaatctgtgcaatcagaaggtgtcttgaccttcaattcaattggtttcttttaacaaaaataaacactgctaaaagtta

SEQ ID NO: 435770 - DNA, 926 bp, Homo sapiens
caggatgggtcttaatatgtagtggagaggggttggtgaaacagtacttttcatctctatgttggggtagagacttgctgactgagtgtagggctgattgcaaatgaagatttccctgcccactaaggttttagggaagggctttggccaatctgctttatctcagatgtgtgataactaggcctaaggcaataatccttgagcaaaagactcttgctctggcacctggatacctatcttatggagttattctaaggattaagagataatagatataaagcacctaatacagttagagtacatcttaaacatgtaatgtatcgagctattacagagagttaactgattacaggaacgtggagtggtaagttaaacaaacctggccacctgcttataaagcaatataatggtatgtgtaacaatctggatcaactttcttcaaaaacggtgtgctttgaaatgccaggatggctgattttacttattttaattaatttttctttgttgctttcagtgaagcaaagaactgccttgtagataaacatattgcatttattggagattccagaattcgtcaattgttttattcttttgtaaaaataattaatccccaattcaaagaagaaggaaataaggtaaaacttgtctattcccttctgtagagtgttttagaagttaaccaactgaatagttacaggaggagtgtgtctctccagattgagtaggagctgaaaaaattttactttgattttcagaaaggttggggaaaaagagggatgaattgctttaatgaggaagatgacaaaaagaagtggtggctaagacattggcaagctttttattgtaataacttaaacttttagttttcagaaataataaattcttaccatggaaaaacttttaaatttccttagaaagaagacaaa

SEQ ID NO: 435771 - DNA, 395 bp, Homo sapiens
caggatgggtcttaatatgtagtggagaggggttggtgaaacagtacttttcatctctatgttggggtagagacttgctgactgagtgtagggctgattgcaaatgaagatttccctgcccactaaggttttagggaagggctttggccaatctgctttatctcagatgtgtgataactaggcctaaggcaataatccttgagcaaaagactcttgctctggcacctggatacctatcttatggagttattctaaggattaagagataatagatataaagcacctaatacagttagagtacatcttaaacatgtaatgtatcgagctattacagagagttaactgattacaggaacgtggttggctcagggtttgacagagaaaagacaaataaa

SEQ ID NO: 435772 - DNA, 370 bp, Homo sapiens
tacatggagcagcaaaagcaagcagcaagcatgttcagtggaataaacgggggtaagctcgtatctaaagaaatggatagtagcagagtagttctgtattcctcatttgagaattagcgacggtctgtacccaaaatttcaaattttctgttgtttatttcagtagtttctttcttgacctattccatctgggctagcagttgtaaaaacaaagcagagtgcaatgaactccatccgtctgtttctgtggtacagattttagccttcatcgtccttttcccaatttaaaatacatcttatatccatctggtttttctttagcacttgctctattcatttccctttttgttcctctacttttagaacacat

SEQ ID NO: 435773 - DNA, 4068 bp, Homo sapiens
cctaaggctcgcgtccgggccaggcgggtacccctagtactctctccccacacccccatggctctgccgcagccgccgccgcccgccggggcgcgtgacccggtgaccccggagcactgggcatccggacccccctcgcaggcgcagccgctattaaggcaggaggctaaagaggaggaggaaggggaggagacaggcgtccagggcgcctggggaaccggcacggcggagcagcggcggcggggctggggggaggccgccgagtcggccgcggccgaggaggggcaggcggaggtcgggggcgccgcggccgcggggtcaggttccccggcgggaggcgcaggtggcggcctggggagctggcggccgctcctcgcctggctgcagcggcggcagccccagtgctgcccctgtgcggcgcccctttcccgctccgccgcgcactgttgtcatggaggaaccaagatggcggctctggcctacaacctgggcaagcgggagatcaaccactacttcagcgtgaggagcgccaaggtgctggcgctggtggccgtgctgctgctcgcagcgtgccacctcgcctcccgccgctaccgaggcaatgattcgtgtgaataccttctctcaagtggcagatttcttggagagaaagtttggcaacctcacagttgtatgatgcataaatacaaaatcagtgaagcaaagaactgccttgtagataaacatattgcatttattggagattccagaattcgtcaattgttttattcttttgtaaaaataattaatccccaattcaaagaagaaggaaataagcatgaaaacattccttttgaagacaagactgcatcagttaaagtggattttctgtggcatcctgaagttaatggttctatgaaacagtgtatcaaagtgtggactgaggattccattgcaaagccacatgtgattgtagcaggagctgccacatggtccatcaagattcacaatggtagcagtgaagcgctttctcaatataaaatgaacatcacctccatagcaccacttttagaaaaattggcaaagactagtgatgtttattgggtcttacaagatcctgtttatgaagatctattaagtgaaaataggaagatgatcactaatgagaagatagatgcttacaatgaagctgcagtcagtattttgaatagtagcaccagaaattctaaatcaaatgttaagatgttcagtgtttccaaattaattgctcaagaaaccatcatggaatctttggatggcttacatcttcctgaatcgagcagagaaactactgcaatgattcttatgaatgtgtattgcaataagattttgaagcctgtagatgggtcctgttgtcaacctcggcctcctgttactctcatacagaagctagctgcttgttttttcactttatctattatcggatatttaattttttacataattcatcgtaatgctcatcggaagaataagccgtgtactgatttggaaagtggagaggaaaagaaaaatattatcaatacccctgtgtcttcattagaaatacttttacaatctttctgcaaacttggcctgattatggcatatttctatatgtgtgaccgtgcaaatctgttcatgaaggaaaacaaattttatacacattcatctttctttattccaattatctacattttggttttgggagtattttataatgaaaatactaaagagactaaagtattaaatagagaacaaacagacgaatggaaaggctggatgcaacttgtgattttgatttatcacatttctggagcaagtacatttttgcctgtatacatgcacattcgagttctggttgctgcatatttatttcagacagggtatgggcatttctcatacttttggataaaaggagattttggaatctatagagtatgtcaggttttatttcgtctcaatttcctggtagtggtgttatgtatagtaatggatcgaccttatcaattctattactttgtccccttggtcactgtatggttcatggtcatatatgttactttagcactatggccacaaataatccaaaaaaaagcaaacggaaattgtttctggcattttggcttactgttgaaactaggctttttgctgttattcatatgttttttggcatattctcagggtgcatttgagaagatcttttctctttggccattgtccaagtgttttgaactgaaagggaatgtatatgaatggtggttcagatggaggttagaccgttatgtagttttccacggaatgctgtttgcttttatttatctggctttgcagaagcgtcaaatactttctgaaggaaagggtgaacctcttttttcaaacaaaatttcaaattttctgttgtttatttcagtagtttctttcttgacctattccatctgggctagcagttgtaaaaacaaagcagagtgcaatgaactccatccgtctgtttctgtggtacagattttagccttcatcctaataagaaacatccctggatatgcccgttcagtttacagttcattttttgcttggtttggaaaaatttcattagagctatttatttgccagtatcacatatggctggcagcggacacaaggggtatcttggtactgatacctggaaaccctatgctcaacatcattgtcagcactttcatatttgtttgtgtggcacatgaaatttctcagatcactaatgatcttgcacagattattattcctaaagataactcatctctcttgaaaaggttggcatgtatagctgcatttttttgtggactcctcatcttatcatccattcaagataaatcaaaacattaggttccaaaaattctaaaaaacctaaactcttcaggctacctttgtgtgtctctagaagagaaaagcatctatctggagatataaatgtgtttgtaaatataaacgtttgtggcaagaggacagttctgtgacatctgttgaacatatgtggttgtatatattggaaatgtacatatccaatatgaaatactaaaacaaacaaacaaacaaaaaaccagaatgcattgtataggattgcatgtgaagtcttttctactgaatctatatttccatttgtaagtgattttaagttaacatatgaaggcagggaaatgattacctttccagtaaaaagtatagataatttaattaacttagtgacaccaccaagtgttttgatataactaaatttgtggtaataagactgtctgcacctgtattcattgtggaacttcctctttcattggaaactttcttactcaagaatgacggcagtattgttttcttatatgtgcaatgaagtggaatgataaacagtatgcctttaatttatatgtgttcttgttctgatgttgtttcctgaaatgatttttcttcctaactgtggttttcgggtatgcaagcctaaatctttgtacactttgtctcacagaatagttctgaggctccatgacagggttttgtcattgttgatgttattgttgcttcgttttataaaaaagccaaaattttttttccaatccaaacgttcacctgtttcctttcctcaagctataccagtgtaataccagttaccctgtggatccatttaatatgttatccccactaattaattttcgtatattatttccaatatttggaaagctctttatagccatttggtatttcctattacccacctcctattttaaatatttatcagtctaaacttgtgcagtgtagtaaacatgcaagttgttacgattgagctgtattaccataagtagaattttaagtaaactggtgaatttgggcaataaatgtttttgctttttgtttgatttttttttacaagctaactgttagaggtatacatttatttatctgttgtacagatttgattatgattttaatgtttgaaagattgcacttgtttgcttttactatatgtggggtaaaatatattttctgttcacagtatatgaaaatatggagtaatttaaacagtaaataaacattctgtggatgctt

SEQ ID NO: 435774 - DNA, 4264 bp, Homo sapiens
cctaaggctcgcgtccgggccaggcgggtacccctagtactctctccccacacccccatggctctgccgcagccgccgccgcccgccggggcgcgtgacccggtgaccccggagcactgggcatccggacccccctcgcaggcgcagccgctattaaggcaggaggctaaagaggaggaggaaggggaggagacaggcgtccagggcgcctggggaaccggcacggcggagcagcggcggcggggctggggggaggccgccgagtcggccgcggccgaggaggggcaggcggaggtcgggggcgccgcggccgcggggtcaggttccccggcgggaggcgcaggtggcggcctggggagctggcggccgctcctcgcctggctgcagcggcggcagccccagtgctgcccctgtgcggcgcccctttcccgctccgccgcgcactgttgtcatggaggaaccaagatggcggctctggcctacaacctgggcaagcgggagatcaaccactacttcagcgtgaggagcgccaaggtgctggcgctggtggccgtgctgctgctcgcagcgtgccacctcgcctcccgccgctaccgaggcaatgattcgtgtgaataccttctctcaagtggcagatttcttggagagaaagtttggcaacctcacagttgtatgatgcataaatacaaaatcagtgaagcaaagaactgccttgtagataaacatattgcatttattggagattccagaattcgtcaattgttttattcttttgtaaaaataattaatccccaattcaaagaagaaggaaataagtagagacagggtttcaccgtgttagccaggatggtctcgatctcctgacctcgtgatccacccacctcggcctcccaaagtgctgggattacaggtgtgagccactgcacccggccaactttttatttttaacgtgtattacaccattaagcaagttccaacaatatcagagaattggtgtcattcttgctttaagcatgaaaacattccttttgaagacaagactgcatcagttaaagtggattttctgtggcatcctgaagttaatggttctatgaaacagtgtatcaaagtgtggactgaggattccattgcaaagccacatgtgattgtagcaggagctgccacatggtccatcaagattcacaatggtagcagtgaagcgctttctcaatataaaatgaacatcacctccatagcaccacttttagaaaaattggcaaagactagtgatgtttattgggtcttacaagatcctgtttatgaagatctattaagtgaaaataggaagatgatcactaatgagaagatagatgcttacaatgaagctgcagtcagtattttgaatagtagcaccagaaattctaaatcaaatgttaagatgttcagtgtttccaaattaattgctcaagaaaccatcatggaatctttggatggcttacatcttcctgaatcgagcagagaaactactgcaatgattcttatgaatgtgtattgcaataagattttgaagcctgtagatgggtcctgttgtcaacctcggcctcctgttactctcatacagaagctagctgcttgttttttcactttatctattatcggatatttaattttttacataattcatcgtaatgctcatcggaagaataagccgtgtactgatttggaaagtggagaggaaaagaaaaatattatcaatacccctgtgtcttcattagaaatacttttacaatctttctgcaaacttggcctgattatggcatatttctatatgtgtgaccgtgcaaatctgttcatgaaggaaaacaaattttatacacattcatctttctttattccaattatctacattttggttttgggagtattttataatgaaaatactaaagagactaaagtattaaatagagaacaaacagacgaatggaaaggctggatgcaacttgtgattttgatttatcacatttctggagcaagtacatttttgcctgtatacatgcacattcgagttctggttgctgcatatttatttcagacagggtatgggcatttctcatacttttggataaaaggagattttggaatctatagagtatgtcaggttttatttcgtctcaatttcctggtagtggtgttatgtatagtaatggatcgaccttatcaattctattactttgtccccttggtcactgtatggttcatggtcatatatgttactttagcactatggccacaaataatccaaaaaaaagcaaacggaaattgtttctggcattttggcttactgttgaaactaggctttttgctgttattcatatgttttttggcatattctcagggtgcatttgagaagatcttttctctttggccattgtccaagtgttttgaactgaaagggaatgtatatgaatggtggttcagatggaggttagaccgttatgtagttttccacggaatgctgtttgcttttatttatctggctttgcagaagcgtcaaatactttctgaaggaaagggtgaacctcttttttcaaacaaaatttcaaattttctgttgtttatttcagtagtttctttcttgacctattccatctgggctagcagttgtaaaaacaaagcagagtgcaatgaactccatccgtctgtttctgtggtacagattttagccttcatcctaataagaaacatccctggatatgcccgttcagtttacagttcattttttgcttggtttggaaaaatttcattagagctatttatttgccagtatcacatatggctggcagcggacacaaggggtatcttggtactgatacctggaaaccctatgctcaacatcattgtcagcactttcatatttgtttgtgtggcacatgaaatttctcagatcactaatgatcttgcacagattattattcctaaagataactcatctctcttgaaaaggttggcatgtatagctgcatttttttgtggactcctcatcttatcatccattcaagataaatcaaaacattaggttccaaaaattctaaaaaacctaaactcttcaggctacctttgtgtgtctctagaagagaaaagcatctatctggagatataaatgtgtttgtaaatataaacgtttgtggcaagaggacagttctgtgacatctgttgaacatatgtggttgtatatattggaaatgtacatatccaatatgaaatactaaaacaaacaaacaaacaaaaaaccagaatgcattgtataggattgcatgtgaagtcttttctactgaatctatatttccatttgtaagtgattttaagttaacatatgaaggcagggaaatgattacctttccagtaaaaagtatagataatttaattaacttagtgacaccaccaagtgttttgatataactaaatttgtggtaataagactgtctgcacctgtattcattgtggaacttcctctttcattggaaactttcttactcaagaatgacggcagtattgttttcttatatgtgcaatgaagtggaatgataaacagtatgcctttaatttatatgtgttcttgttctgatgttgtttcctgaaatgatttttcttcctaactgtggttttcgggtatgcaagcctaaatctttgtacactttgtctcacagaatagttctgaggctccatgacagggttttgtcattgttgatgttattgttgcttcgttttataaaaaagccaaaattttttttccaatccaaacgttcacctgtttcctttcctcaagctataccagtgtaataccagttaccctgtggatccatttaatatgttatccccactaattaattttcgtatattatttccaatatttggaaagctctttatagccatttggtatttcctattacccacctcctattttaaatatttatcagtctaaacttgtgcagtgtagtaaacatgcaagttgttacgattgagctgtattaccataagtagaattttaagtaaactggtgaatttgggcaataaatgtttttgctttttgtttgatttttttttacaagctaactgttagaggtatacatttatttatctgttgtacagatttgattatgattttaatgtttgaaagattgcacttgtttgcttttactatatgtggggtaaaatatattttctgttcacagtatatgaaaatatggagtaatttaaacagtaaataaacattctgtggatgctt

SEQ ID NO: 435775 - DNA, 3947 bp, Homo sapiens
cctaaggctcgcgtccgggccaggcgggtacccctagtactctctccccacacccccatggctctgccgcagccgccgccgcccgccggggcgcgtgacccggtgaccccggagcactgggcatccggacccccctcgcaggcgcagccgctattaaggcaggaggctaaagaggaggaggaaggggaggagacaggcgtccagggcgcctggggaaccggcacggcggagcagcggcggcggggctggggggaggccgccgagtcggccgcggccgaggaggggcaggcggaggtcgggggcgccgcggccgcggggtcaggttccccggcgggaggcgcaggtggcggcctggggagctggcggccgctcctcgcctggctgcagcggcggcagccccagtgctgcccctgtgcggcgcccctttcccgctccgccgcgcactgttgtcatggaggaaccaagatggcggctctggcctacaacctgggcaagcgggagatcaaccactacttcagcgtgaggagcgccaaggtgctggcgctggtggccgtgctgctgctcgcagcgtgccacctcgcctcccgccgctaccgaggcaatgattcgtgtgaataccttctctcaagtggcagatttcttggagagaaagtttggcaacctcacagttgtatgatgcataaatacaaaatcagcatgaaaacattccttttgaagacaagactgcatcagttaaagtggattttctgtggcatcctgaagttaatggttctatgaaacagtgtatcaaagtgtggactgaggattccattgcaaagccacatgtgattgtagcaggagctgccacatggtccatcaagattcacaatggtagcagtgaagcgctttctcaatataaaatgaacatcacctccatagcaccacttttagaaaaattggcaaagactagtgatgtttattgggtcttacaagatcctgtttatgaagatctattaagtgaaaataggaagatgatcactaatgagaagatagatgcttacaatgaagctgcagtcagtattttgaatagtagcaccagaaattctaaatcaaatgttaagatgttcagtgtttccaaattaattgctcaagaaaccatcatggaatctttggatggcttacatcttcctgaatcgagcagagaaactactgcaatgattcttatgaatgtgtattgcaataagattttgaagcctgtagatgggtcctgttgtcaacctcggcctcctgttactctcatacagaagctagctgcttgttttttcactttatctattatcggatatttaattttttacataattcatcgtaatgctcatcggaagaataagccgtgtactgatttggaaagtggagaggaaaagaaaaatattatcaatacccctgtgtcttcattagaaatacttttacaatctttctgcaaacttggcctgattatggcatatttctatatgtgtgaccgtgcaaatctgttcatgaaggaaaacaaattttatacacattcatctttctttattccaattatctacattttggttttgggagtattttataatgaaaatactaaagagactaaagtattaaatagagaacaaacagacgaatggaaaggctggatgcaacttgtgattttgatttatcacatttctggagcaagtacatttttgcctgtatacatgcacattcgagttctggttgctgcatatttatttcagacagggtatgggcatttctcatacttttggataaaaggagattttggaatctatagagtatgtcaggttttatttcgtctcaatttcctggtagtggtgttatgtatagtaatggatcgaccttatcaattctattactttgtccccttggtcactgtatggttcatggtcatatatgttactttagcactatggccacaaataatccaaaaaaaagcaaacggaaattgtttctggcattttggcttactgttgaaactaggctttttgctgttattcatatgttttttggcatattctcagggtgcatttgagaagatcttttctctttggccattgtccaagtgttttgaactgaaagggaatgtatatgaatggtggttcagatggaggttagaccgttatgtagttttccacggaatgctgtttgcttttatttatctggctttgcagaagcgtcaaatactttctgaaggaaagggtgaacctcttttttcaaacaaaatttcaaattttctgttgtttatttcagtagtttctttcttgacctattccatctgggctagcagttgtaaaaacaaagcagagtgcaatgaactccatccgtctgtttctgtggtacagattttagccttcatcctaataagaaacatccctggatatgcccgttcagtttacagttcattttttgcttggtttggaaaaatttcattagagctatttatttgccagtatcacatatggctggcagcggacacaaggggtatcttggtactgatacctggaaaccctatgctcaacatcattgtcagcactttcatatttgtttgtgtggcacatgaaatttctcagatcactaatgatcttgcacagattattattcctaaagataactcatctctcttgaaaaggttggcatgtatagctgcatttttttgtggactcctcatcttatcatccattcaagataaatcaaaacattaggttccaaaaattctaaaaaacctaaactcttcaggctacctttgtgtgtctctagaagagaaaagcatctatctggagatataaatgtgtttgtaaatataaacgtttgtggcaagaggacagttctgtgacatctgttgaacatatgtggttgtatatattggaaatgtacatatccaatatgaaatactaaaacaaacaaacaaacaaaaaaccagaatgcattgtataggattgcatgtgaagtcttttctactgaatctatatttccatttgtaagtgattttaagttaacatatgaaggcagggaaatgattacctttccagtaaaaagtatagataatttaattaacttagtgacaccaccaagtgttttgatataactaaatttgtggtaataagactgtctgcacctgtattcattgtggaacttcctctttcattggaaactttcttactcaagaatgacggcagtattgttttcttatatgtgcaatgaagtggaatgataaacagtatgcctttaatttatatgtgttcttgttctgatgttgtttcctgaaatgatttttcttcctaactgtggttttcgggtatgcaagcctaaatctttgtacactttgtctcacagaatagttctgaggctccatgacagggttttgtcattgttgatgttattgttgcttcgttttataaaaaagccaaaattttttttccaatccaaacgttcacctgtttcctttcctcaagctataccagtgtaataccagttaccctgtggatccatttaatatgttatccccactaattaattttcgtatattatttccaatatttggaaagctctttatagccatttggtatttcctattacccacctcctattttaaatatttatcagtctaaacttgtgcagtgtagtaaacatgcaagttgttacgattgagctgtattaccataagtagaattttaagtaaactggtgaatttgggcaataaatgtttttgctttttgtttgatttttttttacaagctaactgttagaggtatacatttatttatctgttgtacagatttgattatgattttaatgtttgaaagattgcacttgtttgcttttactatatgtggggtaaaatatattttctgttcacagtatatgaaaatatggagtaatttaaacagtaaataaacattctgtggatgctt

SEQ ID NO: 435776 - DNA, 4234 bp, Homo sapiens
  misc_feature (4200)..(4200): n is a, c, g, or t
cctaaggctcgcgtccgggccaggcgggtacccctagtactctctccccacacccccatggctctgccgcagccgccgccgcccgccggggcgcgtgacccggtgaccccggagcactgggcatccggacccccctcgcaggcgcagccgctattaaggcaggaggctaaagaggaggaggaaggggaggagacaggcgtccagggcgcctggggaaccggcacggcggagcagcggcggcggggctggggggaggccgccgagtcggccgcggccgaggaggggcaggcggaggtcgggggcgccgcggccgcggggtcaggttccccggcgggaggcgcaggtggcggcctggggagctggcggccgctcctcgcctggctgcagcggcggcagccccagtgctgcccctgtgcggcgcccctttcccgctccgccgcgcactgttgtcatggaggaaccaagatggcggctctggcctacaacctgggcaagcgggagatcaaccactacttcagcgtgaggagcgccaaggtgctggcgctggtggccgtgctgctgctcgcagcgtgccacctcgcctcccgccgctaccgaggcaatgattcgtgtgaataccttctctcaagtggcagatttcttggagagaaagtttggcaacctcacagttgtatgatgcataaatacaaaatcagtgaagcaaagaactgccttgtagataaacatattgcatttattggagattccagaattcgtcaattgttttattcttttgtaaaaataattaatccccaattcaaagaagaaggaaataagcatgaaaacattccttttgaagacaagactgcatcagttaaagtggattttctgtggcatcctgaagttaatggttctatgaaacagtgtatcaaagtgtggactgaggattccattgcaaagccacatgtgattgtagcaggagctgccacatggtccatcaagattcacaatggtagcagtgaagcgctttctcaatataaaatgaacatcacctccatagcaccacttttagaaaaattggcaaagactagtgatgtttattgggtcttacaagatcctgtttatgaagatctattaagtgaaaataggaagatgatcactaatgagaagatagatgcttacaatgaagctgcagtcagtattttgaatagtagcaccagaaattctaaatcaaatgttaagatgttcagtgtttccaaattaattgctcaagaaaccatcatggaatctttggatggcttacatcttcctgaatcgagcagagaaactactgcaatgattcttatgaatgtgtattgcaataagattttgaagcctgtagatgggtcctgttgtcaacctcggcctcctgttactctcatacagaagctagctgcttgttttttcactttatctattatcggatatttaattttttacataattcatcgtaatgctcatcggaagaataagccgtgtactgatttggaaagtggagaggaaaagaaaaatattatcaatacccctgtgtcttcattagaaatacttttacaatctttctgcaaacttggcctgattatggcatatttctatatgtgtgaccgtgcaaatctgttcatgaaggaaaacaaattttatacacattcatctttctttattccaattatctacattttggttttgggagtattttataatgaaaatactaaagagactaaagtattaaatagagaacaaacagacgaatggaaaggctggatgcaacttgtgattttgatttatcacatttctggagcaagtacatttttgcctgtatacatgcacattcgagttctggttgctgcatatttatttcagacagggtatgggcatttctcatacttttggataaaaggagattttggaatctatagagtatgtcaggttttatttcgtctcaatttcctggtagtggtgttatgtatagtaatggatcgaccttatcaattctattactttgtccccttggtcactgtatggttcatggtcatatatgttactttagcactatggccacaaataatccaaaaaaaagcaaacggaaattgtttctggcattttggcttactgttgaaactaggctttttgctgttattcatatgttttttggcatattctcagggtgcatttgagaagatcttttctctttggccattgtccaagtgttttgaactgaaagggaatgtatatgaatggtggttcagatggaggttagaccgttatgtagttttccacggaatgctgtttgcttttatttatctggctttgcagaagcgtcaaatactttctgaaggaaagggtgaacctcttttttcaaacaaaatttcaaattttctgttgtttatttcagtagtttctttcttgacctattccatctgggctagcagttgtaaaaacaaagcagagtgcaatgaactccatccgtctgtttctgtggtacagattttagccttcatcctaataagaaacatccctggatatgcccgttcagtttacagttcattttttgcttggtttggaaaaatttcattagagctatttatttgccagtatcacatatggctggcagcggacacaaggggtatcttggtactgatacctggaaaccctatgctcaacatcattgtcagcactttcatatttgtttgtgtggcacatgaaatttctcagatcactaatgatcttgcacagattattattcctaaagataactcatctctcttgaaaaggttggcatgtatagctgcatttttttgtggactcctcatcttatcatccattcaagataaatcaaaacattaggttccaaaaattctaaaaaacctaaactcttcaggctacctttgtgtgtctctagaagagaaaagcatctatctggagatataaatgtgtttgtaaatataaacgtttgtggcaagaggacagttctgtgacatctgttgaacatatgtggttgtatatattggaaatgtacatatccaatatgaaatactaaaacaaacaaacaaacaaaaaaccagaatgcattgtataggattgcatgtgaagtcttttctactgaatctatatttccatttgtaagtgattttaagttaacatatgaaggcagggaaatgattacctttccagtaaaaagtatagataatttaattaacttagtgacaccaccaagtgttttgatataactaaatttgtggtaataagactgtctgcacctgtattcattgtggaacttcctctttcattggaaactttcttactcaagaatgacggcagtattgttttcttatatgtgcaatgaagtggaatgataaacagtatgcctttaatttatatgtgttcttgttctgatgttgtttcctgaaatgatttttcttcctaactgtggttttcgggtatgcaagcctaaatctttgtacactttgtctcacagaatagttctgaggctccatgacagggttttgtcattgttgatgttattgttgcttcgttttataaaaaagccaaaattttttttccaatccaaacgttcacctgtttcctttcctcaagctataccagtgtaataccagttaccctgtggatccatttaatatgttatccccactaattaattttcgtatattatttccaatatttggaaagctctttatagccatttggtatttcctattacccacctcctattttaaatatttatcagtctaaacttgtgcagtgtagtaaacatgcaagttgttacgattgagctgtattaccataagtagaattttaagtaaactggtgaatttgggcaataaatgtttttgctttttgtttgatttttttttacaagctaactgttagaggtatacatttatttatctgttgtacagatttgattatgattttaatgtttgaaagattgcacttgtttgcttttactatatgtggggtaaaatatattttctgttcacagtatatgaaaatatggagtaatttaaacagtaaataaacattctgtggatgcttatttttgtattggcaaagtatcaattaaactatatgtgttctttttcaaaaaacccatcccccccaacacaatctttctctcccccctcctcctacacccctctcacatctccaccctcttttatcctcttnacccccatttcgctctctcttttccctattctca

SEQ ID NO: 435777 - DNA, 2736 bp, Homo sapiens
caaggtcacatagtaagtggtacagcactagtaaaaatctgctgaaattctgtgttttttgaatgacatcaagctgatatctgaaatgactcttattaaagtcccaaagacatttttaactttgagttttgagtaatactattttgtatctttgacaactcttaatttaatcccaaatggggtaagtcaacattaaacaaagatgaaatggacactgctttcttaagataatctaatctatgcttctacactatagccctcagaaggacgacttttttctcttttagcaagatggcagttatagccagaggacagctcaggttggtgctttgctgggatttagttaatatgatgatgtatacatattttatattcagctctttacagtgaatgtaaaacaaatgtaatttaagggattagtaatatatacttgtacagtcattattgagtcttagccatttatactctgtcagagaaaatctgcctttgctgttcgtgtgtacctagaatgaaaacaattacttagaatgaaaccattttcttctccttttcaataggttttatttcgtctcaatttcctggtagtggtgttatgtatagtaatggatcgaccttatcaattctattactttgtccccttggtcactgtatggttcatggtcatatatgttactttagcactatggccacaaataatccaaaaaaaagcaaacggaaattgtttctggcattttggcttactgttgaaactaggctttttgctgttattcatatgttttttggcatattctcagggtgcatttgagaagatcttttctctttggccattgtccaagtgttttgaactgaaagggaatgtatatgaatggtggttcagatggaggttagaccgttatgtagttttccacggaatgctgtttgcttttatttatctggctttgcagaagcgtcaaatactttctgaaggaaagggtgaacctcttttttcaaacaaaatttcaaattttctgttgtttatttcagtagtttctttcttgacctattccatctgggctagcagttgtaaaaacaaagcagagtgcaatgaactccatccgtctgtttctgtggtacagattttagccttcatcctaataagaaacatccctggatatgcccgttcagtttacagttcattttttgcttggtttggaaaaatttcattagagctatttatttgccagtatcacatatggctggcagcggacacaaggggtatcttggtactgatacctggaaaccctatgctcaacatcattgtcagcactttcatatttgtttgtgtggcacatgaaatttctcagatcactaatgatcttgcacagattattattcctaaagataactcatctctcttgaaaaggttggcatgtatagctgcatttttttgtggactcctcatcttatcatccattcaagataaatcaaaacattaggttccaaaaattctaaaaaacctaaactcttcaggctacctttgtgtgtctctagaagagaaaagcatctatctggagatataaatgtgtttgtaaatataaacgtttgtggcaagaggacagttctgtgacatctgttgaacatatgtggttgtatatattggaaatgtacatatccaatatgaaatactaaaacaaacaaacaaacaaaaaaccagaatgcattgtataggattgcatgtgaagtcttttctactgaatctatatttccatttgtaagtgattttaagttaacatatgaaggcagggaaatgattacctttccagtaaaaagtatagataatttaattaacttagtgacaccaccaagtgttttgatataactaaatttgtggtaataagactgtctgcacctgtattcattgtggaacttcctctttcattggaaactttcttactcaagaatgacggcagtattgttttcttatatgtgcaatgaagtggaatgataaacagtatgcctttaatttatatgtgttcttgttctgatgttgtttcctgaaatgatttttcttcctaactgtggttttcgggtatgcaagcctaaatctttgtacactttgtctcacagaatagttctgaggctccatgacagggttttgtcattgttgatgttattgttgcttcgttttataaaaaagccaaaattttttttccaatccaaacgttcacctgtttcctttcctcaagctataccagtgtaataccagttaccctgtggatccatttaatatgttatccccactaattaattttcgtatattatttccaatatttggaaagctctttatagccatttggtatttcctattacccacctcctattttaaatatttatcagtctaaacttgtgcagtgtagtaaacatgcaagttgttacgattgagctgtattaccataagtagaattttaagtaaactggtgaatttgggcaataaatgtttttgctttttgtttgatttttttttacaagctaactgttagaggtatacatttatttatctgttgtacagatttgattatgattttaatgtttgaaagattgcacttgtttgcttttactatatgtggggtaaaatatattttctgttcacagtatatgaaaatatggagtaatttaaacagtaaataaacattctgtggatgcttatttttgtattggcaaagtatcaattaaactatatgtgttctttttcaaaaa

SEQ ID NO: 435778 - DNA, 1107 bp, Homo sapiens
cctaaggctcgcgtccgggccaggcgggtacccctagtactctctccccacacccccatggctctgccgcagccgccgccgcccgccggggcgcgtgacccggtgaccccggagcactgggcatccggacccccctcgcaggcgcagccgctattaaggcaggaggctaaagaggaggaggaaggggaggagacaggcgtccagggcgcctggggaaccggcacggcggagcagcggcggcggggctggggggaggccgccgagtcggccgcggccgaggaggggcaggcggaggtcgggggcgccgcggccgcggggtcaggttccccggcgggaggcgcaggtggcggcctggggagctggcggccgctcctcgcctggctgcagcggcggcagccccagtgctgcccctgtgcggcgcccctttcccgctccgccgcgcactgttgtcatggaggaaccaagatggcggctctggcctacaacctgggcaagcgggagatcaaccactacttcagcgtgaggagcgccaaggtgctggcgctggtggccgtgctgctgctcgcagcgtgccacctcgcctcccgccgctaccgaggcaatgattcgtgtgaataccttctctcaagtggcagatttcttggagagaaagtttggcaacctcacagttgtatgatgcataaatacaaaatcagtgaagcaaagaactgccttgtagataaacatattgcatttattggagattccagaattcgtcaattgttttattcttttgtaaaaataattaatccccaattcaaagaagaaggaaataaggtaaaacttgtctattcccttctgtagagtgttttagaagttaaccaactgaatagttacaggaggagtgtgtctctccagattgagtaggagctgaaaaaattttactttgattttcagaaaggttggggaaaaagagggatgaattgctttaatgaggaagatgacaaaaagaagtggtggctaagacattggcaagctttttattgtaataacttaaacttttagttttcagaaataataaattcttaccatggaaaaacttttaaatttccttagaaagaagacaaa

SEQ ID NO: 435779 - DNA, 435 bp, Homo sapiens
gatgcttacaatgaagctgcagtcagtattttgaatagtagcaccagaaattctaaatcaaatgttaagatgttcagtgtttccaaattaattgctcaagaaaccatcatggaatctttggatggcttacatcttcctgaatcgagcagagaaactgtgagaaatttttacatatgtcagtagatggagactataatatcaattgctttaagccataagtcattataacatggttataaataatttgttttattgcagtcttagtaacttgtagttattgtgtataaagatacatctagaaattattttgctttctatcatctagttgaatatatacgtaagagttttggtatactctaagagagaaagaagttagggaagaggggaaattaaacttcatttactgagtgctaatcactgttaatatacattgtc

SEQ ID NO: 435780 - DNA, 541 bp, Homo sapiens
gattttaatgtttgaaagattgcacttgtttgcttttactatatgtggggtaaaatatattttctgttcacagtatatgaaaatatggagtaatttaaacagtaaataaacattctgtggatgcttatttttgtattggcaaagtatcaattaaactatatgtgttctttttcaaaaatgctggatccattcatgattggttcaaatatctaattatttcctcaacttaaatttgctttttaaattgcttaatatgtaggggtaggttaccaaatgatagttggataaggaatcatttagttatcagagcttcagagggtcatctgctttccaccaaggaagtttaagcattatggttcattagtgattttgcttgaagattttaaaaatgtacttattatttatttagcactggatttatgtgctactgatatacctccattaatagaggaatatttcttggacagagatgtgtgttctttccttttctctcttcttttgcccttacttaatcttttgacatttcccagatagacaattg

SEQ ID NO: 435781 - DNA, 4120 bp, Homo sapiens
cctaaggctcgcgtccgggccaggcgggtacccctagtactctctccccacacccccatggctctgccgcagccgccgccgcccgccggggcgcgtgacccggtgaccccggagcactgggcatccggacccccctcgcaggcgcagccgctattaaggcaggaggctaaagaggaggaggaaggggaggagacaggcgtccagggcgcctggggaaccggcacggcggagcagcggcggcggggctggggggaggccgccgagtcggccgcggccgaggaggggcaggcggaggtcgggggcgccgcggccgcggggtcaggttccccggcgggaggcgcaggtggcggcctggggagctggcggccgctcctcgcctggctgcagcggcggcagccccagtgctgcccctgtgcggcgcccctttcccgctccgccgcgcactgttgtcatggaggaaccaagatggcggctctggcctacaacctgggcaagcgggagatcaaccactacttcagcgtgaggagcgccaaggtgctggcgctggtggccgtgctgctgctcgcagcgtgccacctcgcctcccgccgctaccgaggcaatgattcgtgtgaataccttctctcaagtggcagatttcttggagagaaagtttggcaacctcacagttgtatgatgcataaatacaaaatcagtgaagcaaagaactgccttgtagataaacatattgcatttattggagattccagaattcgtcaattgttttattcttttgtaaaaataattaatccccaattcaaagaagaaggaaataagcatgaaaacattccttttgaagacaagactgcatcagttaaagtggattttctgtggcatcctgaagttaatggttctatgaaacagtgtatcaaagtgtggactgaggattccattgcaaagccacatgtgattgtagcaggagctgccacatggtccatcaagattcacaatggtagcagtgaagcgctttctcaatataaaatgaacatcacctccatagcaccacttttagaaaaattggcaaagactagtgatgtttattgggtcttacaagatcctgtttatgaagatctattaagtgaaaataggaagatgatcactaatgagaagatagatgcttacaatgaagctgcagtcagtattttgaatagtagcaccagaaattctaaatcaaatgttaagatgttcagtgtttccaaattaattgctcaagaaaccatcatggaatctttggatggcttacatcttcctgaatcgagcagagaaactactgcaatgattcttatgaatgtgtattgcaataagattttgaagcctgtagatgggtcctgttgtcaacctcggcctcctgttactctcatacagaagctagctgcttgttttttcactttatctattatcggatatttaattttttacataattcatcgtaatgctcatcggaagaataagccgtgtactgatttggaaagtggagaggaaaagaaaaatattatcaatacccctgtgtcttcattagaaatacttttacaatctttctgcaaacttggcctgattatggcatatttctatatgtgtgaccgtgcaaatctgttcatgaaggaaaacaaattttatacacattcatctttctttattccaattatctacattttggttttgggagtattttataatgaaaatactaaagagactaaagtattaaatagagaacaaacagacgaatggaaaggctggatgcaacttgtgattttgatttatcacatttctggagcaagtacatttttgcctgtatacatgcacattcgagttctggttgctgcatatttatttcagacagggtatgggcatttctcatacttttggataaaaggagattttggaatctatagagtatgtcaggttttatttcgtctcaatttcctggtagtggtgttatgtatagtaatggatcgaccttatcaattctattactttgtccccttggtcactgtatggttcatggtcatatatgttactttagcactatggccacaaataatccaaaaaaaagcaaacggaaattgtttctggcattttggcttactgttgaaactaggctttttgctgttattcatatgttttttggcatattctcagggtgcatttgagaagatcttttctctttggccattgtccaagtgttttgaactgaaagggaatgtatatgaatggtggttcagatggaggttagaccgttatgtagttttccacggaatgctgtttgcttttatttatctggctttgcagaagcgtcaaatactttctgaaggaaagggtgaacctcttttttcaaacaaaatttcaaattttctgttgtttatttcagtagtttctttcttgacctattccatctgggctagcagttgtaaaaacaaagcagagtgcaatgaactccatccgtctgtttctgtggtacagattttagccttcatcctaataagaaacatccctggatatgcccgttcagtttacagttcattttttgcttggtttggaaaaatttcattagagctatttatttgccagtatcacatatggctggcagcggacacaaggggtatcttggtactgatacctggaaaccctatgctcaacatcattgtcagcactttcatatttgtttgtgtggcacatgaaatttctcagatcactaatgatcttgcacagattattattcctaaagataactcatctctcttgaaaaggttggcatgtatagctgcatttttttgtggactcctcatcttatcatccattcaagataaatcaaaacattaggttccaaaaattctaaaaaacctaaactcttcaggctacctttgtgtgtctctagaagagaaaagcatctatctggagatataaatgtgtttgtaaatataaacgtttgtggcaagaggacagttctgtgacatctgttgaacatatgtggttgtatatattggaaatgtacatatccaatatgaaatactaaaacaaacaaacaaacaaaaaaccagaatgcattgtataggattgcatgtgaagtcttttctactgaatctatatttccatttgtaagtgattttaagttaacatatgaaggcagggaaatgattacctttccagtaaaaagtatagataatttaattaacttagtgacaccaccaagtgttttgatataactaaatttgtggtaataagactgtctgcacctgtattcattgtggaacttcctctttcattggaaactttcttactcaagaatgacggcagtattgttttcttatatgtgcaatgaagtggaatgataaacagtatgcctttaatttatatgtgttcttgttctgatgttgtttcctgaaatgatttttcttcctaactgtggttttcgggtatgcaagcctaaatctttgtacactttgtctcacagaatagttctgaggctccatgacagggttttgtcattgttgatgttattgttgcttcgttttataaaaaagccaaaattttttttccaatccaaacgttcacctgtttcctttcctcaagctataccagtgtaataccagttaccctgtggatccatttaatatgttatccccactaattaattttcgtatattatttccaatatttggaaagctctttatagccatttggtatttcctattacccacctcctattttaaatatttatcagtctaaacttgtgcagtgtagtaaacatgcaagttgttacgattgagctgtattaccataagtagaattttaagtaaactggtgaatttgggcaataaatgtttttgctttttgtttgatttttttttacaagctaactgttagaggtatacatttatttatctgttgtacagatttgattatgattttaatgtttgaaagattgcacttgtttgcttttactatatgtggggtaaaatatattttctgttcacagtatatgaaaatatggagtaatttaaacagtaaataaacattctgtggatgcttatttttgtattggcaaagtatcaattaaactatatgtgttctttttcaaaaa

SEQ ID NO: 435782 - DNA, 3911 bp, Homo sapiens
cctaaggctcgcgtccgggccaggcgggtacccctagtactctctccccacacccccatggctctgccgcagccgccgccgcccgccggggcgcgtgacccggtgaccccggagcactgggcatccggacccccctcgcaggcgcagccgctattaaggcaggaggctaaagaggaggaggaaggggaggagacaggcgtccagggcgcctggggaaccggcacggcggagcagcggcggcggggctggggggaggccgccgagtcggccgcggccgaggaggggcaggcggaggtcgggggcgccgcggccgcggggtcaggttccccggcgggaggcgcaggtggcggcctggggagctggcggccgctcctcgcctggctgcagcggcggcagccccagtgctgcccctgtgcggcgcccctttcccgctccgccgcgcactgttgtcatggaggaaccaagatggcggctctggcctacaacctgggcaagcgggagatcaaccaagttgtatgatgcataaatacaaaatcagtgaagcaaagaactgccttgtagataaacatattgcatttattggagattccagaattcgtcaattgttttattcttttgtaaaaataattaatccccaattcaaagaagaaggaaataagcatgaaaacattccttttgaagacaagactgcatcagttaaagtggattttctgtggcatcctgaagttaatggttctatgaaacagtgtatcaaagtgtggactgaggattccattgcaaagccacatgtgattgtagcaggagctgccacatggtccatcaagattcacaatggtagcagtgaagcgctttctcaatataaaatgaacatcacctccatagcaccacttttagaaaaattggcaaagactagtgatgtttattgggtcttacaagatcctgtttatgaagatctattaagtgaaaataggaagatgatcactaatgagaagatagatgcttacaatgaagctgcagtcagtattttgaatagtagcaccagaaattctaaatcaaatgttaagatgttcagtgtttccaaattaattgctcaagaaaccatcatggaatctttggatggcttacatcttcctgaatcgagcagagaaactactgcaatgattcttatgaatgtgtattgcaataagattttgaagcctgtagatgggtcctgttgtcaacctcggcctcctgttactctcatacagaagctagctgcttgttttttcactttatctattatcggatatttaattttttacataattcatcgtaatgctcatcggaagaataagccgtgtactgatttggaaagtggagaggaaaagaaaaatattatcaatacccctgtgtcttcattagaaatacttttacaatctttctgcaaacttggcctgattatggcatatttctatatgtgtgaccgtgcaaatctgttcatgaaggaaaacaaattttatacacattcatctttctttattccaattatctacattttggttttgggagtattttataatgaaaatactaaagagactaaagtattaaatagagaacaaacagacgaatggaaaggctggatgcaacttgtgattttgatttatcacatttctggagcaagtacatttttgcctgtatacatgcacattcgagttctggttgctgcatatttatttcagacagggtatgggcatttctcatacttttggataaaaggagattttggaatctatagagtatgtcaggttttatttcgtctcaatttcctggtagtggtgttatgtatagtaatggatcgaccttatcaattctattactttgtccccttggtcactgtatggttcatggtcatatatgttactttagcactatggccacaaataatccaaaaaaaagcaaacggaaattgtttctggcattttggcttactgttgaaactaggctttttgctgttattcatatgttttttggcatattctcagggtgcatttgagaagatcttttctctttggccattgtccaagtgttttgaactgaaagggaatgtatatgaatggtggttcagatggaggttagaccgttatgtagttttccacggaatgctgtttgcttttatttatctggctttgcagaagcgtcaaatactttctgaaggaaagggtgaacctcttttttcaaacaaaatttcaaattttctgttgtttatttcagtagtttctttcttgacctattccatctgggctagcagttgtaaaaacaaagcagagtgcaatgaactccatccgtctgtttctgtggtacagattttagccttcatcctaataagaaacatccctggatatgcccgttcagtttacagttcattttttgcttggtttggaaaaatttcattagagctatttatttgccagtatcacatatggctggcagcggacacaaggggtatcttggtactgatacctggaaaccctatgctcaacatcattgtcagcactttcatatttgtttgtgtggcacatgaaatttctcagatcactaatgatcttgcacagattattattcctaaagataactcatctctcttgaaaaggttggcatgtatagctgcatttttttgtggactcctcatcttatcatccattcaagataaatcaaaacattaggttccaaaaattctaaaaaacctaaactcttcaggctacctttgtgtgtctctagaagagaaaagcatctatctggagatataaatgtgtttgtaaatataaacgtttgtggcaagaggacagttctgtgacatctgttgaacatatgtggttgtatatattggaaatgtacatatccaatatgaaatactaaaacaaacaaacaaacaaaaaaccagaatgcattgtataggattgcatgtgaagtcttttctactgaatctatatttccatttgtaagtgattttaagttaacatatgaaggcagggaaatgattacctttccagtaaaaagtatagataatttaattaacttagtgacaccaccaagtgttttgatataactaaatttgtggtaataagactgtctgcacctgtattcattgtggaacttcctctttcattggaaactttcttactcaagaatgacggcagtattgttttcttatatgtgcaatgaagtggaatgataaacagtatgcctttaatttatatgtgttcttgttctgatgttgtttcctgaaatgatttttcttcctaactgtggttttcgggtatgcaagcctaaatctttgtacactttgtctcacagaatagttctgaggctccatgacagggttttgtcattgttgatgttattgttgcttcgttttataaaaaagccaaaattttttttccaatccaaacgttcacctgtttcctttcctcaagctataccagtgtaataccagttaccctgtggatccatttaatatgttatccccactaattaattttcgtatattatttccaatatttggaaagctctttatagccatttggtatttcctattacccacctcctattttaaatatttatcagtctaaacttgtgcagtgtagtaaacatgcaagttgttacgattgagctgtattaccataagtagaattttaagtaaactggtgaatttgggcaataaatgtttttgctttttgtttgatttttttttacaagctaactgttagaggtatacatttatttatctgttgtacagatttgattatgattttaatgtttgaaagattgcacttgtttgcttttactatatgtggggtaaaatatattttctgttcacagtatatgaaaatatggagtaatttaaacagtaaataaacattctgtggatgctt

SEQ ID NO: 435783 - DNA, 4022 bp, Homo sapiens
  misc_feature (4003)..(4003): n is a, c, g, or t
cctaaggctcgcgtccgggccaggcgggtacccctagtactctctccccacacccccatggctctgccgcagccgccgccgcccgccggggcgcgtgacccggtgaccccggagcactgggcatccggacccccctcgcaggcgcagccgctattaaggcaggaggctaaagaggaggaggaaggggaggagacaggcgtccagggcgcctggggaaccggcacggcggagcagcggcggcggggctggggggaggccgccgagtcggccgcggccgaggaggggcaggcggaggtcgggggcgccgcggccgcggggtcaggttccccggcgggaggcgcaggtggcggcctggggagctggcggccgctcctcgcctggctgcagcggcggcagccccagtgctgcccctgtgcggcgcccctttcccgctccgccgcgcactgttgtcatggaggaaccaagatggcggctctggcctacaacctgggcaagcgggagatcaaccactacttcagcgtgaggagcgccaaggtgctggcgctggtggccgtgctgctgctcgcagcgtgccacctcgcctcccgccgctaccgaggcaatgattcgtgtgaataccttctctcaagtggcagatttcttggagagaaagtttggcaacctcacagttgtatgatgcataaatacaaaatcagtgaagcaaagaactgccttgtagataaacatattgcatttattggagattccagaattcgtcaattgttttattcttttgtaaaaataattaatccccaattcaaagaagaaggaaataagcatgaaaacattccttttgaagacaagactgcatcagttaaagtggattttctgtggcatcctgaagttaatggttctatgaaacagtgtatcaaagtgtggactgaggattccattgcaaagccacatgtgattgtagcaggagctgccacatggtccatcaagattcacaatggtagcagtgaagcgctttctcaatataaaatgaacatcacctccatagcaccacttttagaaaaattggcaaagactagtgatgtttattgggtcttacaagatcctgtttatgaagatctattaagtgaaaataggaagatgatcactaatgagaagatagatgcttacaatgaagctgcagtcagtattttgaatagtagcaccagaaattctaaatcaaatgttaagatgttcagtgtttccaaattaattgctcaagaaaccatcatggaatctttggatggcttacatcttcctgaatcgagcagagaaactactgcaatgattcttatgaatgtgtattgcaataagattttgaagcctgtagatgggtcctgttgtcaacctcggcctcctgttactctcatacagaagctagctgcttgttttttcactttatctattatcggatatttaattttttacataattcatcgtaatgctcatcggaagaataagccgtgtactgatttggaaagtggagaggaaaagaaaaatattatcaatacccctgtgtcttcattagaaatacttttacaatctttctgcaaacttggcctgattatggcatatttctatatgtgtgaccgtgcaaatctgttcatgaaggaaaacaaattttatacacattcatctttctttattccaattatctacattttggttttgggagtattttataatgaaaatactaaagagactaaagtattaaatagagaacaaacagacgaatggaaaggctggatgcaacttgtgattttgatttatcacatttctggagcaagtacatttttgcctgtatacatgcacattcgagttctggttgctgcatatttatttcagacagggtatgggcatttctcatacttttggataaaaggagattttggaatctatagagtatgtcaggttttatttcgtctcaatttcctggtagtggtgttatgtatagtaatggatcgaccttatcaattctattactttgtccccttggtcactgtatggttcatggtcatatatgttactttagcactatggccacaaataatccaaaaaaaagcaaacggaaattgtttctggcattttggcttactgttgaaactaggctttttgctgttattcatatgttttttggcatattctcagggtgcatttgagaagatcttttctctttggccattgtccaagtgttttgaactgaaagggaatgtatatgaatggtggttcagatggaggttagaccgttatgtagttttccacggaatgctgtttgcttttatttatctggctttgcagaagcgtcaaatactttctgaaggaaagggtgaacctcttttttcaaacaaaatttcaaattttctgttgtttatttcagtagtttctttcttgacctattccatctgggctagcagttgtaaaaacaaagcagagtgcaatgaactccatccgtctgtttctgtggtacagattttagccttcatcctaataagaaacatccctggatatgcccgttcagtttacagttcattttttgcttggtttggaaaaatttcattagagctatttatttgccagtatcacatatggctggcagcggacacaaggggtatcttggtactgatacctggaaaccctatgctcaacatcattgtcagcactttcatatttgtttgtgtggcacatgaaatttctcagatcactaatgatcttgcacagattattattcctaaagataactcatctctcttgaaaaggttggcatgtatagctgcatttttttgtggactcctcatcttatcatccattcaagataaatcaaaacattaggttccaaaaattctaaaaaacctaaactcttcaggctacctttgtgtgtctctagaagagaaaagcatctatctggagatataaatgtgtttgtaaatataaacgtttgtggcaagaggacagttctgtgacatctgttgaacatatgtggttgtatatattggaaatgtacatatccaatatgaaatactaaaacaaacaaacaaacaaaaaaccagaatgcattgtataggattgcatgtgaagtcttttctactgaatctatatttccatttgtaagtgattttaagttaacatatgaaggcagggaaatgattacctttccagtaaaaagtatagataatttaattaacttagtgacaccaccaagtgttttgatataactaaatttgtggtaataagactgtctgcacctgtattcattgtggaacttcctctttcattggaaactttcttactcaagaatgacggcagtattgttttcttatatgtgcaatgaagtggaatgataaacagtatgcctttaatttatatgtgttcttgttctgatgttgtttcctgaaatgatttttcttcctaactgtggttttcgggtatgcaagcctaaatctttgtacactttgtctcacagaatagttctgaggctccatgacagggttttgtcattgttgatgttattgttgcttcgttttataaaaaagccagtgtaataccagttaccctgtggatccatttaatatgttatccccactaattaattttcgtatattatttccaatatttggaaagctctttatagccatttggtatttcctattacccacctcctattttaaatatttatcagtctaaacttgtgcagtgtagtaaacatgcaagttgttacgattgagctgtattaccataagtagaattttaagtaaactggtgaatttgggcaataaatgtttttgctttttgtttgatttttttttacaagctaactgttagaggtatacatttatttatctgttgtacagatcacatttgattctacgctagaagactgctcttcgtccttttacaacgggggggatacatatttttgttcccgcttttatatagcggcactaaacgacataacctttcgcgggcgctccttccngaggccaaccttacttctc

SEQ ID NO: 435784 - DNA, 2439 bp, Homo sapiens
cctaaggctcgcgtccgggccaggcgggtacccctagtactctctccccacacccccatggctctgccgcagccgccgccgcccgccggggcgcgtgacccggtgaccccggagcactgggcatccggacccccctcgcaggcgcagccgctattaaggcaggaggctaaagaggaggaggaaggggaggagacaggcgtccagggcgcctggggaaccggcacggcggagcagcggcggcggggctggggggaggccgccgagtcggccgcggccgaggaggggcaggcggaggtcgggggcgccgcggccgcggggtcaggttccccggcgggaggcgcaggtggcggcctggggagctggcggccgctcctcgcctggctgcagcggcggcagccccagtgctgcccctgtgcggcgcccctttcccgctccgccgcgcactgttgtcatggaggaaccaagatggcggctctggcctacaacctgggcaagcgggagatcaaccactacttcagcgtgaggagcgccaaggtgctggcgctggtggccgtgctgctgctcgcagcgtgccacctcgcctcccgccgctaccgaggcaatgattcgtgtgaataccttctctcaagtggcagatttcttggagagaaagtttggcaacctcacagttgtatgatgcataaatacaaaatcagtgaagcaaagaactgccttgtagataaacatattgcatttattggagattccagaattcgtcaattgttttattcttttgtaaaaataattaatccccaattcaaagaagaaggaaataagcatgaaaacattccttttgaagacaagactgcatcagttaaagtggattttctgtggcatcctgaagttaatggttctatgaaacagtgtatcaaagtgtggactgaggattccattgcaaagccacatgtgattgtagcaggagctgccacatggtccatcaagattcacaatggtagcagtgaagcgctttctcaatataaaatgaacatcacctccatagcaccacttttagaaaaattggcaaagactagtgatgtttattgggtcttacaagatcctgtttatgaagatctattaagtgaaaataggaagatgatcactaatgagaagatagatgcttacaatgaagctgcagtcagtattttgaatagtagcaccagaaattctaaatcaaatgttaagatgttcagtgtttccaaattaattgctcaagaaaccatcatggaatctttggatggcttacatcttcctgaatcgagcagagaaactactgcaatgattcttatgaatgtgtattgcaataagattttgaagcctgtagatgggtcctgttgtcaacctcggcctcctgttactctcatacagaagctagctgcttgttttttcactttatctattatcggatatttaattttttacataattcatcgtaatgctcatcggaagaataagccgtgtactgatttggaaagtggagaggaaaagaaaaatattatcaatacccctgtgtcttcattagaaatacttttacaatctttctgcaaacttggcctgattatggcatatttctatatgtgtgaccgtgcaaatctgttcatgaaggaaaacaaattttatacacattcatctttctttattccaattatctacattttggttttgggagtattttataatgaaaatactaaagagactaaagtattaaatagagaacaaacagacgaatggaaaggctggatgcaacttgtgattttgatttatcacatttctggagcaagtacagtaagtatttggaatttaagttcagaaagtataggaagtgatgtcattttaatgtttctttaagggcaccagcttttttgtgttttataatctctaccagttatagacccttcttatttcccacttaatctttccgcctttccatttttctcctctttgagaaaatgtaattttcaaagcaaaattttttttaaaaaagataaggcaataattgctttgtatttgcttgggccttaatttttaacataatagaaatagctgatatctaagggtattattttatggccatcttattgaacagctaatttgaagttatcaggaaactttgaagaggccaggtgtagtggctcatgcctgtaatcctagcactttcggaggccgaggtgggtggatcacctgaggtcaggagttcaagaccagcctagccaacatggtgagaccctgtctctactaaaaatacaaaaactagccaggcatggcggtgcatgcctgtaatcccagctactcggaaagctgaggcaggagaaacacttgaacccaggggatagaggttgcaatgagccgatatttcaccactgtactccagcctgggttgcagagtgagactccgtctcaaaa

SEQ ID NO: 435785 - DNA, 905 bp, Homo sapiens
tagaggcctgtagggtcggggcgcctgcgcagtcgctcttcctcaggcggcggccatggcgggacaggaggatccggtgcagcgggagattcaccaggactgggctaaccgggagtacattgagataatcaccagcagcatcaagaaaatcgcagactttctcaactcgttcgatatgtcttgtcgttcaagacttgcaacactaaacgagaaattgacagcccttgaacggagaatagagtacattgaagctcgggtgacaaaaggtgagacactcacctagaacagtgccgtgctgctgctgggaagttgctttacacaacacaggccacatgggaaaggccccagcagccttcagctccttcctttctccttaaagagcaacagggcttattcttgtttttcttttttcaaaagtgtggcctttgggctctgccatctggggtgtggtgtggtatgtgggaagaagttcagaggaaccgttggaaacgacgttaggcattttaccttttcagtaacattttatacatctacttgtcaatgtatttgagacattcacagccaaaagcctgggactctttgtgaaggtcctcctcacctctatctttctttctctctctctcaaactttccttaaagttctcattgcctttgcactgcttctgtgaacagtctttgtctcctccccacctttggtgggaagtgcggggcagtcctggtcaagacactcatgccctggcaatgtggctgccagagaatgttgttgctaacccaccagtttcttgttgatttggagaggtcaaggccaggcccccacttggcttgaagggacattttcagacttttctttctgtcacttggagtgtctatgcctctcatatttccctaataaactcctcaactttt

SEQ ID NO: 435786 - DNA, 783 bp, Homo sapiens
agagagagagagagagagagaggaaaatcgcagactttctcaactcgttcgatatgtcttgtcgttcaagacttgcaacactaaacgagaaattgacagcccttgaacggagaatagagtacattgaagctcgggtgacaaaaggtgagacactcacctagaacagtgccgtgctgctgctgggaagttgctttacacaacacaggccacatgggaaaggccccagcagccttcagctccttcctttctccttaaagagcaacagggcttattcttgtttttcttttttcaaaagtgtggcctttgggctctgccatctggggtgtggtgtggtatgtgggaagaagttcagaggaaccgttggaaacgacgttaggcattttaccttttcagtaacattttatacatctacttgtcaatgtatttgagacattcacagccaaaagcctgggactctttgtgaaggtcctcctcacctctatctttctttctctctctctcaaactttccttaaagttctcattgcctttgcactgcttctgtgaacagtctttgtctcctccccacctttggtgggaagtgcggggcagtcctggtcaagacactcatgccctggcaatgtggctgccagagaatgttgttgctaacccaccagtttcttgttgatttggagaggtcaaggccaggcccccacttggcttgaagggacattttcagacttttctttctgtcacttggagtgtctatgcctctcatatttccctaataaactcctcaactttt

SEQ ID NO: 435787 - DNA, 1178 bp, Homo sapiens
tagaggcctgtagggtcggggcgcctgcgcagtcgctcttcctcaggcggcggccatggcgggacaggaggatccggtgcagcgggagattcaccaggactgggctaaccgggagtacattgagataatcaccagcagcatcaagaaaatcgcagactttctcaactcgttcgatatgtcttgtcgttcaagacttgcaacactaaacgagaaattgacagcccttgaacggagaatagagtacattgaagctcgggtgacaaaaggtgagacactcacctagaacagtgccgtgctgctgctgggaagttgctttacacaacacaggccacatgggaaaggccccagcagccttcagctccttcctttctccttaaagagcaacagggcttattcttgtttttcttttttcaaaagtgtggcctttgggctctgccatctggggtgtggtgtggtatgtgggaagaagttcagaggaaccgttggaaacgacgttaggcattttaccttttcagtaacattttatacatctacttgtcaatgtatttgagacattcacagccaaaagcctgggactctttgtgaaggtcctcctcacctctatctttctttctctctctctcaaactttccttaaagttctcattgcctttgcactgcttctgtgaacagtctttgtctcctccccacctttggtgggaagtgcggggcagtcctggtcaagacactcatgccctggcaatgtggctgccagagaatgttgttgctaacccaccagtttcttgttgatttggagaggtcaaggccaggcccccacttggcttgaagggacattttcagacttttctttctgtcacttggagtgtctatgcctctcatatttccctaataaactcctcaactttttatctgactgctgtgattatggtggggagaggagctagagatgggttcacttattgcacagaaatgtaatacatggcgttattattctaacataaaactttcagatgtagctgtttgattcaaagcctaggtggcttaccagcccaagtccccatgtttggactttcagctgactagctcatcttgggaatcatttggtcattcagcacatttaccaagtatttactatgtaggcatgttaaactccaataaaacatacagcattgaatcaga

SEQ ID NO: 435788 - DNA, 1695 bp, Homo sapiens
tagaggcctgtagggtcggggcgcctgcgcagtcgctcttcctcaggcggcggccatggcgggacaggaggatccggtgcagcgggagattcaccaggactgggctaaccgggagtacattgagataatcaccagcagcatcaagaaaatcgcagactttctcaactcgttcgatatgtcttgtcgttcaagacttgcaacactaaacgagaaattgacagcccttgaacggagaatagagtacattgaagctcgggtgacaaaaggtgagacactcacctagaacagtgccgtgctgctgctgggaagttgctttacacaacacaggccacatgggaaaggccccagcagccttcagctccttcctttctccttaaagagcaacagggcttattcttgtttttcttttttcaaaagtgtggcctttgggctctgccatctggggtgtggtgtggtatgtgggaagaagttcagaggaaccgttggaaacgacgttaggcattttaccttttcagtaacattttatacatctacttgtcaatgtatttgagacattcacagccaaaagcctgggactctttgtgaaggtcctcctcacctctatctttctttctctctctctcaaactttccttaaagttctcattgcctttgcactgcttctgtgaacagtctttgtctcctccccacctttggtgggaagtgcggggcagtcctggtcaagacactcatgccctggcaatgtggctgccagagaatgttgttgctaacccaccagtttcttgttgatttggagaggtcaaggccaggcccccacttggcttgaagggacattttcagacttttctttctgtcacttggagtgtctatgcctctcatatttccctaataaactcctcaactttttatctgactgctgtgattatggtggggagaggagctagagatgggttcacttattgcacagaaatgtaatacatggcgttattattctaacataaaactttcagatgtagctgtttgattcaaagcctaggtggcttaccagcccaagtccccatgtttggactttcagctgactagctcatcttgggaatcatttggtcattcagcacatttaccaagtatttactatgtaggcatgttaaactccaataaaacatacagcattgaatcagaaaaaaaaaaaaaaaaaatttttttaaacgcatttccctaatagggagggaaattctgatccctggaagcacaggagagtgggacatggcctctttctcacctcctctcacctactcctctttgggagaaggaggaactcatctaatagatgagattagggaaaaggaatgagcatgttgggattgacttcatcaatatttgttcttttgccctgagaagtgcattctcgtttgtctgtggctgttcaattcagtggcaaggcattagcagcccaacttgcctaattcattccacatttttatttatttatttatttatttatttatttatttatttatttatttgagatggagtctcgctctgttgccaggctggagtcggacgcaacgggccacttggggaggcgccgccgccgtggccgctctccgcccccgccacggcacttgctcgggtggccaccgctgcaggaagctcgatagcggcgccgcggcgcttccaggtgggtccccgcctcccg

SEQ ID NO: 435789 - DNA, 1422 bp, Homo sapiens
tagaggcctgtagggtcggggcgcctgcgcagtcgctcttcctcaggcggcggccatggcgggacaggaggatccggtgcagcgggagattcaccaggactgggctaaccgggagtacattgagataatcaccagcagcatcaagaaaatcgcagactttctcaactcgttcgatatgtcttgtcgttcaagacttgcaacactaaacgagaaattgacagcccttgaacggagaatagagtacattgaagctcgggtgacaaaaggtgagacactcacctagaacagtgccgtgctgctgctgggaagttgctttacacaacacaggccacatgggaaaggccccagcagccttcagctccttcctttctccttaaagagcaacagggcttattcttgtttttcttttttcaaaagtgtggcctttgggctctgccatctggggtgtggtgtggtatgtgggaagaagttcagaggaaccgttggaaacgacgttaggcattttaccttttcagtaacattttatacatctacttgtcaatgtatttgagacattcacagccaaaagcctgggactctttgtgaaggtcctcctcacctctatctttctttctctctctctcaaactttccttaaagttctcattgcctttgcactgcttctgtgaacagtctttgtctcctccccacctttggtgggaagtgcggggcagtcctggtcaagacactcatgccctggcaatgtggctgccagagaatgttgttgctaacccaccagtttcttgttgatttggagaggtcaaggccaggcccccacttggcttgaagggacattttcagacttttctttctgtcacttggagtgtctatgcctctcatatttccctaataaactcctcaacttttaaaaaaaaaaaaaaaaatttttttaaacgcatttccctaatagggagggaaattctgatccctggaagcacaggagagtgggacatggcctctttctcacctcctctcacctactcctctttgggagaaggaggaactcatctaatagatgagattagggaaaaggaatgagcatgttgggattgacttcatcaatatttgttcttttgccctgagaagtgcattctcgtttgtctgtggctgttcaattcagtggcaaggcattagcagcccaacttgcctaattcattccacatttttatttatttatttatttatttatttatttatttatttatttatttgagatggagtctcgctctgttgccaggctggagtcggacgcaacgggccacttggggaggcgccgccgccgtggccgctctccgcccccgccacggcacttgctcgggtggccaccgctgcaggaagctcgatagcggcgccgcggcgcttccaggtgggtccccgcctcccg

SEQ ID NO: 435790 - DNA, 897 bp, Homo sapiens
  misc_feature (837)..(837): n is a, c, g, or t
  misc_feature (861)..(861): n is a, c, g, or t
tagaggcctgtagggtcggggcgcctgcgcagtcgctcttcctcaggcggcggccatggcgggacaggaggatccggtgcagcgggagattcaccaggactgggctaaccgggagtacattgagataatcaccagcagcatcaagaaaatcgcagactttctcaactcgttcgatatgtcttgtcgttcaagacttgcaacactaaacgagaaattgacagcccttgaacggagaatagagtacattgaagctcgggtgacaaaaggtgagacactcacctagaacagtgccgtgctgctgctgggaagttgctttacacaacacaggccacatgggaaaggccccagcagccttcagctccttcctttctccttaaagagcaacagggcttattcttgtttttcttttttcaaaagtgtggcctttgggctctgccatctggggtgtggtgtggtatgtgggaagaagttcagaggaaccgttggaaacgacgttaggcattttaccttttcagtaacattttatacatctacttgtcaatgtatttgagacattcacagccaaaagcctgggactctttgtgaaggtcctcctcacctctatctttctttctctctctctcaaactttccttaaagttctcattgcctttgcactgcttctgtgaacagtctttgtctcctccccacctttggtgggaagtgcggggcagtcctggtcaagacactcatgccctggcaatgtggctgccagagaatgttgttgctaacccaccagtttcttgttgatttggagaggtcaagccggcccttggtgggggacattgcaattcttgcngggggaagcccaattcaaaactcnttaaaaaaaaaaaagtgggcggccaattaaacttgg

SEQ ID NO: 435791 - DNA, 970 bp, Homo sapiens
tagaggcctgtagggtcggggcgcctgcgcagtcgctcttcctcaggcggcggccatggcgggacaggaggatccggtgcagcgggagattcaccaggactgggctaaccgggagtacattgagataatcaccagcagcatcaagaaaatcgcagactttctcaactcgttcgcctactcagcaggaagacaatgaggatgaagacctttatgatgatccactgccatttaatgaataatatgtcttgtcgttcaagacttgcaacactaaacgagaaattgacagcccttgaacggagaatagagtacattgaagctcgggtgacaaaaggtgagacactcacctagaacagtgccgtgctgctgctgggaagttgctttacacaacacaggccacatgggaaaggccccagcagccttcagctccttcctttctccttaaagagcaacagggcttattcttgtttttcttttttcaaaagtgtggcctttgggctctgccatctggggtgtggtgtggtatgtgggaagaagttcagaggaaccgttggaaacgacgttaggcattttaccttttcagtaacattttatacatctacttgtcaatgtatttgagacattcacagccaaaagcctgggactctttgtgaaggtcctcctcacctctatctttctttctctctctctcaaactttccttaaagttctcattgcctttgcactgcttctgtgaacagtctttgtctcctccccacctttggtgggaagtgcggggcagtcctggtcaagacactcatgccctggcaatgtggctgccagagaatgttgttgctaacccaccagtttcttgttgatttggagaggtcaaggccaggcccccacttggcttgaagggacattttcagacttttctttctgtcacttggagtgtctatgcctctcatatttccctaataaactcctcaactttt

SEQ ID NO: 435792 - DNA, 792 bp, Homo sapiens
gttaatgattatatttattgtaaatatttaatctgttattattttattagtcaatccattatatgtcttgtcgttcaagacttgcaacactaaacgagaaattgacagcccttgaacggagaatagagtacattgaagctcgggtgacaaaaggtgagacactcacctagaacagtgccgtgctgctgctgggaagttgctttacacaacacaggccacatgggaaaggccccagcagccttcagctccttcctttctccttaaagagcaacagggcttattcttgtttttcttttttcaaaagtgtggcctttgggctctgccatctggggtgtggtgtggtatgtgggaagaagttcagaggaaccgttggaaacgacgttaggcattttaccttttcagtaacattttatacatctacttgtcaatgtatttgagacattcacagccaaaagcctgggactctttgtgaaggtcctcctcacctctatctttctttctctctctctcaaactttccttaaagttctcattgcctttgcactgcttctgtgaacagtctttgtctcctccccacctttggtgggaagtgcggggcagtcctggtcaagacactcatgccctggcaatgtggctgccagagaatgttgttgctaacccaccagtttcttgttgatttggagaggtcaaggccaggcccccacttggcttgaagggacattttcagacttttctttctgtcacttggagtgtctatgcctctcatatttccctaataaactcctcaactttt

SEQ ID NO: 435793 - DNA, 817 bp, Homo sapiens
tagaggcctgtagggtcggggcgcctgcgcagtcgctcttcctcaggcggcggccatggcgggacaggaggatccggtgcagcgggagattcaccaggactgggctaaccgggagtacattgagataatcaccagcagcatcaagaaaatcgcagactttctcaactcgttcgatatgtcttgtcgttcaagacttgcaacactaaacgagaaattgacagcccttgaacggagaatagagtacattgaagctcgggtgacaaaaggtgagacactcacctagaacagtgccgtgctgctgctgggaagttgctttacacaacacaggccacatgggaaaggccccagcagccttcagctccttcctttctccttaaagagcaacagggcttattcttgtttttcttttttcaaaagtgtggcctttgggctctgccatctggggtgtggtgtggtatgtgggaagaagttcagaggaaccgttggaaacgacgttaggcattttaccttttcagtaacattttatacatctacttgtcaatgtatttgagacattcacagccaaaagcctgggactctttgtgaaggtcctcctcacctctatctttctttctctctctctcaaactttccttaaagttctcattgcctttgcactgcttctgtgaacagtctttgtctcctccccactttcttgttgatttggagaggtcaaggccaggcccccacttggcttgaagggacattttcagacttttctttctgtcacttggagtgtctatgcctctcatatttccctaataaactcctcaactttt

SEQ ID NO: 435794 - DNA, 1124 bp, Homo sapiens
tagaggcctgtagggtcggggcgcctgcgcagtcgctcttcctcaggcggcggccatggcgggacaggaggatccggtgcagcgggagattcaccaggactgggctaaccgggagtacattgagataatcaccagcagcatcaagaaaatcgcagactttctcaactcgttcgatatgtcttgtcgttcaagacttgcaacactaaacgagaaattgacagcccttgaacggagaatagagtacattgaagctcgggtgacaaaaggtgagacactcacctagaacagtgccgtgctgctgctgggaagttgctttacacaacacaggccacatgggaaaggccccagcagccttcagctccttcctttctccttaaagagcaacagggcttattcttgtttttcttttttcaaaagtgtggcctttgggctctgccatctggggtgtggtgtggtatgtgggaagaagttcagaggaaccgttggaaacgacgttaggcattttaccttttcagtaacattttatacatctacttgtcaatgtatttgagacattcacagcctctctcaaactttccttaaagttctcattgcctttgcactgcttctgtgaacagtctttgtctcctccccacctttggtgggaagtgcggggcagtcctggtcaagacactcatgccctggcaatgtggctgccagagaatgttgttgctaacccaccagtttcttgttgatttggagaggtcaaggccaggcccccacttggcttgaagggacattttcagacttttctttctgtcacttggagtgtctatgcctctcatatttccctaataaactcctcaactttttatctgactgctgtgattatggtggggagaggagctagagatgggttcacttattgcacagaaatgtaatacatggcgttattattctaacataaaactttcagatgtagctgtttgattcaaagcctaggtggcttaccagcccaagtccccatgtttggactttcagctgactagctcatcttgggaatcatttggtcattcagcacatttaccaagtatttactatgtaggcatgttaaactccaataaaacatacagcattgaatcaga

SEQ ID NO: 435795 - DNA, 851 bp, Homo sapiens
tagaggcctgtagggtcggggcgcctgcgcagtcgctcttcctcaggcggcggccatggcgggacaggaggatccggtgcagcgggagattcaccaggactgggctaaccgggagtacattgagataatcaccagcagcatcaagaaaatcgcagactttctcaactcgttcgatatgtcttgtcgttcaagacttgcaacactaaacgagaaattgacagcccttgaacggagaatagagtacattgaagctcgggtgacaaaaggtgagacactcacctagaacagtgccgtgctgctgctgggaagttgctttacacaacacaggccacatgggaaaggccccagcagccttcagctccttcctttctccttaaagagcaacagggcttattcttgtttttcttttttcaagttcagaggaaccgttggaaacgacgttaggcattttaccttttcagtaacattttatacatctacttgtcaatgtatttgagacattcacagccaaaagcctgggactctttgtgaaggtcctcctcacctctatctttctttctctctctctcaaactttccttaaagttctcattgcctttgcactgcttctgtgaacagtctttgtctcctccccacctttggtgggaagtgcggggcagtcctggtcaagacactcatgccctggcaatgtggctgccagagaatgttgttgctaacccaccagtttcttgttgatttggagaggtcaaggccaggcccccacttggcttgaagggacattttcagacttttctttctgtcacttggagtgtctatgcctctcatatttccctaataaactcctcaactttt

SEQ ID NO: 435796 - DNA, 757 bp, Homo sapiens
tagaggcctgtagggtcggggcgcctgcgcagtcgctcttcctcaggcggcggccatggcgggacaggaggatccggtgcagcgggagattcaccaggactgggctaaccgggagtacattgagataatcaccagcagcatcaagaaaatcgcagactttctcaactcgttcgatatgtcttgtcgttcaagacttgcaacactaaacgagaaattgacagcccttgaacggagaatagagtacattgaagctcgggtgacaaaaggtgagacactcacctagaacagtgccgtgctgctgctgggaagttgctttacacaacacaggccacatgggaaaggccccagcagccttcagctccttcctttctccttaaagagcaacagggcttattcttgtttttcttttttcaaaagtgtggcctttgggctctgccatctggggtgtggtgtggtatgtgggaagaagttcagaggaaccgttggaaacgacgttaggcattttaccttttcagtaacattttatacatctacttgtcaatgtatttgagacattcacagccaaaagcctgggactctttgtgaaggtcctcctcacctctatctttctttctctctctctcaaactttccttaaagttctcattgcctttgcagccaggcccccacttggcttgaagggacattttcagacttttctttctgtcacttggagtgtctatgcctctcatatttccctaataaactcctcaactttt

SEQ ID NO: 435797 - DNA, 984 bp, Homo sapiens
gctggtacggtcggaattgtgggatgacagcctgaacggagaatagagtacatgaagctcgggtgacaaaaggtgagacactcacctagaacagtgccgtgctgctgctgggaagttgctttacacaacacaggccacatgggaaaggccccagcagccttcagctccttcctttctccttaaagagcaacagggcttattcttgtttttcttttttcaaaagtgtggcctttgggctctgccatctggggtgtggtgtggtatgtgggaagaagttcagaggaaccgttggaaacgacgttaggcattttaccttttcagtaacattttatacatctacttgtcaatgtatttgagacattcacagccaaaagcctgggactctttgtgaaggtcctcctcacctctatctttctttctctctctctcaaactttccttaaagttctcattgcctttgcactgcttctgtgaacagtctttgtctcctccccacctttggtgggaagtgcggggcagtcctggtcaagacactcatgccctggcaatgtggctgccagagaatgttgttgctaacccaccagtttcttgttgatttggagaggtcaaggccaggcccccacttggcttgaagggacattttcagacttttctttctgtcacttggagtgtctatgcctctcatatttccctaataaactcctcaactttttatctgactgctgtgattatggtggggagaggagctagagatgggttcacttattgcacagaaatgtaatacatggcgttattattctaacataaaactttcagatgtagctgtttgattcaaagcctaggtggcttaccagcccaagtccccatgtttggactttcagctgactagctcatcttgggaatcatttggtcattcagcacatttaccaagtatttactatgtaggcatgttaaactccaataaaacatacagcattgaatcaga

SEQ ID NO: 435798 - DNA, 914 bp, Homo sapiens
tagaggcctgtagggtcggggcgcctgcgcagtcgctcttcctcaggcggcggccatggcgggacaggaggatccggtgcagcgggagattcaccaggactgggctaaccgggagtacattgagataatcaccagcagcatcaagaaaatcgcagactttctcaactcgttcgatatgtcttgtcgttcaagacttgcaacactaaacgagaaattgacagcccttgaacggagaatagagtacattgaagctcgggtgacaaaaggtgagacactcacctagaacagtgccgtgctgctgctgggaagttgctttacacaacacaggccacatgggaaaggccccagcagccttcagctccttcctttctccttaaagagcaacagggcttattcttgtttttcttttttcaaaagtgtggcctttgggctctgccatctggggtgtggtgtggtatgtgggaagaagttcagaggaaccgttggaaacgacgttaggcattttaccttttcagtaacattttatacatctacttgtcaatgtatttgagacattcacagccaaaagcctgggactctttgtgaagcatgagcttggcctaaagaggccactgggtggcaggagctgggtgtgtagaagctgctgaaaggttgggagcttggcttggggggtccacagtgaggcagatgctgggcctgaagaatctgctgtgaggcagatgttgggactgtagaggccgacgggaggcagaggctgtgccttggaggggtcaccaagatgcaggagctgggcctggagaggctgcaaagaagcatgagctgggcctggtgaggtcgacttgagaaagttcagggcctggagagaaggctgggaggcaggagctgggtctagagaggccatggcaacagggtct

SEQ ID NO: 435799 - DNA, 623 bp, Homo sapiens
tagaggcctgtagggtcggggcgcctgcgcagtcgctcttcctcaggcggcggccatggcgggacaggaggatccggtgcagcgggagattcaccaggactgggctaaccgggagtacattgagataatcaccagcagcatcaagaaaatcgcagactttctcaactcgttcgatatgtcttgtcgttcaagacttgcaacactaaacgagaaattgacagcccttgaacggagaatagagtacattgaagctcgggtgacaaaaggtgagacactcacctagaacagtgccgtgctgctgctgggaagttgctttacacaacacaggccacatgggaaaggccccagcagccttcagctccttcctttctccttaaagagcaacagggcttattcttgtttttcttttttcaaaagtgtggcctttgggctctgccatctggggtgtggtgtggtatgtgggaagaagttcagaggaaccgttggaaacgacgttaggcattttaccttttcagtaacattttatacatctacttgtcaatgtatttgagacattcacagccctttgaacctttccttaaagttctcattggcattgccctggtttggggaacagcctatga

SEQ ID NO: 435800 - DNA, 909 bp, Homo sapiens
tagaggcctgtagggtcggggcgcctgcgcagtcgctcttcctcaggcggcggccatggcgggacaggaggatccggtgcagcgggagattcaccaggactgggctaaccgggagtacattgagataatcaccagcagcatcaagaaaatcgcagactttctcaactcgttcgcctactcagcaggaagacaatgaggatgaagacctttatgatgatccactgccatttaatgaataatatgtcttgtcgttcaagacttgcaacactaaacgagaaattgacagcccttgaacggagaatagagtacattgaagctcgggtgacaaaaggtgagacactcacctagaacagtgccgtgctgctgctgggaagttgctttacacaacacaggccacatgggaaaggccccagcagccttcagctccttcctttctccttaaagagcaacagggcttattcttgtttttcttttttcaaaagtgtggcctttgggctctgccatctggggtgtggtgtggtatgtgggaagaagttcagaggaaccgttggaaacgacgttaggcattttaccttttcagtaacattttatacatctacttgtcaatgtatttgagacattcacagccaaaagcctgggactctttgtgaaggtcctcctcacctctatctttctttctctctctctcaaactttccttaaagttctcattgcctttgcactgcttctgtgaacagtctttgtctcctccccactttggggaaggggggcgctggcaaaacatgcctgatggtccaaaatttggtaccccattttgttgaagaacacagccctgttaagatacaaatttgtcgggatgccattcaacacatttagaagggagagttcaaaggttacaataacacactta

SEQ ID NO: 435801 - DNA, 152 bp, Homo sapiens
ctgtgacttcacagctatcttcttttctgctatttctcactgcctaggatctaaagatttttttttagacccctctaatcttttttaatttatctaaatgtcagttttcctttcctttcacaggtgacaaaaggtgagacactcacctagaa

SEQ ID NO: 435802 - DNA, 1431 bp, Homo sapiens
ccctccccaaccctgccctcggccttgtcccgggatcgctccgtcgcacccaccatgatggaagacgacgggcagccccggactctatacgtaggtaacctttccagagatgtgacagaagtccttatacttcagttgttcagtcagattggaccctgtaaaagctgtaaaatgataacagagcatacaagcaatgacccatattgctttgtggaattttatgaacacagagatgcagctgctgcattagctgctatgaatgggagaaaaattttgggaaaggaggtcaaagtaaactgggcaaccacaccaagtagccagaaaaaagatacttccaatcacttccatgtgtttgttggggatttgagtccagaaattacaacagaagatatcaaatcagcatttgccccctttggtaaaatatcggatgcccgggtagttaaagacatggcaactggaaaatccaaaggctatggttttgtatctttttataacaaactggatgcagaaaatgcgattgtgcatatgggcggtcagtggttgggtggtcgtcaaatccgaaccaattgggccactcgtaaaccacctgcacctaaaagtacacaagaaaacaacactaagcagttgagatttgaagatgtagtaaaccagtcaagtccaaaaaattgtactgtgtactgtggaggaattgcgtctgggttaacagatcagcttatgagacagacattctcaccatttggacaaattatggaaataagagttttcccagaaaagggctattcatttgtcagattttcaacccatgaaagtgcagcccatgccattgtttcggtgaacggtactacgattgaaggacatgtggttaaatgctattggggtaaagaatctcctgatatgactaaaaacttccaacaggttgactatagtcaatggggccaatggagccaagtgtatggaaacccacaacagtatggacagtatatggcaaatgggtggcaagtaccgccttatggagtatacgggcaaccatggaatcaacaaggatttggagtagatcaatcaccttctgctgcttggatgggtggatttggtgctcagcctccccaaggacaagctcctccccctgtaatacctcctcctaaccaagccggatatggtatggcaagttaccaaacacagtgagccgggactctaaaaaaaaattgtaattcatgataggcttcgatttcctgtgacactctgaagacatgaaagtagacatcggaaaatgaaaatatttattttaaaaattgaaatgtttggaacctttagcacagatttgctttggtgaaggacacgtgtcttctagttctgcctttttaagtttttgttcatgatggatatgaacatgatttttctttatgtacaaaaactaaaataaagtcaataaag

SEQ ID NO: 435803 - DNA, 1560 bp, Homo sapiens
ccctccccaaccctgccctcggccttgtcccgggatcgctccgtcgcacccaccatgatggaagacgacgggcagccccggactctatacgtaggtaacctttccagagatgtgacagaagtccttatacttcagttgttcagtcagattggaccctgtaaaagctgtaaaatgataacagagcatacaagcaatgacccatattgctttgtggaattttatgaacacagagatgcagctgctgcattagctgctatgaatgggagaaaaattttgggaaaggaggtcaaagtaaactgggcaaccacaccaagtagccagaaaaaagatacttccaatcacttccatgtgtttgttggggatttgagtccagaaattacaacagaagatatcaaatcagcatttgccccctttggtaaaatatcggatgcccgggtagttaaagacatggcaactggaaaatccaaaggctatggttttgtatctttttataacaaactggatgcagaaaatgcgattgtgcatatgggcggtcagtggttgggtggtcgtcaaatccgaaccaattgggccactcgtaaaccacctgcacctaaaagtacacaagaaaacaacactaagcagttgagatttgaagatgtagtaaaccagtcaagtccaaaaaattgtactgtgtactgtggaggaattgcgtctgggttaacagatcagcttatgagacagacattctcaccatttggacaaattatggaaataagagttttcccagaaaagggctattcatttgtcagattttcaacccatgaaagtgcagcccatgccattgtttcggtgaacggtactacgattgaaggacatgtggttaaatgctattggggtaaagaatctcctgatatgactaaaaacttccaacaggttgactatagtcaatggggccaatggagccaagtgtatggaaacccacaacagtatggacagtatatggcaaatgggtggcaagtaccgccttatggagtatacgggcaaccatggaatcaacaaggatttggagtagatcaatcaccttctgctgcttggatgggtggatttggtgctcagcctccccaaggacaagctcctccccctgtaatacctcctcctaaccaagccggatatggtatggcaagttaccaaacacagtgagccgggactctaaaaaaaaattgtaattcatgataggcttcgatttcctgtgacactctgaagacatgaaagtagacatcggaaaatgaaaatatttattttaaaaattgaaatgtttggaacctttagcacagatttgctttggtgaaggacacgtgtcttctagttctgcctttttaagtttttgttcatgatggatatgaacatgatttttctttatgtacaaaaactaaaataaagtcaataaagacaattctgactacaaattttgatataataggaaaaatggctaatacattttgattcttagatactattccatttttatcttgctgttcagtattttaactcactgtgggaaggggggtcctctaacgc

SEQ ID NO: 435804 - DNA, 2433 bp, Homo sapiens
ccctccccaaccctgccctcggccttgtcccgggatcgctccgtcgcacccaccatgatggaagacgacgggcagccccggactctacacacacaagctaagacatatggttctatcttcagaaaacaatatggtgtttagagcctaggtagcaattatatatttaaagacttggatctttagcttgactatttcataaccagagcagaaagaaagtgaagtgtagaagctataatttggaacgaataaagatgtcatttcaatgaactaccaagagatgatcttactagatacgtaggtaacctttccagagatgtgacagaagtccttatacttcagttgttcagtcagattggaccctgtaaaagctgtaaaatgataacagagcatacaagcaatgacccatattgctttgtggaattttatgaacacagagatgcagctgctgcattagctgctatgaatgggagaaaaattttgggaaaggaggtcaaagtaaactgggcaaccacaccaagtagccagaaaaaagatacttccaatcacttccatgtgtttgttggggatttgagtccagaaattacaacagaagatatcaaatcagcatttgccccctttggtaaaatatcggatgcccgggtagttaaagacatggcaactggaaaatccaaaggctatggttttgtatctttttataacaaactggatgcagaaaatgcgattgtgcatatgggcggtcagtggttgggtggtcgtcaaatccgaaccaattgggccactcgtaaaccacctgcacctaaaagtacacaagaaaacaacactaagcagttgagatttgaagatgtagtaaaccagtcaagtccaaaaaattgtactgtgtactgtggaggaattgcgtctgggttaacagatcagcttatgagacagacattctcaccatttggacaaattatggaaataagagttttcccagaaaagggctattcatttgtcagattttcaacccatgaaagtgcagcccatgccattgtttcggtgaacggtactacgattgaaggacatgtggttaaatgctattggggtaaagaatctcctgatatgactaaaaacttccaacaggttgactatagtcaatggggccaatggagccaagtgtatggaaacccacaacagtatggacagtatatggcaaatgggtggcaagtaccgccttatggagtatacgggcaaccatggaatcaacaaggatttggagtagatcaatcaccttctgctgcttggatgggtggatttggtgctcagcctccccaaggacaagctcctccccctgtaatacctcctcctaaccaagccggatatggtatggcaagttaccaaacacagtgagccgggactctaaaaaaaaattgtaattcatgataggcttcgatttcctgtgacactctgaagacatgaaagtagacatcggaaaatgaaaatatttattttaaaaattgaaatgtttggaacctttagcacagatttgctttggtgaaggacacgtgtcttctagttctgcctttttaagtttttgttcatgatggatatgaacatgatttttctttatgtacaaaaactaaaataaagtcaataaagacaattctgactacaaattttgatataataggaaaaatggctaatacattttgattcttagatactattccatttttatcttgctgttcagtattttaactcactgtgtttttaaaagagcaaaaaagggaggatcgtgaaaacctgggaatcacatataagttcatcctgaatcctgatactcccctccccttccctgaggtggaccacatttgaagtcagcagagaaaaagtgtgatattcagaagaaatgcgtgattttggagtcgctttggaggaaatattttctttctctatgcctaaagaaactgaagccagactgaagttttgcaccctaaaaaaggaacagcattgtttgagttacttgagcaaatgttggtggtccacgttaagacatatttttaaaacttccaaaagtgtcgattattaaaattgtagtattttacatttcattttggggggaaatccaagtatggtgtttgtattgaagtcagacagtcatacttgtgcttttacatgaagtttaaatgatacatattgtaaatattcaataactacagtgtttaaaaagcatgcttcaacatagaagtagcagcaatgtaattatttgaagtaacacttaacacactccgctgcattgaatgcagtggattgatcagaatgttaagactgacatttccaaggttggctactatgtaaaattaaaattacacaaattgtgcagaaaaagccttaattttaatttcatacaatctttgatgcattagtatgttctaaaatgtcattgggaattagttt

SEQ ID NO: 435805 - DNA, 2384 bp, Homo sapiens
ccctccccaaccctgccctcggccttgtcccgggatcgctccgtcgcacccaccatgatggaagacgacgggcagccccggactctacacacacaagctaagacatatggttctatcttcagaaaacaatatggtgtttagagcctagttcctacagttcctgttcttagaagacaaaatagactctaagatacgtaggtaacctttccagagatgtgacagaagtccttatacttcagttgttcagtcagattggaccctgtaaaagctgtaaaatgataacagagcaacccgatagcagaagggtcaactcttctgttggattttctgttttgcagcatacaagcaatgacccatattgctttgtggaattttatgaacacagagatgcagctgctgcattagctgctatgaatgggagaaaaattttgggaaaggaggtcaaagtaaactgggcaaccacaccaagtagccagaaaaaagatacttccaatcacttccatgtgtttgttggggatttgagtccagaaattacaacagaagatatcaaatcagcatttgccccctttggtaaaatatcggatgcccgggtagttaaagacatggcaactggaaaatccaaaggctatggttttgtatctttttataacaaactggatgcagaaaatgcgattgtgcatatgggcggtcagtggttgggtggtcgtcaaatccgaaccaattgggccactcgtaaaccacctgcacctaaaagtacacaagaaaacaacactaagcagttgagatttgaagatgtagtaaaccagtcaagtccaaaaaattgtactgtgtactgtggaggaattgcgtctgggttaacagatcagcttatgagacagacattctcaccatttggacaaattatggaaataagagttttcccagaaaagggctattcatttgtcagattttcaacccatgaaagtgcagcccatgccattgtttcggtgaacggtactacgattgaaggacatgtggttaaatgctattggggtaaagaatctcctgatatgactaaaaacttccaacaggttgactatagtcaatggggccaatggagccaagtgtatggaaacccacaacagtatggacagtatatggcaaatgggtggcaagtaccgccttatggagtatacgggcaaccatggaatcaacaaggatttggagtagatcaatcaccttctgctgcttggatgggtggatttggtgctcagcctccccaaggacaagctcctccccctgtaatacctcctcctaaccaagccggatatggtatggcaagttaccaaacacagtgagccgggactctaaaaaaaaattgtaattcatgataggcttcgatttcctgtgacactctgaagacatgaaagtagacatcggaaaatgaaaatatttattttaaaaattgaaatgtttggaacctttagcacagatttgctttggtgaaggacacgtgtcttctagttctgcctttttaagtttttgttcatgatggatatgaacatgatttttctttatgtacaaaaactaaaataaagtcaataaagacaattctgactacaaattttgatataataggaaaaatggctaatacattttgattcttagatactattccatttttatcttgctgttcagtattttaactcactgtgtttttaaaagagcaaaaaagggaggatcgtgaaaacctgggaatcacatataagttcatcctgaatcctgatactcccctccccttccctgaggtggaccacatttgaagtcagcagagaaaaagtgtgatattcagaagaaatgcgtgattttggagtcgctttggaggaaatattttctttctctatgcctaaagaaactgaagccagactgaagttttgcaccctaaaaaaggaacagcattgtttgagttacttgagcaaatgttggtggtccacgttaagacatatttttaaaacttccaaaagtgtcgattattaaaattgtagtattttacatttcattttggggggaaatccaagtatggtgtttgtattgaagtcagacagtcatacttgtgcttttacatgaagtttaaatgatacatattgtaaatattcaataactacagtgtttaaaaagcatgcttcaacatagaagtagcagcaatgtaattatttgaagtaacacttaacacactccgctgcattgaatgcagtggattgatcagaatgttaagactgacatttccaaggttggctactatgtaaaattaaaattacacaaattgtgcagaaaaagccttaattttaatttcatacaatctttgatgcattagtatgttctaaaatgtcattgggaattagttt

SEQ ID NO: 435806 - DNA, 2280 bp, Homo sapiens
ccctccccaaccctgccctcggccttgtcccgggatcgctccgtcgcacccaccatgatggaagacgacgggcagccccggactctatacgtaggtaacctttccagagatgtgacagaagtccttatacttcagttgttcagtcagattggaccctgtaaaagctgtaaaatgataacagagcaacccgatagcagaagggtcaactcttctgttggattttctgttttgcagcatacaagcaatgacccatattgctttgtggaattttatgaacacagagatgcagctgctgcattagctgctatgaatgggagaaaaattttgggaaaggaggtcaaagtaaactgggcaaccacaccaagtagccagaaaaaagatacttccaatcacttccatgtgtttgttggggatttgagtccagaaattacaacagaagatatcaaatcagcatttgccccctttggtaaaatatcggatgcccgggtagttaaagacatggcaactggaaaatccaaaggctatggttttgtatctttttataacaaactggatgcagaaaatgcgattgtgcatatgggcggtcagtggttgggtggtcgtcaaatccgaaccaattgggccactcgtaaaccacctgcacctaaaagtacacaagaaaacaacactaagcagttgagatttgaagatgtagtaaaccagtcaagtccaaaaaattgtactgtgtactgtggaggaattgcgtctgggttaacagatcagcttatgagacagacattctcaccatttggacaaattatggaaataagagttttcccagaaaagggctattcatttgtcagattttcaacccatgaaagtgcagcccatgccattgtttcggtgaacggtactacgattgaaggacatgtggttaaatgctattggggtaaagaatctcctgatatgactaaaaacttccaacaggttgactatagtcaatggggccaatggagccaagtgtatggaaacccacaacagtatggacagtatatggcaaatgggtggcaagtaccgccttatggagtatacgggcaaccatggaatcaacaaggatttggagtagatcaatcaccttctgctgcttggatgggtggatttggtgctcagcctccccaaggacaagctcctccccctgtaatacctcctcctaaccaagccggatatggtatggcaagttaccaaacacagtgagccgggactctaaaaaaaaattgtaattcatgataggcttcgatttcctgtgacactctgaagacatgaaagtagacatcggaaaatgaaaatatttattttaaaaattgaaatgtttggaacctttagcacagatttgctttggtgaaggacacgtgtcttctagttctgcctttttaagtttttgttcatgatggatatgaacatgatttttctttatgtacaaaaactaaaataaagtcaataaagacaattctgactacaaattttgatataataggaaaaatggctaatacattttgattcttagatactattccatttttatcttgctgttcagtattttaactcactgtgtttttaaaagagcaaaaaagggaggatcgtgaaaacctgggaatcacatataagttcatcctgaatcctgatactcccctccccttccctgaggtggaccacatttgaagtcagcagagaaaaagtgtgatattcagaagaaatgcgtgattttggagtcgctttggaggaaatattttctttctctatgcctaaagaaactgaagccagactgaagttttgcaccctaaaaaaggaacagcattgtttgagttacttgagcaaatgttggtggtccacgttaagacatatttttaaaacttccaaaagtgtcgattattaaaattgtagtattttacatttcattttggggggaaatccaagtatggtgtttgtattgaagtcagacagtcatacttgtgcttttacatgaagtttaaatgatacatattgtaaatattcaataactacagtgtttaaaaagcatgcttcaacatagaagtagcagcaatgtaattatttgaagtaacacttaacacactccgctgcattgaatgcagtggattgatcagaatgttaagactgacatttccaaggttggctactatgtaaaattaaaattacacaaattgtgcagaaaaagccttaattttaatttcatacaatctttgatgcattagtatgttctaaaatgtcattgggaattagttt

SEQ ID NO: 435807 - DNA, 2605 bp, Homo sapiens
ccctccccaaccctgccctcggccttgtcccgggatcgctccgtcgcacccaccatgatggaagacgacgggcagccccggactctatacgtaggtaacctttccagagatgtgacagaagtccttatacttcagttgttcagtcagattggaccctgtaaaagctgtaaaatgataacagagcatacaagcaatgacccatattgctttgtggaattttatgaacacagagatgcagctgctgcattagctgctatgaatgggagaaaaattttgggaaaggaggtcaaagtaaactgggcaaccacaccaagtagccagaaaaaagatacttccaatcacttccatgtgtttgttggggatttgagtccagaaattacaacagaagatatcaaatcagcatttgccccctttggtaaaatatcaattgctcataagaatggacaggatcttgaaggctaactgcaaggaactgtgcacactggaactcagttgtagattttttttctcatttctatttattcttattatacattatttatatatacatattttagtatttacattttaacattctatattcagtggagttctatatttccaatcatttaacttactcactaaaatttctgtgtaaatttgttgttttcgtactggtgtgcttagcattgttgttagttttttattctcctttcttaaatttctgaaaatgtcaatttttcaaaatttacagctgcccaaactccaaaatgatggtagagaattgaccaagaaaaataaagaaatctgttaacaggccatggatgcccgggtagttaaagacatggcaactggaaaatccaaaggctatggttttgtatctttttataacaaactggatgcagaaaatgcgattgtgcatatgggcggtcagtggttgggtggtcgtcaaatccgaaccaattgggccactcgtaaaccacctgcacctaaaagtacacaagaaaacaacactaagcagttgagatttgaagatgtagtaaaccagtcaagtccaaaaaattgtactgtgtactgtggaggaattgcgtctgggttaacagatcagcttatgagacagacattctcaccatttggacaaattatggaaataagagttttcccagaaaagggctattcatttgtcagattttcaacccatgaaagtgcagcccatgccattgtttcggtgaacggtactacgattgaaggacatgtggttaaatgctattggggtaaagaatctcctgatatgactaaaaacttccaacaggttgactatagtcaatggggccaatggagccaagtgtatggaaacccacaacagtatggacagtatatggcaaatgggtggcaagtaccgccttatggagtatacgggcaaccatggaatcaacaaggatttggagtagatcaatcaccttctgctgcttggatgggtggatttggtgctcagcctccccaaggacaagctcctccccctgtaatacctcctcctaaccaagccggatatggtatggcaagttaccaaacacagtgagccgggactctaaaaaaaaattgtaattcatgataggcttcgatttcctgtgacactctgaagacatgaaagtagacatcggaaaatgaaaatatttattttaaaaattgaaatgtttggaacctttagcacagatttgctttggtgaaggacacgtgtcttctagttctgcctttttaagtttttgttcatgatggatatgaacatgatttttctttatgtacaaaaactaaaataaagtcaataaagacaattctgactacaaattttgatataataggaaaaatggctaatacattttgattcttagatactattccatttttatcttgctgttcagtattttaactcactgtgtttttaaaagagcaaaaaagggaggatcgtgaaaacctgggaatcacatataagttcatcctgaatcctgatactcccctccccttccctgaggtggaccacatttgaagtcagcagagaaaaagtgtgatattcagaagaaatgcgtgattttggagtcgctttggaggaaatattttctttctctatgcctaaagaaactgaagccagactgaagttttgcaccctaaaaaaggaacagcattgtttgagttacttgagcaaatgttggtggtccacgttaagacatatttttaaaacttccaaaagtgtcgattattaaaattgtagtattttacatttcattttggggggaaatccaagtatggtgtttgtattgaagtcagacagtcatacttgtgcttttacatgaagtttaaatgatacatattgtaaatattcaataactacagtgtttaaaaagcatgcttcaacatagaagtagcagcaatgtaattatttgaagtaacacttaacacactccgctgcattgaatgcagtggattgatcagaatgttaagactgacatttccaaggttggctactatgtaaaattaaaattacacaaattgtgcagaaaaagccttaattttaatttcatacaatctttgatgcattagtatgttctaaaatgtcattgggaattagttt

SEQ ID NO: 435808 - DNA, 2622 bp, Homo sapiens
ccctccccaaccctgccctcggccttgtcccgggatcgctccgtcgcacccaccatgatggaagacgacgggcagccccggactctacacacacaagctaagacatatggttctatcttcagaaaacaatatggtgtttagagcctagatacgtaggtaacctttccagagatgtgacagaagtccttatacttcagttgttcagtcagattggaccctgtaaaagctgtaaaatgataacagagcatacaagcaatgacccatattgctttgtggaattttatgaacacagagatgcagctgctgcattagctgctatgaatgggagaaaaattttgggaaaggaggtcaaagtaaactgggcaaccacaccaagtagccagaaaaaagatacttccaatcacttccatgtgtttgttggggatttgagtccagaaattacaacagaagatatcaaatcagcatttgccccctttggtaaaatatcggatgcccgggtagttaaagacatggcaactggaaaatccaaaggctatggttttgtatctttttataacaaactggatgcagaaaatgcgattgtgcatatgggcggtcagtggttgggtggtcgtcaaatccgaaccaattgggccactcgtaaaccacctgcacctaaaagtacacaagaaaacaacactaagcagttgagatttgaagatgtagtaaaccagtcaagtccaaaaaattgtactgtgtactgtggaggaattgcgtctgggttaacagatcagcttatgagacagacattctcaccatttggacaaattatggaaataagagttttcccagaaaagggctattcatttgtcagattttcaacccatgaaagtgcagcccatgccattgtttcggtgaacggtactacgattgaaggacatgtggttaaatgctattggggtaaagaatctcctgatatgactaaaaacttccaacagaggtaattcgatttttcatagcattctttaaggtttccatcttacatgtcacataaaagctttggaaactctgtaaaatgaacaataaaataaagcatatagctactttcagttgattgtatttcaaaattgattatttgcggtattaactgaatcttaatactttcttttcacaggtgtcaccaccccaataaacttagacaatgataaataacagagtcctattcacataagggtgcttacttagtttttctcttccttgtctcccactctttcttcatatacggtgtttcttatgtgttccctaaaacaatactttgctttttcctaggttgactatagtcaatggggccaatggagccaagtgtatggaaacccacaacagtatggacagtatatggcaaatgggtggcaagtaccgccttatggagtatacgggcaaccatggaatcaacaaggatttggagtagatcaatcaccttctgctgcttggatgggtggatttggtgctcagcctccccaaggacaagctcctccccctgtaatacctcctcctaaccaagccggatatggtatggcaagttaccaaacacagtgagccgggactctaaaaaaaaattgtaattcatgataggcttcgatttcctgtgacactctgaagacatgaaagtagacatcggaaaatgaaaatatttattttaaaaattgaaatgtttggaacctttagcacagatttgctttggtgaaggacacgtgtcttctagttctgcctttttaagtttttgttcatgatggatatgaacatgatttttctttatgtacaaaaactaaaataaagtcaataaagacaattctgactacaaattttgatataataggaaaaatggctaatacattttgattcttagatactattccatttttatcttgctgttcagtattttaactcactgtgtttttaaaagagcaaaaaagggaggatcgtgaaaacctgggaatcacatataagttcatcctgaatcctgatactcccctccccttccctgaggtggaccacatttgaagtcagcagagaaaaagtgtgatattcagaagaaatgcgtgattttggagtcgctttggaggaaatattttctttctctatgcctaaagaaactgaagccagactgaagttttgcaccctaaaaaaggaacagcattgtttgagttacttgagcaaatgttggtggtccacgttaagacatatttttaaaacttccaaaagtgtcgattattaaaattgtagtattttacatttcattttggggggaaatccaagtatggtgtttgtattgaagtcagacagtcatacttgtgcttttacatgaagtttaaatgatacatattgtaaatattcaataactacagtgtttaaaaagcatgcttcaacatagaagtagcagcaatgtaattatttgaagtaacacttaacacactccgctgcattgaatgcagtggattgatcagaatgttaagactgacatttccaaggttggctactatgtaaaattaaaattacacaaattgtgcagaaaaagccttaattttaatttcatacaatctttgatgcattagtatgttctaaaatgtcattgggaattagttt

SEQ ID NO: 435809 - DNA, 3396 bp, Homo sapiens
ccctccccaaccctgccctcggccttgtcccgggatcgctccgtcgcacccaccatgatggaagacgacgggcagccccggactctatacgtaggtaacctttccagagatgtgacagaagtccttatacttcagttgttcagtcagattggaccctgtaaaagctgtaaaatgataacagagcatacaagcaatgacccatattgctttgtggaattttatgaacacagagatgcagctgctgcattagctgctatgaatgggagaaaaattttgggaaaggaggtcaaagtaaactgggcaaccacaccaagtagccagaaaaaagatacttccaatcacttccatgtgtttgttggggatttgagtccagaaattacaacagaagatatcaaatcagcatttgccccctttggtaaaatatcaattgctcataagaatggacaggatcttgaaggctaactgcaaggaactgtgcacactggaactcagttgtagattttttttctcatttctatttattcttattatacattatttatatatacatattttagtatttacattttaacattctatattcagtggagttctatatttccaatcatttaacttactcactaaaatttctgtgtaaatttgttgttttcgtactggtgtgcttagcattgttgttagttttttattctcctttcttaaatttctgaaaatgtcaatttttcaaaatttacagctgcccaaactccaaaatgatggtagagaattgaccaagaaaaataaagaaatctgttaacaggccatgtatgcctttttaattcctattttttcctctttttcaattttttaatatttcatatattttgtatcactaggcagaagacatttaactatttagagattgcatggtaaagtagttagtattgttacagtaatttatagaatcagtaaaccttagaggacactagtaaatagaatattagaaagggaaactgttgttcctattaatcttcaaatttgagcatttagtttagaaagcacaggctatttgattaggttgcatgtttattacatgtttttgtcctactgcttttttctaacaggtaaagaagcattagggagagttcaggaatggttgtagttaattagggctaactggaattttattttaaaaatgctcacaatacagtgtgtgtggttccttttagtttttattttgagggtggctcttacttccctcatttagctgtgcttcttttcacagggatgcccgggtagttaaagacatggcaactggaaaatccaaaggctatggttttgtatctttttataacaaactggatgcagaaaatgcgattgtgcatatgggcggtcagtggttgggtggtcgtcaaatccgaaccaattgggccactcgtaaaccacctgcacctaaaagtacacaagaaaacaacactaagcagttgagatttgaagatgtagtaaaccagtcaagtccaaaaaattgtactgtgtactgtggaggaattgcgtctgggttaacagatcagcttatgagacagacattctcaccatttggacaaattatggaaataagagttttcccagaaaagggctattcatttgtcagattttcaacccatgaaagtgcagcccatgccattgtttcggtgaacggtactacgattgaaggacatgtggttaaatgctattggggtaaagaatctcctgatatgactaaaaacttccaacagaggtaattcgatttttcatagcattctttaaggtttccatcttacatgtcacataaaagctttggaaactctgtaaaatgaacaataaaataaagcatatagctactttcagttgattgtatttcaaaattgattatttgcggtattaactgaatcttaatactttcttttcacaggtgtcaccaccccaataaacttagacaatgataaataacagagtcctattcacataagggtgcttacttagtttttctcttccttgtctcccactctttcttcatatacggtgtttcttatgtgttccctaaaacaatactttgctttttcctaggttgactatagtcaatggggccaatggagccaagtgtatggaaacccacaacagtatggacagtatatggcaaatgggtggcaagtaccgccttatggagtatacgggcaaccatggaatcaacaaggatttggagtagatcaatcaccttctgctgcttggatgggtggatttggtgctcagcctccccaaggacaagctcctccccctgtaatacctcctcctaaccaagccggatatggtatggcaagttaccaaacacagtgagccgggactctaaaaaaaaattgtaattcatgataggcttcgatttcctgtgacactctgaagacatgaaagtagacatcggaaaatgaaaatatttattttaaaaattgaaatgtttggaacctttagcacagatttgctttggtgaaggacacgtgtcttctagttctgcctttttaagtttttgttcatgatggatatgaacatgatttttctttatgtacaaaaactaaaataaagtcaataaagacaattctgactacaaattttgatataataggaaaaatggctaatacattttgattcttagatactattccatttttatcttgctgttcagtattttaactcactgtgtttttaaaagagcaaaaaagggaggatcgtgaaaacctgggaatcacatataagttcatcctgaatcctgatactcccctccccttccctgaggtggaccacatttgaagtcagcagagaaaaagtgtgatattcagaagaaatgcgtgattttggagtcgctttggaggaaatattttctttctctatgcctaaagaaactgaagccagactgaagttttgcaccctaaaaaaggaacagcattgtttgagttacttgagcaaatgttggtggtccacgttaagacatatttttaaaacttccaaaagtgtcgattattaaaattgtagtattttacatttcattttggggggaaatccaagtatggtgtttgtattgaagtcagacagtcatacttgtgcttttacatgaagtttaaatgatacatattgtaaatattcaataactacagtgtttaaaaagcatgcttcaacatagaagtagcagcaatgtaattatttgaagtaacacttaacacactccgctgcattgaatgcagtggattgatcagaatgttaagactgacatttccaaggttggctactatgtaaaattaaaattacacaaattgtgcagaaaaagccttaattttaatttcatacaatctttgatgcattagtatgttctaaaatgtcattgggaattagttt

SEQ ID NO: 435810 - DNA, 2545 bp, Homo sapiens
ccctccccaaccctgccctcggccttgtcccgggatcgctccgtcgcacccaccatgatggaagacgacgggcagccccggactctatacgtaggtaacctttccagagatgtgacagaagtccttatacttcagttgttcagtcagattggaccctgtaaaagctgtaaaatgataacagagcatacaagcaatgacccatattgctttgtggaattttatgaacacagagatgcagctgctgcattagctgctatgaatgggagaaaaattttgggaaaggaggtcaaagtaaactgggcaaccacaccaagtagccagaaaaaagatacttccaatcacttccatgtgtttgttggggatttgagtccagaaattacaacagaagatatcaaatcagcatttgccccctttggtaaaatatcaattgctcataagaatggacaggatcttgaaggctaactgcaaggaactgtgcacactggaactcagttgtagattttttttctcatttctatttattcttattatacattatttatatatacatattttagtatttacattttaacattctatattcagtggagttctatatttccaatcatttaacttactcactaaaatttctgtgtaaatttgttgttttcgtactggtgtgcttagcattgttgttagttttttattctcctttcttaaatttctgaaaatgtcaatttttcaaaatttacagctgcccaaactccaaaatgatggtagagaattgaccaagaaaaataaagaaatctgttaacaggccatggatgcccgggtagttaaagacatggcaactggaaaatccaaaggctatggttttgtatctttttataacaaactgaccaattgggccactcgtaaaccacctgcacctaaaagtacacaagaaaacaacactaagcagttgagatttgaagatgtagtaaaccagtcaagtccaaaaaattgtactgtgtactgtggaggaattgcgtctgggttaacagatcagcttatgagacagacattctcaccatttggacaaattatggaaataagagttttcccagaaaagggctattcatttgtcagattttcaacccatgaaagtgcagcccatgccattgtttcggtgaacggtactacgattgaaggacatgtggttaaatgctattggggtaaagaatctcctgatatgactaaaaacttccaacaggttgactatagtcaatggggccaatggagccaagtgtatggaaacccacaacagtatggacagtatatggcaaatgggtggcaagtaccgccttatggagtatacgggcaaccatggaatcaacaaggatttggagtagatcaatcaccttctgctgcttggatgggtggatttggtgctcagcctccccaaggacaagctcctccccctgtaatacctcctcctaaccaagccggatatggtatggcaagttaccaaacacagtgagccgggactctaaaaaaaaattgtaattcatgataggcttcgatttcctgtgacactctgaagacatgaaagtagacatcggaaaatgaaaatatttattttaaaaattgaaatgtttggaacctttagcacagatttgctttggtgaaggacacgtgtcttctagttctgcctttttaagtttttgttcatgatggatatgaacatgatttttctttatgtacaaaaactaaaataaagtcaataaagacaattctgactacaaattttgatataataggaaaaatggctaatacattttgattcttagatactattccatttttatcttgctgttcagtattttaactcactgtgtttttaaaagagcaaaaaagggaggatcgtgaaaacctgggaatcacatataagttcatcctgaatcctgatactcccctccccttccctgaggtggaccacatttgaagtcagcagagaaaaagtgtgatattcagaagaaatgcgtgattttggagtcgctttggaggaaatattttctttctctatgcctaaagaaactgaagccagactgaagttttgcaccctaaaaaaggaacagcattgtttgagttacttgagcaaatgttggtggtccacgttaagacatatttttaaaacttccaaaagtgtcgattattaaaattgtagtattttacatttcattttggggggaaatccaagtatggtgtttgtattgaagtcagacagtcatacttgtgcttttacatgaagtttaaatgatacatattgtaaatattcaataactacagtgtttaaaaagcatgcttcaacatagaagtagcagcaatgtaattatttgaagtaacacttaacacactccgctgcattgaatgcagtggattgatcagaatgttaagactgacatttccaaggttggctactatgtaaaattaaaattacacaaattgtgcagaaaaagccttaattttaatttcatacaatctttgatgcattagtatgttctaaaatgtcattgggaattagttt

SEQ ID NO: 435811 - DNA, 1824 bp, Homo sapiens
ccctccccaaccctgccctcggccttgtcccgggatcgctccgtcgcacccaccatgatggaagacgacgggcagccccggactctacacacacaagctaagacatatggttctatcttcagaaaacaatatggtgtttagagcctagatacgtaggtaacctttccagagatgtgacagaagtccttatacttcagttgttcagtcagattggaccctgtaaaagctgtaaaatgataacagagcatacaagcaatgacccatattgctttgtggaattttatgaacacagagatgcagctgctgcattagctgctatgaatgggagaaaaattttgggaaaggaggtcaaagtaaactgggcaaccacaccaagtagccagaaaaaagatacttccaatcacttccatgtgtttgttggggatttgagtccagaaattacaacagaagatatcaaatcagcatttgccccctttggtaaaatatcggatgcccgggtagttaaagacatggcaactggaaaatccaaaggctatggttttgtatctttttataacaaactggatgcagaaaatgcgattgtgcatatgggcggtcagtggttgggtggtcgtcaaatccgaaccaattgggccactcgtaaaccacctgcacctaaaagtacacaagaaaacaacactaagcagttgagatttgaagatgtagtaaaccagtcaagtccaaaaaattgtactgtgtactgtggaggaattgcgtctgggttaacagatcagcttatgagacagacattctcaccatttggacaaattatggaaataagagttttcccagaaaagggctattcatttgtcagattttcaacccatgaaagtgcagcccatgccattgtttcggtgaacggtactacgattgaaggacatgtggttaaatgctattggggtaaagaatctcctgatatgactaaaaacttccaacagaggtaattcgatttttcatagcattctttaaggtttccatcttacatgtcacataaaagctttggaaactctgtaaaatgaacaataaaataaagcatatagctactttcagttgattgtatttcaaaattgattatttgcggtattaactgaatcttaatactttcttttcacaggtgtcaccaccccaataaacttagacaatgataaataacagagtcctattcacataagggtgcttacttagtttttctcttccttgtctcccactctttcttcatatacggtgtttcttatgtgttccctaaaacaatactttgctttttcctaggttgactatagtcaatggggccaatggagccaagtgtatggaaacccacaacagtatggacagtatatggcaaatgggtggcaagtaccgccttatggagtatacgggcaaccatggaatcaacaaggatttggagtagatcaatcaccttctgctgcttggatgggtggatttggtgctcagcctccccaaggacaagctcctccccctgtaatacctcctcctaaccaagccggatatggtatggcaagttaccaaacacagtgagccgggactctaaaaaaaaattgtaattcatgataggcttcgatttcctgtgacactctgaagacatgaaagtagacatcggaaaatgaaaatatttattttaaaaattgaaatgtttggaacctttagcacagatttgctttggtgaaggacacgtgtcttctagttctgcctttttaagtttttgttcatgatggatatgaacatgatttttctttatgtacaaaaactaaaataaagtcaataaag

SEQ ID NO: 435812 - DNA, 1584 bp, Homo sapiens
ttttgttgatagagtggtttcctcctttgtaattcccctgcccagggccagcccatagctttattttcagatttcttcctttgagactgtttccaacatgaacttgtttttaaaatttcttatgtaatagatgatgtgttgaatcattcacaatttttaaaaaattagtttgcagatactcctcagacatcagtgtgttaagttgtggttatcttaaaaatatcaaagactaatactggaatatgtattctacacatatatcatttatttctttgatctttctatttgttgtaggtgtgttgatttctggttttctattctgtgattaggctctgcttgatttttgtgtaaatacatatgtgattttttttttcttgtgtttgctgaagattttttctttttcttccaagtcaatcaccttctgctgcttggatgggtggatttggtgctcagcctccccaaggacaagctcctccccctgtaatacctcctcctaaccaagccggatatggtatggcaagttaccaaacacagtgagccgggactctaaaaaaaaattgtaattcatgataggcttcgatttcctgtgacactctgaagacatgaaagtagacatcggaaaatgaaaatatttattttaaaaattgaaatgtttggaacctttagcacagatttgctttggtgaaggacacgtgtcttctagttctgcctttttaagtttttgttcatgatggatatgaacatgatttttctttatgtacaaaaactaaaataaagtcaataaagacaattctgactacaaattttgatataataggaaaaatggctaatacattttgattcttagatactattccatttttatcttgctgttcagtattttaactcactgtgtttttaaaagagcaaaaaagggaggatcgtgaaaacctgggaatcacatataagttcatcctgaatcctgatactcccctccccttccctgaggtggaccacatttgaagtcagcagagaaaaagtgtgatattcagaagaaatgcgtgattttggagtcgctttggaggaaatattttctttctctatgcctaaagaaactgaagccagactgaagttttgcaccctaaaaaaggaacagcattgtttgagttacttgagcaaatgttggtggtccacgttaagacatatttttaaaacttccaaaagtgtcgattattaaaattgtagtattttacatttcattttggggggaaatccaagtatggtgtttgtattgaagtcagacagtcatacttgtgcttttacatgaagtttaaatgatacatattgtaaatattcaataactacagtgtttaaaaagcatgcttcaacatagaagtagcagcaatgtaattatttgaagtaacacttaacacactccgctgcattgaatgcagtggattgatcagaatgttaagactgacatttccaaggttggctactatgtaaaattaaaattacacaaattgtgcagaaaaagccttaattttaatttcatacaatctttgatgcattagtatgttctaaaatgtcattgggaattagttt

SEQ ID NO: 435813 - DNA, 2326 bp, Homo sapiens
ccctccccaaccctgccctcggccttgtcccgggatcgctccgtcgcacccaccatgatggaagacgacgggcagccccggactctatacgtaggtaacctttccagagatgtgacagaagtccttatacttcagttgttcagtcagattggaccctgtaaaagctgtaaaatgataacagagcatacaagcaatgacccatattgctttgtggaattttatgaacacagagatgcagctgctgcattagctgctatgaatgggagaaaaattttgggaaaggaggtcaaagtaaactgggcaaccacaccaagtagccagaaaaaagatacttccaatcacttccatgtgtttgttggggatttgagtccagaaattacaacagaagatatcaaatcagcatttgccccctttggtaaaatatcaattgctcataagaatggacaggatcttgaaggctaactgcaaggaactgtgcacactggaactcagttgtagattttttttctcatttctatttattcttattatacattatttatatatacatattttagtatttacattttaacattctatattcagtggagttctatatttccaatcatttaacttactcactaaaatttctgtgtaaatttgttgttttcgtactggtgtgcttagcattgttgttagttttttattctcctttcttaaatttctgaaaatgtcaatttttcaaaatttacagctgcccaaactccaaaatgatggtagagaattgaccaagaaaaataaagaaatctgttaacaggccatgtatgcctttttaattcctattttttcctctttttcaattttttaatatttcatatattttgtatcactaggcagaagacatttaactatttagagattgcatggtaaagtagttagtattgttacagtaatttatagaatcagtaaaccttagaggacactagtaaatagaatattagaaagggaaactgttgttcctattaatcttcaaatttgagcatttagtttagaaagcacaggctatttgattaggttgcatgtttattacatgtttttgtcctactgcttttttctaacaggtaaagaagcattagggagagttcaggaatggttgtagttaattagggctaactggaattttattttaaaaatgctcacaatacagtgtgtgtggttccttttagtttttattttgagggtggctcttacttccctcatttagctgtgcttcttttcacagggatgcccgggtagttaaagacatggcaactggaaaatccaaaggctatggttttgtatctttttataacaaactggatgcagaaaatgcgattgtgcatatgggcggtcagtggttgggtggtcgtcaaatccgaaccaattgggccactcgtaaaccacctgcacctaaaagtacacaagaaaacaacactaagcagttgagatttgaagatgtagtaaaccagtcaagtccaaaaaattgtactgtgtactgtggaggaattgcgtctgggttaacagatcagcttatgagacagacattctcaccatttggacaaattatggaaataagagttttcccagaaaagggctattcatttgtcagattttcaacccatgaaagtgcagcccatgccattgtttcggtgaacggtactacgattgaaggacatgtggttaaatgctattggggtaaagaatctcctgatatgactaaaaacttccaacaggtgtcaccaccccaataaacttagacaatgataaataacagagtcctattcacataagggttgactatagtcaatggggccaatggagccaagtgtatggaaacccacaacagtatggacagtatatggcaaatgggtggcaagtaccgccttatggagtatacgggcaaccatggaatcaacaaggatttggagtagatcaatcaccttctgctgcttggatgggtggatttggtgctcagcctccccaaggacaagctcctccccctgtaatacctcctcctaaccaagccggatatggtatggcaagttaccaaacacagtgagccgggactctaaaaaaaaattgtaattcatgataggcttcgatttcctgtgacactctgaagacatgaaagtagacatcggaaaatgaaaatatttattttaaaaattgaaatgtttggaacctttagcacagatttgctttggtgaaggacacgtgtcttctagttctgcctttttaagtttttgttcatgatggatatgaacatgatttttctttatgtacaaaaactaaaataaagtcaataaag

SEQ ID NO: 435814 - DNA, 1862 bp, Homo sapiens
ccctccccaaccctgccctcggccttgtcccgggatcgctccgtcgcacccaccatgatggaagacgacgggcagccccggactctatacgtaggtaacctttccagagatgtgacagaagtccttatacttcagttgttcagtcagattggaccctgtaaaagctgtaaaatgataacagagcatacaagcaatgacccatattgctttgtggaattttatgaacacagagatgcagctgctgcattagctgctatgaatgggagaaaaattttgggaaaggaggtcaaagtaaactgggcaaccacaccaagtagccagaaaaaagatacttccaatcacttccatgtgtttgttggggatttgagtccagaaattacaacagaagatatcaaatcagcatttgccccctttggtaaaatatcaattgctcataagaatggacaggatcttgaaggctaactgcaaggaactgtgcacactggaactcagttgtagattttttttctcatttctatttattcttattatacattatttatatatacatattttagtatttacattttaacattctatattcagtggagttctatatttccaatcatttaacttactcactaaaatttctgtgtaaatttgttgttttcgtactggtgtgcttagcattgttgttagttttttattctcctttcttaaatttctgaaaatgtcaatttttcaaaatttacagctgcccaaactccaaaatgatggtagagaattgaccaagaaaaataaagaaatctgttaacaggccatgtatgcctttttaattcctattttttcctctttttcaattttttaatatttcatatattttgtatcactaggcagaagacatttaactatttagagattgcatggtaaagtagttagtattgttacagtaatttatagaatcagtaaaccttagaggacactagtaaatagaatattagaaagggaaactgttgttcctattaatcttcaaatttgagcatttagtttagaaagcacaggctatttgattaggttgcatgtttattacatgtttttgtcctactgcttttttctaacaggtaaagaagcattagggagagttcaggaatggttgtagttaattagggctaactggaattttattttaaaaatgctcacaatacagtgtgtgtggttccttttagtttttattttgagggtggctcttacttccctcatttagctgtgcttcttttcacagggatgcccgggtagttaaagacatggcaactggaaaatccaaaggctatggttttgtatctttttataacaaactggatgcagaaaatgcgattgtgcatatgggcggtcagtggttgggtggtcgtcaaatccgaaccaattgggccactcgtaaaccacctgcacctaaaagtacacaagaaaacaacactaagcagttgagatttgaagatgtagtaaaccagtcaagtccaaaaaattgtactgtgtactgtggaggaattgcgtctgggttaacagatcagcttatgagacagacattctcaccatttggacaaattatggaaataagagttttcccagaaaagggctattcatttgtcagattttcaacccatgaaagtgcagcccatgccattgtttcggtgaacggtactacgattgaaggacatgtggttaaatgctattggggtaaagaatctcctgatatgactaaaaacttccaacagaggtaattcgatttttcatagcattctttaaggtttccatcttacatgtcacataaaagctttggaaactctgtaaaatgaacaataaaataaagcatatagctactttca

SEQ ID NO: 435815 - DNA, 634 bp, Homo sapiens
ccctccccaaccctgccctcggccttgtcccgggatcgctccgtcgcacccaccatgatggaagacgacgggcagccccggactctatacgtaggtaacctttccagagatgtgacagaagtccttatacttcagttgttcagtcagattggaccctgtaaaagctgtaaaatgataacagagcatacaagcaatgacccatattgctttgtggaattttatgaacacagagatgcagctgctgcattagctgctatgaatgggagaaaaattttgggaaaggaggtcaaagtaaactgggcaaccacaccaagtagccagaaaaaagatacttccaatcacttccatgtgtttgttggggatttgagtccagaaattacaacagaagatatcaaatcagcatttgccccctttggtaaaatatcgtaagtatcataatcagtactacactcagtcatgataggcagaattgtatatgattaacttgtaattgaattaagattttctttctctagttagtatggttttgttttgtttcttatttttcatttatttattttggtttgttttgagtagtggatgttgttgaaaatgttaatgtcatttcagtgtcttggggtctcgttttcatcta

SEQ ID NO: 435816 - DNA, 1048 bp, Homo sapiens
ccctccccaaccctgccctcggccttgtcccgggatcgctccgtcgcacccaccatgatggaagacgacgggcagccccggactctacacacacaagctaagacatatggttctatcttcagaaaacaatatggtgtttagagcctaggtagcaattatatatttaaagacttggatctttagcttgactatttcataaccagagcagaaagaaagtgaagtgtagaagctataatttggaacgaataaagatgtcatttcaatgaactaccaagagatgatcttactagatacgtaggtaacctttccagagatgtgacagaagtccttatacttcagttgttcagtcagattggaccctgtaaaagctgtaaaatgataacagagcaacccgatagcagaagggtcaactcttctgttggattttctgttttgcagcatacaagcaatgacccatattgctttgtggaattttatgaacacagagatgcagctgctgcattagctgctatgaatgggagaaaaattttgggaaaggaggtcaaagtaaactgggcaaccacaccaagtagccagaaaaaagatacttccagtaagtactcctgctgcattttactgtggaagagttctgaaattatccaggaggcattaccagcttaaataggtttttttttcctcctctagagttgccttaaaaaggttttagtggctgacttcttaagtatttgattaccaaatgctctgatttcagatcacttccatgtgtttgttggggatttgagtccagaaattacaacagaagatatcaaatcagcatttgccccctttggtaaaatatcgtaagtatcataatcagtactacactcagtcatgataggcagaattgtatatgattaacttgtaattgaattaagattttctttctctagttagtatggttttgttttgtttcttatttttcatttatttattttggtttgttttgagtagtggatgttgttgaaaatgttaatgtcatttcagtgtcttggggtctcgttttcatcta

SEQ ID NO: 435817 - DNA, 404 bp, Homo sapiens
gcattagggagagttcaggaatggttgtagttaattagggctaactggaattttattttaaaaatgctcacaatacagtgtgtgtggttccttttagtttttattttgagggtggctcttacttccctcatttagctgtgcttcttttcacagggatgcccgggtagttaaagacatggcaactggaaaatccaaaggctatggttttgtatctttttataacaaactggtacgttcttccatctcaatttatattttttaatactaaatttagtcattagttacttaatgtattgaatctgaaacttgaatatacttgaatgttaactacaaacacaacttttatgtaatgttatgtatgttttaataatagagtataatttcattcctctttcataaactcg

SEQ ID NO: 435818 - DNA, 2229 bp, Homo sapiens
ccctccccaaccctgccctcggccttgtcccgggatcgctccgtcgcacccaccatgatggaagacgacgggcagccccggactctatacgtaggtaacctttccagagatgtgacagaagtccttatacttcagttgttcagtcagattggaccctgtaaaagctgtaaaatgataacagagcatacaagcaatgacccatattgctttgtggaattttatgaacacagagatgcagctgctgcattagctgctatgaatgggagaaaaattttgggaaaggaggtcaaagtaaactgggcaaccacaccaagtagccagaaaaaagatacttccaatcacttccatgtgtttgttggggatttgagtccagaaattacaacagaagatatcaaatcagcatttgccccctttggtaaaatatcggatgcccgggtagttaaagacatggcaactggaaaatccaaaggctatggttttgtatctttttataacaaactggatgcagaaaatgcgattgtgcatatgggcggtcagtggttgggtggtcgtcaaatccgaaccaattgggccactcgtaaaccacctgcacctaaaagtacacaagaaaacaacactaagcagttgagatttgaagatgtagtaaaccagtcaagtccaaaaaattgtactgtgtactgtggaggaattgcgtctgggttaacagatcagcttatgagacagacattctcaccatttggacaaattatggaaataagagttttcccagaaaagggctattcatttgtcagattttcaacccatgaaagtgcagcccatgccattgtttcggtgaacggtactacgattgaaggacatgtggttaaatgctattggggtaaagaatctcctgatatgactaaaaacttccaacaggttgactatagtcaatggggccaatggagccaagtgtatggaaacccacaacagtatggacagtatatggcaaatgggtggcaagtaccgccttatggagtatacgggcaaccatggaatcaacaaggatttggagtagatcaatcaccttctgctgcttggatgggtggatttggtgctcagcctccccaaggacaagctcctccccctgtaatacctcctcctaaccaagccggatatggtatggcaagttaccaaacacagtgagccgggactctaaaaaaaaattgtaattcatgataggcttcgatttcctgtgacactctgaagacatgaaagtagacatcggaaaatgaaaatatttattttaaaaattgaaatgtttggaacctttagcacagatttgctttggtgaaggacacgtgtcttctagttctgcctttttaagtttttgttcatgatggatatgaacatgatttttctttatgtacaaaaactaaaataaagtcaataaagacaattctgactacaaattttgatataataggaaaaatggctaatacattttgattcttagatactattccatttttatcttgctgttcagtattttaactcactgtgtttttaaaagagcaaaaaagggaggatcgtgaaaacctgggaatcacatataagttcatcctgaatcctgatactcccctccccttccctgaggtggaccacatttgaagtcagcagagaaaaagtgtgatattcagaagaaatgcgtgattttggagtcgctttggaggaaatattttctttctctatgcctaaagaaactgaagccagactgaagttttgcaccctaaaaaaggaacagcattgtttgagttacttgagcaaatgttggtggtccacgttaagacatatttttaaaacttccaaaagtgtcgattattaaaattgtagtattttacatttcattttggggggaaatccaagtatggtgtttgtattgaagtcagacagtcatacttgtgcttttacatgaagtttaaatgatacatattgtaaatattcaataactacagtgtttaaaaagcatgcttcaacatagaagtagcagcaatgtaattatttgaagtaacacttaacacactccgctgcattgaatgcagtggattgatcagaatgttaagactgacatttccaaggttggctactatgtaaaattaaaattacacaaattgtgcagaaaaagccttaattttaatttcatacaatctttgatgcattagtatgttctaaaatgtcattgggaattagttt

SEQ ID NO: 435819 - DNA, 2175 bp, Homo sapiens
ctaaaaaaaaaagaaagaaagaaagaaagaaaatacgtaggtaacctttccagagatgtgacagaagtccttatacttcagttgttcagtcagattggaccctgtaaaagctgtaaaatgataacagagcatacaagcaatgacccatattgctttgtggaattttatgaacacagagatgcagctgctgcattagctgctatgaatgggagaaaaattttgggaaaggaggtcaaagtaaactgggcaaccacaccaagtagccagaaaaaagatacttccaatcacttccatgtgtttgttggggatttgagtccagaaattacaacagaagatatcaaatcagcatttgccccctttggtaaaatatcggatgcccgggtagttaaagacatggcaactggaaaatccaaaggctatggttttgtatctttttataacaaactggatgcagaaaatgcgattgtgcatatgggcggtcagtggttgggtggtcgtcaaatccgaaccaattgggccactcgtaaaccacctgcacctaaaagtacacaagaaaacaacactaagcagttgagatttgaagatgtagtaaaccagtcaagtccaaaaaattgtactgtgtactgtggaggaattgcgtctgggttaacagatcagcttatgagacagacattctcaccatttggacaaattatggaaataagagttttcccagaaaagggctattcatttgtcagattttcaacccatgaaagtgcagcccatgccattgtttcggtgaacggtactacgattgaaggacatgtggttaaatgctattggggtaaagaatctcctgatatgactaaaaacttccaacaggttgactatagtcaatggggccaatggagccaagtgtatggaaacccacaacagtatggacagtatatggcaaatgggtggcaagtaccgccttatggagtatacgggcaaccatggaatcaacaaggatttggagtagatcaatcaccttctgctgcttggatgggtggatttggtgctcagcctccccaaggacaagctcctccccctgtaatacctcctcctaaccaagccggatatggtatggcaagttaccaaacacagtgagccgggactctaaaaaaaaattgtaattcatgataggcttcgatttcctgtgacactctgaagacatgaaagtagacatcggaaaatgaaaatatttattttaaaaattgaaatgtttggaacctttagcacagatttgctttggtgaaggacacgtgtcttctagttctgcctttttaagtttttgttcatgatggatatgaacatgatttttctttatgtacaaaaactaaaataaagtcaataaagacaattctgactacaaattttgatataataggaaaaatggctaatacattttgattcttagatactattccatttttatcttgctgttcagtattttaactcactgtgtttttaaaagagcaaaaaagggaggatcgtgaaaacctgggaatcacatataagttcatcctgaatcctgatactcccctccccttccctgaggtggaccacatttgaagtcagcagagaaaaagtgtgatattcagaagaaatgcgtgattttggagtcgctttggaggaaatattttctttctctatgcctaaagaaactgaagccagactgaagttttgcaccctaaaaaaggaacagcattgtttgagttacttgagcaaatgttggtggtccacgttaagacatatttttaaaacttccaaaagtgtcgattattaaaattgtagtattttacatttcattttggggggaaatccaagtatggtgtttgtattgaagtcagacagtcatacttgtgcttttacatgaagtttaaatgatacatattgtaaatattcaataactacagtgtttaaaaagcatgcttcaacatagaagtagcagcaatgtaattatttgaagtaacacttaacacactccgctgcattgaatgcagtggattgatcagaatgttaagactgacatttccaaggttggctactatgtaaaattaaaattacacaaattgtgcagaaaaagccttaattttaatttcatacaatctttgatgcattagtatgttctaaaatgtcattgggaattagttt

SEQ ID NO: 435820 - DNA, 2484 bp, Homo sapiens
ccctccccaaccctgccctcggccttgtcccgggatcgctccgtcgcacccaccatgatggaagacgacgggcagccccggactctacacacacaagctaagacatatggttctatcttcagaaaacaatatggtgtttagagcctaggtagcaattatatatttaaagacttggatctttagcttgactatttcataaccagagcagaaagaaagtgaagtgtagaagctataatttggaacgaataaagatgtcatttcaatgaactaccaagagatgatcttactagatacgtaggtaacctttccagagatgtgacagaagtccttatacttcagttgttcagtcagattggaccctgtaaaagctgtaaaatgataacagagcaacccgatagcagaagggtcaactcttctgttggattttctgttttgcagcatacaagcaatgacccatattgctttgtggaattttatgaacacagagatgcagctgctgcattagctgctatgaatgggagaaaaattttgggaaaggaggtcaaagtaaactgggcaaccacaccaagtagccagaaaaaagatacttccaatcacttccatgtgtttgttggggatttgagtccagaaattacaacagaagatatcaaatcagcatttgccccctttggtaaaatatcggatgcccgggtagttaaagacatggcaactggaaaatccaaaggctatggttttgtatctttttataacaaactggatgcagaaaatgcgattgtgcatatgggcggtcagtggttgggtggtcgtcaaatccgaaccaattgggccactcgtaaaccacctgcacctaaaagtacacaagaaaacaacactaagcagttgagatttgaagatgtagtaaaccagtcaagtccaaaaaattgtactgtgtactgtggaggaattgcgtctgggttaacagatcagcttatgagacagacattctcaccatttggacaaattatggaaataagagttttcccagaaaagggctattcatttgtcagattttcaacccatgaaagtgcagcccatgccattgtttcggtgaacggtactacgattgaaggacatgtggttaaatgctattggggtaaagaatctcctgatatgactaaaaacttccaacaggttgactatagtcaatggggccaatggagccaagtgtatggaaacccacaacagtatggacagtatatggcaaatgggtggcaagtaccgccttatggagtatacgggcaaccatggaatcaacaaggatttggagtagatcaatcaccttctgctgcttggatgggtggatttggtgctcagcctccccaaggacaagctcctccccctgtaatacctcctcctaaccaagccggatatggtatggcaagttaccaaacacagtgagccgggactctaaaaaaaaattgtaattcatgataggcttcgatttcctgtgacactctgaagacatgaaagtagacatcggaaaatgaaaatatttattttaaaaattgaaatgtttggaacctttagcacagatttgctttggtgaaggacacgtgtcttctagttctgcctttttaagtttttgttcatgatggatatgaacatgatttttctttatgtacaaaaactaaaataaagtcaataaagacaattctgactacaaattttgatataataggaaaaatggctaatacattttgattcttagatactattccatttttatcttgctgttcagtattttaactcactgtgtttttaaaagagcaaaaaagggaggatcgtgaaaacctgggaatcacatataagttcatcctgaatcctgatactcccctccccttccctgaggtggaccacatttgaagtcagcagagaaaaagtgtgatattcagaagaaatgcgtgattttggagtcgctttggaggaaatattttctttctctatgcctaaagaaactgaagccagactgaagttttgcaccctaaaaaaggaacagcattgtttgagttacttgagcaaatgttggtggtccacgttaagacatatttttaaaacttccaaaagtgtcgattattaaaattgtagtattttacatttcattttggggggaaatccaagtatggtgtttgtattgaagtcagacagtcatacttgtgcttttacatgaagtttaaatgatacatattgtaaatattcaataactacagtgtttaaaaagcatgcttcaacatagaagtagcagcaatgtaattatttgaagtaacacttaacacactccgctgcattgaatgcagtggattgatcagaatgttaagactgacatttccaaggttggctactatgtaaaattaaaattacacaaattgtgcagaaaaagccttaattttaatttcatacaatctttgatgcattagtatgttctaaaatgtcattgggaattagttt

SEQ ID NO: 435821 - DNA, 3065 bp, Homo sapiens
ccctccccaaccctgccctcggccttgtcccgggatcgctccgtcgcacccaccatgatggaagacgacgggcagccccggactctatacgtaggtaacctttccagagatgtgacagaagtccttatacttcagttgttcagtcagattggaccctgtaaaagctgtaaaatgataacagagcatacaagcaatgacccatattgctttgtggaattttatgaacacagagatgcagctgctgcattagctgctatgaatgggagaaaaattttgggaaaggaggtcaaagtaaactgggcaaccacaccaagtagccagaaaaaagatacttccaatcacttccatgtgtttgttggggatttgagtccagaaattacaacagaagatatcaaatcagcatttgccccctttggtaaaatatcaattgctcataagaatggacaggatcttgaaggctaactgcaaggaactgtgcacactggaactcagttgtagattttttttctcatttctatttattcttattatacattatttatatatacatattttagtatttacattttaacattctatattcagtggagttctatatttccaatcatttaacttactcactaaaatttctgtgtaaatttgttgttttcgtactggtgtgcttagcattgttgttagttttttattctcctttcttaaatttctgaaaatgtcaatttttcaaaatttacagctgcccaaactccaaaatgatggtagagaattgaccaagaaaaataaagaaatctgttaacaggccatgtatgcctttttaattcctattttttcctctttttcaattttttaatatttcatatattttgtatcactaggcagaagacatttaactatttagagattgcatggtaaagtagttagtattgttacagtaatttatagaatcagtaaaccttagaggacactagtaaatagaatattagaaagggaaactgttgttcctattaatcttcaaatttgagcatttagtttagaaagcacaggctatttgattaggttgcatgtttattacatgtttttgtcctactgcttttttctaacaggtaaagaagcattagggagagttcaggaatggttgtagttaattagggctaactggaattttattttaaaaatgctcacaatacagtgtgtgtggttccttttagtttttattttgagggtggctcttacttccctcatttagctgtgcttcttttcacagggatgcccgggtagttaaagacatggcaactggaaaatccaaaggctatggttttgtatctttttataacaaactggatgcagaaaatgcgattgtgcatatgggcggtcagtggttgggtggtcgtcaaatccgaaccaattgggccactcgtaaaccacctgcacctaaaagtacacaagaaaacaacactaagcagttgagatttgaagatgtagtaaaccagtcaagtccaaaaaattgtactgtgtactgtggaggaattgcgtctgggttaacagatcagcttatgagacagacattctcaccatttggacaaattatggaaataagagttttcccagaaaagggctattcatttgtcagattttcaacccatgaaagtgcagcccatgccattgtttcggtgaacggtactacgattgaaggacatgtggttaaatgctattggggtaaagaatctcctgatatgactaaaaacttccaacaggttgactatagtcaatggggccaatggagccaagtgtatggaaacccacaacagtatggacagtatatggcaaatgggtggcaagtaccgccttatggagtatacgggcaaccatggaatcaacaaggatttggagtagatcaatcaccttctgctgcttggatgggtggatttggtgctcagcctccccaaggacaagctcctccccctgtaatacctcctcctaaccaagccggatatggtatggcaagttaccaaacacagtgagccgggactctaaaaaaaaattgtaattcatgataggcttcgatttcctgtgacactctgaagacatgaaagtagacatcggaaaatgaaaatatttattttaaaaattgaaatgtttggaacctttagcacagatttgctttggtgaaggacacgtgtcttctagttctgcctttttaagtttttgttcatgatggatatgaacatgatttttctttatgtacaaaaactaaaataaagtcaataaagacaattctgactacaaattttgatataataggaaaaatggctaatacattttgattcttagatactattccatttttatcttgctgttcagtattttaactcactgtgtttttaaaagagcaaaaaagggaggatcgtgaaaacctgggaatcacatataagttcatcctgaatcctgatactcccctccccttccctgaggtggaccacatttgaagtcagcagagaaaaagtgtgatattcagaagaaatgcgtgattttggagtcgctttggaggaaatattttctttctctatgcctaaagaaactgaagccagactgaagttttgcaccctaaaaaaggaacagcattgtttgagttacttgagcaaatgttggtggtccacgttaagacatatttttaaaacttccaaaagtgtcgattattaaaattgtagtattttacatttcattttggggggaaatccaagtatggtgtttgtattgaagtcagacagtcatacttgtgcttttacatgaagtttaaatgatacatattgtaaatattcaataactacagtgtttaaaaagcatgcttcaacatagaagtagcagcaatgtaattatttgaagtaacacttaacacactccgctgcattgaatgcagtggattgatcagaatgttaagactgacatttccaaggttggctactatgtaaaattaaaattacacaaattgtgcagaaaaagccttaattttaatttcatacaatctttgatgcattagtatgttctaaaatgtcattgggaattagttt

SEQ ID NO: 435822 - DNA, 2297 bp, Homo sapiens
ccctccccaaccctgccctcggccttgtcccgggatcgctccgtcgcacccaccatgatggaagacgacgggcagccccggactctatacgtaggtaacctttccagagatgtgacagaagtccttatacttcagttgttcagtcagattggaccctgtaaaagctgtaaaatgataacagagcatacaagcaatgacccatattgctttgtggaattttatgaacacagagatgcagctgctgcattagctgctatgaatgggagaaaaattttgggaaaggaggtcaaagtaaactgggcaaccacaccaagtagccagaaaaaagatacttccaatcacttccatgtgtttgttggggatttgagtccagaaattacaacagaagatatcaaatcagcatttgccccctttggtaaaatatcctgcccaaactccaaaatgatggtagagaattgaccaagaaaaataaagaaatctgttaacaggccatggatgcccgggtagttaaagacatggcaactggaaaatccaaaggctatggttttgtatctttttataacaaactggatgcagaaaatgcgattgtgcatatgggcggtcagtggttgggtggtcgtcaaatccgaaccaattgggccactcgtaaaccacctgcacctaaaagtacacaagaaaacaacactaagcagttgagatttgaagatgtagtaaaccagtcaagtccaaaaaattgtactgtgtactgtggaggaattgcgtctgggttaacagatcagcttatgagacagacattctcaccatttggacaaattatggaaataagagttttcccagaaaagggctattcatttgtcagattttcaacccatgaaagtgcagcccatgccattgtttcggtgaacggtactacgattgaaggacatgtggttaaatgctattggggtaaagaatctcctgatatgactaaaaacttccaacaggttgactatagtcaatggggccaatggagccaagtgtatggaaacccacaacagtatggacagtatatggcaaatgggtggcaagtaccgccttatggagtatacgggcaaccatggaatcaacaaggatttggagtagatcaatcaccttctgctgcttggatgggtggatttggtgctcagcctccccaaggacaagctcctccccctgtaatacctcctcctaaccaagccggatatggtatggcaagttaccaaacacagtgagccgggactctaaaaaaaaattgtaattcatgataggcttcgatttcctgtgacactctgaagacatgaaagtagacatcggaaaatgaaaatatttattttaaaaattgaaatgtttggaacctttagcacagatttgctttggtgaaggacacgtgtcttctagttctgcctttttaagtttttgttcatgatggatatgaacatgatttttctttatgtacaaaaactaaaataaagtcaataaagacaattctgactacaaattttgatataataggaaaaatggctaatacattttgattcttagatactattccatttttatcttgctgttcagtattttaactcactgtgtttttaaaagagcaaaaaagggaggatcgtgaaaacctgggaatcacatataagttcatcctgaatcctgatactcccctccccttccctgaggtggaccacatttgaagtcagcagagaaaaagtgtgatattcagaagaaatgcgtgattttggagtcgctttggaggaaatattttctttctctatgcctaaagaaactgaagccagactgaagttttgcaccctaaaaaaggaacagcattgtttgagttacttgagcaaatgttggtggtccacgttaagacatatttttaaaacttccaaaagtgtcgattattaaaattgtagtattttacatttcattttggggggaaatccaagtatggtgtttgtattgaagtcagacagtcatacttgtgcttttacatgaagtttaaatgatacatattgtaaatattcaataactacagtgtttaaaaagcatgcttcaacatagaagtagcagcaatgtaattatttgaagtaacacttaacacactccgctgcattgaatgcagtggattgatcagaatgttaagactgacatttccaaggttggctactatgtaaaattaaaattacacaaattgtgcagaaaaagccttaattttaatttcatacaatctttgatgcattagtatgttctaaaatgtcattgggaattagttt

SEQ ID NO: 435823 - DNA, 1795 bp, Homo sapiens
gtgaggtgactctacaggagctgtagctgtctcaggctatggtttcgtatctttatataacaaactggatgcagaaaatgcgattgtgcatatgggcggtcagtggttgggtggtcgtcaaatccgaaccaattgggccactcgtaaaccacctgcacctaaaagtacacaagaaaacaacactaagcagttgagatttgaagatgtagtaaaccagtcaagtccaaaaaattgtactgtgtactgtggaggaattgcgtctgggttaacagatcagcttatgagacagacattctcaccatttggacaaattatggaaataagagttttcccagaaaagggctattcatttgtcagattttcaacccatgaaagtgcagcccatgccattgtttcggtgaacggtactacgattgaaggacatgtggttaaatgctattggggtaaagaatctcctgatatgactaaaaacttccaacaggttgactatagtcaatggggccaatggagccaagtgtatggaaacccacaacagtatggacagtatatggcaaatgggtggcaagtaccgccttatggagtatacgggcaaccatggaatcaacaaggatttggagtagatcaatcaccttctgctgcttggatgggtggatttggtgctcagcctccccaaggacaagctcctccccctgtaatacctcctcctaaccaagccggatatggtatggcaagttaccaaacacagtgagccgggactctaaaaaaaaattgtaattcatgataggcttcgatttcctgtgacactctgaagacatgaaagtagacatcggaaaatgaaaatatttattttaaaaattgaaatgtttggaacctttagcacagatttgctttggtgaaggacacgtgtcttctagttctgcctttttaagtttttgttcatgatggatatgaacatgatttttctttatgtacaaaaactaaaataaagtcaataaagacaattctgactacaaattttgatataataggaaaaatggctaatacattttgattcttagatactattccatttttatcttgctgttcagtattttaactcactgtgtttttaaaagagcaaaaaagggaggatcgtgaaaacctgggaatcacatataagttcatcctgaatcctgatactcccctccccttccctgaggtggaccacatttgaagtcagcagagaaaaagtgtgatattcagaagaaatgcgtgattttggagtcgctttggaggaaatattttctttctctatgcctaaagaaactgaagccagactgaagttttgcaccctaaaaaaggaacagcattgtttgagttacttgagcaaatgttggtggtccacgttaagacatatttttaaaacttccaaaagtgtcgattattaaaattgtagtattttacatttcattttggggggaaatccaagtatggtgtttgtattgaagtcagacagtcatacttgtgcttttacatgaagtttaaatgatacatattgtaaatattcaataactacagtgtttaaaaagcatgcttcaacatagaagtagcagcaatgtaattatttgaagtaacacttaacacactccgctgcattgaatgcagtggattgatcagaatgttaagactgacatttccaaggttggctactatgtaaaattaaaattacacaaattgtgcagaaaaagccttaattttaatttcatacaatctttgatgcattagtatgttctaaaatgtcattgggaattagttt

SEQ ID NO: 435824 - DNA, 1750 bp, Homo sapiens
gtgaggtgactctacaggagctgtagctgtctcaggctatggtttcgtatctttatataacaaactggatgcagaaaatgcgattgtgcatatgggcggtcagtggttgggtggtcgtcaaatccgaaccaattgggccactcgtaaaccacctgcacctaaaagtacacaagaaaacaacactaagcagttgagatttgaagatgtagtaaaccagtcaagtccaaaaaattgtactgtgtactgtggaggaattgcgtctgggttaacagatcagcttatgagacagacattctcaccatttggacaaattatggaaataagagttttcccagaaaagggctattcatttgtcagattttcaacccatgaaagtgcagcccatgccattgtttcggtgaacggtactacgattgaaggacatgtggttaaatgctattggggtaaagaatctcctgatatgactaaaaacttccaacagccacaacagtatggacagtatatggcaaatgggtggcaagtaccgccttatggagtatacgggcaaccatggaatcaacaaggatttggagtagatcaatcaccttctgctgcttggatgggtggatttggtgctcagcctccccaaggacaagctcctccccctgtaatacctcctcctaaccaagccggatatggtatggcaagttaccaaacacagtgagccgggactctaaaaaaaaattgtaattcatgataggcttcgatttcctgtgacactctgaagacatgaaagtagacatcggaaaatgaaaatatttattttaaaaattgaaatgtttggaacctttagcacagatttgctttggtgaaggacacgtgtcttctagttctgcctttttaagtttttgttcatgatggatatgaacatgatttttctttatgtacaaaaactaaaataaagtcaataaagacaattctgactacaaattttgatataataggaaaaatggctaatacattttgattcttagatactattccatttttatcttgctgttcagtattttaactcactgtgtttttaaaagagcaaaaaagggaggatcgtgaaaacctgggaatcacatataagttcatcctgaatcctgatactcccctccccttccctgaggtggaccacatttgaagtcagcagagaaaaagtgtgatattcagaagaaatgcgtgattttggagtcgctttggaggaaatattttctttctctatgcctaaagaaactgaagccagactgaagttttgcaccctaaaaaaggaacagcattgtttgagttacttgagcaaatgttggtggtccacgttaagacatatttttaaaacttccaaaagtgtcgattattaaaattgtagtattttacatttcattttggggggaaatccaagtatggtgtttgtattgaagtcagacagtcatacttgtgcttttacatgaagtttaaatgatacatattgtaaatattcaataactacagtgtttaaaaagcatgcttcaacatagaagtagcagcaatgtaattatttgaagtaacacttaacacactccgctgcattgaatgcagtggattgatcagaatgttaagactgacatttccaaggttggctactatgtaaaattaaaattacacaaattgtgcagaaaaagccttaattttaatttcatacaatctttgatgcattagtatgttctaaaatgtcattgggaattagttt

SEQ ID NO: 435825 - DNA, 3417 bp, Homo sapiens
ccctccccaaccctgccctcggccttgtcccgggatcgctccgtcgcacccaccatgatggaagacgacgggcagccccggactctatacgtaggtaacctttccagagatgtgacagaagtccttatacttcagttgttcagtcagattggaccctgtaaaagctgtaaaatgataacagagcatacaagcaatgacccatattgctttgtggaattttatgaacacagagatgcagctgctgcattagctgctatgaatgggagaaaaattttgggaaaggaggtcaaagtaaactgggcaaccacaccaagtagccagaaaaaagatacttccaatcacttccatgtgtttgttggggatttgagtccagaaattacaacagaagatatcaaatcagcatttgccccctttggtaaaatatcaattgctcataagaatggacaggatcttgaaggctaactgcaaggaactgtgcacactggaactcagttgtagattttttttctcatttctatttattcttattatacattatttatatatacatattttagtatttacattttaacattctatattcagtggagttctatatttccaatcatttaacttactcactaaaatttctgtgtaaatttgttgttttcgtactggtgtgcttagcattgttgttagttttttattctcctttcttaaatttctgaaaatgtcaatttttcaaaatttacagctgcccaaactccaaaatgatggtagagaattgaccaagaaaaataaagaaatctgttaacaggccatgtatgcctttttaattcctattttttcctctttttcaattttttaatatttcatatattttgtatcactaggcagaagacatttaactatttagagattgcatggtaaagtagttagtattgttacagtaatttatagaatcagtaaaccttagaggacactagtaaatagaatattagaaagggaaactgttgttcctattaatcttcaaatttgagcatttagtttagaaagcacaggctatttgattaggttgcatgtttattacatgtttttgtcctactgcttttttctaacaggtaaagaagcattagggagagttcaggaatggttgtagttaattagggctaactggaattttattttaaaaatgctcacaatacagtgtgtgtggttccttttagtttttattttgagggtggctcttacttccctcatttagctgtgcttcttttcacagggatgcccgggtagttaaagacatggcaactggaaaatccaaaggctatggttttgtatctttttataacaaactggatgcagaaaatgcgattgtgcatatgggcggtcagtggttgggtggtcgtcaaatccgaaccaattgggccactcgtaaaccacctgcacctaaaagtacacaagaaaacaacactaagcagttgagatttgaagatgtagtaaaccagtcaagtccaaaaaattgtactgtgtactgtggaggaattgcgtctgggttaacagatcagcttatgagacagacattctcaccatttggacaaattatggaaataagagttttcccagaaaagggctattcatttgtcagattttcaacccatgaaagtgcagcccatgccattgtttcggtgaacggtactacgattgaaggacatgtggttaaatgctattggggtaaagaatctcctgatatgactaaaaacttccaacagaggtaattcgatttttcatagcattctttaaggtttccatcttacatgtcacataaaagctttggaaactctgtaaaatgaacaataaaataaagcatatagctactttcagttgattgtatttcaaaattgattatttgcggtattaactgaatcttaatactttcttttcacaggtgtcaccaccccaataaacttagacaatgataaataacagagtcctattcacataagggtgcttacttagtttttctcttccttgtctcccactctttcttcatatacggtgtttcttatgtgttccctaaaacaatactttgctttttcctaggttgactatagtcaatggggccaatggagccaagtgtatggaaacccacaacagtatggacagtatatggcaaatgggtggcaagtaccgccttatggagtatacgggcaaccatggaatcaacaaggatttggagtagaattttttctttttcttccaagtcaatcaccttctgctgcttggatgggtggatttggtgctcagcctccccaaggacaagctcctccccctgtaatacctcctcctaaccaagccggatatggtatggcaagttaccaaacacagtgagccgggactctaaaaaaaaattgtaattcatgataggcttcgatttcctgtgacactctgaagacatgaaagtagacatcggaaaatgaaaatatttattttaaaaattgaaatgtttggaacctttagcacagatttgctttggtgaaggacacgtgtcttctagttctgcctttttaagtttttgttcatgatggatatgaacatgatttttctttatgtacaaaaactaaaataaagtcaataaagacaattctgactacaaattttgatataataggaaaaatggctaatacattttgattcttagatactattccatttttatcttgctgttcagtattttaactcactgtgtttttaaaagagcaaaaaagggaggatcgtgaaaacctgggaatcacatataagttcatcctgaatcctgatactcccctccccttccctgaggtggaccacatttgaagtcagcagagaaaaagtgtgatattcagaagaaatgcgtgattttggagtcgctttggaggaaatattttctttctctatgcctaaagaaactgaagccagactgaagttttgcaccctaaaaaaggaacagcattgtttgagttacttgagcaaatgttggtggtccacgttaagacatatttttaaaacttccaaaagtgtcgattattaaaattgtagtattttacatttcattttggggggaaatccaagtatggtgtttgtattgaagtcagacagtcatacttgtgcttttacatgaagtttaaatgatacatattgtaaatattcaataactacagtgtttaaaaagcatgcttcaacatagaagtagcagcaatgtaattatttgaagtaacacttaacacactccgctgcattgaatgcagtggattgatcagaatgttaagactgacatttccaaggttggctactatgtaaaattaaaattacacaaattgtgcagaaaaagccttaattttaatttcatacaatctttgatgcattagtatgttctaaaatgtcattgggaattagttt

SEQ ID NO: 435826 - DNA, 2442 bp, Homo sapiens
ccctccccaaccctgccctcggccttgtcccgggatcgctccgtcgcacccaccatgatggaagacgacgggcagccccggactctatacgtaggtaacctttccagagatgtgacagaagtccttatacttcagttgttcagtcagattggaccctgtaaaagctgtaaaatgataacagagcatacaagcaatgacccatattgctttgtggaattttatgaacacagagatgcagctgctgcattagctgctatgaatgggagaaaaattttgggaaaggaggtcaaagtaaactgggcaaccacaccaagtagccagaaaaaagatacttccaatcacttccatgtgtttgttggggatttgagtccagaaattacaacagaagatatcaaatcagcatttgccccctttggtaaaatatcaattgctcataagaatggacaggatcttgaaggctaactgcaaggaactgtgcacactggaactcagttgtagattttttttctcatttctatttattcttattatacattatttatatatacatattttagtatttacattttaacattctatattcagtggagttctatatttccaatcatttaacttactcactaaaatttctgtgtaaatttgttgttttcgtactggtgtgcttagcattgttgttagttttttattctcctttcttaaatttctgaaaatgtcaatttttcaaaatttacagctgcccaaactccaaaatgatggtagagaattgaccaagaaaaataaagaaatctgttaacaggccatgtatgcctttttaattcctattttttcctctttttcaattttttaatatttcatatattttgtatcactaggcagaagacatttaactatttagagattgcatggtaaagtagttagtattgttacagtaatttatagaatcagtaaaccttagaggacactagtaaatagaatattagaaagggaaactgttgttcctattaatcttcaaatttgagcatttagtttagaaagcacaggctatttgattaggttgcatgtttattacatgtttttgtcctactgcttttttctaacaggtaaagaagcattagggagagttcaggaatggttgtagttaattagggctaactggaattttattttaaaaatgctcacaatacagtgtgtgtggttccttttagtttttattttgagggtggctcttacttccctcatttagctgtgcttcttttcacagggatgcccgggtagttaaagacatggcaactggaaaatccaaaggctatggttttgtatctttttataacaaactggatgcagaaaatgcgattgtgcatatgggcggtcagtggttgggtggtcgtcaaatccgaaccaattgggccactcgtaaaccacctgcacctaaaagtacacaagaaaacaacactaagcagttgagatttgaagatgtagtaaaccagtcaagtccaaaaaattgtactgtgtactgtggaggaattgcgtctgggttaacagatcagcttatgagacagacattctcaccatttggacaaattatggaaataagagttttcccagaaaagggctattcatttgtcagattttcaacccatgaaagtgcagcccatgccattgtttcggtgaacggtactacgattgaaggacatgtggttaaatgctattggggtaaagaatctcctgatatgactaaaaacttccaacagaggtaattcgatttttcatagcattctttaaggtttccatcttacatgtcacataaaagctttggaaactctgtaaaatgaacaataaaataaagcatatagctactttcagttgattgtatttcaaaattgattatttgcggtattaactgaatcttaatactttcttttcacaggtgtcaccaccccaataaacttagacaatgataaataacagagtcctattcacataagggtgcttacttagtttttctcttccttgtctcccactctttcttcatatacggtgtttcttatgtgttccctaaaacaatactttgctttttcctaggttgactatagtcaatggggccaatggagccaagtgtatggaaacccacaacagtatggacagtatatggcaaatgggtggcaagtaccgccttatggagtatacgggcaaccatggaatcaacaaggatttggagtagagtaagttgtttgggtttttccagtatagaaacgtatggttctgacaaaataaataaaagtgtgttttcctagggagaatctattttaattatatacattgagctatttggcattatgagcattatagaaactaatctaacaaaatatgatttatgaggctaagaaattacttctcattacctaggtggaaaggggggattggggtaacatttagtgtgtc

SEQ ID NO: 435827 - DNA, 889 bp, Homo sapiens
ccctccccaaccctgccctcggccttgtcccgggatcgctccgtcgcacccaccatgatggaagacgacgggcagccccggactctacacacacaagctaagacatatggttctatcttcagaaaacaatatggtgtttagagcctaggtagcaattatatatttaaagacttggatctttagcttgactatttcataaccagagcagaaagaaagtgaagtgtagaagctataatttggaacgaataaagatgtcatttcaatgaactaccaagagatgatcttactagatacgtaggtaacctttccagagatgtgacagaagtccttatacttcagttgttcagtcagattggaccctgtaaaagctgtaaaatgataacagagcaacccgatagcagaagggtcaactcttctgttggattttctgttttgcagcatacaagcaatgacccatattgctttgtggaattttatgaacacagagatgcagctgctgcattagctgctatgaatgggagaaaaattttgggaaaggaggtcaaagtaaactgggcaaccacaccaagtagccagaaaaaagatacttccaatcacttccatgtgtttgttggggatttgagtccagaaattacaacagaagatatcaaatcagcatttgccccctttggtaaaatatcgtaagtatcataatcagtactacactcagtcatgataggcagaattgtatatgattaacttgtaattgaattaagattttctttctctagttagtatggttttgttttgtttcttatttttcatttatttattttggtttgttttgagtagtggatgttgttgaaaatgttaatgtcatttcagtgtcttggggtctcgttttcatcta

SEQ ID NO: 435828 - DNA, 562 bp, Homo sapiens
ctgcaggattcggcacgagctcgtgccgaattcggcacgtgtcgattccctgttaacatggatatcagttctgcctcacatttcccacttgaggttgaggcgtactggagacaacacctcagaccatctgaaccccatcagtggacgaaaatggggctgttaatatactctaaaagccatactaaaaatgctctgagggaactggctaagaatagtgggcctggtgattgtctatcacgcaaggctttgttttgtactgttcagaaatctgtcacctttctgcctgcccttgtttcctgaatgaaatgcttctggggttatttatgaaaggagtgatcctggggcaggcaggaggcagtgggcttcatggctccttgaagttattactgatcttgaccttctctttggctacctttagacaaagaatacgccaatcaatacttggggctctaagttttacaattgatatttatttgtatcatctctttgtctaggaatgtaaaagtgattctaaactaagatgtgtaataaaaatcaatcagatttattgtacctacaaaaa

SEQ ID NO: 435829 - DNA, 290 bp, Homo sapiens
  misc_feature (36)..(36): n is a, c, g, or t
cgagctcggtacccttcatatccgcccttcatgtcnaggccttcatgccggcagcagctagcaaagccagaaagcaagtctaacaggatctaagatgaccatcaggagaaggagtttgagactgtgtatgcaacccccaatagacccccttttactctgatctggagaatgtatctggcttcatattttcaagtcacatgtctctcagacccctggattcagaacccaaggccacaaatcataggcatgaagcctcgacatgaagggatcctctagagtcgatcacaggc

SEQ ID NO: 435830 - DNA, 266 bp, Homo sapiens
ttgctttttaaagaaaaatgttagttcagttccaagtcatgtgggtaccaggcaggaggcagtgggcttcatggctccttgaagttattactgatcttgaccttctctttggctacctttagacaaagaatacgccaatcaatacttggggctctaagttttacaattgatatttatttgtatcatctctttgtctaggaatgtaaaagtgattctaaactaagatgtgtaataaaaatcaatcagatttattgtacctacaaaaa

SEQ ID NO: 435831 - DNA, 6103 bp, Homo sapiens
atccggggcagcggggaatggctgagccaggggttcgccgcccccgccgccgccgccgccgccgccgccgccgccgccgcccgctttcggctcgggcctcaggaccgtagcatcctgagacattttgaattgacacttctcaagatttgactggatcagagttcatcatgtcaaagttgaaaagctcagagtcagtcagggtggtggttcgctgtcggcccatgaatggcaaggaaaaggctgcttcgtatgacaaagtggtggatgtggatgttaagctggggcaggtgtctgtgaagaaccccaaagggacggcccatgaaatgcccaagaccttcacctttgatgccgtctatgactggaatgccaagcagtttgaactgtacgatgagacgttccgaccacttgttgactctgtcctgcaaggtttcaatggaaccatttttgcctatggacaaactgggacaggaaaaacctacaccatggaaggaatccgtggtgaccctgaaaaaagaggagtcattcctaactcatttgaccatatcttcacccacatctctcgatcccagaatcaacaatacctggtcagggcttcttacttagagatctaccaggaggagatccgagatttgctctcaaaggatcagaccaaaaggcttgagctcaaagagaggcctgacacaggagtgtatgtgaaagacctgtcttcctttgtcaccaagagtgtgaaggagatagagcatgtgatgaatgtggggaaccagaaccgttctgtcggtgctaccaacatgaacgagcacagctcgcgttctcatgcaattttcgttatcactattgagtgcagcgaggtgggcctcgatggtgaaaaccacatccgtgtaggaaaattgaaccttgtagatcttgctggcagcgaacggcaagccaagaccggcgcacaaggggagagattaaaagaagctaccaagatcaacctctccctttccgctttgggtaatgtcatctctgctctagtggacggcaaaagcactcacattccatatcgggactcaaagcttaccaggctcctccaagattcccttggtggcaatgccaagactgtgatggtggccaacgtggggcctgcctcttacaacgtagaagagactctgaccactctgcgatatgccaaccgtgccaaaaacattaagaacaaaccaagggtcaatgaggaccccaaggatgccctccttcgagaattccaggaagagattgctcggctcaaggcccagctggaaaaacggtccattggtaggaggaagaggcgagagaagcggagggaaggtggtggcagtggtgggggtggggaagaggaggaggaggagggagaagagggtgaggaggaaggggatgataaggatgattactggcgggaacagcaagaaaaactggagattgagaagcgggccattgtagaggatcacagcttggttgcagaggagaagatgaggctgctgaaggagaaagagaaaaagatggaggacctgcggcgggagaaggatgctgccgagatgctgggcgccaagatcaaggccatggagagtaagttgcttgttggaggaaaaaatatagtagatcatacgaatgaacagcagaaaatcctggagcagaaacgacaggaaattgcagagcagaaacgtcgagaaagagaaatccagcaacagatggaaagtcgagatgaggagaccttggaacttaaagagacatacagctcattgcagcaagaggtggacatcaagaccaaaaaactcaaaaagctcttctccaagcttcaggcagtgaaggctgagatccatgacctccaagaagaacacatcaaggagcgccaagagctagagcagactcagaatgagctcaccagggagctgaaactcaagcatcttattatagaaaactttatccctctggaagaaaaaagtaaaattatgaatagagccttctttgatgaagaggaagatcattggaaactacatcctataaccagactggagaaccagcagatgatgaagcggccagtctcagccgtgggatataagagaccattgagccagcacgcaagaatgtccatgatgattcgtccagaggcccgatatagggcagaaaacattgtgctgttagagctggacatgcccagccggaccaccagagactatgagggtccagccattgcccccaaggtccaggctgcattggatgcggctctgcaggatgaagatgagatacaggtggatgcatcatcatttgaaagcactgcaaataagaaatccaaggccaggcctaaaagtggaaggaagtcgggatcctcctcctcttcctcaggaacccctgcatctcagctttatccacagtctcgggggctggttccaaagtaaagccagcttctcctctcccagggcggaaacagcatttgccttctgagagaagagactagcaaaaagctgcagagaggattcggcccaaactcagaactgttcccctgaggagaagcggtggcctctttgcagatcaaccaacttaatctggttgaacgtgctgttcctaatctggcactcagcccctctgggaaacatcttttaattagcatctcagaaatgcatgggtaaggtaaagtgcgatagttcaagtggaaagcaagagaatgaccagtgaccttgcttccttcccccttgccttcttctcccccttcccctgtgctccctttctctcctctctccttttctagcctgttctttacatggggctcccttcttgttgaacaatagggcagaatcaggagtcaccttagcaggaccacatctttggagcctcgggataaaatgacagtgaggttgaaaagtgaaaaccctagaacttgaataggtgcctgttcttgtagggagaaatgagaaatcgcatttggatccaggccccaggtgggcaccatcagcagtcttgcttccatgcacctcagtaagaagtggatctgcctttgggacctgctcagtgaggaaatctcttccaatttctgcttctgaatgattcaatgttgggagcaatagaaataacattccctttgccttctctgagtgtttagggaaatagcttctttaaaacctcaaaaccatgaccatcctgtcaaagacctaagtctgtaagctggtgccatgtccatacaccatgtcactttactcttcatttgtcaccatcttttcccatgcacgcatactctgaacatccttgtgtgggcccatcctctgcatccagagcatgctctgcagtgggcctgttttgtggaagaaaggaggctgtctctgccttctctgatgggactggagttgagggaaggagctgtattgtggcacttctgaattccccgttttgttccatattggtatagagagcagaagagtagctaggcagatgcagagatggagacatgagactcagtgcagtgggcagggaagacataacagatggaagcaaaggaatcctgcctgccttcagcagagaattcaccgaatcctagaactgtggctccctccaggcagagcctaagatgctggtgaagaatagctgtgtgattgaataggctcaaaggagagttcagaattcccatttacatattactagtttggtttgtaagttttagttccttgtattattgagattcagagcttcattttatgttggtcattaggtgaatattactcattttccctcaagagaagctcataagtgtgtgtgggtgtgagagcacgatggtgcctgtgttctgtgaatgtgtccatatgtgtctgtaagagagacagagaccaagaacttgcccaattttagaaatacactaatgtgcagttgttgccttttgtctgtattgaaggcccattgaatgactaatccaggctggaagcattcccatgtgggtgtctgagtccatgagccaagcctgaggggacagtgagtctccaggtctgccacactggtgcaccttgctggcacggtgcctcaggaaggtggcgactcaggtgggccttgagttatattttaactcagctgctcagttcccagggcacatttctggatcagaacccatgggaaacaggaggtactaagtgcaatgtcttagcattctgcaaaatggagatctgttgtccagcggcttatctcctttttagtaacccttctttctgaacccagggcccttttcagccttccctcatattttcttgagatcaaactttacttctttcttatttactaagaatttgcctgtttgaataagaacaaaacgctaaggtgggtagcctaagctgattttctgctggttacacgtgtctctcacaccacatttcctcaaagctaatctgaattctgtaggctaaaaatattcatgtagcaaatctgagaattgaaaactgcagataaccggccgggtatggtgactcatgcctgtaatcctagcactttgggaggccgaggtgggtggaccacctgaggttaggacttcaagaccagcctggccaacatggtgaaaccccatctgtactaaaaatacaaaaatttgcctggtgtggtggtgcatgcctctagtcctagctactcgggaggctgaggcacgagaatcacttgaacctgggaggcggaggttgcagtgagtcgagataacactactgcattccagcctgggtgacagagtgagactccacctcaaaaaaaaaaaaaaaaaaaaaaaaaacagaaagaaagaaaaagaaaactgcagataaccctatacattaatactggtatctcgaggtgactcttctgaccaagggtggttaagtgacacatagaacttttctaagagaagacagacaagttgacaggcatgccttgtactcagctgtgttcatgtggtggtctgtggaaagaaaagaagactcatttggaaatgaagctgtccctttccaagcagtctctggtgcttttcttctctcaaaatggatccgataaatatttgaatagagcagattgtagaatgtcgtgctgtcaccagaaagctgctgttttgggttctgcattgagccaaatatgtagaggacctaccaagcccactgagggactaggttttcatgtctctagtcatacctagaatgttctgagccgtctgagggccttcatgccggcagcagctagcaaagccagaaagcaagtctaacaggatctaagatgaccatcaggagaaggagtttgagactgtgtatgcaacccccaatagacccccttttactctgatctggagaatgtatctggcttcatattttcaagtcacatgtctctcagacccctggattcagaacccaaggccacaaatcataggcatgaagcactttcttaagactgacctaacgctggattatttcccgtccaatgcctgcatgctgcttgaattgctccacccacacctccatgaccaagggcgccagagtgctgcaactggggcgtgggccgctctctgcttttcctgtctgactctgacaagtcctccctcactgaatgtagaatcgttgccaagtttctgagaagtgtcgattccctgttaacatggatatcagttctgcctcacatttcccacttgaggttgaggcgtactggagacaacacctcagaccatctgaaccccatcagtggacgaaaatggggctgttaatatactctaaaagccatactaaaaatgctctgagggaactggctaagaatagtgggcctggtgattgtctatcacgcaaggctttgttttgtactgttcagaaatctgtcacctttctgcctgcccttgtttcctgaatgaaatgcttctggggttatttatgaaaggagtgatcctggggcaggcaggaggcagtgggcttcatggctccttgaagttattactgatcttgaccttctctttggctacctttagacaaagaatacgccaatcaatacttggggctctaagttttacaattgatatttatttgtatcatctctttgtctaggaatgtaaaagtgattctaaactaagatgtgtaataaaaatcaatcagatttattgtacctacaaaaa

SEQ ID NO: 435832 - DNA, 6049 bp, Homo sapiens
atccggggcagcggggaatggctgagccaggggttcgccgcccccgccgccgccgccgccgccgccgccgccgccgccgcccgctttcggctcgggcctcaggaccgtagcatcctgagacattttgaattgacacttctcaagatttgactggatcagagttcatcatgtcaaagttgaaaagctcagagtcagtcagggtggtggttcgctgtcggcccatgaatggcaaggaaaaggctgcttcgtatgacaaagtggtggatgtggatgttaagctggggcaggtgtctgtgaagaaccccaaagggacggcccatgaaatgcccaagaccttcacctttgatgccgtctatgactggaatgccaagcagtttgaactgtacgatgagacgttccgaccacttgttgactctgtcctgcaaggtttcaatggaaccatttttgcctatggacaaactgggacaggaaaaacctacaccatggaaggaatccgtggtgaccctgaaaaaagaggagtcattcctaactcatttgaccatatcttcacccacatctctcgatcccagaatcaacaatacctggtcagggcttcttacttagagatctaccaggaggagatccgagatttgctctcaaaggatcagaccaaaaggcttgagctcaaagagaggcctgacacaggagtgtatgtgaaagacctgtcttcctttgtcaccaagagtgtgaaggagatagagcatgtgatgaatgtggggaaccagaaccgttctgtcggtgctaccaacatgaacgagcacagctcgcgttctcatgcaattttcgttatcactattgagtgcagcgaggtgggcctcgatggtgaaaaccacatccgtgtaggaaaattgaaccttgtagatcttgctggcagcgaacggcaagccaagaccggcgcacaaggggagagattaaaagaagctaccaagatcaacctctccctttccgctttgggtaatgtcatctctgctctagtggacggcaaaagcactcacattccatatcgggactcaaagcttaccaggctcctccaagattcccttggtggcaatgccaagactgtgatggtggccaacgtggggcctgcctcttacaacgtagaagagactctgaccactctgcgatatgccaaccgtgccaaaaacattaagaacaaaccaagggtcaatgaggaccccaaggatgccctccttcgagaattccaggaagagattgctcggctcaaggcccagctggaaaaacggtccattggtaggaggaagaggcgagagaagcggagggaaggtggtggcagtggtgggggtggggaagaggaggaggaggagggagaagagggtgaggaggaaggggatgataaggatgattactggcgggaacagcaagaaaaactggagattgagaagcgggccattgtagaggatcacagcttggttgcagaggagaagatgaggctgctgaaggagaaagagaaaaagatggaggacctgcggcgggagaaggatgctgccgagatgctgggcgccaagatcaaggccatggagagtaagttgcttgttggaggaaaaaatatagtagatcatacgaatgaacagcagaaaatcctggagcagaaacgacaggaaattgcagagcagaaacgtcgagaaagagaaatccagcaacagatggaaagtcgagatgaggagaccttggaacttaaagagacatacagctcattgcagcaagaggtggacatcaagaccaaaaaactcaaaaagctcttctccaagcttcaggcagtgaaggctgagatccatgacctccaagaagaacacatcaaggagcgccaagagctagagcagactcagaatgagctcaccagggagctgaaactcaagcatcttattatagaaaactttatccctctggaagaaaaaagtaaaattatgaatagagccttctttgatgaagaggaagatcattggaaactacatcctataaccagactggagaaccagcagatgatgaagcggccagtctcagccgtgggatataagagaccattgagccagcacgcaagaatgtccatgatgattcgtccagaggcccgatatagggcagaaaacattgtgctgttagagctggacatgcccagccggaccaccagagactatgagggtccagccattgcccccaaggtccaggctgcattggatgcggctctgcaggatgaagatgagatacaggtggatgcatcatcatttgaaagcactgcaaataagaaatccaaggccaggcctaaaagtggaaggaagtcgggatcctcctcctcttcctcaggaacccctgcatctcagctttatccacagtctcgggggctggttccaaagtaaagccagcttctcctctcccagggcggaaacagcatttgccttctgagagaagagactagcaaaaagctgcagagaggattcggcccaaactcagaactgttcccctgaggagaagcggtggcctctttgcagatcaaccaacttaatctggttgaacgtgctgttcctaatctggcactcagcccctctgggaaacatcttttaattagcatctcagaaatgcatgggtaaggtaaagtgcgatagttcaagtggaaagcaagagaatgaccagtgaccttgcttccttcccccttgccttcttctcccccttcccctgtgctccctttctctcctctctccttttctagcctgttctttacatggggctcccttcttgttgaacaatagggcagaatcaggagtcaccttagcaggaccacatctttggagcctcgggataaaatgacagtgaggttgaaaagtgaaaaccctagaacttgaataggtgcctgttcttgtagggagaaatgagaaatcgcatttggatccaggccccaggtgggcaccatcagcagtcttgcttccatgcacctcagtaagaagtggatctgcctttgggacctgctcagtgaggaaatctcttccaatttctgcttctgaatgattcaatgttgggagcaatagaaataacattccctttgccttctctgagtgtttagggaaatagcttctttaaaacctcaaaaccatgaccatcctgtcaaagacctaagtctgtaagctggtgccatgtccatacaccatgtcactttactcttcatttgtcaccatcttttcccatgcacgcatactctgaacatccttgtgtgggcccatcctctgcatccagagcatgctctgcagtgggcctgttttgtggaagaaaggaggctgtctctgccttctctgatgggactggagttgagggaaggagctgtattgtggcacttctgaattccccgttttgttccatattggtatagagagcagaagagtagctaggcagatgcagagatggagacatgagactcagtgcagtgggcagggaagacataacagatggaagcaaaggaatcctgcctgccttcagcagagaattcaccgaatcctagaactgtggctccctccaggcagagcctaagatgctggtgaagaatagctgtgtgattgaataggctcaaaggagagttcagaattcccatttacatattactagtttggtttgtaagttttagttccttgtattattgagattcagagcttcattttatgttggtcattaggtgaatattactcattttccctcaagagaagctcataagtgtgtgtgggtgtgagagcacgatggtgcctgtgttctgtgaatgtgtccatatgtgtctgtaagagagacagagaccaagaacttgcccaattttagaaatacactaatgtgcagttgttgccttttgtctgtattgaaggcccattgaatgactaatccaggctggaagcattcccatgtgggtgtctgagtccatgagccaagcctgaggggacagtgagtctccaggtctgccacactggtgcaccttgctggcacggtgcctcaggaaggtggcgactcaggtgggccttgagttatattttaactcagctgctcagttcccagggcacatttctggatcagaacccatgggaaacaggaggtactaagtgcaatgtcttagcattctgcaaaatggagatctgttgtccagcggcttatctcctttttagtaacccttctttctgaacccagggcccttttcagccttccctcatattttcttgagatcaaactttacttctttcttatttactaagaatttgcctgtttgaataagaacaaaacgctaaggtgggtagcctaagctgattttctgctggttacacgtgtctctcacaccacatttcctcaaagctaatctgaattctgtaggctaaaaatattcatgtagcaaatctgagaattgaaaactgcagataaccggccgggtatggtgactcatgcctgtaatcctagcactttgggaggccgaggtgggtggaccacctgaggttaggacttcaagaccagcctggccaacatggtgaaaccccatctgtactaaaaatacaaaaatttgcctggtgtggtggtgcatgcctctagtcctagctactcgggaggctgaggcacgagaatcacttgaacctgggaggcggaggttgcagtgagtcgagataacactactgcattccagcctgggtgacagagtgagactccacctcaaaaaaaaaaaaaaaaaaaaaaaaaacagaaagaaagaaaaagaaaactgcagataaccctatacattaatactggtatctcgaggtgactcttctgaccaagggtggttaagtgacacatagaacttttctaagagaagacagacaagttgacaggcatgccttgtactcagctgtgttcatgtggtggtctgtggaaagttttcttctctcaaaatggatccgataaatatttgaatagagcagattgtagaatgtcgtgctgtcaccagaaagctgctgttttgggttctgcattgagccaaatatgtagaggacctaccaagcccactgagggactaggttttcatgtctctagtcatacctagaatgttctgagccgtctgagggccttcatgccggcagcagctagcaaagccagaaagcaagtctaacaggatctaagatgaccatcaggagaaggagtttgagactgtgtatgcaacccccaatagacccccttttactctgatctggagaatgtatctggcttcatattttcaagtcacatgtctctcagacccctggattcagaacccaaggccacaaatcataggcatgaagcactttcttaagactgacctaacgctggattatttcccgtccaatgcctgcatgctgcttgaattgctccacccacacctccatgaccaagggcgccagagtgctgcaactggggcgtgggccgctctctgcttttcctgtctgactctgacaagtcctccctcactgaatgtagaatcgttgccaagtttctgagaagtgtcgattccctgttaacatggatatcagttctgcctcacatttcccacttgaggttgaggcgtactggagacaacacctcagaccatctgaaccccatcagtggacgaaaatggggctgttaatatactctaaaagccatactaaaaatgctctgagggaactggctaagaatagtgggcctggtgattgtctatcacgcaaggctttgttttgtactgttcagaaatctgtcacctttctgcctgcccttgtttcctgaatgaaatgcttctggggttatttatgaaaggagtgatcctggggcaggcaggaggcagtgggcttcatggctccttgaagttattactgatcttgaccttctctttggctacctttagacaaagaatacgccaatcaatacttggggctctaagttttacaattgatatttatttgtatcatctctttgtctaggaatgtaaaagtgattctaaactaagatgtgtaataaaaatcaatcagatttattgtacctacaaaaa

SEQ ID NO: 435833 - DNA, 6167 bp, Homo sapiens
  misc_feature (6109)..(6109): n is a, c, g, or t
  misc_feature (6129)..(6130): n is a, c, g, or t
atccggggcagcggggaatggctgagccaggggttcgccgcccccgccgccgccgccgccgccgccgccgccgccgccgcccgctttcggctcgggcctcaggaccgtagcatcctgagacattttgaattgacacttctcaagatttgactggatcagagttcatcatgtcaaagttgaaaagctcagagtcagtcagggtggtggttcgctgtcggcccatgaatggcaaggaaaaggctgcttcgtatgacaaagtggtggatgtggatgttaagctggggcaggtgtctgtgaagaaccccaaagggacggcccatgaaatgcccaagaccttcacctttgatgccgtctatgactggaatgccaagcagtttgaactgtacgatgagacgttccgaccacttgttgactctgtcctgcaaggtttcaatggaaccatttttgcctatggacaaactgggacaggaaaaacctacaccatggaaggaatccgtggtgaccctgaaaaaagaggagtcattcctaactcatttgaccatatcttcacccacatctctcgatcccagaatcaacaatacctggtcagggcttcttacttagagatctaccaggaggagatccgagatttgctctcaaaggatcagaccaaaaggcttgagctcaaagagaggcctgacacaggagtgtatgtgaaagacctgtcttcctttgtcaccaagagtgtgaaggagatagagcatgtgatgaatgtggggaaccagaaccgttctgtcggtgctaccaacatgaacgagcacagctcgcgttctcatgcaattttcgttatcactattgagtgcagcgaggtgggcctcgatggtgaaaaccacatccgtgtaggaaaattgaaccttgtagatcttgctggcagcgaacggcaagccaagaccggcgcacaaggggagagattaaaagaagctaccaagatcaacctctccctttccgctttgggtaatgtcatctctgctctagtggacggcaaaagcactcacattccatatcgggactcaaagcttaccaggctcctccaagattcccttggtggcaatgccaagactgtgatggtggccaacgtggggcctgcctcttacaacgtagaagagactctgaccactctgcgatatgccaaccgtgccaaaaacattaagaacaaaccaagggtcaatgaggaccccaaggatgccctccttcgagaattccaggaagagattgctcggctcaaggcccagctggaaaaacggtccattggtaggaggaagaggcgagagaagcggagggaaggtggtggcagtggtgggggtggggaagaggaggaggaggagggagaagagggtgaggaggaaggggatgataaggatgattactggcgggaacagcaagaaaaactggagattgagaagcgggccattgtagaggatcacagcttggttgcagaggagaagatgaggctgctgaaggagaaagagaaaaagatggaggacctgcggcgggagaaggatgctgccgagatgctgggcgccaagatcaaggccatggagagtaagttgcttgttggaggaaaaaatatagtagatcatacgaatgaacagcagaaaatcctggagcagaaacgacaggaaattgcagagcagaaacgtcgagaaagagaaatccagcaacagatggaaagtcgagatgaggagaccttggaacttaaagagacatacagctcattgcagcaagaggtggacatcaagaccaaaaaactcaaaaagctcttctccaagcttcaggcagtgaaggctgagatccatgacctccaagaagaacacatcaaggagcgccaagagctagagcagactcagaatgagctcaccagggagctgaaactcaagcatcttattatagaaaactttatccctctggaagaaaaaagtaaaattatgaatagagccttctttgatgaagaggaagatcattggaaactacatcctataaccagactggagaaccagcagatgatgaagcggccagtctcagccgtgggatataagagaccattgagccagcacgcaagaatgtccatgatgattcgtccagaggcccgatatagggcagaaaacattgtgctgttagagctggacatgcccagccggaccaccagagactatgagggtccagccattgcccccaaggtccaggctgcattggatgcggctctgcaggatgaagatgagatacaggtggatgcatcatcatttgaaagcactgcaaataagaaatccaaggccaggcctaaaagtggaaggaagtcgggatcctcctcctcttcctcaggaacccctgcatctcagctttatccacagtctcgggggctggttccaaagtaaagccagcttctcctctcccagggcggaaacagcatttgccttctgagagaagagactagcaaaaagctgcagagaggattcggcccaaactcagaactgttcccctgaggagaagcggtggcctctttgcagatcaaccaacttaatctggttgaacgtgctgttcctaatctggcactcagcccctctgggaaacatcttttaattagcatctcagaaatgcatgggtaaggtaaagtgcgatagttcaagtggaaagcaagagaatgaccagtgaccttgcttccttcccccttgccttcttctcccccttcccctgtgctccctttctctcctctctccttttctagcctgttctttacatggggctcccttcttgttgaacaatagggcagaatcaggagtcaccttagcaggaccacatctttggagcctcgggataaaatgacagtgaggttgaaaagtgaaaaccctagaacttgaataggtgcctgttcttgtagggagaaatgagaaatcgcatttggatccaggccccaggtgggcaccatcagcagtcttgcttccatgcacctcagtaagaagtggatctgcctttgggacctgctcagtgaggaaatctcttccaatttctgcttctgaatgattcaatgttgggagcaatagaaataacattccctttgccttctctgagtgtttagggaaatagcttctttaaaacctcaaaaccatgaccatcctgtcaaagacctaagtctgtaagctggtgccatgtccatacaccatgtcactttactcttcatttgtcaccatcttttcccatgcacgcatactctgaacatccttgtgtgggcccatcctctgcatccagagcatgctctgcagtgggcctgttttgtggaagaaaggaggctgtctctgccttctctgatgggactggagttgagggaaggagctgtattgtggcacttctgaattccccgttttgttccatattggtatagagagcagaagagtagctaggcagatgcagagatggagacatgagactcagtgcagtgggcagggaagacataacagatggaagcaaaggaatcctgcctgccttcagcagagaattcaccgaatcctagaactgtggctccctccaggcagagcctaagatgctggtgaagaatagctgtgtgattgaataggctcaaaggagagttcagaattcccatttacatattactagtttggtttgtaagttttagttccttgtattattgagattcagagcttcattttatgttggtcattaggtgaatattactcattttccctcaagagaagctcataagtgtgtgtgggtgtgagagcacgatggtgcctgtgttctgtgaatgtgtccatatgtgtctgtaagagagacagagaccaagaacttgcccaattttagaaatacactaatgtgcagttgttgccttttgtctgtattgaaggcccattgaatgactaatccaggctggaagcattcccatgtgggtgtctgagtccatgagccaagcctgaggggacagtgagtctccaggtctgccacactggtgcaccttgctggcacggtgcctcaggaaggtggcgactcaggtgggccttgagttatattttaactcagctgctcagttcccagggcacatttctggatcagaacccatgggaaacaggaggtactaagtgcaatgtcttagcattctgcaaaatggagatctgttgtccagcggcttatctcctttttagtaacccttctttctgaacccagggcccttttcagccttccctcatattttcttgagatcaaactttacttctttcttatttactaagaatttgcctgtttgaataagaacaaaacgctaaggtgggtagcctaagctgattttctgctggttacacgtgtctctcacaccacatttcctcaaagctaatctgaattctgtaggctaaaaatattcatgtagcaaatctgagaattgaaaactgcagataaccggccgggtatggtgactcatgcctgtaatcctagcactttgggaggccgaggtgggtggaccacctgaggttaggacttcaagaccagcctggccaacatggtgaaaccccatctgtactaaaaatacaaaaatttgcctggtgtggtggtgcatgcctctagtcctagctactcgggaggctgaggcacgagaatcacttgaacctgggaggcggaggttgcagtgagtcgagataacactactgcattccagcctgggtgacagagtgagactccacctcaaaaaaaaaaaaaaaaaaaaaaaaaacagaaagaaagaaaaagaaaactgcagataaccctatacattaatactggtatctcgaggtgactcttctgaccaagggtggttaagtgacacatagaacttttctaagagaagacagacaagttgacaggcatgccttgtactcagctgtgttcatgtggtggtctgtggaaagaaaagaagactcatttggaaatgaagctgtccctttccaagcagtctctggtgcttttcttctctcaaaatggatccgataaatatttgaatagagcagattgtagaatgtcgtgctgtcaccagaaagctgctgttttgggttctgcattgagccaaatatgtagaggacctaccaagcccactgagggactaggttttcatgtctctagtcatacctagaatgttctgagccgtctgagggccttcatgccggcagcagctagcaaagccagaaagcaagtctaacaggatctaagatgaccatcaggagaaggagtttgagactgtgtatgcaacccccaatagacccccttttactctgatctggagaatgtatctggcttcatattttcaagtcacatgtctctcagacccctggattcagaacccaaggccacaaatcataggcatgaagcactttcttaagactgacctaacgctggattatttcccgtccaatgcctgcatgctgcttgaattgctccacccacacctccatgaccaagggcgccagagtgctgcaactggggcgtgggccgctctctgcttttcctgtctgactctgacaagtcctccctcactgaatgtagaatcgttgccaagtttctgagaagtgtcgattccctgttaacatggatatcagttctgcctcacatttcccacttgaggttgaggcgtactggagacaacacctcagaccatctgaaccccatcagtggacgaaaatggggctgttaatatactctaaaagccatactaaaaatgctctgagggaactggctaagaatagtgggcctggtgattgtctatcacgcaaggctttgttttgtactgttcagaaatctgtcacctttctgcctgcccttgtttcctgaatgaaatgcttctggggttatttatgaaaggagtgatcctggggcaggcaggaggcagtgggcttcatggctccttgaagttattactgatcttgaccttctctttggctacctttagacaaagaatacgccaatcaatacttggggctctaagttttacaattgatatttatttgtatcatctctttgtctaggaatgtaaaagtgattctaaactaagatgtgtaataaaaatcaatcagatttattgtacctacaaaaaaaagcnttgcgtgatagacatcaccnncccactattcttagccagttgacctgtagctcctctg

SEQ ID NO: 435834 - DNA, 6066 bp, Homo sapiens
atccggggcagcggggaatggctgagccaggggttcgccgcccccgccgccgccgccgccgccgccgccgccgccgccgcccgctttcggctcgggcctcaggaccgtagcatcctgagacattttgaattgacacttctcaagatttgactggatcagagttcatcatgtcaaagttgaaaagctcagagtcagtcagggtggtggttcgctgtcggcccatgaatggcaaggaaaaggctgcttcgtatgacaaagtggtggatgtggatgttaagctggggcaggtgtctgtgaagaaccccaaagggacggcccatgaaatgcccaagaccttcacctttgatgccgtctatgactggaatgccaagcagtttgaactgtacgatgagacgttccgaccacttgttgactctgtcctgcaaggtttcaatggaaccatttttgcctatggacaaactgggacaggaaaaacctacaccatggaaggaatccgtggtgaccctgaaaaaagaggagtcattcctaactcatttgaccatatcttcacccacatctctcgatcccagaatcaacaatacctggtcagggcttcttacttagagatctaccaggaggagatccgagatttgctctcaaaggatcagaccaaaaggcttgagctcaaagagaggcctgacacaggagtgtatgtgaaagacctgtcttcctttgtcaccaagagtgtgaaggagatagagcatgtgatgaatgtggggaaccagaaccgttctgtcggtgctaccaacatgaacgagcacagctcgcgttctcatgcaattttcgttatcactattgagtgcagcgaggtgggcctcgatggtgaaaaccacatccgtgtaggaaaattgaaccttgtagatcttgctggcagcgaacggcaagccaagaccggcgcacaaggggagagattaaaagaagctaccaagatcaacctctccctttccgctttgggtaatgtcatctctgctctagtggacggcaaaagcactcacattccatatcgggactcaaagcttaccaggctcctccaagattcccttggtggcaatgccaagactgtgatggtggccaacgtggggcctgcctcttacaacgtagaagagactctgaccactctgcgatatgccaaccgtgccaaaaacattaagaacaaaccaagggtcaatgaggaccccaaggatgccctccttcgagaattccaggaagagattgctcggctcaaggcccagctggaaaaacggtccattggtaggaggaagaggcgagagaagcggagggaaggtggtggcagtggtgggggtggggaagaggaggaggaggagggagaagagggtgaggaggaaggggatgataaggatgattactggcgggaacagcaagaaaaactggagattgagaagcgggccattgtagaggatcacagcttggttgcagaggagaagatgaggctgctgaaggagaaagagaaaaagatggaggacctgcggcgggagaaggatgctgccgagatgctgggcgccaagatcaaggccatggagagtaagttgcttgttggaggaaaaaatatagtagatcatacgaatgaacagcagaaaatcctggagcagaaacgacaggaaattgcagagcagaaacgtcgagaaagagaaatccagcaacagatggaaagtcgagatgaggagaccttggaacttaaagagacatacagctcattgcagcaagaggtggacatcaagaccaaaaaactcaaaaagctcttctccaagcttcaggcagtgaaggctgagatccatgacctccaagaagaacacatcaaggagcgccaagagctagagcagactcagaatgagctcaccagggagctgaaactcaagcatcttattatagaaaactttatccctctggaagaaaaaagtaaaattatgaatagagccttctttgatgaagaggaagatcattggaaactacatcctataaccagactggagaaccagcagatgatgaagcggccagtctcagccgtgggatataagagaccattgagccagcacgcaagaatgtccatgatgattcgtccagaggcccgatatagggcagaaaacattgtgctgttagagctggacatgcccagccggaccaccagagactatgagggtccagccattgcccccaaggtccaggctgcattggatgcggctctgcaggatgaagatgagatacaggtggatgcatcatcatttgaaagcactgcaaataagaaatccaaggccaggcctaaaagtggaaggaagtcgggatcctcctcctcttcctcaggaacccctgcatctcagctttatccacagtctcgggggctggttccaaagtaaagccagcttctcctctcccagggcggaaacagcatttgccttctgagagaagagactagcaaaaagctgcagagaggattcggcccaaactcagaactgttcccctgaggagaagcggtggcctctttgcagatcaaccaacttaatctggttgaacgtgctgttcctaatctggcactcagcccctctgggaaacatcttttaattagcatctcagaaatgcatgggtaaggtaaagtgcgatagttcaagtggaaagcaagagaatgaccagtgaccttgcttccttcccccttgccttcttctcccccttcccctgtgctccctttctctcctctctccttttctagcctgttctttacatggggctcccttcttgttgaacaatagggcagaatcaggagtcaccttagcaggaccacatctttggagcctcgggataaaatgacagtgaggttgaaaagtgaaaaccctagaacttgaataggtgcctgttcttgtagggagaaatgagaaatcgcatttggatccaggccccaggtgggcaccatcagcagtcttgcttccatgcacctcagtaagaagtggatctgcctttgggacctgctcagtgaggaaatctcttccaatttctgcttctgaatgattcaatgttgggagcaatagaaataacattccctttgccttctctgagtgtttagggaaatagcttctttaaaacctcaaaaccatgaccatcctgtcaaagacctaagtctgtaagctggtgccatgtccatacaccatgtcactttactcttcatttgtcaccatcttttcccatgcacgcatactctgaacatccttgtgtgggcccatcctctgcatccagagcatgctctgcagtgggcctgttttgtggaagaaaggaggctgtctctgccttctctgatgggactggagttgagggaaggagctgtattgtggcacttctgaattccccgttttgttccatattggtatagagagcagaagagtagctaggcagatgcagagatggagacatgagactcagtgcagtgggcagggaagacataacagatggaagcaaaggaatcctgcctgccttcagcagagaattcaccgaatcctagaactgtggctccctccaggcagagcctaagatgctggtgaagaatagctgtgtgattgaataggctcaaaggagagttcagaattcccatttacatattactagtttggtttgtaagttttagttccttgtattattgagattcagagcttcattttatgttggtcattaggtgaatattactcattttccctcaagagaagctcataagtgtgtgtgggtgtgagagcacgatggtgcctgtgttctgtgaatgtgtccatatgtgtctgtaagagagacagagaccaagaacttgcccaattttagaaatacactaatgtgcagttgttgccttttgtctgtattgaaggcccattgaatgactaatccaggctggaagcattcccatgtgggtgtctgagtccatgagccaagcctgaggggacagtgagtctccaggtctgccacactggtgcaccttgctggcacggtgcctcaggaaggtggcgactcaggtgggccttgagttatattttaactcagctgctcagttcccagggcacatttctggatcagaacccatgggaaacaggaggtactaagtgcaatgtcttagcattctgcaaaatggagatctgttgtccagcggcttatctcctttttagtaacccttctttctgaacccagggcccttttcagccttccctcatattttcttgagatcaaactttacttctttcttatttactaagaatttgcctgtttgaataagaacaaaacgctaaggtgggtagcctaagctgattttctgctggttacacgtgtctctcacaccacatttcctcaaagctaatctgaattctgtaggctaaaaatattcatgtagcaaatctgagaattgaaaactgcagataaccggccgggtatggtgactcatgcctgtaatcctagcactttgggaggccgaggtgggtggaccacctgaggttaggacttcaagaccagcctggccaacatggtgaaaccccatctgtactaaaaatacaaaaatttgcctggtgtggtggtgcatgcctctagtcctagctactcgggaggctgaggcacgagaatcacttgaacctgggaggcggaggttgcagtgagtcgagataacactactgcattccagcctgggtgacagagtgagactccacctcaaaaaaaaaaaaaaaaaaaaaaaaaacagaaagaaagaaaaagaaaactgcagataaccctatacattaatactggtatctcgaggtgactcttctgaccaagggtggttaagtgacacatagaacttttctaagagaagacagacaagttgacaggcatgccttgtactcagctgtgttcatgtggtggtctgtggaaagaaaagaagactcatttggaaatgaagctgtccctttccaagcagtctctggtgcttttcttctctcaaaatggatccgataaatatttgaatagagcagattgtagaatgtcgtgctgtcaccagaaagctgctgttttgggttctgcattgagccaaatatgtagaggacctaccaagcccactgagggactaggttttcatgtctctagtcatacctagaatgttctgagccgtctgagggccttcatgccggcagcagctagcaaagccagaaagcaagtctaacaggatctaagatgaccatcaggagaaggagtttgagactgtgtatgcaacccccaatagacccccttttactctgatctggagaatgtatctggcttcatattttcaagtcacatgtctctcagacccctggattcagaacccaaggccacaaatcataggcatgaagcactttcttaagactgacctaacgctggattatttcccgtccaatgcctgcatgctgcttgaattgctccacccacacctccatgaccaagggcgccagagtgctgcaactggggcgtgggccgctctctgcttttcctgtctgactctgacaagtcctccctcactgaatgtagaatcgttgccaagtttctgagaagtgtcgattccctgttaacatggatatcagttctgcctcacatttcccacttgaggttgaggcgtactggagacaacacctcagaccatctgaaccccatcagtggacgaaaatggggctgttaatatactctaaaagccatactaaaaatgctctgagggaactggctaagaatagtgggcctggtgattgtctatcacgcaaggctttgttttgtactgttcagaaatctgtcacctttctgcctgcccttgtttcctgaatgaaatgcttctggggttatttatgaaaggagtgatcctggggcaggcaggaggcagtgggcttcatggctccttgaagttattactgatcttgaccttctctttggctacctttagacaaagaatacgccaatcaatacttggggctctaagttttacaattgatatttattacacatcttagtttagaatcacttttacattcctagacaaagagatgatac

SEQ ID NO: 435835 - DNA, 5665 bp, Homo sapiens
  misc_feature (5640)..(5640): n is a, c, g, or t
  misc_feature (5646)..(5646): n is a, c, g, or t
atccggggcagcggggaatggctgagccaggggttcgccgcccccgccgccgccgccgccgccgccgccgccgccgccgcccgctttcggctcgggcctcaggaccgtagcatcctgagacattttgaattgacacttctcaagatttgactggatcagagttcatcatgtcaaagttgaaaagctcagagtcagtcagggtggtggttcgctgtcggcccatgaatggcaaggaaaaggctgcttcgtatgacaaagtggtggatgtggatgttaagctggggcaggtgtctgtgaagaaccccaaagggacggcccatgaaatgcccaagaccttcacctttgatgccgtctatgactggaatgccaagcagtttgaactgtacgatgagacgttccgaccacttgttgactctgtcctgcaaggtttcaatggaaccatttttgcctatggacaaactgggacaggaaaaacctacaccatggaaggaatccgtggtgaccctgaaaaaagaggagtcattcctaactcatttgaccatatcttcacccacatctctcgatcccagaatcaacaatacctggtcagggcttcttacttagagatctaccaggaggagatccgagatttgctctcaaaggatcagaccaaaaggcttgagctcaaagagaggcctgacacaggagtgtatgtgaaagacctgtcttcctttgtcaccaagagtgtgaaggagatagagcatgtgatgaatgtggggaaccagaaccgttctgtcggtgctaccaacatgaacgagcacagctcgcgttctcatgcaattttcgttatcactattgagtgcagcgaggtgggcctcgatggtgaaaaccacatccgtgtaggaaaattgaaccttgtagatcttgctggcagcgaacggcaagccaagaccggcgcacaaggggagagattaaaagaagctaccaagatcaacctctccctttccgctttgggtaatgtcatctctgctctagtggacggcaaaagcactcacattccatatcgggactcaaagcttaccaggctcctccaagattcccttggtggcaatgccaagactgtgatggtggccaacgtggggcctgcctcttacaacgtagaagagactctgaccactctgcgatatgccaaccgtgccaaaaacattaagaacaaaccaagggtcaatgaggaccccaaggatgccctccttcgagaattccaggaagagattgctcggctcaaggcccagctggaaaaacggtccattggtaggaggaagaggcgagagaagcggagggaaggtggtggcagtggtgggggtggggaagaggaggaggaggagggagaagagggtgaggaggaaggggatgataaggatgattactggcgggaacagcaagaaaaactggagattgagaagcgggccattgtagaggatcacagcttggttgcagaggagaagatgaggctgctgaaggagaaagagaaaaagatggaggacctgcggcgggagaaggatgctgccgagatgctgggcgccaagatcaaggccatggagagtaagttgcttgttggaggaaaaaatatagtagatcatacgaatgaacagcagaaaatcctggagcagaaacgacaggaaattgcagagcagaaacgtcgagaaagagaaatccagcaacagatggaaagtcgagatgaggagaccttggaacttaaagagacatacagctcattgcagcaagaggtggacatcaagaccaaaaaactcaaaaagctcttctccaagcttcaggcagtgaaggctgagatccatgacctccaagaagaacacatcaaggagcgccaagagctagagcagactcagaatgagctcaccagggagctgaaactcaagcatcttattatagaaaactttatccctctggaagaaaaaagtaaaattatgaatagagccttctttgatgaagaggaagatcattggaaactacatcctataaccagactggagaaccagcagatgatgaagcggccagtctcagccgtgggatataagagaccattgagccagcacgcaagaatgtccatgatgattcgtccagaggcccgatatagggcagaaaacattgtgctgttagagctggacatgcccagccggaccaccagagactatgagggtccagccattgcccccaaggtccaggctgcattggatgcggctctgcaggatgaagatgagatacaggtggatgcatcatcatttgaaagcactgcaaataagaaatccaaggccaggcctaaaagtggaaggaagtcgggatcctcctcctcttcctcaggaacccctgcatctcagctttatccacagtctcgggggctggttccaaagtaaagccagcttctcctctcccagggcggaaacagcatttgccttctgagagaagagactagcaaaaagctgcagagaggattcggcccaaactcagaactgttcccctgaggagaagcggtggcctctttgcagatcaaccaacttaatctggttgaacgtgctgttcctaatctggcactcagcccctctgggaaacatcttttaattagcatctcagaaatgcatgggtaaggtaaagtgcgatagttcaagtggaaagcaagagaatgaccagtgaccttgcttccttcccccttgccttcttctcccccttcccctgtgctccctttctctcctctctccttttctagcctgttctttacatggggctcccttcttgttgaacaatagggcagaatcaggagtcaccttagcaggaccacatctttggagcctcgggataaaatgacagtgaggttgaaaagtgaaaaccctagaacttgaataggtgcctgttcttgtagggagaaatgagaaatcgcatttggatccaggccccaggtgggcaccatcagcagtcttgcttccatgcacctcagtaagaagtggatctgcctttgggacctgctcagtgaggaaatctcttccaatttctgcttctgaatgattcaatgttgggagcaatagaaataacattccctttgccttctctgagtgtttagggaaatagcttctttaaaacctcaaaaccatgaccatcctgtcaaagacctaagtctgtaagctggtgccatgtccatacaccatgtcactttactcttcatttgtcaccatcttttcccatgcacgcatactctgaacatccttgtgtgggcccatcctctgcatccagagcatgctctgcagtgggcctgttttgtggaagaaaggaggctgtctctgccttctctgatgggactggagttgagggaaggagctgtattgtggcacttctgaattccccgttttgttccatattggtatagagagcagaagagtagctaggcagatgcagagatggagacatgagactcagtgcagtgggcagggaagacataacagatggaagcaaaggaatcctgcctgccttcagcagagaattcaccgaatcctagaactgtggctccctccaggcagagcctaagatgctggtgaagaatagctgtgtgattgaataggctcaaaggagagttcagaattcccatttacatattactagtttggtttgtaagttttagttccttgtattattgagattcagagcttcattttatgttggtcattaggtgaatattactcattttccctcaagagaagctcataagtgtgtgtgggtgtgagagcacgatggtgcctgtgttctgtgaatgtgtccatatgtgtctgtaagagagacagagaccaagaacttgcccaattttagaaatacactaatgtgcagttgttgccttttgtctgtattgaaggcccattgaatgactaatccaggctggaagcattcccatgtgggtgtctgagtccatgagccaagcctgaggggacagtgagtctccaggtctgccacactggtgcaccttgctggcacggtgcctcaggaaggtggcgactcaggtgggccttgagttatattttaactcagctgctcagttcccagggcacatttctggatcagaacccatgggaaacaggaggtactaagtgcaatgtcttagcattctgcaaaatggagatctgttgtccagcggcttatctcctttttagtaacccttctttctgaacccagggcccttttcagccttccctcatattttcttgagatcaaactttacttctttcttatttactaagaatttgcctgtttgaataagaacaaaacgctaaggtgggtagcctaagctgattttctgctggttacacgtgtctctcacaccacatttcctcaaagctaatctgaattctgtaggctaaaaatattcatgtagcaaatctgagaattgaaaactgcagataaccggccgggtatggtgactcatgcctgtaatcctagcactttgggaggccgaggtgggtggaccacctgaggttaggacttcaagaccagcctggccaacatggtgaaaccccatctgtactaaaaatacaaaaatttgcctggtgtggtggtgcatgcctctagtcctagctactcgggaggctgaggcacgagaatcacttgaacctgggaggcggaggttgcagtgagtcgagataacactactgcattccagcctgggtgacagagtgagactccacctcaaaaaaaaaaaaaaaaaaaaaaaaaacagaaagaaagaaaaagaaaactgcagataaccctatacattaatactggtatctcgaggtgactcttctgaccaagggtggttaagtgacacatagaacttttctaagagaagacagacaagttgacaggcatgccttgtactcagctgtgttcatgtggtggtctgtggaaagaaaagaagactcatttggaaatgaagctgtccctttccaagcagtctctggtgcttttcttctctcaaaatggatccgataaatatttgaatagagcagattgtagaatgtcgtgctgtcaccagaaagctgctgttttgggttctgcattgagccaaatatgtagaggacctaccaagcccactgagggactaggttttcatgtctctagtcatacctagaatgttctgagccgtctgagggccttcatgccggcagcagctagcaaagccagaaagcaagtctaacaggatctaagatgaccatcaggagaaggagtttgagactgtgtatgcaacccccaatagacccccttttactctgatctggagaatgtatctggcttcatattttcaagtcacatgtctctcagacccctggattcagaacccaaggccacaaatcataggcatgaagcactttcttaagactgacctaacgctggattatttccctcatattttcttgagatcaaactttacttctttcttatttactaaggaatttgcctgtttgaataaggaacaaaacgctaaggtggggtagcctaagctggattttctgctggttacacgtgtctcttcacaccacatttcctcaaaggctaatctggaattctgtagggcttaaaaatatttcatgtaggcaaatctggggaattggaaaacttgcaggntaaccnggccggggtatgggtggac

SEQ ID NO: 435836 - DNA, 5419 bp, Homo sapiens
atccggggcagcggggaatggctgagccaggggttcgccgcccccgccgccgccgccgccgccgccgccgccgccgccgcccgctttcggctcgggcctcaggaccgtagcatcctgagacattttgaattgacacttctcaagatttgactggatcagagttcatcatgtcaaagttgaaaagctcagagtcagtcagggtggtggttcgctgtcggcccatgaatggcaaggaaaaggctgcttcgtatgacaaagtggtggatgtggatgttaagctggggcaggtgtctgtgaagaaccccaaagggacggcccatgaaatgcccaagaccttcacctttgatgccgtctatgactggaatgccaagcagtttgaactgtacgatgagacgttccgaccacttgttgactctgtcctgcaaggtttcaatggaaccatttttgcctatggacaaactgggacaggaaaaacctacaccatggaaggaatccgtggtgaccctgaaaaaagaggagtcattcctaactcatttgaccatatcttcacccacatctctcgatcccagaatcaacaatacctggtcagggcttcttacttagagatctaccaggaggagatccgagatttgctctcaaaggatcagaccaaaaggcttgagctcaaagagaggcctgacacaggagtgtatgtgaaagacctgtcttcctttgtcaccaagagtgtgaaggagatagagcatgtgatgaatgtggggaaccagaaccgttctgtcggtgctaccaacatgaacgagcacagctcgcgttctcatgcaattttcgttatcactattgagtgcagcgaggtgggcctcgatggtgaaaaccacatccgtgtaggaaaattgaaccttgtagatcttgctggcagcgaacggcaagccaagaccggcgcacaaggggagagattaaaagaagctaccaagatcaacctctccctttccgctttgggtaatgtcatctctgctctagtggacggcaaaagcactcacattccatatcgggactcaaagcttaccaggctcctccaagattcccttggtggcaatgccaagactgtgatggtggccaacgtggggcctgcctcttacaacgtagaagagactctgaccactctgcgatatgccaaccgtgccaaaaacattaagaacaaaccaagggtcaatgaggaccccaaggatgccctccttcgagaattccaggaagagattgctcggctcaaggcccagctggaaaaacggtccattggtaggaggaagaggcgagagaagcggagggaaggtggtggcagtggtgggggtggggaagaggaggaggaggagggagaagagggtgaggaggaaggggatgataaggatgattactggcgggaacagcaagaaaaactggagattgagaagcgggccattgtagaggatcacagcttggttgcagaggagaagatgaggctgctgaaggagaaagagaaaaagatggaggacctgcggcgggagaaggatgctgccgagatgctgggcgccaagatcaaggccatggagagtaagttgcttgttggaggaaaaaatatagtagatcatacgaatgaacagcagaaaatcctggagcagaaacgacaggaaattgcagagcagaaacgtcgagaaagagaaatccagcaacagatggaaagtcgagatgaggagaccttggaacttaaagagacatacagctcattgcagcaagaggtggacatcaagaccaaaaaactcaaaaagctcttctccaagcttcaggcagtgaaggctgagatccatgacctccaagaagaacacatcaaggagcgccaagagctagagcagactcagaatgagctcaccagggagctgaaactcaagcatcttattatagaaaactttatccctctggaagaaaaaagtaaaattatgaatagagccttctttgatgaagaggaagatcattggaaactacatcctataaccagactggagaaccagcagatgatgaagcggccagtctcagccgtgggatataagagaccattgagccagcacgcaagaatgtccatgatgattcgtccagaggcccgatatagggcagaaaacattgtgctgttagagctggacatgcccagccggaccaccagagactatgagggtccagccattgcccccaaggtccaggctgcattggatgcggctctgcaggatgaagatgagatacaggtggatgcatcatcatttgaaagcactgcaaataagaaatccaaggccaggcctaaaagtggaaggaagtcgggatcctcctcctcttcctcaggaacccctgcatctcagctttatccacagtctcgggggctggttccaaagtaaagccagcttctcctctcccagggcggaaacagcatttgccttctgagagaagagactagcaaaaagctgcagagaggattcggcccaaactcagaactgttcccctgaggagaagcggtggcctctttgcagatcaaccaacttaatctggttgaacgtgctgttcctaatctggcactcagcccctctgggaaacatcttttaattagcatctcagaaatgcatgggtaaggtaaagtgcgatagttcaagtggaaagcaagagaatgaccagtgaccttgcttccttcccccttgccttcttctcccccttcccctgtgctccctttctctcctctctccttttctagcctgttctttacatggggctcccttcttgttgaacaatagggcagaatcaggagtcaccttagcaggaccacatctttggagcctcgggataaaatgacagtgaggttgaaaagtgaaaaccctagaacttgaataggtgcctgttcttgtagggagaaatgagaaatcgcatttggatccaggccccaggtgggcaccatcagcagtcttgcttccatgcacctcagtaagaagtggatctgcctttgggacctgctcagtgaggaaatctcttccaatttctgcttctgaatgattcaatgttgggagcaatagaaataacattccctttgccttctctgagtgtttagggaaatagcttctttaaaacctcaaaaccatgaccatcctgtcaaagacctaagtctgtaagctggtgccatgtccatacaccatgtcactttactcttcatttgtcaccatcttttcccatgcacgcatactctgaacatccttgtgtgggcccatcctctgcatccagagcatgctctgcagtgggcctgttttgtggaagaaaggaggctgtctctgccttctctgatgggactggagttgagggaaggagctgtattgtggcacttctgaattccccgttttgttccatattggtatagagagcagaagagtagctaggcagatgcagagatggagacatgagactcagtgcagtgggcagggaagacataacagatggaagcaaaggaatcctgcctgccttcagcagagaattcaccgaatcctagaactgtggctccctccaggcagagcctaagatgctggtgaagaatagctgtgtgattgaataggctcaaaggagagttcagaattcccatttacatattactagtttggtttgtaagttttagttccttgtattattgagattcagagcttcattttatgttggtcattaggtgaatattactcattttccctcaagagaagctcataagtgtgtgtgggtgtgagagcacgatggtgcctgtgttctgtgaatgtgtccatatgtgtctgtaagagagacagagaccaagaacttgcccaattttagaaatacactaatgtgcagttgttgccttttgtctgtattgaaggcccattgaatgactaatccaggctggaagcattcccatgtgggtgtctgagtccatgagccaagcctgaggggacagtgagtctccaggtctgccacactggtgcaccttgctggcacggtgcctcaggaaggtggcgactcaggtgggccttgagttatattttaactcagctgctcagttcccagggcacatttctggatcagaacccatgggaaacaggaggtactaagtgcaatgtcttagcattctgcaaaatggagatctgttgtccagcggcttatctcctttttagtaacccttctttctgaacccagggcccttttcagccttccctcatattttcttgagatcaaactttacttctttcttatttactaagaatttgcctgtttgaataagaacaaaacgctaaggtgggtagcctaagctgattttctgctggttacacgtgtctctcacaccacatttcctcaaagctaatctgaattctgtaggctaaaaatattcatgtagcaaatctgagaattgaaaactgcagataaccggccgggtatggtgactcatgcctgtaatcctagcactttgggaggccgaggtgggtggaccacctgaggttaggacttcaagaccagcctggccaacatggtgaaaccccatctgtactaaaaatacaaaaatttgcctggtgtggtggtgcatgcctctagtcctagctactcgggaggctgaggcacgagaatcacttgaacctgggaggcggaggttgcagtgagtcgagataacactactgcattccagcctgggtgacagagtgagactccacctcaaaaaaaaaaaaaaaaaaaaaaaaaacagaaagaaagaaaaagaaaactgcagataaccctatacattaatactggtatctcgaggtgactcttctgaccaagggtggttaagtgacacatagaacttttctaagagaagacagacaagttgacaggcatgccttgtactcagctgtgttcatgtggtggtctgtggaaagaaaagaagactcatttggaaatgaagctgtccctttccaagcagtctctggtgcttttcttctctcaaaatggatccgataaatatttgaatagagcagattgtagaatgtcgtgctgtcaccagaaagctgctgttttgggttctgcattgagccaaatatgtagaggacctaccaagcccactgagggactaggttttcatgtctctagtcatacctagaatgttctgagccgtctgagggccttcatgccggcagcagctagcaaagccagaaagcaagtctaacaggatctaagatgaccatcaggagaaggagtttgagactgtgtatgcaacccccaatagacccccttttactctgatctggagaatgtatctggcttcatattttcaagtcacatgtctctcagacccctggattcagaacccaaggccacaaatcataggcatgaagcctcgacatgaagggatcctctagagtcgatcacaggc

SEQ ID NO: 435837 - DNA, 5571 bp, Homo sapiens
atccggggcagcggggaatggctgagccaggggttcgccgcccccgccgccgccgccgccgccgccgccgccgccgccgcccgctttcggctcgggcctcaggaccgtagcatcctgagacattttgaattgacacttctcaagatttgactggatcagagttcatcatgtcaaagttgaaaagctcagagtcagtcagggtggtggttcgctgtcggcccatgaatggcaaggaaaaggctgcttcgtatgacaaagtggtggatgtggatgttaagctggggcaggtgtctgtgaagaaccccaaagggacggcccatgaaatgcccaagaccttcacctttgatgccgtctatgactggaatgccaagcagtttgaactgtacgatgagacgttccgaccacttgttgactctgtcctgcaaggtttcaatggaaccatttttgcctatggacaaactgggacaggaaaaacctacaccatggaaggaatccgtggtgaccctgaaaaaagaggagtcattcctaactcatttgaccatatcttcacccacatctctcgatcccagaatcaacaatacctggtcagggcttcttacttagagatctaccaggaggagatccgagatttgctctcaaaggatcagaccaaaaggcttgagctcaaagagaggcctgacacaggagtgtatgtgaaagacctgtcttcctttgtcaccaagagtgtgaaggagatagagcatgtgatgaatgtggggaaccagaaccgttctgtcggtgctaccaacatgaacgagcacagctcgcgttctcatgcaattttcgttatcactattgagtgcagcgaggtgggcctcgatggtgaaaaccacatccgtgtaggaaaattgaaccttgtagatcttgctggcagcgaacggcaagccaagaccggcgcacaaggggagagattaaaagaagctaccaagatcaacctctccctttccgctttgggtaatgtcatctctgctctagtggacggcaaaagcactcacattccatatcgggactcaaagcttaccaggctcctccaagattcccttggtggcaatgccaagactgtgatggtggccaacgtggggcctgcctcttacaacgtagaagagactctgaccactctgcgatatgccaaccgtgccaaaaacattaagaacaaaccaagggtcaatgaggaccccaaggatgccctccttcgagaattccaggaagagattgctcggctcaaggcccagctggaaaaacggtccattggtaggaggaagaggcgagagaagcggagggaaggtggtggcagtggtgggggtggggaagaggaggaggaggagggagaagagggtgaggaggaaggggatgataaggatgattactggcgggaacagcaagaaaaactggagattgagaagcgggccattgtagaggatcacagcttggttgcagaggagaagatgaggctgctgaaggagaaagagaaaaagatggaggacctgcggcgggagaaggatgctgccgagatgctgggcgccaagatcaaggccatggagagtaagttgcttgttggaggaaaaaatatagtagatcatacgaatgaacagcagaaaatcctggagcagaaacgacaggaaattgcagagcagaaacgtcgagaaagagaaatccagcaacagatggaaagtcgagatgaggagaccttggaacttaaagagacatacagctcattgcagcaagaggtggacatcaagaccaaaaaactcaaaaagctcttctccaagcttcaggcagtgaaggctgagatccatgacctccaagaagaacacatcaaggagcgccaagagctagagcagactcagaatgagctcaccagggagctgaaactcaagcatcttattatagaaaactttatccctctggaagaaaaaagtaaaattatgaatagagccttctttgatgaagaggaagatcattggaaactacatcctataaccagactggagaaccagcagatgatgaagcggccagtctcagccgtgggatataagagaccattgagccagcacgcaagaatgtccatgatgattcgtccagaggcccgatatagggcagaaaacattgtgctgttagagctggacatgcccagccggaccaccagagactatgagggtccagccattgcccccaaggtccaggctgcattggatgcggctctgcaggatgaagatgagatacaggtggatgcatcatcatttgaaagcactgcaaataagaaatccaaggccaggcctaaaagtggaaggaagtcgggatcctcctcctcttcctcaggaacccctgcatctcagctttatccacagtctcgggggctggttccaaagtaaagccagcttctcctctcccagggcggaaacagcatttgccttctgagagaagagactagcaaaaagctgcagagaggattcggcccaaactcagaactgttcccctgaggagaagcggtggcctctttgcagatcaaccaacttaatctggttgaacgtgctgttcctaatctggcactcagcccctctgggaaacatcttttaattagcatctcagaaatgcatgggtaaggtaaagtgcgatagttcaagtggaaagcaagagaatgaccagtgaccttgcttccttcccccttgccttcttctcccccttcccctgtgctccctttctctcctctctccttttctagcctgttctttacatggggctcccttcttgttgaacaatagggcagaatcaggagtcaccttagcaggaccacatctttggagcctcgggataaaatgacagtgaggttgaaaagtgaaaaccctagaacttgaataggtgcctgttcttgtagggagaaatgagaaatcgcatttggatccaggccccaggtgggcaccatcagcagtcttgcttccatgcacctcagtaagaagtggatctgcctttgggacctgctcagtgaggaaatctcttccaatttctgcttctgaatgattcaatgttgggagcaatagaaataacattccctttgccttctctgagtgtttagggaaatagcttctttaaaacctcaaaaccatgaccatcctgtcaaagacctaagtctgtaagctggtgccatgtccatacaccatgtcactttactcttcatttgtcaccatcttttcccatgcacgcatactctgaacatccttgtgtgggcccatcctctgcatccagagcatgctctgcagtgggcctgttttgtggaagaaaggaggctgtctctgccttctctgatgggactggagttgagggaaggagctgtattgtggcacttctgaattccccgttttgttccatattggtatagagagcagaagagtagctaggcagatgcagagatggagacatgagactcagtgcagtgggcagggaagacataacagatggaagcaaaggaatcctgcctgccttcagcagagaattcaccgaatcctagaactgtggctccctccaggcagagcctaagatgctggtgaagaatagctgtgtgattgaataggctcaaaggagagttcagaattcccatttacatattactagtttggtttgtaagttttagttccttgtattattgagattcagagcttcattttatgttggtcattaggtgaatattactcattttccctcaagagaagctcataagtgtgtgtgggtgtgagagcacgatggtgcctgtgttctgtgaatgtgtccatatgtgtctgtaagagagacagagaccaagaacttgcccaattttagaaatacactaatgtgcagttgttgccttttgtctgtattgaaggcccattgaatgactaatccaggctggaagcattcccatgtgggtgtctgagtccatgagccaagcctgaggggacagtgagtctccaggtctgccacactggtgcaccttgctggcacggtgcctcaggaaggtggcgactcaggtgggccttgagttatattttaactcagctgctcagttcccagggcacatttctggatcagaacccatgggaaacaggaggtactaagtgcaatgtcttagcattctgcaaaatggagatctgttgtccagcggcttatctcctttttagtaacccttctttctgaacccagggcccttttcagccttccctcatattttcttgagatcaaactttacttctttcttatttactaagaatttgcctgtttgaataagaacaaaacgctaaggtgggtagcctaagctgattttctgctggttacacgtgtctctcacaccacatttcctcaaagctaatctgaattctgtaggctaaaaatattcatgtagcaaatctgagaattgaaaactgcagataaccggccgggtatggtgactcatgcctgtaatcctagcactttgggaggccgaggtgggtggaccacctgaggttaggacttcaagaccagcctggccaacatggtgaaaccccatctgtactaaaaatacaaaaatttgcctggtgtggtggtgcatgcctctagtcctagctactcgggaggctgaggcacgagaatcacttgaacctgggaggcggaggttgcagtgagtcgagataacactactgcattccagcctgggtgacagagtgagactccacctcaaaaaaaaaaaaaaaaaaaaaaaaaacagaaagaaagaaaaagaaaactgcagataaccctatacattaatactggtatctcgaggtgactcttctgaccaagggtggttaagtgacacatagaacttttctaagagaagacagacaagttgacaggcatgccttgtactcagctgtgttcatgtggtggtctgtggaaagaaaagaagactcatttggaaatgaagctgtccctttccaagcagtctctggtgcttttcttctctcaaaatggatccgataaatatttgaatagagcagattgtagaatgtcgtgctgtcaccagaaagctgctgttttgggttctgcattgagccaaatatgtagaggacctaccaagcccactgagggactaggttttcatgtctctagtcatacctagaatgttctgagccgtctgagggccttcatgccggcagcagctagcaaagccagaaagcaagtctaacaggatctaagatgaccatcaggagaaggagtttgagactgtgtatgcaacccccaatagacccccttttactctgatctggagaatgtatctggcttcatattttcaagtcacatgtctctcagacccctggattcagaacccaaggccacaaatcataggcatgaagagcgctggatatgaattcatgtcggagctttcatcccccagttttacagatgagggaatagaggtttagggacatagagtttgttttatcatcaattcagtggtaccttcctcacatgttagttctaagaagctacacttggcagcagaggccacatttgctgaggaaaggcatgaagccctgacatgaa

SEQ ID NO: 435838 - DNA, 6045 bp, Homo sapiens
atccggggcagcggggaatggctgagccaggggttcgccgcccccgccgccgccgccgccgccgccgccgccgccgccgcccgctttcggctcgggcctcaggaccgtagcatcctgagacattttgaattgacacttctcaagatttgactggatcagagttcatcatgtcaaagttgaaaagctcagagtcagtcagggtggtggttcgctgtcggcccatgaatggcaaggaaaaggctgcttcgtatgacaaagtggtggatgtggatgttaagctggggcaggtgtctgtgaagaaccccaaagggacggcccatgaaatgcccaagaccttcacctttgatgccgtctatgactggaatgccaagcagtttgaactgtacgatgagacgttccgaccacttgttgactctgtcctgcaaggtttcaatggaaccatttttgcctatggacaaactgggacaggaaaaacctacaccatggaaggaatccgtggtgaccctgaaaaaagaggagtcattcctaactcatttgaccatatcttcacccacatctctcgatcccagaatcaacaatacctggtcagggcttcttacttagagatctaccaggaggagatccgagatttgctctcaaaggatcagaccaaaaggcttgagctcaaagagaggcctgacacaggagtgtatgtgaaagacctgtcttcctttgtcaccaagagtgtgaaggagatagagcatgtgatgaatgtggggaaccagaaccgttctgtcggtgctaccaacatgaacgagcacagctcgcgttctcatgcaattttcgttatcactattgagtgcagcgaggtgggcctcgatggtgaaaaccacatccgtgtaggaaaattgaaccttgtagatcttgctggcagcgaacggcaagccaagaccggcgcacaaggggagagattaaaagaagctaccaagatcaacctctccctttccgctttgggtaatgtcatctctgctctagtggacggcaaaagcactcacattccatatcgggactcaaagcttaccaggctcctccaagattcccttggtggcaatgccaagactgtgatggtggccaacgtggggcctgcctcttacaacgtagaagagactctgaccactctgcgatatgccaaccgtgccaaaaacattaagaacaaaccaagggtcaatgaggaccccaaggatgccctccttcgagaattccaggaagagattgctcggctcaaggcccagctggaaaaacggtccattggtaggaggaagaggcgagagaagcggagggaaggtggtggcagtggtgggggtggggaagaggaggaggaggagggagaagagggtgaggaggaaggggatgataaggatgattactggcgggaacagcaagaaaaactggagattgagaagcgggccattgtagaggatcacagcttggttgcagaggagaagatgaggctgctgaaggagaaagagaaaaagatggaggacctgcggcgggagaaggatgctgccgagatgctgggcgccaagatcaaggccatggagagtaagttgcttgttggaggaaaaaatatagtagatcatacgaatgaacagcagaaaatcctggagcagaaacgacaggaaattgcagagcagaaacgtcgagaaagagaaatccagcaacagatggaaagtcgagatgaggagaccttggaacttaaagagacatacagctcattgcagcaagaggtggacatcaagaccaaaaaactcaaaaagctcttctccaagcttcaggcagtgaaggctgagatccatgacctccaagaagaacacatcaaggagcgccaagagctagagcagactcagaatgagctcaccagggagctgaaactcaagcatcttattatagaaaactttatccctctggaagaaaaaagtaaaattatgaatagagccttctttgatgaagaggaagatcattggaaactacatcctataaccagactggagaaccagcagatgatgaagcggccagtctcagccgtgggatataagagaccattgagccagcacgcaagaatgtccatgatgattcgtccagaggcccgatatagggcagaaaacattgtgctgttagagctggacatgcccagccggaccaccagagactatgagggtccagccattgcccccaaggtccaggctgcattggatgcggctctgcaggatgaagatgagatacaggtggatgcatcatcatttgaaagcactgcaaataagaaatccaaggccaggcctaaaagtggaaggaagtcgggatcctcctcctcttcctcaggaacccctgcatctcagctttatccacagtctcgggggctggttccaaagtaaagccagcttctcctctcccagggcggaaacagcatttgccttctgagagaagagactagcaaaaagctgcagagaggattcggcccaaactcagaactgttcccctgaggagaagcggtggcctctttgcagatcaaccaacttaatctggttgaacgtgctgttcctaatctggcactcagcccctctgggaaacatcttttaattagcatctcagaaatgcatgggtaaggtaaagtgcgatagttcaagtggaaagcaagagaatgaccagtgaccttgcttccttcccccttgccttcttctcccccttcccctgtgctccctttctctcctctctccttttctagcctgttctttacatggggctcccttcttgttgaacaatagggcagaatcaggagtcaccttagcaggaccacatctttggagcctcgggataaaatgacagtgaggttgaaaagtgaaaaccctagaacttgaataggtgcctgttcttgtagggagaaatgagaaatcgcatttggatccaggccccaggtgggcaccatcagcagtcttgcttccatgcacctcagtaagaagtggatctgcctttgggacctgctcagtgaggaaatctcttccaatttctgcttctgaatgattcaatgttgggagcaatagaaataacattccctttgccttctctgagtgtttagggaaatagcttcatgtccatacaccatgtcactttactcttcatttgtcaccatcttttcccatgcacgcatactctgaacatccttgtgtgggcccatcctctgcatccagagcatgctctgcagtgggcctgttttgtggaagaaaggaggctgtctctgccttctctgatgggactggagttgagggaaggagctgtattgtggcacttctgaattccccgttttgttccatattggtatagagagcagaagagtagctaggcagatgcagagatggagacatgagactcagtgcagtgggcagggaagacataacagatggaagcaaaggaatcctgcctgccttcagcagagaattcaccgaatcctagaactgtggctccctccaggcagagcctaagatgctggtgaagaatagctgtgtgattgaataggctcaaaggagagttcagaattcccatttacatattactagtttggtttgtaagttttagttccttgtattattgagattcagagcttcattttatgttggtcattaggtgaatattactcattttccctcaagagaagctcataagtgtgtgtgggtgtgagagcacgatggtgcctgtgttctgtgaatgtgtccatatgtgtctgtaagagagacagagaccaagaacttgcccaattttagaaatacactaatgtgcagttgttgccttttgtctgtattgaaggcccattgaatgactaatccaggctggaagcattcccatgtgggtgtctgagtccatgagccaagcctgaggggacagtgagtctccaggtctgccacactggtgcaccttgctggcacggtgcctcaggaaggtggcgactcaggtgggccttgagttatattttaactcagctgctcagttcccagggcacatttctggatcagaacccatgggaaacaggaggtactaagtgcaatgtcttagcattctgcaaaatggagatctgttgtccagcggcttatctcctttttagtaacccttctttctgaacccagggcccttttcagccttccctcatattttcttgagatcaaactttacttctttcttatttactaagaatttgcctgtttgaataagaacaaaacgctaaggtgggtagcctaagctgattttctgctggttacacgtgtctctcacaccacatttcctcaaagctaatctgaattctgtaggctaaaaatattcatgtagcaaatctgagaattgaaaactgcagataaccggccgggtatggtgactcatgcctgtaatcctagcactttgggaggccgaggtgggtggaccacctgaggttaggacttcaagaccagcctggccaacatggtgaaaccccatctgtactaaaaatacaaaaatttgcctggtgtggtggtgcatgcctctagtcctagctactcgggaggctgaggcacgagaatcacttgaacctgggaggcggaggttgcagtgagtcgagataacactactgcattccagcctgggtgacagagtgagactccacctcaaaaaaaaaaaaaaaaaaaaaaaaaacagaaagaaagaaaaagaaaactgcagataaccctatacattaatactggtatctcgaggtgactcttctgaccaagggtggttaagtgacacatagaacttttctaagagaagacagacaagttgacaggcatgccttgtactcagctgtgttcatgtggtggtctgtggaaagaaaagaagactcatttggaaatgaagctgtccctttccaagcagtctctggtgcttttcttctctcaaaatggatccgataaatatttgaatagagcagattgtagaatgtcgtgctgtcaccagaaagctgctgttttgggttctgcattgagccaaatatgtagaggacctaccaagcccactgagggactaggttttcatgtctctagtcatacctagaatgttctgagccgtctgagggccttcatgccggcagcagctagcaaagccagaaagcaagtctaacaggatctaagatgaccatcaggagaaggagtttgagactgtgtatgcaacccccaatagacccccttttactctgatctggagaatgtatctggcttcatattttcaagtcacatgtctctcagacccctggattcagaacccaaggccacaaatcataggcatgaagcactttcttaagactgacctaacgctggattatttcccgtccaatgcctgcatgctgcttgaattgctccacccacacctccatgaccaagggcgccagagtgctgcaactggggcgtgggccgctctctgcttttcctgtctgactctgacaagtcctccctcactgaatgtagaatcgttgccaagtttctgagaagtgtcgattccctgttaacatggatatcagttctgcctcacatttcccacttgaggttgaggcgtactggagacaacacctcagaccatctgaaccccatcagtggacgaaaatggggctgttaatatactctaaaagccatactaaaaatgctctgagggaactggctaagaatagtgggcctggtgattgtctatcacgcaaggctttgttttgtactgttcagaaatctgtcacctttctgcctgcccttgtttcctgaatgaaatgcttctggggttatttatgaaaggagtgatcctggggcaggcaggaggcagtgggcttcatggctccttgaagttattactgatcttgaccttctctttggctacctttagacaaagaatacgccaatcaatacttggggctctaagttttacaattgatatttatttgtatcatctctttgtctaggaatgtaaaagtgattctaaactaagatgtgtaataaaaatcaatcagatttattgtacctacaaaaa

SEQ ID NO: 435839 - DNA, 1318 bp, Homo sapiens
  misc_feature (102)..(102): n is a, c, g, or t
tgccttatcatcttcagcacccctgagccctctgaagaagggattaagatggtccttggctttcagattaagtgataagtgcagattgataaaataatgatnagggtcaaacattcagacatttttatctgtaagatttttttcaggttgctaataaaaattcagaggggactgacaataaacacagaatttccttttcttctctcaaaatggatccgataaatatttgaatagagcagattgtagaatgtcgtgctgtcaccagaaagctgctgttttgggttctgcattgagccaaatatgtagaggacctaccaagcccactgagggactaggttttcatgtctctagtcatacctagaatgttctgagccgtctgagggccttcatgccggcagcagctagcaaagccagaaagcaagtctaacaggatctaagatgaccatcaggagaaggagtttgagactgtgtatgcaacccccaatagacccccttttactctgatctggagaatgtatctggcttcatattttcaagtcacatgtctctcagacccctggattcagaacccaaggccacaaatcataggcatgaagcactttcttaagactgacctaacgctggattatttcccgtccaatgcctgcatgctgcttgaattgctccacccacacctccatgaccaagggcgccagagtgctgcaactggggcgtgggccgctctctgcttttcctgtctgactctgacaagtcctccctcactgaatgtagaatcgttgccaagtttctgagaagtgtcgattccctgttaacatggatatcagttctgcctcacatttcccacttgaggttgaggcgtactggagacaacacctcagaccatctgaaccccatcagtggacgaaaatggggctgttaatatactctaaaagccatactaaaaatgctctgagggaactggctaagaatagtgggcctggtgattgtctatcacgcaaggctttgttttgtactgttcagaaatctgtcacctttctgcctgcccttgtttcctgaatgaaatgcttctggggttatttatgaaaggagtgatcctggggcaggcaggaggcagtgggcttcatggctccttgaagttattactgatcttgaccttctctttggctacctttagacaaagaatacgccaatcaatacttggggctctaagttttacaattgatatttatttgtatcatctctttgtctaggaatgtaaaagtgattctaaactaagatgtgtaataaaaatcaatcagatttattgtacctacaaaaa

SEQ ID NO: 435840 - DNA, 1213 bp, Homo sapiens
cttatctagaggatcccgtgtatgcaacccccaatagacccccttttactcttcagccaaaaacacatatagctgctaatggcaattctgattcatctagagccaaaaacttgatgtgatttagcctgcattgtgcctagttctgggcaggcttgtcaacatttggaaataggaaagctggtgtatccattgaggaccctttaggcctaagagcccagtctgagaaccctggaatggaggagtggcatgaaagcactggacatgaattcatgtcgaggccttcatgccggcagcagctagcaaagccagaaagcaagtctaacaggatctaagatgaccatcaggagaaggagtttgagactgtgtatgcaacccccaatagacccccttttactctgatctggagaatgtatctggcttcatattttcaagtcacatgtctctcagacccctggattcagaacccaaggccacaaatcataggcatgaagcactttcttaagactgacctaacgctggattatttcccgtccaatgcctgcatgctgcttgaattgctccacccacacctccatgaccaagggcgccagagtgctgcaactggggcgtgggccgctctctgcttttcctgtctgactctgacaagtcctccctcactgaatgtagaatcgttgccaagtttctgagaagtgtcgattccctgttaacatggatatcagttctgcctcacatttcccacttgaggttgaggcgtactggagacaacacctcagaccatctgaaccccatcagtggacgaaaatggggctgttaatatactctaaaagccatactaaaaatgctctgagggaactggctaagaatagtgggcctggtgattgtctatcacgcaaggctttgttttgtactgttcagaaatctgtcacctttctgcctgcccttgtttcctgaatgaaatgcttctggggttatttatgaaaggagtgatcctggggcaggcaggaggcagtgggcttcatggctccttgaagttattactgatcttgaccttctctttggctacctttagacaaagaatacgccaatcaatacttggggctctaagttttacaattgatatttatttgtatcatctctttgtctaggaatgtaaaagtgattctaaactaagatgtgtaataaaaatcaatcagatttattgtacctacaaaaa

SEQ ID NO: 435841 - DNA, 974 bp, Homo sapiens
  misc_feature (36)..(36): n is a, c, g, or t
cgagctcggtacccttcatatccgcccttcatgtcnaggccttcatgccggcagcagctagcaaagccagaaagcaagtctaacaggatctaagatgaccatcaggagaaggagtttgagactgtgtatgcaacccccaatagacccccttttactctgatctggagaatgtatctggcttcatattttcaagtcacatgtctctcagacccctggattcagaacccaaggccacaaatcataggcatgaagcactttcttaagactgacctaacgctggattatttcccgtccaatgcctgcatgctgcttgaattgctccacccacacctccatgaccaagggcgccagagtgctgcaactggggcgtgggccgctctctgcttttcctgtctgactctgacaagtcctccctcactgaatgtagaatcgttgccaagtttctgagaagtgtcgattccctgttaacatggatatcagttctgcctcacatttcccacttgaggttgaggcgtactggagacaacacctcagaccatctgaaccccatcagtggacgaaaatggggctgttaatatactctaaaagccatactaaaaatgctctgagggaactggctaagaatagtgggcctggtgattgtctatcacgcaaggctttgttttgtactgttcagaaatctgtcacctttctgcctgcccttgtttcctgaatgaaatgcttctggggttatttatgaaaggagtgatcctggggcaggcaggaggcagtgggcttcatggctccttgaagttattactgatcttgaccttctctttggctacctttagacaaagaatacgccaatcaatacttggggctctaagttttacaattgatatttatttgtatcatctctttgtctaggaatgtaaaagtgattctaaactaagatgtgtaataaaaatcaatcagatttattgtacctacaaaaa

SEQ ID NO: 435842 - DNA, 307 bp, Homo sapiens
ggaggaaggggatgataaggatgattactggcgggaacagcaagaaaaactggagattgagaagcgggccattgtagaggatcacagcttggttgcagaggagaagatgaggctgctgaaggagaaagagaaaaagatggaggacctgcggcgggagaaggatgctgccgagatgctgggcgccaagatcaaggtaccatacccgtacccttccttaggcccttgccctgtcactgcttttgctttcatcaaacaacaacaaaaaacataaccatatgagggatgatgtctctcatcagttttggat

SEQ ID NO: 435843 - DNA, 1215 bp, Homo sapiens
agagacttgggttttgctccctaggagccctggaatagctttggccagaattccctatctcccattagaacctctcctttgcgtcctttgttaacctccaagtctacttggtgaaaacgcccacgaagaagtaacaaggactttgttcctagtgtgccaggtttgggcaccagtgctgtagtggctttctctgctgctccttgtgcatcagcagacagatgtggttcacataggaagaaagactaacgtaggcaaagatttgctctttcttcagcagccctagaaagacggcggcctgggtgattcaccactccttcctcacgtccttgattttatttgaactgagctccagatgctcctcccacccttttcctcttggaagccaaacccctttgtaatctgtataaggtccacaccccgggagctgagtgattgcagaaactggccttccatctctctcagacaccaagctgcagatccaggcttttctgggaaagtgaggccaccatggctctggagaagtctcttgtccggctccttctgcttgtcctgatactgctggtgctgggctgggtccagccttccctgggcaaggaatcccgggccaagaaattccagcggcagcatatggactcagacagttcccccagcagcagctccacctactgtaaccaaatgatgaggcgccggaatatgacacaggggcggtgcaaaccagtgaacacctttgtgcacgagcccctggtagatgtccagaatgtctgtttccaggaaaaggtcacctgcaagaacgggcagggcaactgctacaagagcaactccagcatgcacatcacagactgccgcctgacaaacggctccaggtaccccaactgtgcataccggaccagcccgaaggagagacacatcattgtggcctgtgaagggagcccatatgtgccagtccactttgatgcttctgtggaggactctacctaaggtcagagcagcgagataccccacctccctcaacctcatcctctccacagctgcctcttccctcttccttccctgctgtgaaagaagtaactacagttagggctcctattcaacacacacatgcttccctttcctgagtcccatccctgcgtgattttgggggtgaagagtgggttgtgaggtgggccccatgttaacccctccactctttctttcaataaaacgcagttgcaaaca

SEQ ID NO: 435844 - DNA, 314 bp, Homo sapiens
atccgaattcggtccaaccggatgggagcccatatgtgccagtccactttgatgcttctgtggaggactctacctaaggtcagagcagcgagataccccacctccctcaacctcatcctctccacagctgcctcttccctcttccttccctgctgtgaaagaagtaactacagttagggctcctattcaacacacacatgcttccctttcctgagtcccatccctgcgtgattttgggggtgaagagtgggttgtgaggtgggccccatgttaacccctccactctttctttcaataaaacgcagttgcaaaca

SEQ ID NO: 435845 - DNA, 1704 bp, Homo sapiens
gaattccgggtttgaaaaggagttctagggaagaagagagttagttagcacatcaatgggagcagggctcttaccccacgtggtgttacatatatattattttcatacatggtttctggctcataagttccttagcccttgctatagtcttttgtgttcggtcttaagggcaggactgtactcttccctcacctttctaattgtgcatcttaagaccttccccagagagggtggtgccctgtagttgtgggaaggaatgctggcatcatgaagcttccataaaaacccgagaaacgagcttctggatagctggacacatggaggtcctggagggtggagcccagggaggcatggaagctccacagcccttcccccataccttaccctatttcctctgtatcctttgtaatatcctttatgataaaccagcaaatgtgtgtaaatgtttccctaaggtctgtggccactccagcaaattaattgaacctaaagagggggtcgtgggaaccccaacttgaagccagtcagtcagaagttctggatgtccagacttcagactggtgtctgaaagggtggaggcagtcttggggaccgagcccccaatctatgggatctgacactatctccagtagtgttggaattgagtcaccagcgtgtccactggttagtgtgtgagaaactccctaccattggtcacagaagtcttcttctgtgttgatagttgtagtgtgacagcagaggaaaaacaaagtcagaaagagttttcccgaacacacccaatttctccattttactatccatttccacaaacactgactacaatagaagtataaaaattactccactgcatcattcagctttccatctctctcagacaccaagctgcagatccagttgtaggtcaccacctagaggggaggaagacctcgctttggagagtgggaataaaacgctcgtggaaaagggtacacgcttttctgggaaagtgaggccaccatggctctggagaagtctcttgtccggctccttctgcttgtcctgatactgctggtgctgggctgggtccagccttccctgggcaaggaatcccgggccaagaaattccagcggcagcatatggactcagacagttcccccagcagcagctccacctactgtaaccaaatgatgaggcgccggaatatgacacaggggcggtgcaaaccagtgaacacctttgtgcacgagcccctggtagatgtccagaatgtctgtttccaggaaaaggtcacctgcaagaacgggcagggcaactgctacaagagcaactccagcatgcacatcacagactgccgcctgacaaacggctccaggtaccccaactgtgcataccggaccagcccgaaggagagacacatcattgtggcctgtgaagggagcccatatgtgccagtccactttgatgcttctgtggaggactctacctaaggtcagagcagcgagataccccacctccctcaacctcatcctctccacagctgcctcttccctcttccttccctgctgtgaaagaagtaactacagttagggctcctattcaacacacacatgcttccctttcctgagtcccatccctgcgtgattttgggggtgaagagtgggttgtgaggtgggccccatgttaacccctccactctttctttcaataaaacgcagttgcaaaca

SEQ ID NO: 435846 - DNA, 893 bp, Homo sapiens
atttgagcactgggtacaaatgtattttggatcaaagaaactccagtattcaaagataggaactgacaggattttaggtcactttgtaggtcaccacctagaggggaggaagacctcgctttggagagtgggaataaaacgctcgtggaaaagggtacacgcttttctgggaaagtgaggccaccatggctctggagaagtctcttgtccggctccttctgcttgtcctgatactgctggtgctgggctgggtccagccttccctgggcaaggaatcccgggccaagaaattccagcggcagcatatggactcagacagttcccccagcagcagctccacctactgtaaccaaatgatgaggcgccggaatatgacacaggggcggtgcaaaccagtgaacacctttgtgcacgagcccctggtagatgtccagaatgtctgtttccaggaaaaggtcacctgcaagaacgggcagggcaactgctacaagagcaactccagcatgcacatcacagactgccgcctgacaaacggctccaggtaccccaactgtgcataccggaccagcccgaaggagagacacatcattgtggcctgtgaagggagcccatatgtgccagtccactttgatgcttctgtggaggactctacctaaggtcagagcagcgagataccccacctccctcaacctcatcctctccacagctgcctcttccctcttccttccctgctgtgaaagaagtaactacagttagggctcctattcaacacacacatgcttccctttcctgagtcccatccctgcgtgattttgggggtgaagagtgggttgtgaggtgggccccatgttaacccctccactctttctttcaataaaacgcagttgcaaaca

SEQ ID NO: 435847 - DNA, 1449 bp, Homo sapiens
agagacttgggttttgctccctaggagccctggaatagctttggccagaattccctatctcccattagaacctctcctttgcgtcctttgttaacctccaagtctacttggtgaaaacgcccacgaagaagtaacaaggactttgttcctagtgtgccaggtttgggcaccagtgctgtagtggctttctctgctgctccttgtgcatcagcagacagatgtggttcacataggaagaaagactaacgtaggcaaagatttgctctttcttcagcagccctagaaagacggcggcctgggtgattcaccactccttcctcacgtccttgattttatttgaactgagctccagatgctcctcccacccttttcctcttggaagccaaacccctttgtaatctgtataaggtccacaccccgggagctgagtgattgcagaaactggccttccatctctctcagacaccaagctgcagatccagttgtaggtcaccacctagaggggaggaagacctcgctttggagagtgggaataaaacgctcgtggaaaagggtacacacgtgagtgtctcattacacgaaaaacctcaggaagtaggatggacgtctttctggctgacctgaaacagaaagtgtaaaccaggcaagccataggtgggagctggagttctttttctaagagggctcttttccttctctctccttttctcaattaggcttttctgggaaagtgaggccaccatggctctggagaagtctcttgtccggctccttctgcttgtcctgatactgctggtgctgggctgggtccagccttccctgggcaaggaatcccgggccaagaaattccagcggcagcatatggactcagacagttcccccagcagcagctccacctactgtaaccaaatgatgaggcgccggaatatgacacaggggcggtgcaaaccagtgaacacctttgtgcacgagcccctggtagatgtccagaatgtctgtttccaggaaaaggtcacctgcaagaacgggcagggcaactgctacaagagcaactccagcatgcacatcacagactgccgcctgacaaacggctccaggtaccccaactgtgcataccggaccagcccgaaggagagacacatcattgtggcctgtgaagggagcccatatgtgccagtccactttgatgcttctgtggaggactctacctaaggtcagagcagcgagataccccacctccctcaacctcatcctctccacagctgcctcttccctcttccttccctgctgtgaaagaagtaactacagttagggctcctattcaacacacacatgcttccctttcctgagtcccatccctgcgtgattttgggggtgaagagtgggttgtgaggtgggccccatgttaacccctccactctttctttcaataaaacgcagttgcaaaca

SEQ ID NO: 435848 - DNA, 768 bp, Homo sapiens
  misc_feature (27)..(27): n is a, c, g, or t
gaccggcccctggttcgctcgggttangggtacacgcttttctgggaaagtgaggccaccatggctctggagaagtctcttgtccggctccttctgcttgtcctgatactgctggtgctgggctgggtccagccttccctgggcaaggaatcccgggccaagaaattccagcggcagcatatggactcagacagttcccccagcagcagctccacctactgtaaccaaatgatgaggcgccggaatatgacacaggggcggtgcaaaccagtgaacacctttgtgcacgagcccctggtagatgtccagaatgtctgtttccaggaaaaggtcacctgcaagaacgggcagggcaactgctacaagagcaactccagcatgcacatcacagactgccgcctgacaaacggctccaggtaccccaactgtgcataccggaccagcccgaaggagagacacatcattgtggcctgtgaagggagcccatatgtgccagtccactttgatgcttctgtggaggactctacctaaggtcagagcagcgagataccccacctccctcaacctcatcctctccacagctgcctcttccctcttccttccctgctgtgaaagaagtaactacagttagggctcctattcaacacacacatgcttccctttcctgagtcccatccctgcgtgattttgggggtgaagagtgggttgtgaggtgggccccatgttaacccctccactctttctttcaataaaacgcagttgcaaaca

SEQ ID NO: 435849 - DNA, 1352 bp, Homo sapiens
agagacttgggttttgctccctaggagccctggaatagctttggccagaattccctatctcccattagaacctctcctttgcgtcctttgttaacctccaagtctacttggtgaaaacgcccacgaagaagtaacaaggactttgttcctagtgtgccaggtttgggcaccagtgctgtagtggctttctctgctgctccttgtgcatcagcagacagatgtggttcacataggaagaaagactaacgtaggcaaagatttgctctttcttcagcagccctagaaagacggcggcctgggtgattcaccactccttcctcacgtccttgattttatttgaactgagctccagatgctcctcccacccttttcctcttggaagccaaacccctttgtaatctgtataaggtccacaccccgggagctgagtgattgcagaaactggccttccatctctctcagacaccaagctgcagatccaggcttttctgggaaagtgaggccaccatggctctggagaagtctcttgtccggctccttctgcttgtcctgatactgctggtgctgggctgggtccagccttccctgggcaaggaatcccgggccaagaaattccagcggcagcatatggactcagacagttcccccagcagcagctccacctactgtaaccaaatgatgaggcgccggaatatgacacaggggcggtgcaaaccagtgaacacctttgtgcacgagcccctggtagatgtccagaatgtctgtttccaggaaaaggtcacctgcaagaacgggcagggcaactgctacaagagcaactccagcatgcacatcacagactgccgcctgacaaacggctccaggtaccccaactgtgcataccggaccagcccgaaggagagacacatcattgtggcctgtgaagggagcccatatgtgccagtccactttgatgcttctgtggaggactctacctaaggtcagagcagcgagataccccacctccctcaacctcatcctctccacagctgcctcttccctcttccttccctgctgtgaaagaagtaactacagttagggctcctattcaacacacacatgcttccctttcctgagtcccatccctgcgtgattttgggggtgaagagtgggttgtgaggtgggccccatgttaacccctccactctttctttcaataaaacgcagttgcaaacagacgcaaaaaaaaaaaatgaggaaaagaacctaagaagagaacatatacgggtatttactattttactgttcttcagatttagtacttgtaaataaacacacacattaaggagagattaaacatttttgctaaaaaa

SEQ ID NO: 435850 - DNA, 1160 bp, Homo sapiens
agagacttgggttttgctccctaggagccctggaatagctttggccagaattccctatctcccattagaacctctcctttgcgtcctttgttaacctccaagtctacttggtgaaaacgcccacgaagaagtaacaaggactttgttcctagtgtgccaggtttgggcaccagtgctgtagtggctttctctgctgctccttgtgcatcagcagacagatgtggttcacataggaagaaagactaacgtaggcaaagatttgctctttcttcagcagccctagaaagacggcggcctgggtgattcaccactccttcctcacgtccttgattttatttgaactgagctccagatgctcctcccacccttttcctcttggaagccaaacccctttgtaatctgtataaggtccacaccccgggagctgagtgattgcagaaactggccttccatctctctcagacaccaagctgcagatccaggcttttctgggaaagtgaggccaccatggctctggagaagtctcttgtccggctccttctgcttgtcctgatactgctggtgctgggctgggtccagccttccctgggcaaggaatcccgggccaagaaattccagcggcagcatatggactcagacagttcccccagcagcagctccacctactgtaaccaaatgatgagcccctggtagatgtccagaatgtctgtttccaggaaaaggtcacctgcaagaacgggcagggcaactgctacaagagcaactccagcatgcacatcacagactgccgcctgacaaacggctccaggtaccccaactgtgcataccggaccagcccgaaggagagacacatcattgtggcctgtgaagggagcccatatgtgccagtccactttgatgcttctgtggaggactctacctaaggtcagagcagcgagataccccacctccctcaacctcatcctctccacagctgcctcttccctcttccttccctgctgtgaaagaagtaactacagttagggctcctattcaacacacacatgcttccctttcctgagtcccatccctgcgtgattttgggggtgaagagtgggttgtgaggtgggccccatgttaacccctccactctttctttcaataaaacgcagttgcaaaca

SEQ ID NO: 435851 - DNA, 1141 bp, Homo sapiens
agagacttgggttttgctccctaggagccctggaatagctttggccagaattccctatctcccattagaacctctcctttgcgtcctttgttaacctccaagtctacttggtgaaaacgcccacgaagaagtaacaaggactttgttcctagtgtgccaggtttgggcaccagtgctgtagtggctttctctgctgctccttgtgcatcagcagacagatgtggttcacataggaagaaagactaacgtaggcaaagatttgctctttcttcagcagccctagaaagacggcggcctgggtgattcaccactccttcctcacgtccttgattttatttgaactgagctccagatgctcctcccacccttttcctcttggaagccaaacccctttgtaatctgtataaggtccacaccccgggagctgagtgattgcagaaactggccttccatctctctcagacaccaagctgcagatccaggcttttctgggaaagtgaggccaccatggctctggagaagtctcttgtccggctccttctgcttgtcctgatactgctggtgctgggctgggtccagccttccctgggcaaggaatcccgggccaagaaattccagcggcagcatatggactcagacagttcccccagcagcagctccacctactgtaaccaaatgatgaggcgccggaatatgacacaggggcggtgcaaaccagtgaacacctttgtgcacgagcccctggtagatgtccagaatgtctgtttccaggaaaaggtcacctgcaagaacgggcagggcaactgctacaagagcaactccagcatgcacatcacagactgccgcctgacaaacggctccaggtaccccaactgtgcataccggaccagcccgaaggagagacacatcattgtggcctgtgaagggagcccatatgtgccagtccactttgatgcttctgtggaggactctacctaaggtcagagcagcgagataccccacctccctcaacctcatcctctccacagctgcctcttccctcttccttccctgcgtgattttgggggtgaagagtgggttgtgaggtgggccccatgttaacccctccactctttctttcaataaaacgcagttgcaaaca

SEQ ID NO: 435852 - DNA, 1377 bp, Homo sapiens
  misc_feature (911)..(911): n is a, c, g, or t
gaattccgggtttgaaaaggagttctagggaagaagagagttagttagcacatcaatgggagcagggctcttaccccacgtggtgttacatatatattattttcatacatggtttctggctcataagttccttagcccttgctatagtcttttgtgttcggtcttaagggcaggactgtactcttccctcacctttctaattgtgcatcttaagaccttccccagagagggtggtgccctgtagttgtgggaaggaatgctggcatcatgaagcttccataaaaacccgagaaacgagcttctggatagctggacacatggaggtcctggagggtggagcccagggaggcatggaagctccacagcccttcccccataccttaccctatttcctctgtatcctttgtaatatcctttatgataaaccagcaaatgtgtgtaaatgtttccctaaggtctgtggccactccagcaaattaattgaacctaaagagggggtcgtgggaaccccaacttgaagccagtcagtcagaagttctggatgtccagacttcagactggtgtctgaaagggtggaggcagtcttggggaccgagcccccaatctatgggatctgacactatctccagtagtgttggaattgagtcaccagcgtgtccactggttagtgtgtgagaaactccctaccattggtcacagaagtcttcttctgtgttgatagttgtagtgtgacagcagaggaaaaacaaagtcagaaagagttttcccgaacacacccaatttctccattttactatccatttccacaaacactgactacaatagaagtataaaaattactccactgcatcattcagctttccatctctctcagacaccaagctgcagatccaggcttttttgggaaagtnaggccaccatggctctggtagatgtccagaatgtttgtttccaggaaaaggcaactgctacaagagcaactccagcatgcacatcacagactgccgcctgacaaacggctccaggtaccccaactgtgcataccggaccagcccgaaggagagacacatcattgtggcctgtgaagggagcccatatgtgccagtccactttgatgcttctgtggaggactctacctaaggtcagagcagcgagataccccacctccctcaacctcatcctctccacagctgcctcttccctcttccttccctgctgtgaaagaagtaactacagttagggctcctattcaacacacacatgcttccctttcctgagtcccatccctgcgtgattttgggggtgaagagtgggttgtgaggtgggccccatgttaacccctccactctttctttcaataaaacgcagttgcaaaca

SEQ ID NO: 435853 - DNA, 1161 bp, Homo sapiens
agagacttgggttttgctccctaggagccctggaatagctttggccagaattccctatctcccattagaacctctcctttgcgtcctttgttaacctccaagtctacttggtgaaaacgcccacgaagaagtaacaaggactttgttcctagtgtgccaggtttgggcaccagtgctgtagtggctttctctgctgctccttgtgcatcagcagacagatgtggttcacataggaagaaagactaacgtaggcaaagatttgctctttcttcagcagccctagaaagacggcggcctgggtgattcaccactccttcctcacgtccttgattttatttgaactgagctccagatgctcctcccacccttttcctcttggaagccaaacccctttgtaatctgtataaggtccacaccccgggagctgagtgattgcagaaactggccttccatctctctcagacaccaagctgcagatccaggcttttctgggaaagtgaggccaccatggctctggagaagtctcttgtccggctccttctgcttgtcctgatactgctggtgctgggctgggtccagccttccctgggcaaggaatcccgggccaagaaattccagcggcagcatatggactcagacagttcccccagcagcagctccacctactgtaaccaaatgatgaggcgccggaatatgacacaggggcggtgcaaaccagtgaacacctttgtgcacgagcccctggtagatgtccagaatgtctgtttccaggtgcacatcacagactgccgcctgacaaacggctccaggtaccccaactgtgcataccggaccagcccgaaggagagacacatcattgtggcctgtgaagggagcccatatgtgccagtccactttgatgcttctgtggaggactctacctaaggtcagagcagcgagataccccacctccctcaacctcatcctctccacagctgcctcttccctcttccttccctgctgtgaaagaagtaactacagttagggctcctattcaacacacacatgcttccctttcctgagtcccatccctgcgtgattttgggggtgaagagtgggttgtgaggtgggccccatgttaacccctccactctttctttcaataaaacgcagttgcaaaca

SEQ ID NO: 435854 - DNA, 1238 bp, Homo sapiens
agagacttgggttttgctccctaggagccctggaatagctttggccagaattccctatctcccattagaacctctcctttgcgtcctttgttaacctccaagtctacttggtgaaaacgcccacgaagaagtaacaaggactttgttcctagtgtgccaggtttgggcaccagtgctgtagtggctttctctgctgctccttgtgcatcagcagacagatgtggttcacataggaagaaagactaacgtaggcaaagatttgctctttcttcagcagccctagaaagacggcggcctgggtgattcaccactccttcctcacgtccttgattttatttgaactgagctccagatgctcctcccacccttttcctcttggaagccaaacccctttgtaatctgtataaggtccacaccccgggagctgagtgattgcagaaactggccttccatctctctcagacaccaagctgcagatccagttgtaggtcaccacctagaggggaggaagacctcgctttggagagtgggaataaaacgctcgtggaaaagggtacacgcttttctgggaaagtgaggccaccatggctctggagaagtctcttgtccggctccttctgcttgtcctgatactgctggtgctgggctgggtccagccttccctgggcaaggaatcccgggccaagaaattccagcggcagcatatggactcagacagttcccccagcagcagctccacctactgtaaccaaatgatgaggcgccggaatatgacacaggggcggtgcaaaccagtgaacacctttgtgcacgagcccctggtagatgtccagaatgtctgtttccaggtgcacatcacagactgccgcctgacaaacggctccaggtaccccaactgtgcataccggaccagcccgaaggagagacacatcattgtggcctgtgaagggagcccatatgtgccagtccactttgatgcttctgtggaggactctacctaaggtcagagcagcgagataccccacctccctcaacctcatcctctccacagctgcctcttccctcttccttccctgctgtgaaagaagtaactacagttagggctcctattcaacacacacatgcttccctttcctgagtcccatccctgcgtgattttgggggtgaagagtgggttgtgaggtgggccccatgttaacccctccactctttctttcaataaaacgcagttgcaaaca

SEQ ID NO: 435855 - DNA, 1158 bp, Homo sapiens
agagacttgggttttgctccctaggagccctggaatagctttggccagaattccctatctcccattagaacctctcctttgcgtcctttgttaacctccaagtctacttggtgaaaacgcccacgaagaagtaacaaggactttgttcctagtgtgccaggtttgggcaccagtgctgtagtggctttctctgctgctccttgtgcatcagcagacagatgtggttcacataggaagaaagactaacgtaggcaaagatttgctctttcttcagcagccctagaaagacggcggcctgggtgattcaccactccttcctcacgtccttgattttatttgaactgagctccagatgctcctcccacccttttcctcttggaagccaaacccctttgtaatctgtataaggtccacaccccgggagctgagtgattgcagaaactggccttccatctctctcagacaccaagctgcagatccagttgtaggtcaccacctagaggggaggaagacctcgctttggagagtgggaataaaacgctcgtggaaaagggtacacgcttttctgggaaagtgaggccaccatggctctggagaagtctcttgtccggctccttctgcttgtcctgatactgctggtgctgggctgggtccagccttccctgggcaaggaatcccgggccaagaaattccagcggcagcatatggactcagacagttcccccagcagcagctccacctactgtaaccaaatgatgaggcgccggaatatgacacaggggcggtgcaaaccagtgaacacctttgtgcacgagcccctggtagatgtccagaatgtctgtttccaggaaaaggtcacctgcaagaacgggcagggcaactgctacaagagcaactccagcatgcacatcacagactgccgcctgacaaacggctccaggtaccccaactcaacctcatcctctccacagctgcctcttccctcttccttccctgctgtgaaagaagtaactacagttagggctcctattcaacacacacatgcttccctttcctgagtcccatccctgcgtgattttgggggtgaagagtgggttgtgaggtgggccccatgttaacccctccactctttctttcaataaaacgcagttgcaaaca

SEQ ID NO: 435856 - DNA, 1255 bp, Homo sapiens
agagacttgggttttgctccctaggagccctggaatagctttggccagaattccctatctcccattagaacctctcctttgcgtcctttgttaacctccaagtctacttggtgaaaacgcccacgaagaagtaacaaggactttgttcctagtgtgccaggtttgggcaccagtgctgtagtggctttctctgctgctccttgtgcatcagcagacagatgtggttcacataggaagaaagactaacgtaggcaaagatttgctctttcttcagcagccctagaaagacggcggcctgggtgattcaccactccttcctcacgtccttgattttatttgaactgagctccagatgctcctcccacccttttcctcttggaagccaaacccctttgtaatctgtataaggtccacaccccgggagctgagtgattgcagaaactggccttccatctctctcagacaccaagctgcagatccaggcttttctgggaaagtgaggccaccatggctctggagaagtctcttgtccggctccttctgcttgtcctgatactgctggtgctgggctgggtccagccttccctgggcaaggaatcccgggccaagaaattccagcggcagcatatggactcagacagttcccccagcagcagctccacctactgtaaccaaatgatgaggcgccggaatatgacacaggggcggtgcaaaccagtgaacacctttgtgcacgagcccctggtagatgtccagaatgtctgtttccaggaaaaggtcacctgcaagaacgggcagggcaactgctacaagagcaactccagcatgcacatcacagactgccgcctgacaaacggctccaggtaccccaactgtgcataccggaccagcccgaaggagagacacatcattgtggcctgtgaagggagcccatatgtgccagtccactttgatgcttctgtggaggactctacctaaggtcagagcagcgagataccccacctccctcaacctcatcctctccacagctgcctcttccctcttccttccctgctgtgaaagaagtaactacagttagggctcctattcaacacacacatgcttccctttcctgagtcccatccctgcgtgattttgggggtgaagagtgggttgtgaggtgggccccatgttaacccctccactctttctttcaataaaacgcagttgcaaacaaaaaaaaaaaaaaaaaaaaaaaaaaaaaaaaaaggggggg

SEQ ID NO: 435857 - DNA, 945 bp, Homo sapiens
atttgagcactgggtacaaatgtattttggatcaaagaaactccagtattcaaagataggaactgacaggattttaggtcactttgtaggtcaccacctagaggggaggaagacctcgctttggagagtgggaataaaacgctcgtggaaaagggtacacgcttttctgggaaagtgaggccaccatggctctggagaagtctcttgtccggctccttctgcttgtcctgatactgctggtgctgggctgggtccagccttccctgggcaaggaatcccgggccaagaaattccagcggcagcatatggactcagacagttcccccagcagcagctccacctactgtaaccaaatgatgaggcgccggaatatgacacaggggcggtgcaaaccagtgaacacctttgtgcacgagcccctggtagatgtccagaatgtctgtttccaggaaaaggtcacctgcaagaacgggcagggcaactgctacaagagcaactccagcatgcacatcacagactgccgcctgacaaacggctccaggtaccccaactgtgcataccggaccagcccgaaggagagacacatcattgtggcctgtgaagggagcccatatgtgccagtccactttgatgcttctgtggaggactctacctaaggtcagagcagcgagataccccacctccctcaacctcatcctctccacagctgcctcttccctcttccttccctgctgtgaaagaagtaactacagttagggctcctattcaacacacacatgcttccctttcctgagtcccatccctgcgtgattttgggggtgaagagtgggttgtgaggtgggccccatgttaacccctccactctttctttcaataaaacgcagttgcaaacaaaaaaaaaaattctcaggccggaccgccaaagggccaacctcgagggggccg

SEQ ID NO: 435858 - DNA, 1292 bp, Homo sapiens
agagacttgggttttgctccctaggagccctggaatagctttggccagaattccctatctcccattagaacctctcctttgcgtcctttgttaacctccaagtctacttggtgaaaacgcccacgaagaagtaacaaggactttgttcctagtgtgccaggtttgggcaccagtgctgtagtggctttctctgctgctccttgtgcatcagcagacagatgtggttcacataggaagaaagactaacgtaggcaaagatttgctctttcttcagcagccctagaaagacggcggcctgggtgattcaccactccttcctcacgtccttgattttatttgaactgagctccagatgctcctcccacccttttcctcttggaagccaaacccctttgtaatctgtataaggtccacaccccgggagctgagtgattgcagaaactggccttccatctctctcagacaccaagctgcagatccagttgtaggtcaccacctagaggggaggaagacctcgctttggagagtgggaataaaacgctcgtggaaaagggtacacgcttttctgggaaagtgaggccaccatggctctggagaagtctcttgtccggctccttctgcttgtcctgatactgctggtgctgggctgggtccagccttccctgggcaaggaatcccgggccaagaaattccagcggcagcatatggactcagacagttcccccagcagcagctccacctactgtaaccaaatgatgaggcgccggaatatgacacaggggcggtgcaaaccagtgaacacctttgtgcacgagcccctggtagatgtccagaatgtctgtttccaggaaaaggtcacctgcaagaacgggcagggcaactgctacaagagcaactccagcatgcacatcacagactgccgcctgacaaacggctccaggtaccccaactgtgcataccggaccagcccgaaggagagacacatcattgtggcctgtgaagggagcccatatgtgccagtccactttgatgcttctgtggaggactctacctaaggtcagagcagcgagataccccacctccctcaacctcatcctctccacagctgcctcttccctcttccttccctgctgtgaaagaagtaactacagttagggctcctattcaacacacacatgcttccctttcctgagtcccatccctgcgtgattttgggggtgaagagtgggttgtgaggtgggccccatgttaacccctccactctttctttcaataaaacgcagttgcaaaca

SEQ ID NO: 435859 - DNA, 759 bp, Homo sapiens
  misc_feature (21)..(21): n is a, c, g, or t
aactcaggggcgagctgcagntccaggcttttctgggaaagtgaggccaccatggctctggagaagtctcttgtccggctccttctgcttgtcctgatactgctggtgctgggctgggtccagccttccctgggcaaggaatcccgggccaagaaattccagcggcagcatatggactcagacagttcccccagcagcagctccacctactgtaaccaaatgatgaggcgccggaatatgacacaggggcggtgcaaaccagtgaacacctttgtgcacgagcccctggtagatgtccagaatgtctgtttccaggaaaaggtcacctgcaagaacgggcagggcaactgctacaagagcaactccagcatgcacatcacagactgccgcctgacaaacggctccaggtaccccaactgtgcataccggaccagcccgaaggagagacacatcattgtggcctgtgaagggagcccatatgtgccagtccactttgatgcttctgtggaggactctacctaaggtcagagcagcgagataccccacctccctcaacctcatcctctccacagctgcctcttccctcttccttccctgctgtgaaagaagtaactacagttagggctcctattcaacacacacatgcttccctttcctgagtcccatccctgcgtgattttgggggtgaagagtgggttgtgaggtgggccccatgttaacccctccactctttctttcaataaaacgcagttgcaaaca

SEQ ID NO: 435860 - DNA, 1118 bp, Homo sapiens
agagacttgggttttgctccctaggagccctggaatagctttggccagaattccctatctcccattagaacctctcctttgcgtcctttgttaacctccaagtctacttggtgaaaacgcccacgaagaagtaacaaggactttgttcctagtgtgccaggtttgggcaccagtgctgtagtggctttctctgctgctccttgtgcatcagcagacagatgtggttcacataggaagaaagactaacgtaggcaaagatttgctctttcttcagcagccctagaaagacggcggcctgggtgattcaccactccttcctcacgtccttgattttatttgaactgagctccagatgctcctcccacccttttcctcttggaagccaaacccctttgtaatctgtataaggtccacaccccgggagctgagtgattgcagaaactggccttccatctctctcagacaccaagctgcagatccagccttccctgggcaaggaatcccgggccaagaaattccagcggcagcatatggactcagacagttcccccagcagcagctccacctactgtaaccaaatgatgaggcgccggaatatgacacaggggcggtgcaaaccagtgaacacctttgtgcacgagcccctggtagatgtccagaatgtctgtttccaggaaaaggtcacctgcaagaacgggcagggcaactgctacaagagcaactccagcatgcacatcacagactgccgcctgacaaacggctccaggtaccccaactgtgcataccggaccagcccgaaggagagacacatcattgtggcctgtgaagggagcccatatgtgccagtccactttgatgcttctgtggaggactctacctaaggtcagagcagcgagataccccacctccctcaacctcatcctctccacagctgcctcttccctcttccttccctgctgtgaaagaagtaactacagttagggctcctattcaacacacacatgcttccctttcctgagtcccatccctgcgtgattttgggggtgaagagtgggttgtgaggtgggccccatgttaacccctccactctttctttcaataaaacgcagttgcaaaca

SEQ ID NO: 435861 - DNA, 1181 bp, Homo sapiens
agagacttgggttttgctccctaggagccctggaatagctttggccagaattccctatctcccattagaacctctcctttgcgtcctttgttaacctccaagtctacttggtgaaaacgcccacgaagaagtaacaaggactttgttcctagtgtgccaggtttgggcaccagtgctgtagtggctttctctgctgctccttgtgcatcagcagacagatgtggttcacataggaagaaagactaacgtaggcaaagatttgctctttcttcagcagccctagaaagacggcggcctgggtgattcaccactccttcctcacgtccttgattttatttgaactgagctccagatgctcctcccacccttttcctcttggaagccaaacccctttgtaatctgtataaggtccacaccccgggagctgagtgattgcagaaactggccttccatctctctcagacaccaagctgcagatccaggcttttctgggaaagtgaggccaccatggctctggagaagtctcttgtccggctccttctgcttgtcctgatactgctggtgctgggctgggtccagccttccctgggcaaggaatcccgggccaagaaattccagcggcagcatatggactcagacagttcccccagcagcagctccacctactgtaaccaaatgatgaggcgccggaatatgacacaggggcggtgcaaaccagtgaacacctttgtgcacgagcccctggtagatgtccagaatgtctgtttccaggaaaaggtcacctgcaagaacgggcagggcaactgctacaagagcaactccagcatgcacatcacagactgccgcctgacaaacggctccaggtaccccaactgtgcataccggaccagcccgaaggagagacacatcattgtggcctgtgaagggagcccatatgtgccagtccactttgatgcttctgtggaggactctaccaacctcatcctctccacagctgcctcttccctcttccttccctgctgtgaaagaagtaactacagttagggctcctattcaacacacacatgcttccctttcctgagtcccatccctgcgtgattttgggggtgaagagtgggttgtgaggtgggccccatgttaacccctccactctttctttcaataaaacgcagttgcaaaca

SEQ ID NO: 435862 - DNA, 1220 bp, Homo sapiens
agagacttgggttttgctccctaggagccctggaatagctttggccagaattccctatctcccattagaacctctcctttgcgtcctttgttaacctccaagtctacttggtgaaaacgcccacgaagaagtaacaaggactttgttcctagtgtgccaggtttgggcaccagtgctgtagtggctttctctgctgctccttgtgcatcagcagacagatgtggttcacataggaagaaagactaacgtaggcaaagatttgctctttcttcagcagccctagaaagacggcggcctgggtgattcaccactccttcctcacgtccttgattttatttgaactgagctccagatgctcctcccacccttttcctcttggaagccaaacccctttgtaatctgtataaggtccacaccccgggagctgagtgattgcagaaactggccttccatctctctcagacaccaagctgcagatccaggcttttctgggaaagtgaggccaccatggctctggagaagtctcttgtccggctccttctgcttgtcctgatactgctggtgctgggctgggtccagccttccctgggcaaggaatcccgggccaagaaattccagcggcagcatatggactcagacagttcccccagcagcagctccacctactgtaaccaaatgatgaggcgccggaatatgacacaggggcggtgcaaaccagtgaacacctttgtgcacgagcccctggtagatgtccagaatgtctgtttccaggaaaaggtcacctgcaagaacgggcagggcaactgctacaagagcaactccagcatgcacatcacagactgccgcctgacaaacggctccaggtaccccaactgtgcataccggaccagcccgaaggagagacacatcattgtggcctgtgaaccaacacacaaccaaaaaccaacacaccacccccccccccccaacaaccccaaaaccactccccaggagagagagagatgaaaaaaaaacaacctcatcctctccacagctgcctcttccctcttccttccctgctgtgaaagaagtaactacagttagggctcctattcaacacacacatgcttccctttcctgagtcccatccctgcgtgattttgggggtgaagagtgggttgtgaggtgggccccatgttaacccctccactctttctttcaataaaacgcagttgcaaaca

SEQ ID NO: 435863 - DNA, 8021 bp, Homo sapiens
ggccgcgggcgggcccgcccatctgtcagttacgggggctgcccggcgggcgggctggaggcgctcgcaggctgcctagtcgttcgctcgctctctctcgcgtgctccctctcgccgcctgtggggaagtcggggccgcccgagcggccgtcgccaccgcctcgccccgacctccttcccggtcccctcccggcccagtccctcccgcccgcgcaccccgagtagtgagtggccccgcgcaggtctggagagtcaccgcggcggcgccgggtggtggttaaaccatgttaaggaggattttacagaggactcctgggagagttggctctcaaggttctgatttagattcatcagcaactcctataaacacagtggacgtcaataatgaaagctcttcagagggtttcatatgtccccagtgtatgaaatctcttggatctgctgatgaacttttcaaacattatgaagctgttcatgatgctggtaatgactcaggtcatggaggagagtctaatcttgctttgaagcgagatgatgtaacactgctcagacaagaggtccaagacctacaggcttcacttaaggaagaaaaatggtactcggaagaattaaagaaggaattagaaaaatatcaagggctgcagcagcaagaggccaaacctgatgggttggtgactgattcatcagcagaactacagtctttggaacagcaattagaagaagcccaaacagaaaattttaatattaagcaaatgaaagacttatttgaacagaaagcagcccaacttgctactgaaattgcagatataaagtcaaagtatgatgaagaaaggagtcttcgagaagctgctgaacaaaaagtgacacgtctgacagaagaattaaacaaagaggcaactgtaattcaagatctgaagacggaactgcttcagagacctggtatagaagatgttgccgtgctaaagaaagaactggtccaagttcaaacactaatggataacatgaccttggaacgtgagcgagaatctgaaaaactcaaagatgaatgcaaaaaattgcagtcacaatatgctagctcagaggccacaataagccagctaaggagtgaacttgccaaaggcccccaggaagttgctgtatatgtacaggaactacaaaaactgaaaagttcagttaatgaattaacacaaaaaaatcagaccttgacagaaaacttgctgaaaaaagaacaagactatactaagttagaggagaaacataatgaagaatctgtgagtaaaaagaatattcaggcaacccttcatcaaaaagacctagattgtcaacagcttcagtcaagattgtctgcatctgaaacctcactgcatagaatacatgtagaactaagtgaaaaaggagaagctactcaaaagctcaaagaagaattatctgaggtagagaccaagtaccagcatctaaaggcggagtttaagcagctacaacaacagagagaagaaaaggagcagcatgggttacaactccaaagtgaaattaatcaattacatagcaaacttctggagacagagcgccaactaggggaagctcatggtaggctgaaggaacagagacagctttcaagtgaaaagttgatggataaagaacaacaagtggctgatttacaactcaaactttctcggttagaagagcagttgaaggaaaaagttacaaattctacagaattgcagcatcaattagataaaacaaagcaacagcatcaagaacaacaggctcttcagcaaagcaccacggcaaaacttcgagaagctcagaatgatttggaacaagttctacgtcaaattggcgataaggaccaaaagatccagaaccttgaagctttattacagaagagtaaagaaaatatttcattactagaaaaagaaagagaagatctttatgcaaaaattcaggctggtgaaggagagactgctgttcttaaccagttacaagaaaaaaaccatacactacaggagcaagtaactcaactaacagagaagctgaagaatcagtcagaaagtcataaacaagcccaggagaatttgcatgaccaggtacaagagcagaaggcacatcttagagctgcacaagaccgtgtcctttccctagaaactagtgtcaatgaattaaatagtcaattaaatgaaagcaaggagaaggtctcccagcttgacatacagattaaagccaaaaccgaactattactatcagcagaagcagcaaaaactgctcaaagagctgatcttcagaatcatttggacacagctcaaaatgcattacaagataaacagcaggagttaaataagattactactcagttggatcaggtcactgcaaagttacaagacaagcaagaacattgcagtcagctggaaagtcatcttaaagaatataaagagaaatacctctctttagaacagaaaaccgaagagctagaaggtcaaattaagaaactagaagctgatagtcttgaagttaaagcaagcaaggagcaggctttgcaagatctacaacagcaaagacagctgaacacagatttagagctcagagccacagaattgagtaaacaacttgaaatggagaaggaaatagtatccagtacaagattggatctacagaaaaaatctgaagcccttgaaagtatcaagcaaaagcttaccaagcaagaggaagaaaaacaaatcctgaaacaagattttgaaactttaagtcaagaaacaaagattcagcatgaggaattgaataacagaattcaaacaacagtaacagaactacaaaaagtgaaaatggagaaagaagctttaatgacagagctttctacagtaaaggacaaactatcaaaagtttctgattctttgaaaaactctaaaagtgaatttgaaaaggagaatcagaaaggaaaagccgctatattagacttggaaaaaacttgcaaagaattaaagcatcaacttcaagtgcagatggaaaacacacttaaggaacagaaggaactgaaaaagtcacttgaaaaagagaaggaggcttctcatcagttgaaattggaactcaattcaatgcaggaacaacttatacaggcccagaatactttaaaacaaaatgaaaaagaagagcaacaacttcaggggaacataaatgagctaaagcaatcaagtgaacagaagaaaaaacaaattgaagcactccaaggagagcttaaaattgctgttttacagaagacagagcttgagaataaactacagcagcagttaacacaggcagcccaggaacttgcagcagagaaagagaaaatatcagtattacaaaacaactatgaaaaaagtcaggaaactttcaaacagcttcaatctgatttctatgggagggaatctgaacttctagccaccaggcaagatcttaagtctgtagaagagaagctttctctagcacaggaggacttgatttcaaacagaaatcaaattggaaatcaaaataaattgattcaagaactgaagactgccaaggctacattggagcaggattcagcaaagaaagaacagcaattgcaggagcgatgtaaagcactacaagacattcagaaagaaaagtcactgaaagaaaaagaactggtaaatgagaagtctaaattggcagagatagaagaaattaaatgtagacaagaaaaagaaatcactaaactaaacgaagaactcaagtcccacaaactagaaagcataaaggagataacaaatcttaaagatgctaaacagcttctaattcagcagaaattagaacttcaaggaaaagcggactccctgaaggcagctgttgaacaggagaagagaaatcagcagatactaaaagaccaggtgaaaaaggaagaagaggagctgaagaaagaatttattgagaaagaagctaagttgcattccgaaataaaagaaaaggaagtaggaatgaagaagcatgaagaaaatgaggctaaacttaccatgcagattacagcattaaatgaaaacttaggcactgtgaagaaggagtggcaatctagtcaacggagagttagtgagcttgagaaacaaacggatgacttacggggtgaaattgcagtattagaagcaacggttcagaataatcaagatgaaaggagagcactactggaaagatgtcttaaaggagaaggtgaaatagaaaagcttcaaaccaaagtattagaattgcaaagaaagctggataatacaactgcagcagtgcaggagctgggcagagaaaaccaatcacttcagatcaaacatacacaagcgttgaatagaaagtgggccgaagacaatgaagtacaaaactgtatggcctgtgggaaaggcttttcagtaacagtgagacggcatcactgccgacagtgtggaaatatcttctgtgctgaatgttcagccaaaaatgccttaactccttcctccaagaagcctgttcgtgtctgtgatgcatgtttcaatgacttgcaaggataatgggttatcacaacttcagagtaatattacactaacattagatttttaataaatgtacttaatagaggtcttggactactatttggtttggacactggttgcaatactagaccaaataggaattagtatattttggaatgttatggatatcaagtaaaactcttctatttttgtgagacttgggcttatcatctttcattacttttttcccatttagcccctggaatagctttcatgccaagtttagaattagccaatgaaatgtaaataaactttggacagaaaatagcaatgtatttttttaatataatttcattattcacaaatgaagaatgcaattccatagcttacttctttctcctaaatttaatgtacaaaaatgtacatggatgatattatcacttgttgctgtttttgttgcacaatagcacattaattatattaaatattctctttgtgaagttatgcacagaactgtaacactttcctctgcctttttctcttatatgtgggttcatggttcagttgcattgttatgttatgaatttactacttgggtgttctaaatacagtttatcttaaaatatgtagtaatatgaattcaaaaatggtttttgttttaacaatattaattaaattttcttgggtggattttataaaaacctctgtaaaatcaatttgtttacttatagttatctggggttgtattgcaaagaatagggttaatttttctttttgtctttttctgtctctttcttaaactcccacgcattgtccatttagaatcttagaaagcttcttaccctcgctgtcagttggaggatgaataataaacattgtataatgttcttattctcggtttcttgtaagtgggaagtcttttgagatcagccttcatatcatacccttattttgtctctctagcatcttcaggaacctgagtttgctttttacatagatctgattttttcctttatttggtttaacattttcaagcatagatcagcttcatgtatttgttttataattttgcatcttaaagctagtaactaatattgctgtggtcttattggtgaaaacaaaatataaaatgataagaagacattaaatattttactttctatttcttaccctattgggaagaatttttaaaagttgtaaaattgacttaaagttaaaatggttctgaatttggtgttccatgtcaactgttcccagttttaattttaactttgcaaaaataatgttgtgaaattccctttaagtaactaacacctagaaatagagtatcaccaaaaacaaatgtatttaggaatcccagttacaataaaaactgaaacagcatggctaagcatcttaaggataattaagaaattagcttatttgtatgctgaacaatggaatcgaactttaatttagcatagtcttattaatttggaaaattgtaaaacatctcaagagagaagttattaatattggtttattaatctttctagagaagaagtgtagttatacattcattcagtgcaatcattttataacagtagttaatatttcatttataatagttcttaatatacatttgctttcaaatattctgaaatgaaattatattcatgctatacctacagtgtatgtaaactaaagagatcactacatatttgtttaattatttaaaaaaaaatttaagtaaaccctgttgtcattagctattaagaacattgattaagtccctggacttggataaacatatatccttgaacatatataatgaagaaatacagtggctctttattaaaaataatagttggataatataaactgaactatttatgcatttttatatacttataaatccttccaaatagttttaattctatccttttacatataaataacttaataagtgtgctggaaaaacacagatgttcacagcaccactgttttttttttttttttttgagataataaattccatgagaaatctgggtttgaatatttgtttactttgtctcctaattgaacaccactccaggccttctgtctgtctcccctttacccccaaaatactcacaaaaaaattttaagacaacaagtaaccatatataggtgtttgaatgattttctcatttttatctaatttcatttcataagtcccgagtaatttacctaccataggctactatactgataatataaatgaaaccgaacattttttgctactaactctccccaatttaatgtgttttcgaaataaaaatttaaatttttttccttttaattaaaaagtcatctttgaagtccttattggctgtacattttacatgtttgctggtactattattttgtcagtcagttaaagctggcatgtacagctcttggctttaatgaaaagcacattgacataatgttagtaaattccaaaccccggcacagaatgtgagttaaaattaagtcttgctgggttagtgtacaataaactatacctacagacttttttttaatagaaagaagacaaagctgctggtataggatttgttcctttgaagaaaaaatgagggaaacaaacacaaaaacctcaatgcagtgtataaataacattttgttcaactacctcttaatgtggaattatctactttaatagtttcctgacagtaatgttaaatagtaactgccaaatttgttattttcccatctctcttaaaaaagtctttatgattattttatatagttttgagaactttaaagccacttttttttaaccttacatttgcataaaaatgtttagcttttaagtagagagcaaattatgatcatatattttgatattcatgacctgtttgactataggagtttttttaaaaaaatgcactttggctataaaaccatggatgatttgatccataagatttaaatgtgccaccattatagtattcctagacatgagcttgatgaatggtattctgtaattataacgtgccacacattattgtgtcttaattgcccttagcctgaattttaatgatcaatttgttattgttgcagatgtgaatattgtgcataaacttactaaatttatgtaaaattgtataaaatagaattagaagtcactaagttctttctgtgtagaagtaataaatttattgtaacacaatgcagttgtgtatatgacattctgtaattccttgaactggatcatatattcataagttctgtagatacttatgcatgaacattttctcatttagttcttgggttcattatttgtattgtgtttactacttgtgatcatgtagttgtgccttactttgtgagaaaggttagctcagtaaatactgcaatttctaaactcagtgattggaaggttattaattataaatgtaactgataaagtacgtgacagcatttaaatctgtataaagaacaatggaaggatccttattgaattgttgcttttttttaatatgtttaaatattatattaaaaacatttctttctaaa

SEQ ID NO: 435864 - DNA, 8283 bp, Homo sapiens
ggccgcgggcgggcccgcccatctgtcagttacgggggctgcccggcgggcgggctggaggcgctcgcaggctgcctagtcgttcgctcgctctctctcgcgtgctccctctcgccgcctgtggggaagtcggggccgcccgagcggccgtcgccaccgcctcgccccgacctccttcccggtcccctcccggcccagtccctcccgcccgcgcaccccgagtagtgagtggccccgcgcaggtctggagagtcaccgcggcggcgccgggtggtggttaaaccatgttaaggaggattttacagaggactcctgggagagttggctctcaaggttctgatttagattcatcagcaactcctataaacacagtggacgtcaataatgaaagctcttcagagggtttcatatgtccccagtgtatgaaatctcttggatctgctgatgaacttttcaaacattatgaagctgttcatgatgctggtaatgactcaggtcatggaggagagtctaatcttgctttgaagcgagatgatgtaacactgctcagacaagaggtccaagacctacaggcttcacttaaggaagaaaaatggtactcggaagaattaaagaaggaattagaaaaatatcaagggctgcagcagcaagaggccaaacctgatgggttggtgactgattcatcagcagaactacagtctttggaacagcaattagaagaagcccaaacagaaaattttaatattaagcaaatgaaagacttatttgaacagaaagcagcccaacttgctactgaaattgcagatataaagtcaaagtatgatgaagaaaggagtcttcgagaagctgctgaacaaaaagtgacacgtctgacagaagaattaaacaaagaggcaactgtaattcaagatctgaagacggaactgcttcagagacctggtatagaagatgttgccgtgctaaagaaagaactggtccaagttcaaacactaatggataacatgaccttggaacgtgagcgagaatctgaaaaactcaaagatgaatgcaaaaaattgcagtcacaatatgctagctcagaggccacaataagccagctaaggagtgaacttgccaaaggcccccaggaagttgctgtatatgtacaggaactacaaaaactgaaaagttcagttaatgaattaacacaaaaaaatcagaccttgacagaaaacttgctgaaaaaagaacaagactatactaagttagaggagaaacataatgaagaatctgtgagtaaaaagaatattcaggcaacccttcatcaaaaagacctagattgtcaacagcttcagtcaagattgtctgcatctgaaacctcactgcatagaatacatgtagaactaagtgaaaaaggagaagctactcaaaagctcaaagaagaattatctgaggtagagaccaagtaccagcatctaaaggcggagtttaagcagctacaacaacagagagaagaaaaggagcagcatgggttacaactccaaagtgaaattaatcaattacatagcaaacttctggagacagagcgccaactaggggaagctcatggtaggctgaaggaacagagacagctttcaagtgaaaagttgatggataaagaacaacaagtggctgatttacaactcaaactttctcggttagaagagcagttgaaggaaaaagttacaaattctacagaattgcagcatcaattagataaaacaaagcaacagcatcaagaacaacaggctcttcagcaaagcaccacggcaaaacttcgagaagctcagaatgatttggaacaagttctacgtcaaattggcgataaggaccaaaagatccagaaccttgaagctttattacagaagagtaaagaaaatatttcattactagaaaaagaaagagaagatctttatgcaaaaattcaggctggtgaaggagagactgctgttcttaaccagttacaagaaaaaaaccatacactacaggagcaagtaactcaactaacagagaagctgaagaatcagtcagaaagtcataaacaagcccaggagaatttgcatgaccaggtacaagagcagaaggcacatcttagagctgcacaagaccgtgtcctttccctagaaactagtgtcaatgaattaaatagtcaattaaatgaaagcaaggagaaggtctcccagcttgacatacagattaaagccaaaaccgaactattactatcagcagaagcagcaaaaactgctcaaagagctgatcttcagaatcatttggacacagctcaaaatgcattacaagataaacagcaggagttaaataagattactactcagttggatcaggtcactgcaaagttacaagacaagcaagaacattgcagtcagctggaaagtcatcttaaagaatataaagagaaatacctctctttagaacagaaaaccgaagagctagaaggtcaaattaagaaactagaagctgatagtcttgaagttaaagcaagcaaggagcaggctttgcaagatctacaacagcaaagacagctgaacacagatttagagctcagagccacagaattgagtaaacaacttgaaatggagaaggaaatagtatccagtacaagattggatctacagaaaaaatctgaagcccttgaaagtatcaagcaaaagcttaccaagcaagaggaagaaaaacaaatcctgaaacaagattttgaaactttaagtcaagaaacaaagattcagcatgaggaattgaataacagaattcaaacaacagtaacagaactacaaaaagtgaaaatggagaaagaagctttaatgacagagctttctacagtaaaggacaaactatcaaaagtttctgattctttgaaaaactctaaaagtgaatttgaaaaggagaatcagaaaggaaaagccgctatattagacttggaaaaaacttgcaaagaattaaagcatcaacttcaagtgcagatggaaaacacacttaaggaacagaaggaactgaaaaagtcacttgaaaaagagaaggaggcttctcatcagttgaaattggaactcaattcaatgcaggaacaacttatacaggcccagaatactttaaaacaaaatgaaaaagaagagcaacaacttcaggggaacataaatgagctaaagcaatcaagtgaacagaagaaaaaacaaattgaagcactccaaggagagcttaaaattgctgttttacagaagacagagcttgagaataaactacagcagcagttaacacaggcagcccaggaacttgcagcagagaaagagaaaatatcagtattacaaaacaactatgaaaaaagtcaggaaactttcaaacagcttcaatctgatttctatgggagggaatctgaacttctagccaccaggcaagatcttaagtctgtagaagagaagctttctctagcacaggaggacttgatttcaaacagaaatcaaattggaaatcaaaataaattgattcaagaactgaagactgccaaggctacattggagcaggattcagcaaagaaagaacagcaattgcaggagcgatgtaaagcactacaagacattcagaaagaaaagtcactgaaagaaaaagaactggtaaatgagaagtctaaattggcagagatagaagaaattaaatgtagacaagaaaaagaaatcactaaactaaacgaagaactcaagtcccacaaactagaaagcataaaggagataacaaatcttaaagatgctaaacagcttctaattcagcagaaattagaacttcaaggaaaagcggactccctgaaggcagctgttgaacaggagaagagaaatcagcagatactaaaagaccaggtgaaaaaggaagaagaggagctgaagaaagaatttattgagaaagaagctaagttgcattccgaaataaaagaaaaggaagtaggaatgaagaagcatgaagaaaatgaggctaaacttaccatgcagattacagcattaaatgaaaacttaggcactgtgaagaaggagtggcaatctagtcaacggagagttagtgagcttgagaaacaaacggatgacttacggggtgaaattgcagtattagaagcaacggttcagaataatcaagatgaaaggagagcactactggaaagatgtcttaaaggagaaggtgaaatagaaaagcttcaaaccaaagtattagaattgcaaagaaagctggataatacaactgcagcagtgcaggagctgggcagagaaaaccaatcacttcagatcaaacatacacaagcgttgaatagaaagtgggccgaagacaatgaagtacaaaactgtatggcctgtgggaaaggcttttcagtaacagtgagacggcatcactgccgacagtgtggaaatatcttctgtgctgaatgttcagccaaaaatgccttaactccttcctccaagaagcctgttcgtgtctgtgatgcatgtttcaatgacttgcaaggataatgggttatcacaacttcagagtaatattacactaacattagatttttaataaatgtacttaatagaggtcttggactactatttggtttggacactggttgcaatactagaccaaataggaattagtatattttggaatgttatggatatcaagtaaaactcttctatttttgtgagacttgggcttatcatctttcattacttttttcccatttagcccctggaatagctttcatgccaagtttagaattagccaatgaaatgtaaataaactttggacagaaaatagcaatgtatttttttaatataatttcattattcacaaatgaagaatgcaattccatagcttacttctttctcctaaatttaatgtacaaaaatgtacatggatgatattatcacttgttgctgtttttgttgcacaatagcacattaattatattaaatattctctttgtgaagttatgcacagaactgtaacactttcctctgcctttttctcttatatgtgggttcatggttcagttgcattgttatgttatgaatttactacttgggtgttctaaatacagtttatcttaaaatatgtagtaatatgaattcaaaaatggtttttgttttaacaatattaattaaattttcttgggtggattttataaaaacctctgtaaaatcaatttgtttacttatagttatctggggttgtattgcaaagaatagggttaatttttctttttgtctttttctgtctctttcttaaactcccacgcattgtccatttagaatcttagaaagcttcttaccctcgctgtcagttggaggatgaataataaacattgtataatgttcttattctcggtttcttgtaagtgggaagtcttttgagatcagccttcatatcatacccttattttgtctctctagcatcttcaggaacctgagtttgctttttacatagatctgattttttcctttatttggtttaacattttcaagcatagatcagcttcatgtatttgttttataattttgcatcttaaagctagtaactaatattgctgtggtcttattggtgaaaacaaaatataaaatgataagaagacattaaatattttactttctatttcttaccctattgggaagaatttttaaaagttgtaaaattgacttaaagttaaaatggttctgaatttggtgttccatgtcaactgttcccagttttaattttaactttgcaaaaataatgttgtgaaattccctttaagtaactaacacctagaaatagagtatcaccaaaaacaaatgtatttaggaatcccagttacaataaaaactgaaacagcatggctaagcatcttaaggataattaagaaattagcttatttgtatgctgaacaatggaatcgaactttaatttagcatagtcttattaatttggaaaattgtaaaacatctcaagagagaagttattaatattggtttattaatctttctagagaagaagtgtagttatacattcattcagtgcaatcattttataacagtagttaatatttcatttataatagttcttaatatacatttgctttcaaatattctgaaatgaaattatattcatgctatacctacagtgtatgtaaactaaagagatcactacatatttgtttaattatttaaaaaaaaatttaagtaaaccctgttgtcattagctattaagaacattgattaagtccctggacttggataaacatatatccttgaacatatataatgaagaaatacagtggctctttattaaaaataatagttggataatataaactgaactatttatgcatttttatatacttataaatccttccaaatagttttaattctatccttttacatataaataacttaataagtgtgctggaaaaacacagatgttcacagcaccactgttttttttttttttttttgagataataaattccatgagaaatctgggtttgaatatttgtttactttgtctcctaattgaacaccactccaggccttctgtctgtctcccctttacccccaaaatactcacaaaaaaattttaagacaacaagtaaccatatataggtgtttgaatgattttctcatttttatctaatttcatttcataagtcccgagtaatttacctaccataggctactatactgataatataaatgaaaccgaacattttttgctactaactctccccaatttaatgtgttttcgaaataaaaatttaaatttttttccttttaattaaaaagtcatctttgaagtccttattggctgtacattttacatgtttgctggtactattattttgtcagtcagttaaagctggcatgtacagctcttggctttaatgaaaagcacattgacataatgttagtaaattccaaaccccggcacagaatgtgagttaaaattaagtcttgctgggttagtgtacaataaactatacctacagacttttttttaatagaaagaagacaaagctgctggtataggatttgttcctttgaagaaaaaatgagggaaacaaacacaaaaacctcaatgcagtgtataaataacattttgttcaactacctcttaatgtggaattatctactttaatagtttcctgacagtaatgttaaatagtaactgccaaatttgttattttcccatctctcttaaaaaagtctttatgattattttatatagttttgagaactttaaagccacttttttttaaccttacatttgcataaaaatgtttagcttttaagtagagagcaaattatgatcatatattttgatattcatgacctgtttgactataggagtttttttaaaaaaatgcactttggctataaaaccatggatgatttgatccataagatttaaatgtgccaccattatagtattcctagacatgagcttgatgaatggtattctgtaattataacgtgccacacattattgtgtcttaattgcccttagcctgaattttaatgatcaatttgttattgttgcagatgtgaatattgtgcataaacttactaaatttatgtaaaattgtataaaatagaattagaagtcactaagttctttctgtgtagaagtaataaatttattgtaacacaatgcagttgtgtatatgacattctgtaattccttgaactggatcatatattcataagttctgtagatacttatgcatgaacattttctcatttagttcttgggttcattatttgtattgtgtttactacttgtgatcatgtagttgtgccttactttgtgagaaaggttagctcagtaaatactgcaatttctaaactcagtgattggaaggttattaattataaatgtaactgataaagtacgtgacagcatttaaatctgtataaagaacaatggaaggatccttattgaattgttgcttttttttaatatgtttaaatattatattaaaaacatttctttctaaaaaacgccagaagaaaagacaacacctttgtgggcctaggccctgagagaagttgatgaacacaagtagttgaggcgccgcgcgcccagatggcaactgagaaaggtgccaaagggggctccgagagagacgcgcgcaacaaaaggggtgaggactccaccaaaaaaaagccccgcgagacacagagcttttagaaaacatccaaaggagcatgacaagcacagaggagacacacaaaggaggtcacagagagcgagataatc

SEQ ID NO: 435865 - DNA, 8548 bp, Homo sapiens
ggccgcgggcgggcccgcccatctgtcagttacgggggctgcccggcgggcgggctggaggcgctcgcaggctgcctagtcgttcgctcgctctctctcgcgtgctccctctcgccgcctgtggggaagtcggggccgcccgagcggccgtcgccaccgcctcgccccgacctccttcccggtcccctcccggcccagtccctcccgcccgcgcaccccgagtagtgagtggccccgcgcaggtctggagagtcaccgcggcggcgccgggtggtggttaaaccatgttaaggaggattttacagaggactcctgggagagttggctctcaaggttctgatttagattcatcagcaactcctataaacacagtggacgtcaataatgaaagctcttcagagggtttcatatgtccccagtgtatgaaatctcttggatctgctgatgaacttttcaaacattatgaagctgttcatgatgctggtaatgactcaggtcatggaggagagtctaatcttgctttgaagcgagatgatgtaacactgctcagacaagaggtccaagacctacaggcttcacttaaggaagaaaaatggtactcggaagaattaaagaaggaattagaaaaatatcaagggctgcagcagcaagaggccaaacctgatgggttggtgactgattcatcagcagaactacagtctttggaacagcaattagaagaagcccaaacagaaaattttaatattaagcaaatgaaagacttatttgaacagaaagcagcccaacttgctactgaaattgcagatataaagtcaaagtatgatgaagaaaggagtcttcgagaagctgctgaacaaaaagtgacacgtctgacagaagaattaaacaaagaggcaactgtaattcaagatctgaagacggaactgcttcagagacctggtatagaagatgttgccgtgctaaagaaagaactggtccaagttcaaacactaatggataacatgaccttggaacgtgagcgagaatctgaaaaactcaaagatgaatgcaaaaaattgcagtcacaatatgctagctcagaggccacaataagccagctaaggagtgaacttgccaaaggcccccaggaagttgctgtatatgtacaggaactacaaaaactgaaaagttcagttaatgaattaacacaaaaaaatcagaccttgacagaaaacttgctgaaaaaagaacaagactatactaagttagaggagaaacataatgaagaatctgtgagtaaaaagaatattcaggcaacccttcatcaaaaagacctagattgtcaacagcttcagtcaagattgtctgcatctgaaacctcactgcatagaatacatgtagaactaagtgaaaaaggagaagctactcaaaagctcaaagaagaattatctgaggtagagaccaagtaccagcatctaaaggcggagtttaagcagctacaacaacagagagaagaaaaggagcagcatgggttacaactccaaagtgaaattaatcaattacatagcaaacttctggagacagagcgccaactaggggaagctcatggtaggctgaaggaacagagacagctttcaagtgaaaagttgatggataaagaacaacaagtggctgatttacaactcaaactttctcggttagaagagcagttgaaggaaaaagttacaaattctacagaattgcagcatcaattagataaaacaaagcaacagcatcaagaacaacaggctcttcagcaaagcaccacggcaaaacttcgagaagctcagaatgatttggaacaagttctacgtcaaattggcgataaggaccaaaagatccagaaccttgaagctttattacagaagagtaaagaaaatatttcattactagaaaaagaaagagaagatctttatgcaaaaattcaggctggtgaaggagagactgctgttcttaaccagttacaagaaaaaaaccatacactacaggagcaagtaactcaactaacagagaagctgaagaatcagtcagaaagtcataaacaagcccaggagaatttgcatgaccaggtacaagagcagaaggcacatcttagagctgcacaagaccgtgtcctttccctagaaactagtgtcaatgaattaaatagtcaattaaatgaaagcaaggagaaggtctcccagcttgacatacagattaaagccaaaaccgaactattactatcagcagaagcagcaaaaactgctcaaagagctgatcttcagaatcatttggacacagctcaaaatgcattacaagataaacagcaggagttaaataagattactactcagttggatcaggtcactgcaaagttacaagacaagcaagaacattgcagtcagctggaaagtcatcttaaagaatataaagagaaatacctctctttagaacagaaaaccgaagagctagaaggtcaaattaagaaactagaagctgatagtcttgaagttaaagcaagcaaggagcaggctttgcaagatctacaacagcaaagacagctgaacacagatttagagctcagagccacagaattgagtaaacaacttgaaatggagaaggaaatagtatccagtacaagattggatctacagaaaaaatctgaagcccttgaaagtatcaagcaaaagcttaccaagcaagaggaagaaaaacaaatcctgaaacaagattttgaaactttaagtcaagaaacaaagattcagcatgaggaattgaataacagaattcaaacaacagtaacagaactacaaaaagtgaaaatggagaaagaagctttaatgacagagctttctacagtaaaggacaaactatcaaaagtttctgattctttgaaaaactctaaaagtgaatttgaaaaggagaatcagaaaggaaaagccgctatattagacttggaaaaaacttgcaaagaattaaagcatcaacttcaagtgcagatggaaaacacacttaaggaacagaaggaactgaaaaagtcacttgaaaaagagaaggaggcttctcatcagttgaaattggaactcaattcaatgcaggaacaacttatacaggcccagaatactttaaaacaaaatgaaaaagaagagcaacaacttcaggggaacataaatgagctaaagcaatcaagtgaacagaagaaaaaacaaattgaagcactccaaggagagcttaaaattgctgttttacagaagacagagcttgagaataaactacagcagcagttaacacaggcagcccaggaacttgcagcagagaaagagaaaatatcagtattacaaaacaactatgaaaaaagtcaggaaactttcaaacagcttcaatctgatttctatgggagggaatctgaacttctagccaccaggcaagatcttaagtctgtagaagagaagctttctctagcacaggaggacttgatttcaaacagaaatcaaattggaaatcaaaataaattgattcaagaactgaagactgccaaggctacattggagcaggattcagcaaagaaagaacagcaattgcaggagcgatgtaaagcactacaagacattcagaaagaaaagtcactgaaagaaaaagaactggtaaatgagaagtctaaattggcagagatagaagaaattaaatgtagacaagaaaaagaaatcactaaactaaacgaagaactcaagtcccacaaactagaaagcataaaggagataacaaatcttaaagatgctaaacagcttctaattcagcagaaattagaacttcaaggaaaagcggactccctgaaggcagctgttgaacaggagaagagaaatcagcagatactaaaagaccaggtgaaaaaggaagaagaggagctgaagaaagaatttattgagaaagaagctaagttgcattccgaaataaaagaaaaggaagtaggaatgaagaagcatgaagaaaatgaggctaaacttaccatgcagattacagcattaaatgaaaacttaggcactgtgaagaaggagtggcaatctagtcaacggagagttagtgagcttgagaaacaaacggatgacttacggggtgaaattgcagtattagaagcaacggttcagaataatcaagatgaaaggagagcactactggaaagatgtcttaaaggagaaggtgaaatagaaaagcttcaaaccaaagtattagaattgcaaagaaagctggataatacaactgcagcagtgcaggagctgggcagagaaaaccaatcacttcagatcaaacatacacaagcgttgaatagaaagtgggccgaagacaatgaagtacaaaactgtatggcctgtgggaaaggcttttcagtaacagtgagacggcatcactgccgacagtgtggaaatatcttctgtgctgaatgttcagccaaaaatgccttaactccttcctccaagaagcctgttcgtgtctgtgatgcatgtttcaatgacttgcaaggataatgggttatcacaacttcagagtaatattacactaacattagatttttaataaatgtacttaatagaggtcttggactactatttggtttggacactggttgcaatactagaccaaataggaattagtatattttggaatgttatggatatcaagtaaaactcttctatttttgtgagacttgggcttatcatctttcattacttttttcccatttagcccctggaatagctttcatgccaagtttagaattagccaatgaaatgtaaataaactttggacagaaaatagcaatgtatttttttaatataatttcattattcacaaatgaagaatgcaattccatagcttacttctttctcctaaatttaatgtacaaaaatgtacatggatgatattatcacttgttgctgtttttgttgcacaatagcacattaattatattaaatattctctttgtgaagttatgcacagaactgtaacactttcctctgcctttttctcttatatgtgggttcatggttcagttgcattgttatgttatgaatttactacttgggtgttctaaatacagtttatcttaaaatatgtagtaatatgaattcaaaaatggtttttgttttaacaatattaattaaattttcttgggtggattttataaaaacctctgtaaaatcaatttgtttacttatagttatctggggttgtattgcaaagaatagggttaatttttctttttgtctttttctgtctctttcttaaactcccacgcattgtccatttagaatcttagaaagcttcttaccctcgctgtcagttggaggatgaataataaacattgtataatgttcttattctcggtttcttgtaagtgggaagtcttttgagatcagccttcatatcatacccttattttgtctctctagcatcttcaggaacctgagtttgctttttacatagatctgattttttcctttatttggtttaacattttcaagcatagatcagcttcatgtatttgttttataattttgcatcttaaagctagtaactaatattgctgtggtcttattggtgaaaacaaaatataaaatgataagaagacattaaatattttactttctatttcttaccctattgggaagaatttttaaaagttgtaaaattgacttaaagttaaaatggttctgaatttggtgttccatgtcaactgttcccagttttaattttaactttgcaaaaataatgttgtgaaattccctttaagtaactaacacctagaaatagagtatcaccaaaaacaaatgtatttaggaatcccagttacaataaaaactgaaacagcatggctaagcatcttaaggataattaagaaattagcttatttgtatgctgaacaatggaatcgaactttaatttagcatagtcttattaatttggaaaattgtaaaacatctcaagagagaagttattaatattggtttattaatctttctagagaagaagtgtagttatacattcattcagtgcaatcattttataacagtagttaatatttcatttataatagttcttaatatacatttgctttcaaatattctgaaatgaaattatattcatgctatacctacagtgtatgtaaactaaagagatcactacatatttgtttaattatttaaaaaaaaatttaagtaaaccctgttgtcattagctattaagaacattgattaagtccctggacttggataaacatatatccttgaacatatataatgaagaaatacagtggctctttattaaaaataatagttggataatataaactgaactatttatgcatttttatatacttataaatccttccaaatagttttaattctatccttttacatataaataacttaataagtgtgctggaaaaacacagatgttcacagcaccactgttttttttttttttttttgagataataaattccatgagaaatctgggtttgaatatttgtttactttgtctcctaattgaacaccactccaggccttctgtctgtctcccctttacccccaaaatactcacaaaaaaattttaagacaacaagtaaccatatataggtgtttgaatgattttctcatttttatctaatttcatttcataagtcccgagtaatttacctaccataggctactatactgataatataaatgaaaccgaacattttttgctactaactctccccaatttaatgtgttttcgaaataaaaatttaaatttttttccttttaattaaaaagtcatctttgaagtccttattggctgtacattttacatgtttgctggtactattattttgtcagtcagttaaagctggcatgtacagctcttggctttaatgaaaagcacattgacataatgttagtaaattccaaaccccggcacagaatgtgagttaaaattaagtcttgctgggttagtgtacaataaactatacctacagacttttttttaatagaaagaagacaaagctgctggtataggatttgttcctttgaagaaaaaatgagggaaacaaacacaaaaacctcaatgcagtgtataaataacattttgttcaactacctcttaatgtggaattatctactttaatagtttcctgacagtaatgttaaatagtaactgccaaatttgttattttcccatctctcttaaaaaagtctttatgattattttatatagttttgagaactttaaagccacttttttttaaccttacatttgcataaaaatgtttagcttttaagtagagagcaaattatgatcatatattttgatattcatgacctgtttgactataggagtttttttaaaaaaatgcactttggctataaaaccatggatgatttgatccataagatttaaatgtgccaccattatagtattcctagacatgagcttgatgaatggtattctgtaattataacgtgccacacattattgtgtcttaattgcccttagcctgaattttaatgatcaatttgttattgttgcagatgtgaatattgtgcataaacttactaaatttatgtaaaattgtataaaatagaattagaagtcactaagttctttctgtgtagaagtaataaatttattgtaacacaatgcagttgtgtatatgacattctgtaattccttgaactggatcatatattcataagttctgtagatacttatgcatgaacattttctcatttagttcttgggttcattatttgtattgtgtttactacttgtgatcatgtagttgtgccttactttgtgagaaaggttagctcagtaaatactgcaatttctaaactcagtgattggaaggttattaattataaatgtaactgataaagtacgtgacagcatttaaatctgtataaagaacaatggaaggatccttattgaattgttgcttttttttaatatgtttaaatattatattaaaaacatttctttctaaactagttgtattctgtgactataaattgttttgtctaacaaaagagagaacactgtattaaccattttgcattaatttatttacagaatattaggactttgcacttggatatagacagtggtgttttaatgttgttcaatttcgaatagtaattaaattcctgatctcaagagaaattattaatgccattttgccttagacattccatttaatattgtagagaattaacaaaactaaaaacaaatataaaaaatatgtaattaaccccttatttcattgtgtgtctgcatttaatacccagatgaccatttaaagatacttaaaacattatttatttatttatttatttatttttctccctcccctccccaaagatactttttggaaggcccaatgtgccattgttttttgctattttttcttcctgggagccacggttctagaatggtttttgttctgacccccgtgatcccttcattcgaatgtgcttcattctaaaccctccaaagagtttaatgtgcatatcct

SEQ ID NO: 435866 - DNA, 7967 bp, Homo sapiens
ggccgcgggcgggcccgcccatctgtcagttacgggggctgcccggcgggcgggctggaggcgctcgcaggctgcctagtcgttcgctcgctctctctcgcgtgctccctctcgccgcctgtggggaagtcggggccgcccgagcggccgtcgccaccgcctcgccccgacctccttcccggtcccctcccggcccagtccctcccgcccgcgcaccccgagtagtgagtggccccgcgcaggtctggagagtcaccgcggcggcgccgggtggtggttaaaccatgttaaggaggattttacagaggactcctgggagagttggctctcaaggttctgatttagattcatcagcaactcctataaacacagtggacgtcaataatgaaagctcttcagagggtttcatatgtccccagtgtatgaaatctcttggatctgctgatgaacttttcaaacattatgaagctgttcatgatgctggtaatgactcaggtcatggaggagagtctaatcttgctttgaagcgagatgatgtaacactgctcagacaagaggtccaagacctacaggcttcacttaaggaagaaaaatggtactcggaagaattaaagaaggaattagaaaaatatcaagggctgcagcagcaagaggccaaacctgatgggttggtgactgattcatcagcagaactacagtctttggaacagcaattagaagaagcccaaacagaaaattttaatattaagcaaatgaaagacttatttgaacagaaagcagcccaacttgctactgaaattgcagatataaagtcaaagtatgatgaagaaaggagtcttcgagaagctgctgaacaaaaagtgacacgtctgacagaagaattaaacaaagaggcaactgtaattcaagatctgaagacggaactgcttcagagacctggtatagaagatgttgccgtgctaaagaaagaactggtccaagttcaaacactaatggataacatgaccttggaacgtgagcgagaatctgaaaaactcaaagatgaatgcaaaaaattgcagtcacaatatgctagctcagaggccacaataagccagctaaggagtgaacttgccaaaggcccccaggaagttgctgtatatgtacaggaactacaaaaactgaaaagttcagttaatgaattaacacaaaaaaatcagaccttgacagaaaacttgctgaaaaaagaacaagactatactaagttagaggagaaacataatgaagaatctgtgagtaaaaagaatattcaggcaacccttcatcaaaaagacctagattgtcaacagcttcagtcaagattgtctgcatctgaaacctcactgcatagaatacatgtagaactaagtgaaaaaggagaagctactcaaaagctcaaagaagaattatctgaggtagagaccaagtaccagcatctaaaggcggagtttaagcagctacaacaacagagagaagaaaaggagcagcatgggttacaactccaaagtgaaattaatcaattacatagcaaacttctggagacagagcgccaactaggggaagctcatggtaggctgaaggaacagagacagctttcaagtgaaaagttgatggataaagaacaacaagtggctgatttacaactcaaactttctcggttagaagagcagttgaaggaaaaagttacaaattctacagaattgcagcatcaattagataaaacaaagcaacagcatcaagaacaacaggctcttcagcaaagcaccacggcaaaacttcgagaagctcagaatgatttggaacaagttctacgtcaaattggcgataaggaccaaaagatccagaaccttgaagctttattacagaagagtaaagaaaatatttcattactagaaaaagaaagagaagatctttatgcaaaaattcaggctggtgaaggagagactgctgttcttaaccagttacaagaaaaaaaccatacactacaggagcaagtaactcaactaacagagaagctgaagaatcagtcagaaagtcataaacaagcccaggagaatttgcatgaccaggtacaagagcagaaggcacatcttagagctgcacaagaccgtgtcctttccctagaaactagtgtcaatgaattaaatagtcaattaaatgaaagcaaggagaaggtctcccagcttgacatacagattaaagccaaaaccgaactattactatcagcagaagcagcaaaaactgctcaaagagctgatcttcagaatcatttggacacagctcaaaatgcattacaagataaacagcaggagttaaataagattactactcagttggatcaggtcactgcaaagttacaagacaagcaagaacattgcagtcagctggaaagtcatcttaaagaatataaagagaaatacctctctttagaacagaaaaccgaagagctagaaggtcaaattaagaaactagaagctgatagtcttgaagttaaagcaagcaaggagcaggctttgcaagatctacaacagcaaagacagctgaacacagatttagagctcagagccacagaattgagtaaacaacttgaaatggagaaggaaatagtatccagtacaagattggatctacagaaaaaatctgaagcccttgaaagtatcaagcaaaagcttaccaagcaagaggaagaaaaacaaatcctgaaacaagattttgaaactttaagtcaagaaacaaagattcagcatgaggaattgaataacagaattcaaacaacagtaacagaactacaaaaagtgaaaatggagaaagaagctttaatgacagagctttctacagtaaaggacaaactatcaaaagtttctgattctttgaaaaactctaaaagtgaatttgaaaaggagaatcagaaaggaaaagccgctatattagacttggaaaaaacttgcaaagaattaaagcatcaacttcaagtgcagatggaaaacacacttaaggaacagaaggaactgaaaaagtcacttgaaaaagagaaggaggcttctcatcagttgaaattggaactcaattcaatgcaggaacaacttatacaggcccagaatactttaaaacaaaatgaaaaagaagagcaacaacttcaggggaacataaatgagctaaagcaatcaagtgaacagaagaaaaaacaaattgaagcactccaaggagagcttaaaattgctgttttacagaagacagagcttgagaataaactacagcagcagttaacacaggcagcccaggaacttgcagcagagaaagagaaaatatcagtattacaaaacaactatgaaaaaagtcaggaaactttcaaacagcttcaatctgatttctatgggagggaatctgaacttctagccaccaggcaagatcttaagtctgtagaagagaagctttctctagcacaggaggacttgatttcaaacagaaatcaaattggaaatcaaaataaattgattcaagaactgaagactgccaaggctacattggagcaggattcagcaaagaaagaacagcaattgcaggagcgatgtaaagcactacaagacattcagaaagaaaagtcactgaaagaaaaagaactggtaaatgagaagtctaaattggcagagatagaagaaattaaatgtagacaagaaaaagaaatcactaaactaaacgaagaactcaagtcccacaaactagaaagcataaaggagataacaaatcttaaagatgctaaacagcttctaattcagcagaaattagaacttcaaggaaaagcggactccctgaaggcagctgttgaacaggagaagagaaatcagcagatactaaaagaccaggtgaaaaaggaagaagaggagctgaagaaagaatttattgagaaagaagctaagttgcattccgaaataaaagaaaaggaagtaggaatgaagaagcatgaagaaaatgaggctaaacttaccatgcagattacagcattaaatgaaaacttaggcactgtgaagaaggagtggcaatctagtcaacggagagttagtgagcttgagaaacaaacggatgacttacggggtgaaattgcagtattagaagcaacggttcagaataatcaagatgaaaggagagcactactggaaagatgtcttaaaggagaaggtgaaatagaaaagcttcaaaccaaagtattagaattgcaaagaaagctggataatacaactgcagcagtgcaggagctgggcagagaaaaccaatcacttcagatcaaacatacacaagcgttgaatagaaagtgggccgaagacaatgaagtacaaaactgtatggcctgtgggaaaggcttttcagtaacagtgagacggcatcactgccgacagtgtggaaatatcttctgtgctgaatgttcagccaaaaatgccttaactccttcctccaagaagcctgttcgtgtctgtgatgcatgtttcaatgacttgcaaggataatgggttatcacaacttcagagtaatattacactaacattagatttttaataaatgtacttaatagaggtcttggactactatttggtttggacactggttgcaatactagaccaaataggaattagtatattttggaatgttatggatatcaagtaaaactcttctatttttgtgagacttgggcttatcatctttcattacttttttcccatttagcccctggaatagctttcatgccaagtttagaattagccaatgaaatgtaaataaactttggacagaaaatagcaatgtatttttttaatataatttcattattcacaaatgaagaatgcaattccatagcttacttctttctcctaaatttaatgtacaaaaatgtacatggatgatattatcacttgttgctgtttttgttgcacaatagcacattaattatattaaatattctctttgtgaagttatgcacagaactgtaacactttcctctgcctttttctcttatatgtgggttcatggttcagttgcattgttatgttatgaatttactacttgggtgttctaaatacagtttatcttaaaatatgtagtaatatgaattcaaaaatggtttttgttttaacaatattaattaaattttcttgggtggattttataaaaacctctgtaaaatcaatttgtttacttatagttatctggggttgtattgcaaagaatagggttaatttttctttttgtctttttctgtctctttcttaaactcccacgcattgtccatttagaatcttagaaagcttcttaccctcgctgtcagttggaggatgaataataaacattgtataatgttcttattctcggtttcttgtaagtgggaagtcttttgagatcagccttcatatcatacccttattttgtctctctagcatcttcaggaacctgagtttgctttttacatagatctgattttttcctttatttggtttaacattttcaagcatagatcagcttcatgtatttgttttataattttgcatcttaaagctagtaactaatattgctgtggtcttattggtgaaaacaaaatataaaatgataagaagacattaaatattttactttctatttcttaccctattgggaagaatttttaaaagttgtaaaattgacttaaagttaaaatggttctgaatttggtgttccatgtcaactgttcccagttttaattttaactttgcaaaaataatgttgtgaaattccctttaagtaactaacacctagaaatagagtatcaccaaaaacaaatgtatttaggaatcccagttacaataaaaactgaaacagcatggctaagcatcttaaggataattaagaaattagcttatttgtatgctgaacaatggaatcgaactttaatttagcatagtcttattaatttggaaaattgtaaaacatctcaagagagaagttattaatattggtttattaatctttctagagaagaagtgtagttatacattcattcagtgcaatcattttataacagtagttaatatttcatttataatagttcttaatatacatttgctttcaaatattctgaaatgaaattatattcatgctatacctacagtgtatgtaaactaaagagatcactacatatttgtttaattatttaaaaaaaaatttaagtaaaccctgttgtcattagctattaagaacattgattaagtccctggacttggataaacatatatccttgaacatatataatgaagaaatacagtggctctttattaaaaataatagttggataatataaactgaactatttatgcatttttatatacttataaatccttccaaatagttttaattctatccttttacatataaataacttaataagtgtgctggaaaaacacagatgttcacagcaccactgttttttttttttttttttgagataataaattccatgagaaatctgggtttgaatatttgtttactttgtctcctaattgaacaccactccaggccttctgtctgtctcccctttacccccaaaatactcacaaaaaaattttaagacaacaagtaaccatatataggtgtttgaatgattttctcatttttatctaatttcatttcataagtcccgagtaatttacctaccataggctactatactgataatataaatgaaaccgaacattttttgctactaactctccccaatttaatgtgttttcgaaataaaaatttaaatttttttccttttaattaaaaagtcatctttgaagtccttattggctgtacattttacatgtttgctggtactattattttgtcagtcagttaaagctggcatgtacagctcttggctttaatgaaaagcacattgacataatgttagtaaattccaaaccccggcacagaatgtgatttttaatagaaagaagacaaagctgctggtataggatttgttcctttgaagaaaaaatgagggaaacaaacacaaaaacctcaatgcagtgtataaataacattttgttcaactacctcttaatgtggaattatctactttaatagtttcctgacagtaatgttaaatagtaactgccaaatttgttattttcccatctctcttaaaaaagtctttatgattattttatatagttttgagaactttaaagccacttttttttaaccttacatttgcataaaaatgtttagcttttaagtagagagcaaattatgatcatatattttgatattcatgacctgtttgactataggagtttttttaaaaaaatgcactttggctataaaaccatggatgatttgatccataagatttaaatgtgccaccattatagtattcctagacatgagcttgatgaatggtattctgtaattataacgtgccacacattattgtgtcttaattgcccttagcctgaattttaatgatcaatttgttattgttgcagatgtgaatattgtgcataaacttactaaatttatgtaaaattgtataaaatagaattagaagtcactaagttctttctgtgtagaagtaataaatttattgtaacacaatgcagttgtgtatatgacattctgtaattccttgaactggatcatatattcataagttctgtagatacttatgcatgaacattttctcatttagttcttgggttcattatttgtattgtgtttactacttgtgatcatgtagttgtgccttactttgtgagaaaggttagctcagtaaatactgcaatttctaaactcagtgattggaaggttattaattataaatgtaactgataaagtacgtgacagcatttaaatctgtataaagaacaatggaaggatccttattgaattgttgcttttttttaatatgtttaaatattatattaaaaacatttctttctaaa

SEQ ID NO: 435867 - DNA, 7967 bp, Homo sapiens
ggccgcgggcgggcccgcccatctgtcagttacgggggctgcccggcgggcgggctggaggcgctcgcaggctgcctagtcgttcgctcgctctctctcgcgtgctccctctcgccgcctgtggggaagtcggggccgcccgagcggccgtcgccaccgcctcgccccgacctccttcccggtcccctcccggcccagtccctcccgcccgcgcaccccgagtagtgagtggccccgcgcaggtctggagagtcaccgcggcggcgccgggtggtggttaaaccatgttaaggaggattttacagaggactcctgggagagttggctctcaaggttctgatttagattcatcagcaactcctataaacacagtggacgtcaataatgaaagctcttcagagggtttcatatgtccccagtgtatgaaatctcttggatctgctgatgaacttttcaaacattatgaagctgttcatgatgctggtaatgactcaggtcatggaggagagtctaatcttgctttgaagcgagatgatgtaacactgctcagacaagaggtccaagacctacaggcttcacttaaggaagaaaaatggtactcggaagaattaaagaaggaattagaaaaatatcaagggctgcagcagcaagaggccaaacctgatgggttggtgactgattcatcagcagaactacagtctttggaacagcaattagaagaagcccaaacagaaaattttaatattaagcaaatgaaagacttatttgaacagaaagcagcccaacttgctactgaaattgcagatataaagtcaaagtatgatgaagaaaggagtcttcgagaagctgctgaacaaaaagtgacacgtctgacagaagaattaaacaaagaggcaactgtaattcaagatctgaagacggaactgcttcagagacctggtatagaagatgttgccgtgctaaagaaagaactggtccaagttcaaacactaatggataacatgaccttggaacgtgagcgagaatctgaaaaactcaaagatgaatgcaaaaaattgcagtcacaatatgctagctcagaggccacaataagccagctaaggagtgaacttgccaaaggcccccaggaagttgctgtatatgtacaggaactacaaaaactgaaaagttcagttaatgaattaacacaaaaaaatcagaccttgacagaaaacttgctgaaaaaagaacaagactatactaagttagaggagaaacataatgaagaatctgtgagtaaaaagaatattcaggcaacccttcatcaaaaagacctagattgtcaacagcttcagtcaagattgtctgcatctgaaacctcactgcatagaatacatgtagaactaagtgaaaaaggagaagctactcaaaagctcaaagaagaattatctgaggtagagaccaagtaccagcatctaaaggcggagtttaagcagctacaacaacagagagaagaaaaggagcagcatgggttacaactccaaagtgaaattaatcaattacatagcaaacttctggagacagagcgccaactaggggaagctcatggtaggctgaaggaacagagacagctttcaagtgaaaagttgatggataaagaacaacaagtggctgatttacaactcaaactttctcggttagaagagcagttgaaggaaaaagttacaaattctacagaattgcagcatcaattagataaaacaaagcaacagcatcaagaacaacaggctcttcagcaaagcaccacggcaaaacttcgagaagctcagaatgatttggaacaagttctacgtcaaattggcgataaggaccaaaagatccagaaccttgaagctttattacagaagagtaaagaaaatatttcattactagaaaaagaaagagaagatctttatgcaaaaattcaggctggtgaaggagagactgctgttcttaaccagttacaagaaaaaaaccatacactacaggagcaagtaactcaactaacagagaagctgaagaatcagtcagaaagtcataaacaagcccaggagaatttgcatgaccaggtacaagagcagaaggcacatcttagagctgcacaagaccgtgtcctttccctagaaactagtgtcaatgaattaaatagtcaattaaatgaaagcaaggagaaggtctcccagcttgacatacagattaaagccaaaaccgaactattactatcagcagaagcagcaaaaactgctcaaagagctgatcttcagaatcatttggacacagctcaaaatgcattacaagataaacagcaggagttaaataagattactactcagttggatcaggtcactgcaaagttacaagacaagcaagaacattgcagtcagctggaaagtcatcttaaagaatataaagagaaatacctctctttagaacagaaaaccgaagagctagaaggtcaaattaagaaactagaagctgatagtcttgaagttaaagcaagcaaggagcaggctttgcaagatctacaacagcaaagacagctgaacacagatttagagctcagagccacagaattgagtaaacaacttgaaatggagaaggaaatagtatccagtacaagattggatctacagaaaaaatctgaagcccttgaaagtatcaagcaaaagcttaccaagcaagaggaagaaaaacaaatcctgaaacaagattttgaaactttaagtcaagaaacaaagattcagcatgaggaattgaataacagaattcaaacaacagtaacagaactacaaaaagtgaaaatggagaaagaagctttaatgacagagctttctacagtaaaggacaaactatcaaaagtttctgattctttgaaaaactctaaaagtgaatttgaaaaggagaatcagaaaggaaaagccgctatattagacttggaaaaaacttgcaaagaattaaagcatcaacttcaagtgcagatggaaaacacacttaaggaacagaaggaactgaaaaagtcacttgaaaaagagaaggaggcttctcatcagttgaaattggaactcaattcaatgcaggaacaacttatacaggcccagaatactttaaaacaaaatgaaaaagaagagcaacaacttcaggggaacataaatgagctaaagcaatcaagtgaacagaagaaaaaacaaattgaagcactccaaggagagcttaaaattgctgttttacagaagacagagcttgagaataaactacagcagcagttaacacaggcagcccaggaacttgcagcagagaaagagaaaatatcagtattacaaaacaactatgaaaaaagtcaggaaactttcaaacagcttcaatctgatttctatgggagggaatctgaacttctagccaccaggcaagatcttaagtctgtagaagagaagctttctctagcacaggaggacttgatttcaaacagaaatcaaattggaaatcaaaataaattgattcaagaactgaagactgccaaggctacattggagcaggattcagcaaagaaagaacagcaattgcaggagcgatgtaaagcactacaagacattcagaaagaaaagtcactgaaagaaaaagaactggtaaatgagaagtctaaattggcagagatagaagaaattaaatgtagacaagaaaaagaaatcactaaactaaacgaagaactcaagtcccacaaactagaaagcataaaggagataacaaatcttaaagatgctaaacagcttctaattcagcagaaattagaacttcaaggaaaagcggactccctgaaggcagctgttgaacaggagaagagaaatcagcagatactaaaagaccaggtgaaaaaggaagaagaggagctgaagaaagaatttattgagaaagaagctaagttgcattccgaaataaaagaaaaggaagtaggaatgaagaagcatgaagaaaatgaggctaaacttaccatgcagattacagcattaaatgaaaacttaggcactgtgaagaaggagtggcaatctagtcaacggagagttagtgagcttgagaaacaaacggatgacttacggggtgaaattgcagtattagaagcaacggttcagaataatcaagatgaaaggagagcactactggaaagatgtcttaaaggagaaggtgaaatagaaaagcttcaaaccaaagtattagaattgcaaagaaagctggataatacaactgcagcagtgcaggagctgggcagagaaaaccaatcacttcagatcaaacatacacaagcgttgaatagaaagtgggccgaagacaatgaagtacaaaactgtatggcctgtgggaaaggcttttcagtaacagtgagacggcatcactgccgacagtgtggaaatatcttctgtgctgaatgttcagccaaaaatgccttaactccttcctccaagaagcctgttcgtgtctgtgatgcatgtttcaatgacttgcaaggataatgggttatcacaacttcagagtaatattacactaacattagatttttaataaatgtacttaatagaggtcttggactactatttggtttggacactggttgcaatactagaccaaataggaattagtatattttggaatgttatggatatcaagtaaaactcttctatttttgtgagacttgggcttatcatctttcattacttttttcccatttagcccctggaatagctttcatgccaagtttagaattagccaatgaaatgtaaataaactttggacagaaaatagcaatgtatttttttaatataatttcattattcacaaatgaagaatgcaattccatagcttacttctttctcctaaatttaatgtacaaaaatgtacatggatgatattatcacttgttgctgtttttgttgcacaatagcacattaattatattaaatattctctttgtgaagttatgcacagaactgtaacactttcctctgcctttttctcttatatgtgggttcatggttcagttgcattgttatgttatgaatttactacttgggtgttctaaatacagtttatcttaaaatatgtagtaatatgaattcaaaaatggtttttgttttaacaatattaattaaattttcttgggtggattttataaaaacctctgtaaaatcaatttgtttacttatagttatctggggttgtattgcaaagaatagggttaatttttctttttgtctttttctgtctctttcttaaactcccacgcattgtccatttagaatcttagaaagcttcttaccctcgctgtcagttggaggatgaataataaacattgtataatgttcttattctcggtttcttgtaagtgggaagtcttttgagatcagccttcatatcatacccttattttgtctctctagcatcttcaggaacctgagtttgctttttacatagatctgattttttcctttatttggtttaacattttcaagcatagatcagcttcatgtatttgttttataattttgcatcttaaagctagtaactaatattgctgtggtcttattggtgaaaacaaaatataaaatgataagaagacattaaatattttactttctatttcttaccctattgggaagaatttttaaaagttgtaaaattgacttaaagttaaaatggttctgaatttggtgttccatgtcaactgttcccagttttaattttaactttgcaaaaataatgttgtgaaattccctttaagtaactaacacctagaaatagagtatcaccaaaaacaaatgtatttaggaatcccagttacaataaaaactgaaacagcatggctaagcatcttaaggataattaagaaattagcttatttgtatgctgaacaatggaatcgaactttaatttagcatagtcttattaatttggaaaattgtaaaacatctcaagagagaagttattaatattggtttattaatctttctagagaagaagtgtagttatacattcattcagtgcaatcattttataacagtagttaatatttcatttataatagttcttaatatacatttgctttcaaatattctgaaatgaaattatattcatgctatacctacagtgtatgtaaactaaagagatcactacatatttgtttaattatttaaaaaaaaatttaagtaaaccctgttgtcattagctattaagaacattgattaagtccctggacttggataaacatatatccttgaacatatataatgaagaaatacagtggctctttattaaaaataatagttggataatataaactgaactatttatgcatttttatatacttataaatccttccaaatagttttaattctatccttttacatataaataacttaataagtgtgctggaaaaacacagatgttcacagcaccactgttttttttttttttttttgagataataaattccatgagaaatctgggtttgaatatttgtttactttgtctcctaattgaacaccactccaggccttctgtctgtctcccctttacccccaaaatactcacaaaaaaattttaagacaacaagtaaccatatataggtgtttgaatgattttctcatttttatctaatttcatttcataagtcccgagtaatttacctaccataggctactatactgataatataaatgaaaccgaacattttttgctactaactctccccaatttaatgtgttttcgaaataaaaatttaaatttttttccttttaattaaaaagtcatctttgaagtccttattggctgtacattttacatgtttgctggtactattattttgtcagtcagttaaagctggcatgtacagctcttggctttaatgaaaagcacattgacataatgttagtaaattccaaaccccggcacagaatgtgagttaaaattaagtcttgctgggttagtgtacaataaactatacctacagacttttttttaatagaaagaagacaaagctgctggtataggatttgttcctttgaagaaaaaatgagggaaacaaacacaaaaacctcaatgcagtgtataaataacattttgttcaactacctcttaatgtggaattatctactttaatagtttcctgacagtaatgttaaatagtaactgccaaatttgttattttcccatctctcttaaaaaagtctttatgattattttatatagttttgagaactttaaagccacttttttttaaccttacatttgcataaaaatgtttagcttttaagtagagagcaaattatgatcatatattttgatattcatgacctgtttgactataggagtttttttaaaaaaatgcactttggctataaaaccatggatgatttgatccataagatttaaatgtgccaccattatagtattcctagacatgagcttgatgaatggtattctgtaattataacgtgccacacattattgtgtcttaattgcccttagcctgaattttaatgatcaatttgttattgttgcagatgtgaatattgtgcataaacttactaaatttatgtaaaatttattgtaacacaatgcagttgtgtatatgacattctgtaattccttgaactggatcatatattcataagttctgtagatacttatgcatgaacattttctcatttagttcttgggttcattatttgtattgtgtttactacttgtgatcatgtagttgtgccttactttgtgagaaaggttagctcagtaaatactgcaatttctaaactcagtgattggaaggttattaattataaatgtaactgataaagtacgtgacagcatttaaatctgtataaagaacaatggaaggatccttattgaattgttgcttttttttaatatgtttaaatattatattaaaaacatttctttctaaa

SEQ ID NO: 435868 - DNA, 8062 bp, Homo sapiens
ggccgcgggcgggcccgcccatctgtcagttacgggggctgcccggcgggcgggctggaggcgctcgcaggctgcctagtcgttcgctcgctctctctcgcgtgctccctctcgccgcctgtggggaagtcggggccgcccgagcggccgtcgccaccgcctcgccccgacctccttcccggtcccctcccggcccagtccctcccgcccgcgcaccccgagtagtgagtggccccgcgcaggtctggagagtcaccgcggcggcgccgggtggtggttaaaccatgttaaggaggattttacagaggactcctgggagagttggctctcaaggttctgatttagattcatcagcaactcctataaacacagtggacgtcaataatgaaagctcttcagagggtttcatatgtccccagtgtatgaaatctcttggatctgctgatgaacttttcaaacattatgaagctgttcatgatgctggtaatgactcaggtcatggaggagagtctaatcttgctttgaagcgagatgatgtaacactgctcagacaagaggtccaagacctacaggcttcacttaaggaagaaaaatggtactcggaagaattaaagaaggaattagaaaaatatcaagggctgcagcagcaagaggccaaacctgatgggttggtgactgattcatcagcagaactacagtctttggaacagcaattagaagaagcccaaacagaaaattttaatattaagcaaatgaaagacttatttgaacagaaagcagcccaacttgctactgaaattgcagatataaagtcaaagtatgatgaagaaaggagtcttcgagaagctgctgaacaaaaagtgacacgtctgacagaagaattaaacaaagaggcaactgtaattcaagatctgaagacggaactgcttcagagacctggtatagaagatgttgccgtgctaaagaaagaactggtccaagttcaaacactaatggataacatgaccttggaacgtgagcgagaatctgaaaaactcaaagatgaatgcaaaaaattgcagtcacaatatgctagctcagaggccacaataagccagctaaggagtgaacttgccaaaggcccccaggaagttgctgtatatgtacaggaactacaaaaactgaaaagttcagttaatgaattaacacaaaaaaatcagaccttgacagaaaacttgctgaaaaaagaacaagactatactaagttagaggagaaacataatgaagaatctgtgagtaaaaagaatattcaggcaacccttcatcaaaaagacctagattgtcaacagcttcagtcaagattgtctgcatctgaaacctcactgcatagaatacatgtagaactaagtgaaaaaggagaagctactcaaaagctcaaagaagaattatctgaggtagagaccaagtaccagcatctaaaggcggagtttaagcagctacaacaacagagagaagaaaaggagcagcatgggttacaactccaaagtgaaattaatcaattacatagcaaacttctggagacagagcgccaactaggggaagctcatggtaggctgaaggaacagagacagctttcaagtgaaaagttgatggataaagaacaacaagtggctgatttacaactcaaactttctcggttagaagagcagttgaaggaaaaagttacaaattctacagaattgcagcatcaattagataaaacaaagcaacagcatcaagaacaacaggctcttcagcaaagcaccacggcaaaacttcgagaagctcagaatgatttggaacaagttctacgtcaaattggcgataaggaccaaaagatccagaaccttgaagctttattacagaagagtaaagaaaatatttcattactagaaaaagaaagagaagatctttatgcaaaaattcaggctggtgaaggagagactgctgttcttaaccagttacaagaaaaaaaccatacactacaggagcaagtaactcaactaacagagaagctgaagaatcagtcagaaagtcataaacaagcccaggagaatttgcatgaccaggtacaagagcagaaggcacatcttagagctgcacaagaccgtgtcctttccctagaaactagtgtcaatgaattaaatagtcaattaaatgaaagcaaggagaaggtctcccagcttgacatacagattaaagccaaaaccgaactattactatcagcagaagcagcaaaaactgctcaaagagctgatcttcagaatcatttggacacagctcaaaatgcattacaagataaacagcaggagttaaataagattactactcagttggatcaggtcactgcaaagttacaagacaagcaagaacattgcagtcagctggaaagtcatcttaaagaatataaagagaaatacctctctttagaacagaaaaccgaagagctagaaggtcaaattaagaaactagaagctgatagtcttgaagttaaagcaagcaaggagcaggctttgcaagatctacaacagcaaagacagctgaacacagatttagagctcagagccacagaattgagtaaacaacttgaaatggagaaggaaatagtatccagtacaagattggatctacagaaaaaatctgaagcccttgaaagtatcaagcaaaagcttaccaagcaagaggaagaaaaacaaatcctgaaacaagattttgaaactttaagtcaagaaacaaagattcagcatgaggaattgaataacagaattcaaacaacagtaacagaactacaaaaagtgaaaatggagaaagaagctttaatgacagagctttctacagtaaaggacaaactatcaaaagtttctgattctttgaaaaactctaaaagtgaatttgaaaaggagaatcagaaaggaaaagccgctatattagacttggaaaaaacttgcaaagaattaaagcatcaacttcaagtgcagatggaaaacacacttaaggaacagaaggaactgaaaaagtcacttgaaaaagagaaggagttgttgattgaaagcagacttgtgttgtagatgccagccatgcttctcatcagttgaaattggaactcaattcaatgcaggaacaacttatacaggcccagaatactttaaaacaaaatgaaaaagaagagcaacaacttcaggggaacataaatgagctaaagcaatcaagtgaacagaagaaaaaacaaattgaagcactccaaggagagcttaaaattgctgttttacagaagacagagcttgagaataaactacagcagcagttaacacaggcagcccaggaacttgcagcagagaaagagaaaatatcagtattacaaaacaactatgaaaaaagtcaggaaactttcaaacagcttcaatctgatttctatgggagggaatctgaacttctagccaccaggcaagatcttaagtctgtagaagagaagctttctctagcacaggaggacttgatttcaaacagaaatcaaattggaaatcaaaataaattgattcaagaactgaagactgccaaggctacattggagcaggattcagcaaagaaagaacagcaattgcaggagcgatgtaaagcactacaagacattcagaaagaaaagtcactgaaagaaaaagaactggtaaatgagaagtctaaattggcagagatagaagaaattaaatgtagacaagaaaaagaaatcactaaactaaacgaagaactcaagtcccacaaactagaaagcataaaggagataacaaatcttaaagatgctaaacagcttctaattcagcagaaattagaacttcaaggaaaagcggactccctgaaggcagctgttgaacaggagaagagaaatcagcagatactaaaagaccaggtgaaaaaggaagaagaggagctgaagaaagaatttattgagaaagaagctaagttgcattccgaaataaaagaaaaggaagtaggaatgaagaagcatgaagaaaatgaggctaaacttaccatgcagattacagcattaaatgaaaacttaggcactgtgaagaaggagtggcaatctagtcaacggagagttagtgagcttgagaaacaaacggatgacttacggggtgaaattgcagtattagaagcaacggttcagaataatcaagatgaaaggagagcactactggaaagatgtcttaaaggagaaggtgaaatagaaaagcttcaaaccaaagtattagaattgcaaagaaagctggataatacaactgcagcagtgcaggagctgggcagagaaaaccaatcacttcagatcaaacatacacaagcgttgaatagaaagtgggccgaagacaatgaagtacaaaactgtatggcctgtgggaaaggcttttcagtaacagtgagacggcatcactgccgacagtgtggaaatatcttctgtgctgaatgttcagccaaaaatgccttaactccttcctccaagaagcctgttcgtgtctgtgatgcatgtttcaatgacttgcaaggataatgggttatcacaacttcagagtaatattacactaacattagatttttaataaatgtacttaatagaggtcttggactactatttggtttggacactggttgcaatactagaccaaataggaattagtatattttggaatgttatggatatcaagtaaaactcttctatttttgtgagacttgggcttatcatctttcattacttttttcccatttagcccctggaatagctttcatgccaagtttagaattagccaatgaaatgtaaataaactttggacagaaaatagcaatgtatttttttaatataatttcattattcacaaatgaagaatgcaattccatagcttacttctttctcctaaatttaatgtacaaaaatgtacatggatgatattatcacttgttgctgtttttgttgcacaatagcacattaattatattaaatattctctttgtgaagttatgcacagaactgtaacactttcctctgcctttttctcttatatgtgggttcatggttcagttgcattgttatgttatgaatttactacttgggtgttctaaatacagtttatcttaaaatatgtagtaatatgaattcaaaaatggtttttgttttaacaatattaattaaattttcttgggtggattttataaaaacctctgtaaaatcaatttgtttacttatagttatctggggttgtattgcaaagaatagggttaatttttctttttgtctttttctgtctctttcttaaactcccacgcattgtccatttagaatcttagaaagcttcttaccctcgctgtcagttggaggatgaataataaacattgtataatgttcttattctcggtttcttgtaagtgggaagtcttttgagatcagccttcatatcatacccttattttgtctctctagcatcttcaggaacctgagtttgctttttacatagatctgattttttcctttatttggtttaacattttcaagcatagatcagcttcatgtatttgttttataattttgcatcttaaagctagtaactaatattgctgtggtcttattggtgaaaacaaaatataaaatgataagaagacattaaatattttactttctatttcttaccctattgggaagaatttttaaaagttgtaaaattgacttaaagttaaaatggttctgaatttggtgttccatgtcaactgttcccagttttaattttaactttgcaaaaataatgttgtgaaattccctttaagtaactaacacctagaaatagagtatcaccaaaaacaaatgtatttaggaatcccagttacaataaaaactgaaacagcatggctaagcatcttaaggataattaagaaattagcttatttgtatgctgaacaatggaatcgaactttaatttagcatagtcttattaatttggaaaattgtaaaacatctcaagagagaagttattaatattggtttattaatctttctagagaagaagtgtagttatacattcattcagtgcaatcattttataacagtagttaatatttcatttataatagttcttaatatacatttgctttcaaatattctgaaatgaaattatattcatgctatacctacagtgtatgtaaactaaagagatcactacatatttgtttaattatttaaaaaaaaatttaagtaaaccctgttgtcattagctattaagaacattgattaagtccctggacttggataaacatatatccttgaacatatataatgaagaaatacagtggctctttattaaaaataatagttggataatataaactgaactatttatgcatttttatatacttataaatccttccaaatagttttaattctatccttttacatataaataacttaataagtgtgctggaaaaacacagatgttcacagcaccactgttttttttttttttttttgagataataaattccatgagaaatctgggtttgaatatttgtttactttgtctcctaattgaacaccactccaggccttctgtctgtctcccctttacccccaaaatactcacaaaaaaattttaagacaacaagtaaccatatataggtgtttgaatgattttctcatttttatctaatttcatttcataagtcccgagtaatttacctaccataggctactatactgataatataaatgaaaccgaacattttttgctactaactctccccaatttaatgtgttttcgaaataaaaatttaaatttttttccttttaattaaaaagtcatctttgaagtccttattggctgtacattttacatgtttgctggtactattattttgtcagtcagttaaagctggcatgtacagctcttggctttaatgaaaagcacattgacataatgttagtaaattccaaaccccggcacagaatgtgagttaaaattaagtcttgctgggttagtgtacaataaactatacctacagacttttttttaatagaaagaagacaaagctgctggtataggatttgttcctttgaagaaaaaatgagggaaacaaacacaaaaacctcaatgcagtgtataaataacattttgttcaactacctcttaatgtggaattatctactttaatagtttcctgacagtaatgttaaatagtaactgccaaatttgttattttcccatctctcttaaaaaagtctttatgattattttatatagttttgagaactttaaagccacttttttttaaccttacatttgcataaaaatgtttagcttttaagtagagagcaaattatgatcatatattttgatattcatgacctgtttgactataggagtttttttaaaaaaatgcactttggctataaaaccatggatgatttgatccataagatttaaatgtgccaccattatagtattcctagacatgagcttgatgaatggtattctgtaattataacgtgccacacattattgtgtcttaattgcccttagcctgaattttaatgatcaatttgttattgttgcagatgtgaatattgtgcataaacttactaaatttatgtaaaattgtataaaatagaattagaagtcactaagttctttctgtgtagaagtaataaatttattgtaacacaatgcagttgtgtatatgacattctgtaattccttgaactggatcatatattcataagttctgtagatacttatgcatgaacattttctcatttagttcttgggttcattatttgtattgtgtttactacttgtgatcatgtagttgtgccttactttgtgagaaaggttagctcagtaaatactgcaatttctaaactcagtgattggaaggttattaattataaatgtaactgataaagtacgtgacagcatttaaatctgtataaagaacaatggaaggatccttattgaattgttgcttttttttaatatgtttaaatattatattaaaaacatttctttctaaa

SEQ ID NO: 435869 - DNA, 3873 bp, Homo sapiens
ctggttatagtgaggagttccataataaattctatgtaaaatgtttagcatagtgtttgataaataggaagcattcaatttaattataacagagattaagttaacatattgaaacatatcattaaataatataccaatgacttgaaagctaatgtaccttcataatgtagttggtggtattcatgtagtttcataatacttttggtatagtttttattcttgaaattgtttaatttttgtcatttacagcatcactgccgacagtgtggaaatatcttctgtgctgaatgttcagccaaaaatgccttaactccttcctccaagaagcctgttcgtgtctgtgatgcatgtttcaatgacttgcaaggataatgggttatcacaacttcagagtaatattacactaacattagatttttaataaatgtacttaatagaggtcttggactactatttggtttggacactggttgcaatactagaccaaataggaattagtatattttggaatgttatggatatcaagtaaaactcttctatttttgtgagacttgggcttatcatctttcattacttttttcccatttagcccctggaatagctttcatgccaagtttagaattagccaatgaaatgtaaataaactttggacagaaaatagcaatgtatttttttaatataatttcattattcacaaatgaagaatgcaattccatagcttacttctttctcctaaatttaatgtacaaaaatgtacatggatgatattatcacttgttgctgtttttgttgcacaatagcacattaattatattaaatattctctttgtgaagttatgcacagaactgtaacactttcctctgcctttttctcttatatgtgggttcatggttcagttgcattgttatgttatgaatttactacttgggtgttctaaatacagtttatcttaaaatatgtagtaatatgaattcaaaaatggtttttgttttaacaatattaattaaattttcttgggtggattttataaaaacctctgtaaaatcaatttgtttacttatagttatctggggttgtattgcaaagaatagggttaatttttctttttgtctttttctgtctctttcttaaactcccacgcattgtccatttagaatcttagaaagcttcttaccctcgctgtcagttggaggatgaataataaacattgtataatgttcttattctcggtttcttgtaagtgggaagtcttttgagatcagccttcatatcatacccttattttgtctctctagcatcttcaggaacctgagtttgctttttacatagatctgattttttcctttatttggtttaacattttcaagcatagatcagcttcatgtatttgttttataattttgcatcttaaagctagtaactaatattgctgtggtcttattggtgaaaacaaaatataaaatgataagaagacattaaatattttactttctatttcttaccctattgggaagaatttttaaaagttgtaaaattgacttaaagttaaaatggttctgaatttggtgttccatgtcaactgttcccagttttaattttaactttgcaaaaataatgttgtgaaattccctttaagtaactaacacctagaaatagagtatcaccaaaaacaaatgtatttaggaatcccagttacaataaaaactgaaacagcatggctaagcatcttaaggataattaagaaattagcttatttgtatgctgaacaatggaatcgaactttaatttagcatagtcttattaatttggaaaattgtaaaacatctcaagagagaagttattaatattggtttattaatctttctagagaagaagtgtagttatacattcattcagtgcaatcattttataacagtagttaatatttcatttataatagttcttaatatacatttgctttcaaatattctgaaatgaaattatattcatgctatacctacagtgtatgtaaactaaagagatcactacatatttgtttaattatttaaaaaaaaatttaagtaaaccctgttgtcattagctattaagaacattgattaagtccctggacttggataaacatatatccttgaacatatataatgaagaaatacagtggctctttattaaaaataatagttggataatataaactgaactatttatgcatttttatatacttataaatccttccaaatagttttaattctatccttttacatataaataacttaataagtgtgctggaaaaacacagatgttcacagcaccactgttttttttttttttttttgagataataaattccatgagaaatctgggtttgaatatttgtttactttgtctcctaattgaacaccactccaggccttctgtctgtctcccctttacccccaaaatactcacaaaaaaattttaagacaacaagtaaccatatataggtgtttgaatgattttctcatttttatctaatttcatttcataagtcccgagtaatttacctaccataggctactatactgataatataaatgaaaccgaacattttttgctactaactctccccaatttaatgtgttttcgaaataaaaatttaaatttttttccttttaattaaaaagtcatctttgaagtccttattggctgtacattttacatgtttgctggtactattattttgtcagtcagttaaagctggcatgtacagctcttggctttaatgaaaagcacattgacataatgttagtaaattccaaaccccggcacagaatgtgagttaaaattaagtcttgctgggttagtgtacaataaactatacctacagacttttttttaatagaaagaagacaaagctgctggtataggatttgttcctttgaagaaaaaatgagggaaacaaacacaaaaacctcaatgcagtgtataaataacattttgttcaactacctcttaatgtggaattatctactttaatagtttcctgacagtaatgttaaatagtaactgccaaatttgttattttcccatctctcttaaaaaagtctttatgattattttatatagttttgagaactttaaagccacttttttttaaccttacatttgcataaaaatgtttagcttttaagtagagagcaaattatgatcatatattttgatattcatgacctgtttgactataggagtttttttaaaaaaatgcactttggctataaaaccatggatgatttgatccataagatttaaatgtgccaccattatagtattcctagacatgagcttgatgaatggtattctgtaattataacgtgccacacattattgtgtcttaattgcccttagcctgaattttaatgatcaatttgttattgttgcagatgtgaatattgtgcataaacttactaaatttatgtaaaattgtataaaatagaattagaagtcactaagttctttctgtgtagaagtaataaatttattgtaacacaatgcagttgtgtatatgacattctgtaattccttgaactggatcatatattcataagttctgtagatacttatgcatgaacattttctcatttagttcttgggttcattatttgtattgtgtttactacttgtgatcatgtagttgtgccttactttgtgagaaaggttagctcagtaaatactgcaatttctaaactcagtgattggaaggttattaattataaatgtaactgataaagtacgtgacagcatttaaatctgtataaagaacaatggaaggatccttattgaattgttgcttttttttaatatgtttaaatattatattaaaaacatttctttctaaa

SEQ ID NO: 435870 - DNA, 1782 bp, Homo sapiens
attggagtttgttcaaaaagctcgggttcctgccgccgcgtttcacctggggagaaagccccgaccccaatgcttctacccggttcttctgagcccaggattgatctcacgagttcagtcccctacggtcggctctccgtagtcccacacgaatggcttttatcagaccctcttttaggcgactatactggccccgaaatcttcttttttgttcttactcttctctatcatgtattgttcttgagataataaattccatgagaaatctgggtttgaatatttgtttactttgtctcctaattgaacaccactccaggccttctgtctgtctcccctttacccccaaaatactcacaaaaaaattttaagacaacaagtaaccatatataggtgtttgaatgattttctcatttttatctaatttcatttcataagtcccgagtaatttacctaccataggctactatactgataatataaatgaaaccgaacattttttgctactaactctccccaatttaatgtgttttcgaaataaaaatttaaatttttttccttttaattaaaaagtcatctttgaagtccttattggctgtacattttacatgtttgctggtactattattttgtcagtcagttaaagctggcatgtacagctcttggctttaatgaaaagcacattgacataatgttagtaaattccaaaccccggcacagaatgtgagttaaaattaagtcttgctgggttagtgtacaataaactatacctacagacttttttttaatagaaagaagacaaagctgctggtataggatttgttcctttgaagaaaaaatgagggaaacaaacacaaaaacctcaatgcagtgtataaataacattttgttcaactacctcttaatgtggaattatctactttaatagtttcctgacagtaatgttaaatagtaactgccaaatttgttattttcccatctctcttaaaaaagtctttatgattattttatatagttttgagaactttaaagccacttttttttaaccttacatttgcataaaaatgtttagcttttaagtagagagcaaattatgatcatatattttgatattcatgacctgtttgactataggagtttttttaaaaaaatgcactttggctataaaaccatggatgatttgatccataagatttaaatgtgccaccattatagtattcctagacatgagcttgatgaatggtattctgtaattataacgtgccacacattattgtgtcttaattgcccttagcctgaattttaatgatcaatttgttattgttgcagatgtgaatattgtgcataaacttactaaatttatgtaaaattgtataaaatagaattagaagtcactaagttctttctgtgtagaagtaataaatttattgtaacacaatgcagttgtgtatatgacattctgtaattccttgaactggatcatatattcataagttctgtagatacttatgcatgaacattttctcatttagttcttgggttcattatttgtattgtgtttactacttgtgatcatgtagttgtgccttactttgtgagaaaggttagctcagtaaatactgcaatttctaaactcagtgattggaaggttattaattataaatgtaactgataaagtacgtgacagcatttaaatctgtataaagaacaatggaaggatccttattgaattgttgcttttttttaatatgtttaaatattatattaaaaacatttctttctaaa

SEQ ID NO: 435871 - DNA, 3907 bp, Homo sapiens
  misc_feature (3793)..(3794): n is a, c, g, or t
  misc_feature (3805)..(3805): n is a, c, g, or t
  misc_feature (3807)..(3807): n is a, c, g, or t
  misc_feature (3822)..(3822): n is a, c, g, or t
  misc_feature (3829)..(3829): n is a, c, g, or t
  misc_feature (3836)..(3836): n is a, c, g, or t
  misc_feature (3838)..(3838): n is a, c, g, or t
  misc_feature (3840)..(3840): n is a, c, g, or t
  misc_feature (3854)..(3854): n is a, c, g, or t
  misc_feature (3856)..(3856): n is a, c, g, or t
  misc_feature (3863)..(3863): n is a, c, g, or t
  misc_feature (3865)..(3865): n is a, c, g, or t
  misc_feature (3872)..(3873): n is a, c, g, or t
  misc_feature (3876)..(3876): n is a, c, g, or t
  misc_feature (3883)..(3883): n is a, c, g, or t
ggccgcgggcgggcccgcccatctgtcagttacgggggctgcccggcgggcgggctggaggcgctcgcaggctgcctagtcgttcgctcgctctctctcgcgtgctccctctcgccgcctgtggggaagtcggggccgcccgagcggccgtcgccaccgcctcgccccgacctccttcccggtcccctcccggcccagtccctcccgcccgcgcaccccgagtagtgagtggccccgcgcaggtctggagagtcaccgcggcggcgccgggtggtggttaaaccatgttaaggaggattttacagaggactcctgggagagttggctctcaaggttctgatttagattcatcagcaactcctataaacacagtggacgtcaataatgaaagctcttcagagggtttcatatgtccccagtgtatgaaatctcttggatctgctgatgaacttttcaaacattatgaagctgttcatgatgctggtaatgactcaggtcatggaggagagtctaatcttgctttgaagcgagatgatgtaacactgctcagacaagaggtccaagacctacaggcttcacttaaggaagaaaaatggtactcggaagaattaaagaaggaattagaaaaatatcaagggctgcagcagcaagaggccaaacctgatgggttggtgactgattcatcagcagaactacagtctttggaacagcaattagaagaagcccaaacagaaaattttaatattaagcaaatgaaagacttatttgaacagaaagcagcccaacttgctactgaaattgcagatataaagtcaaagtatgatgaagaaaggagtcttcgagaagctgctgaacaaaaagtgacacgtctgacagaagaattaaacaaagaggcaactgtaattcaagatctgaagacggaactgcttcagagacctggtatagaagatgttgccgtgctaaagaaagaactggtccaagttcaaacactaatggataacatgaccttggaacgtgagcgagaatctgaaaaactcaaagatgaatgcaaaaaattgcagtcacaatatgctagctcagaggccacaataagccagctaaggagtgaacttgccaaaggcccccaggaagttgctgtatatgtacaggaactacaaaaactgaaaagttcagttaatgaattaacacaaaaaaatcagaccttgacagaaaacttgctgaaaaaagaacaagactatactaagttagaggagaaacataatgaagaatctgtgagtaaaaagaatattcaggcaacccttcatcaaaaagacctagattgtcaacagcttcagtcaagattgtctgcatctgaaacctcactgcatagaatacatgtagaactaagtgaaaaaggagaagctactcaaaagctcaaagaagaattatctgaggtagagaccaagtaccagcatctaaaggcggagtttaagcagctacaacaacagagagaagaaaaggagcagcatgggttacaactccaaagtgaaattaatcaattacatagcaaacttctggagacagagcgccaactaggggaagctcatggtaggctgaaggaacagagacagctttcaagtgaaaagttgatggataaagaacaacaagtggctgatttacaactcaaactttctcggttagaagagcagttgaaggaaaaagttacaaattctacagaattgcagcatcaattagataaaacaaagcaacagcatcaagaacaacaggctcttcagcaaagcaccacggcaaaacttcgagaagctcagaatgatttggaacaagttctacgtcaaattggcgataaggaccaaaagatccagaaccttgaagctttattacagaagagtaaagaaaatatttcattactagaaaaagaaagagaagatctttatgcaaaaattcaggctggtgaaggagagactgctgttcttaaccagttacaagaaaaaaaccatacactacaggagcaagtaactcaactaacagagaagctgaagaatcagtcagaaagtcataaacaagcccaggagaatttgcatgaccaggtacaagagcagaaggcacatcttagagctgcacaagaccgtgtcctttccctagaaactagtgtcaatgaattaaatagtcaattaaatgaaagcaaggagaaggtctcccagcttgacatacagattaaagccaaaaccgaactattactatcagcagaagcagcaaaaactgctcaaagagctgatcttcagaatcatttggacacagctcaaaatgcattacaagataaacagcaggagttaaataagattactactcagttggatcaggtcactgcaaagttacaagacaagcaagaacattgcagtcagctggaaagtcatcttaaagaatataaagagaaatacctctctttagaacagaaaaccgaagagctagaaggtcaaattaagaaactagaagctgatagtcttgaagttaaagcaagcaaggagcaggctttgcaagatctacaacagcaaagacagctgaacacagatttagagctcagagccacagaattgagtaaacaacttgaaatggagaaggaaatagtatccagtacaagattggatctacagaaaaaatctgaagcccttgaaagtatcaagcaaaagcttaccaagcaagaggaagaaaaacaaatcctgaaacaagattttgaaactttaagtcaagaaacaaagattcagcatgaggaattgaataacagaattcaaacaacagtaacagaactacaaaaagtgaaaatggagaaagaagctttaatgacagagctttctacagtaaaggacaaactatcaaaagtttctgattctttgaaaaactctaaaagtgaatttgaaaaggagaatcagaaaggaaaagccgctatattagacttggaaaaaacttgcaaagaattaaagcatcaacttcaagtgcagatggaaaacacacttaaggaacagaaggaactgaaaaagtcacttgaaaaagagaaggaggcttctcatcagttgaaattggaactcaattcaatgcaggaacaacttatacaggcccagaatactttaaaacaaaatgaaaaagaagagcaacaacttcaggggaacataaatgagctaaagcaatcaagtgaacagaagaaaaaacaaattgaagcactccaaggagagcttaaaattgctgttttacagaagacagagcttgagaataaactacagcagcagttaacacaggcagcccaggaacttgcagcagagaaagagaaaatatcagtattacaaaacaactatgaaaaaagtcaggaaactttcaaacagcttcaatctgatttctatgggagggaatctgaacttctagccaccaggcaagatcttaagtctgtagaagagaagctttctctagcacaggaggacttgatttcaaacagaaatcaaattggaaatcaaaataaattgattcaagaactgaagactgccaaggctacattggagcaggattcagcaaagaaagaacagcaattgcaggagcgatgtaaagcactacaagacattcagaaagaaaagtcactgaaagaaaaagaactggtaaatgagaagtctaaattggcagagatagaagaaattaaatgtagacaagaaaaagaaatcactaaactaaacgaagaactcaagtcccacaaactagaaagcataaagagatacaatcttaagatgtaacagctctaatcagcagaatnnactcagaaagngntccgagcgcgtgacnggagaancgcgttnancngtgaaggaaggtgnanattggananatgtcgnnagnggggacngggccccataacaccgaaggcggg

SEQ ID NO: 435872 - DNA, 3850 bp, Homo sapiens
  misc_feature (3736)..(3737): n is a, c, g, or t
  misc_feature (3748)..(3748): n is a, c, g, or t
  misc_feature (3750)..(3750): n is a, c, g, or t
  misc_feature (3765)..(3765): n is a, c, g, or t
  misc_feature (3772)..(3772): n is a, c, g, or t
  misc_feature (3779)..(3779): n is a, c, g, or t
  misc_feature (3781)..(3781): n is a, c, g, or t
  misc_feature (3783)..(3783): n is a, c, g, or t
  misc_feature (3797)..(3797): n is a, c, g, or t
  misc_feature (3799)..(3799): n is a, c, g, or t
  misc_feature (3806)..(3806): n is a, c, g, or t
  misc_feature (3808)..(3808): n is a, c, g, or t
  misc_feature (3815)..(3816): n is a, c, g, or t
  misc_feature (3819)..(3819): n is a, c, g, or t
  misc_feature (3826)..(3826): n is a, c, g, or t
ggccgcgggcgggcccgcccatctgtcagttacgggggctgcccggcgggcgggctggaggcgctcgcaggctgcctagtcgttcgctcgctctctctcgcgtgctccctctcgccgcctgtggggaagtcggggccgcccgagcggccgtcgccaccgcctcgccccgacctccttcccggtcccctcccggcccagtccctcccgcccgcgcaccccgagtagtgagtggccccgcgcaggtctggagagtcaccgcggcggcgccgggtggtggttaaaccatgttaaggaggattttacagaggactcctgggagagttggctctcaaggttctgatttagattcatcagcaactcctataaacacagtggacgtcaataatgaaagctcttcagagggtttcatatgtccccagtgtatgaaatctcttggatctgctgatgaacttttcaaacattatgaagctgttcatgatgctggtaatgactcaggtcatggaggagagtctaatcttgctttgaagcgagatgatgtaacactgctcagacaagaggtccaagacctacaggcttcacttaaggaagaaaaatggtactcggaagaattaaagaaggaattagaaaaatatcaagggctgcagcagcaagaggccaaacctgatgggttggtgactgattcatcagcagaactacagtctttggaacagcaattagaagaagcccaaacagaaaattttaatattaagcaaatgaaagacttatttgaacagaaagcagcccaacttgctactgaaattgcagatataaagtcaaagtatgatgaagaaaggagtcttcgagaagctgctgaacaaaaagtgacacgtctgacagaagaattaaacaaagaggcaactgtaattcaagatctgaagacggaactgcttcagagacctggtatagaagatgttgccgtgctaaagaaagaactggtccaagttcaaacactaatggataacatgaccttggaacgtgagcgagaatctgaaaaactcaaagatgaatgcaaaaaattgcagtcacaatatgctagctcagaggccacaataagccagctaaggagtgaacttgccaaaggcccccaggaagttgctgtatatgtacaggaactacaaaaactgaaaagttcagttaatgaattaacacaaaaaaatcagaccttgacagaaaacttgctgaaaaaagaacaagactatactaagttagaggagaaacataatgaagaatctgtgagtaaaaagaatattcaggcaacccttcatcaaaaagacctagattgtcaacagcttcagtcaagattgtctgcatctgaaacctcactgcatagaatacatgtagaactaagtgaaaaaggagaagctactcaaaagctcaaagaagaattatctgaggtagagaccaagtaccagcatctaaaggcggagtttaagcagctacaacaacagagagaagaaaaggagcagcatgggttacaactccaaagtgaaattaatcaattacatagcaaacttctggagacagagcgccaactaggggaagctcatggtaggctgaaggaacagagacagctttcaagtgaaaagttgatggataaagaacaacaagtggctgatttacaactcaaactttctcggttagaagagcagttgaaggaaaaagttacaaattctacagaattgcagcatcaattagataaaacaaagcaacagcatcaagaacaacaggctcttcagcaaagcaccacggcaaaacttcgagaagctcagaatgatttggaacaagttctacgtcaaattggcgataaggaccaaaagatccagaaccttgaagctttattacagaagagtaaagaaaatatttcattactagaaaaagaaagagaagatctttatgcaaaaattcaggctggtgaaggagagactgctgttcttaaccagttacaagaaaaaaaccatacactacaggagcaagtaactcaactaacagagaagctgaagaatcagtcagaaagtcataaacaagcccaggagaatttgcatgaccaggtacaagagcagaaggcacatcttagagctgcacaagaccgtgtcctttccctagaaactagtgtcaatgaattaaatagtcaattaaatgaaagcaaggagaaggtctcccagcttgacatacagattaaagccaaaaccgaactattactatcagcagaagcagcaaaaactgctcaaagagctgatcttcagaatcatttggacacagctcaaaatgcattacaagataaacagcaggagttaaataagattactactcagttggatcaggtcactgcaaagttacaagacaagcaagaacattgcagtcagctggaaagtcatcttaaagaatataaagagaaatacctctctttagaacagaaaaccgaagagctagaaggtcaaattaagaaactagaagctgatagtcttgaagttaaagcaagcaaggagcaggctttgcaagatctacaacagcaaagacagctgaacacagatttagagctcagagccacagaattgagtaaacaacttgaaatggagaaggaaatagtatccagtacaagattggatctacagaaaaaatctgaagcccttgaaagtatcaagcaaaagcttaccaagcaagaggaagaaaaacaaatcctgaaacaagattttgaaactttaagtcaagaaacaaagattcagcatgaggaattgaataacagaattcaaacaacagtaacagaactacaaaaagtgaaaatggagaaagaagctttaatgacagagctttctacagtaaaggacaaactatcaaaagtttctgattctttgaaaaactctaaaagtgaatttgaaaaggagaatcagaaaggaaaagccgctatattagacttggaaaaaacttgcaaagaattaaagcatcaacttcaagtgcagatggaaaacacacttaaggaacagaaggaactgaaaaagtcacttgaaaaagagaaggaggcttctcatcagttgaaattggaactcaattcaatgcaggaacaacttatacaggcccagaatactttaaaacaaaatgaaaaagaagagcaacaacttcaggggaacataaatgagctaaagcaatcaagtgaacagaagaaaaaacaaattgaagcactccaaggagagcttaaaattgctgttttacagaagacagagcttgagaataaactacagcagcagttaacacaggcagcccaggaacttgcagcagagaaagagaaaatatcagtattacaaaacaactatgaaaaaagtcaggaaactttcaaacagcttcaatctgatttctatgggagggaatctgaacttctagccaccaggcaagatcttaagtctgtagaagagaagctttctctagcacaggaggacttgatttcaaacagaaatcaaattggaaatcaaaataaattgattcaagaactgaagactgccaaggctacattggagcaggattcagcaaagaaagaacagcaattgcaggagcgatgtaaagcactacaagacattcagaaagaaaagtcactgaaagaaaaagaactggtaaatgagaagtctaaattggcagagatagaagaaattaaatgtagacaagaaagatacaatcttaagatgtaacagctctaatcagcagaatnnactcagaaagngntccgagcgcgtgacnggagaancgcgttnancngtgaaggaaggtgnanattggananatgtcgnnagnggggacngggccccataacaccgaaggcggg

SEQ ID NO: 435873 - DNA, 819 bp, Homo sapiens
ggcacttaacagtcagttatatgattatttccatgagaaaatgttttttccatttataaacagtaagctttaggaataaaatcgtttttctgagggatttatatatatgctattatagataaaatcttccgtagtttttttttgaattgaaaaaactataatattaatatacaattactagccatgatttcttaagaccagtttgttaattaaaggacattgactattaattccttcctcccatttttatttagagatgatgtaacactgctcagacaagaggtccaagacctacaggcttcacttaaggtaagaataaaaattgttatacctttttattttcagtgtttcagataatacctctttttaaatttactaattaaaaatcttttttattaggaagaaaaatggtactcggaagaattaaagaaggaattagaaaaatatcaagggctgcagcagcaagtaattgcttttaactacttaaagcatgtttattagttgtttatttttattgttgaaaactaaacttaatacctttttgcaagcaggtggcggcctgatataaataacttcctaatttgtttctctgtgttgaattctgatgaatgcaaacaaatgtatgaggagtgaagatgtaattttttaaaaggtgttccattaaaaatgagttactggatgggcccacgcctgtaatcccagcactttgggaggctgaggcgagagagttgcttgagccaggagttcgagaccagcctgggcaacacagggagacccctgtctctacaaaaaatttaaaaattagctgagtgtggtgcc

SEQ ID NO: 435874 - DNA, 1124 bp, Homo sapiens
  misc_feature (974)..(974): n is a, c, g, or t
  misc_feature (988)..(988): n is a, c, g, or t
  misc_feature (1008)..(1008): n is a, c, g, or t
  misc_feature (1025)..(1025): n is a, c, g, or t
gtgcgcggagaacacaaagtaaaacttctgctgttcccagtcctgcagccccagcccagccgtcccccgcgggcgtggcaggtcctgagtcagggcctgtccgtggccagcatccctgctgggcgattgagcagcgggaagctgcttggacccagtctcaaacttaaccctcatctagcacccgggcaggcctcctgggttgcagggacttgagaaaaggcagagttctcaggtcctaggaagctggggcacgctggcgtgacaagcgtcccggagaaagccaagccctcggggagctggggaccgcagcagggctgcagtcacatcctgcgcgggtgggcggcgggccaggccttcagttgtttcgggacgcgccgagcttcgccgctcttccagcggctccgctgccagagctagcccgagcccggttctggggcgaaaatgcctgcccttcacatcgaagatttgccagagaaggaaaaactgaaaatggaagttgagcagcttcgcaaagaagtgaagttgcagagacaacaagtgtctaaatgttctgaagaaataaagaactatattgaagaacgttctggagaggatcctctagtaaagggaattccagaagacaagaacccctttaaagaaaaaggcagctgtgttatttcataaataacttgggagaaactgcatcctaagtggaagaactagtttgttttagttttcccagataaaaccaacatgctttttaaggaaggaagaatgaaattaaaaggagactttcttaagcaccatatagatagggttatgtataaaagcatatgtgctactcatctttgctcactatgcagtcttttttaagagagcagagagtatcagatgtacaattatggaaataagaacattacttgagcatgacacttctttcagtatattgcttgatgcttcaaataaagttttgtcttgggaaaaaaaaaaacacnaaaacaaaattggngggggccggccccgaaaaanttcacacccacgtgggnggcgggggcccaggggaatggaccaggggccagcgggcccgagaaaacgggccggaagggggggtcccccaaaaagcccggggaccggggttgaaaacc

SEQ ID NO: 435875 - DNA, 1753 bp, Homo sapiens
gtgcgcggagaacacaaagtaaaacttctgctgttcccagtcctgcagccccagcccagccgtcccccgcgggcgtggcaggtcctgagtcagggcctgtccgtggccagcatccctgctgggcgattgagcagcgggaagctgcttggacccagtctcaaacttaaccctcatctagcacccgggcaggcctcctgggttgcagggacttgagaaaaggcagagttctcaggtcctaggaagctggggcacgctggcgtgacaagcgtcccggagaaagccaagccctcggggagctggggaccgcagcagggctgcagtcacatcctgcgcgggtgggcggcgggccaggccttcagttgtttcgggacgcgccgagcttcgccgctcttccagcggctccgctgccagagctagcccgagcccggttctggggcgaaaatgcctgcccttcacatcgaagatttgccagagaaggaaaaactgaaaatggaagttgagcagcttcgcaaagaagtgaagttgcagagacaacaagtgtctaaatgttctgaagaaataaagaactatattgaagaacgttctggagaggatcctctagtaaagggaattccagaagacaagaacccctttaaagaaaaaggcagctgtgttatttcataaataacttgggagaaactgcatcctaagtggaagaactagtttgttttagttttcccagataaaaccaacatgctttttaaggaaggaagaatgaaattaaaaggagactttcttaagcaccatatagatagggttatgtataaaagcatatgtgctactcatctttgctcactatgcagtcttttttaagagagcagagagtatcagatgtacaattatggaaataagaacattacttgagcatgacacttctttcagtatattgcttgatgcttcaaataaagttttgtcttgggaaaaaaaaaaaaaaaaaaaaaaaaaaaacaaaaaacaaagaaaaagaaaaaaaagaaaaaacaaaacaaaaaaagaaaaaagaaaagagaagagaagagacaaaagagaaaggaaagaaagaagaggagaagagaagaagaggagagagaagacagagagaccagcagagagacgcagcgcgagacgaggagagcaacagagcagcgaacagaagtaagcagcgagagccgaggcgacgagcaacaccaacgcagcgacgcgaccacgcagagacgcggaagtgcgaccagactgcgggagtaggtgggaagaggagtgggatcagacaggccatcgtccaggtccgagtcatgtaacgctcgagacagaagcagcgagctgcaccaacacgagacaaagaagaaacaccgccagaagagtagaagcagagcaagacagaacataagcgggcagtaaacaaactcaagaacagcaaataaacaacagcgtaacagtcgagggagacagaagaacgagacgaaaagacatgaagacaatagatccgagactaggagggaacagagaacgataacagaaaagagctgagcaaaggcgatgagaaaaagacgaaacagacaaagaccaatctaaatacaggagccaagacaacaagacaagaaaacaatacaagggaaaagtggcaggaagaagatgaagcgaagatgaaccgaaagaagacataagagccaagaaactgcaaccaaggaaaagacagacacgaagagacacagcaaaataaacaaaaaagaaaaag

SEQ ID NO: 435876 - DNA, 961 bp, Homo sapiens
gtgcgcggagaacacaaagtaaaacttctgctgttcccagtcctgcagccccagcccagccgtcccccgcgggcgtggcaggtcctgagtcagggcctgtccgtggccagcatccctgctgggcgattgagcagcgggaagctgcttggacccagtctcaaacttaaccctcatctagcacccgggcaggcctcctgggttgcagggacttgagaaaaggcagagttctcaggtcctaggaagctggggcacgctggcgtgacaagcgtcccggagaaagccaagccctcggggagctggggaccgcagcagggctgcagtcacatcctgcgcgggtgggcggcgggccaggccttcagttgtttcgggacgcgccgagcttcgccgctcttccagcggctccgctgccagagctagcccgagcccggttctggggcgaaaatgcctgcccttcacatcgaagatttgccagagaaggaaaaactgaaaatggaagttgagcagcttcgcaaagaagtgaagttgcagagacaacaagtgtctaaatgttctgaagaaataaagaactatattgaagaacgttctggagaggatcctctagtaaagggaattccagaagacaagaacccctttaaagaaaaaggcagctgtgttatttcataaataacttgggagaaactgcatcctaagtggaagaactagtttgttttagttttcccagataaaaccaacatgctttttaaggaaggaagaatgaaattaaaaggagactttcttaagcaccatatagatagggttatgtataaaagcatatgtgctactcatctttgctcactatgcagtcttttttaagagagcagagagtatcagatgtacaattatggaaataagaacattacttgagcatgacacttctttcagtatattgcttgatgcttcaaataaagttttgtcttgggaa

SEQ ID NO: 435877 - DNA, 3318 bp, Homo sapiens
agcggacagatctctggcggcggcaaggggacagcactgagctctgccgcctggctctagccgcctgcctggcccccgccgggactcttgcccaccctcagccatggctccgatatctctgtcgtggctgctccgcttggccaccttctgccatctgactgtcctgctggctggacagcaccacggtgtgacgaaatgcaacatcacgtgcagcaagatgacatcaaagatacctgtagctttgctcatccactatcaacagaaccaggcatcatgcggcaaacgcgcaatcatcttggagacgagacagcacaggctgttctgtgccgacccgaaggagcaatgggtcaaggacgcgatgcagcatctggaccgccaggctgctgccctaactcgaaatggcggcaccttcgagaagcagatcggcgaggtgaagcccaggaccacccctgccgccgggggaatggacgagtctgtggtcctggagcccgaagccacaggcgaaagcagtagcctggagccgactccttcttcccaggaagcacagagggccctggggacctccccagagctgccgacgggcgtgactggttcctcagggaccaggctccccccgacgccaaaggctcaggatggagggcctgtgggcacggagcttttccgagtgcctcccgtctccactgccgccacgtggcagagttctgctccccaccaacctgggcccagcctctgggctgaggcaaagacctctgaggccccgtccacccaggacccctccacccaggcctccactgcgtcctccccagccccagaggagaatgctccgtctgaaggccagcgtgtgtggggtcagggacagagccccaggccagagaactctctggagcgggaggagatgggtcccgtgccagcgcacacggatgccttccaggactgggggcctggcagcatggcccacgtctctgtggtccctgtctcctcagaagggacccccagcagggagccagtggcttcaggcagctggacccctaaggctgaggaacccatccatgccaccatggacccccagaggctgggcgtccttatcactcctgtccctgacgcccaggctgccacccggaggcaggcggtggggctgctggccttccttggcctcctcttctgcctgggggtggccatgttcacctaccagagcctccagggctgccctcgaaagatggcaggagagatggcggagggccttcgctacatcccccggagctgtggtagtaattcatatgtcctggtgcccgtgtgaactcctctggcctgtgtctagttgtttgattcagacagctgcctgggatccctcatcctcatacccacccccacccaagggcctggcctgagctgggatgattggaggggggaggtgggatcctccaggtgcacaagctccaagctcccaggcattccccaggaggccagccttgaccattctccaccttccagggacagagggggtggcctcccaactcaccccagccccaaaactctcctctgctgctggctggttagaggttccctttgacgccatcccagccccaatgaacaattatttattaaatgcccagccccttctgacccatgctgccctgtgagtactacagtcctcccatctcacacatgagcatcaggccaggccctctgcccactccctgcaacctgattgtgtctcttggtcctgctgcagttgccagtcaccccggccacctgcggtgctatctcccccagccccatcctctgtacagagcccacgcccccactggtgacatgtcttttcttgcatgaggctagtgtggtgtttcctggcactgcttccagtgaggctctgcccttggttaggcattgtgggaaggggagataagggtatctggtgactttcctctttggtctacactgtgctgagtctgaaggctgggttctgatcctagttccaccatcaagccaccaacatactcccatctgtgaaaggaaagagggaggtaaggaatacctgtccccctgacaacactcattgacctgaggcccttctctccagcccctggatgcagcctcacagtccttaccagcagagcaccttagacagtccctgccaatggactaacttgtctttggaccctgaggcccagagggcctgcaagggagtgagttgatagcacagaccctgccctgtgggcccccaaatggaaatgggcagagcagagaccatccctgaaggccccgcccaggcttagtcactgagacagcccgggctctgcctcccatcacccgctaagagggagggagggctccagacacatgtccaagaagcccaggaaaggctccaggagcagccacattcctgatgcttcttcagagactcctgcaggcagccaggccacaagacccttgtggtcccaccccacacacgccagattctttcctgaggctgggctcccttcccacctctctcactccttgaaaacactgttctctgccctccaagaccttctccttcacctttgtccccaccgcagacaggaccagggatttccatgatgttttccatgagtcccctgtttgtttctgaaagggacgctacccgggaagggggctgggacatgggaaaggggaagttgtaggcataaagtcaggggttcccttttttggctgctgaaggctcgagcatgcctggatggggctgcaccggctggcctggcccctcagggtccctggtggcagctcacctctcccttggattgtccccgacccttgccgtctacctgaggggcctcttatgggctgggttctacccaggtgctaggaacactccttcacagatgggtgcttggaggaaggaaacccagctctggtccatagagagcaagacgctgtgctgccctgcccacctggcctctgcactcccctgctgggtgtggcgcagcatattcaggaagctcagggcctggctcaggtggggtcactctggcagctcagagagggtgggagtgggtccaatgcactttgttctggctcttccaggctgggagagcctttcaggggtgggacaccctgtgatggggccctgcctcctttgtgaggaagccgctggggccagttggtcccccttccatggactttgttagtttctccaagcaggacatggacaaggatgatctaggaagactttggaaagagtaggaagactttggaaagacttttccaaccctcatcaccaacgtctgtgccattttgtattttactaataaaatttaaaagtcttgtgaaaaaaaaaaa

SEQ ID NO: 435878 - DNA, 1622 bp, Homo sapiens
agcggacagatctctggcggcggcaaggggacagcactgagctctgccgcctggctctagccgcctgcctggcccccgccgggactcttgcccaccctcagccatggctccgatatctctgtcgtggctgctccgcttggccaccttctgccatctgactgtcctgctggctggacagcaccacggtgtgacgaaatgcaacatcacgtgcagcaagatgacatcaaagatacctgtagctttgctcatccactatcaacagaaccaggcatcatgcggcaaacgcgcaatcatcttggagacgagacagcacaggctgttctgtgccgacccgaaggagcaatgggtcaaggacgcgatgcagcatctggaccgccaggctgctgccctaactcgaaatggcggcaccttcgagaagcagatcggcgaggtgaagcccaggaccacccctgccgccgggggaatggacgagtctgtggtcctggagcccgaagccacaggcgaaagcagtagcctggagccgactccttcttcccaggaagcacagagggccctggggacctccccagagctgccgacgggcgtgactggttcctcagggaccaggctccccccgacgccaaaggctcaggatggagggcctgtgggcacggagcttttccgagtgcctcccgtctccactgccgccacgtggcagagttctgctccccaccaacctgggcccagcctctgggctgaggcaaagacctctgaggccccgtccacccaggacccctccacccaggcctccactgcgtcctccccagccccagaggagaatgctccgtctgaaggccagcgtgtgtggggtcagggacagagccccaggccagagaactctctggagcgggaggagatgggtcccgtgccagcgcacacggatgccttccaggactgggggcctggcagcatggcccacgtctctgtggtccctgtctcctcagaagggacccccagcagggagccagtggcttcaggcagctggacccctaaggctgaggaacccatccatgccaccatggacccccagaggctgggcgtccttatcactcctgtccctgacgcccaggctgccacccggaggcaggcggtggggctgctggccttccttggcctcctcttctgcctgggggtggccatgttcacctaccagagcctccagggctgccctcgaaagatggcaggagagatggcggagggccttcgctacatcccccggagctgtggtagtaattcatatgtcctggtgcccgtgtgaactcctctggcctgtgtctagttgtttgattcagacagctgcctgggatccctcatcctcatacccacccccacccaagggcctggcctgagctgggatgattggaggggggaggtgggatcctccaggtgcacaagctccaagctcccaggcattccccaggaggccagccttgaccattctccaccttccagggacagagggggtggcctcccaactcaccccagccccaaaactctcctctgctgctggctggttagaggttccctttgacgccatcccagccccaatgaacaattatttattaaatgcccagccccttctg

SEQ ID NO: 435879 - DNA, 3307 bp, Homo sapiens
agcggacagatctctggcggcggcaaggggacagcactgagctctgccgcctggctctagccgcctgcctggcccccgccgggactcttgcccaccctcagccatggctccgatatctctgtcgtggctgctccgcttggccaccttctgccatctgactgtcctgctggctggacagcaccacggtgtgacgaaatgcaacatcacgtgcagcaagatgacatcaaagatacctgtagctttgctcatccactatcaacagaaccaggcatcatgcggcaaacgcgcaatcatcttggagacgagacagcacaggctgttctgtgccgacccgaaggagcaatgggtcaaggacgcgatgcagcatctggaccgccaggctgctgccctaactcgaaatggcggcaccttcgagaagcagatcggcgaggtgaagcccaggaccacccctgccgccgggggaatggacgagtctgtggtcctggagcccgaagccacaggcgaaagcagtagcctggagccgactccttcttcccaggaagcacagagggccctggggacctccccagagctgccgacgggcgtgactggttcctcagggaccaggctccccccgacgccaaaggctcaggatggagggcctgtgggcacggagcttttccgagtgcctcccgtctccactgccgccacgtggcagagttctgctccccaccaacctgggcccagcctctgggctgaggcaaagacctctgaggccccgtccacccaggacccctccacccaggcctccactgcgtcctccccagccccagaggagaatgctccgtctgaaggccagcgtgtgtggggtcagggacagagccccaggccagagaactctctggagcgggaggagatgggtcccgtgccagcgcacacggatgccttccaggactgggggcctggcagcatggcccacgtctctgtggtccctgtctcctcagaagggacccccagcagggagccagtggcttcaggcagctggacccctaaggctgaggaacccatccatgccaccatggacccccagaggctgggcgtccttatcactcctgtccctgacgcccaggctgccacccggaggcaggcggtggggctgctggccttccttggcctcctcttctgcctgggggtggccatgttcacctaccagagcctccagggctgccctcgaaagatggcaggagagatggcggagggccttcgctacatcccccggagctgtggtagtaattcatatgtcctggtgcccgtgtgaactcctctggcctgtgtctagttgtttgattcagacagctgcctgggatccctcatcctcatacccacccccacccaagggcctggcctgagctgggatgattggaggggggaggtgggatcctccaggtgcacaagctccaagctcccaggcattccccaggaggccagccttgaccattctccaccttccagggacagagggggtggcctcccaactcaccccagccccaaaactctcctctgctgctggctggttagaggttccctttgacgccatcccagccccaatgaacaattatttattaaatgcccagccccttctgacccatgctgccctgtgagtactacagtcctcccatctcacacatgagcatcaggccaggccctctgcccactccctgcaacctgattgtgtctcttggtcctgctgcagttgccagtcaccccggccacctgcggtgctatctcccccagccccatcctctgtacagagcccacgcccccactggtgacatgtcttttcttgcatgaggctagtgtggtgtttcctggcactgcttccagtgaggctctgcccttggttaggcattgtgggaaggggagataagggtatctggtgactttcctctttggtctacactgtgctgagtctgaaggctgggttctgatcctagttccaccatcaagccaccaacatactcccatctgtgaaaggaaagagggaggtaaggaatacctgtccccctgacaacactcattgacctgaggcccttctctccagcccctggatgcagcctcacagtccttaccagcagagcaccttagacagtccctgccaatggactaacttgtctttggaccctgaggcccagagggcctgcaagggagtgagttgatagcacagaccctgccctgtgggcccccaaatggaaatgggcagagcagagaccatccctgaaggccccgcccaggcttagtcactgagacagcccgggctctgcctcccatcacccgctaagagggagggagggctccagacacatgtccaagaagcccaggaaaggctccaggagcagccacattcctgatgcttcttcagagactcctgcaggcagccaggccacaagacccttgtggtcccaccccacacacgccagattctttcctgaggctgggctcccttcccacctctctcactccttgaaaacactgttctctgccctccaagaccttctccttcacctttgtccccaccgcagacaggaccagggatttccatgatgttttccatgagtcccctgtttgtttctgaaagggacgctacccgggaagggggctgggacatgggaaaggggaagttgtaggcataaagtcaggggttcccttttttggctgctgaaggctcgagcatgcctggatggggctgcaccggctggcctggcccctcagggtccctggtggcagctcacctctcccttggattgtccccgacccttgccgtctacctgaggggcctcttatgggctgggttctacccaggtgctaggaacactccttcacagatgggtgcttggaggaaggaaacccagctctggtccatagagagcaagacgctgtgctgccctgcccacctggcctctgcactcccctgctgggtgtggcgcagcatattcaggaagctcagggcctggctcaggtggggtcactctggcagctcagagagggtgggagtgggtccaatgcactttgttctggctcttccaggctgggagagcctttcaggggtgggacaccctgtgatggggccctgcctcctttgtgaggaagccgctggggccagttggtcccccttccatggactttgttagtttctccaagcaggacatggacaaggatgatctaggaagactttggaaagagtaggcaccctctgccatgccagctccctccccaacccccaacgtcgggtggtaagcgacatggctttaatgattttcgacttttcttt

SEQ ID NO: 435880 - DNA, 2083 bp, Homo sapiens
agcggacagatctctggcggcggcaaggggacagcactgagctctgccgcctggctctagccgcctgcctggcccccgccgggactcttgcccaccctcagccatggctccgatatctctgtcgtggctgctccgcttggccaccttctgccatctgactgtcctgctggctggacagcaccacggtgtgacgaaatgcaacatcacgtgcagcaagatgacatcaaagatacctgtagctttgctcatccactatcaacagaaccaggcatcatgcggcaaacgcgcaatcatcttggagacgagacagcacaggctgttctgtgccgacccgaaggagcaatgggtcaaggacgcgatgcagcatctggaccgccaggctgctgccctaactcgaaatggcggcaccttcgagaagcagatcggcgaggtgaagcccaggaccacccctgccgccgggggaatggacgagtctgtggtcctggagcccgaagccacaggcgaaagcagtagcctggagccgactccttcttcccaggaagcacagagggccctggggacctccccagagctgccgacgggcgtgactggttcctcagggaccaggctccccccgacgccaaaggctcaggatggagggcctgtgggcacggagcttttccgagtgcctcccgtctccactgccgccacgtggcagagttctgctccccaccaacctgggcccagcctctgggctgaggcaaagacctctgaggccccgtccacccaggacccctccacccaggcctccactgcgtcctccccagccccagaggagaatgctccgtctgaaggccagcgtgtgtggggtcagggacagagccccaggccagagaactctctggagcgggaggagatgggtcccgtgccagcgcacacggatgccttccaggactgggggcctggcagcatggcccacgtctctgtggtccctgtctcctcagaagggacccccagcagggagccagtggcttcaggcagctggacccctaaggctgaggaacccatccatgccaccatggacccccagaggctgggcgtccttatcactcctgtccctgacgcccaggctgccacccggaggcaggcggtggggctgctggccttccttggcctcctcttctgcctgggggtggccatgttcacctaccagagcctccagggctgccctcgaaagatggcaggagagatggcggagggccttcgctacatcccccggagctgtggtagtaattcatatgtcctggtgcccgtgtgaactcctctggcctgtgtctagttgtttgattcagacagctgcctgggatccctcatcctcatacccacccccacccaagggcctggcctgagctgggatgattggaggggggaggtgggatcctccaggtgcacaagctccaagctcccaggcattccccaggaggccagccttgaccattctccaccttccagggacagagggggtggcctcccaactcaccccagccccaaaactctcctctgctgctggctggttagaggttccctttgacgccatcccagccccaatgaacaattatttattaaatgcccagccccttctgacccatgctgccctgtgagtactacagtcctcccatctcacacatgagcatcaggccaggccctctgcccactccctgcaacctgattgtgtctcttggtcctgctgcagttgccagtcaccccggccacctgcggtgctatctcccccagccccatcctctgtacagagcccacgcccccactggtgacatgtcttttcttgcatgaggctagtgtggtgtttcctggcactgcttccagtgaggctctgccctcctttgtgaggaagccgctggggccagttggtcccccttccatggactttgttagtttctccaagcaggacatggacaaggatgatctaggaagactttggaaagagtaggaagactttggaaagacttttccaaccctcatcaccaacgtctgtgccattttgtattttactaataaaatttaaaagtcttgtgaaaaaaaaaaa

SEQ ID NO: 435881 - DNA, 546 bp, Homo sapiens
tatcaacagaaccaggcatcatgcggcaaacgcgcaatcatgtaggtactgccctcgaggcctctgaaatcccctttgggcccttggaatattcccagacctctgagaatctacgtccacacctccgctcccagacctgggctcccagccaaaggcctcagcacacgcttctcttgcccctggcctgcaggccacctcactgaccttaatttctgtgccacatggctaaggtggagagtggcttcctgaatggcccagtgtggctgggtggcagccaccctggcttgtggcctggagcagccatgaagggtggtaattcctcctgggctgaagcacatgttaccccacactcgaacccactatatttcatggggcggtgtgggtaggtgtaaagcatgagggtcttacttaaaatgcaggttccagactctaacagacctgatgcaaatcctgccttccctcttactggctgggtggccctgcttccattgcttactttttgcaacttggtttccttgtctgtaaaatgggtagctaggacaggat

SEQ ID NO: 435882 - DNA, 2073 bp, Homo sapiens
gactccgcctgggtcgctgactccgcgcggccgggcgggagggaggtcgaggaggccgctcgcacaaagccgcggaccgctgccccctctccccgccccctgcccggccaacgccgaagtgcggagagcagccgcgggccctttaagggccgcgaggtgcgcggtctctttaaggcgggtcctggtggtttctgttttctgaaggaagtgacggggggtgggattgaatgaaaagtgcaaaacacaggctcgcagcgctggagcccggggccgcggagccgggccggggcagcgccgtctccgcctcggggccgccgggggcgccctgctgagcgctacccacgtgcgtccgcgccacctcgcgggcgaccccgcggccaaggcccccggcggagcggctcccgggcgccccgaactagcccccaactttgggcgaagtttgcctgcgcctctccccgcccccacgcggcgcgccggggccgcggacggcagcggcccccggggatgcgccttcccggggtacccctggcgcgccctgcgctgctgctgctgctgccgctgctcgcgccgctgctgggaacgggtgcgccggccgagctgcgggtccgcgtgcggctgccggacggccaggtgaccgaggagagcctgcaggcggacagcgacgcggacagcatcagcctcgagctgcgcaagcccgacggcaccctcgtctccttcaccgccgacttcaagaaggatgtgaaggtcttccgggccctgatcctgggggagctggagaaggggcagagtcagttccaggccctctgctttgtcacccagctgcagcacaatgagatcatccccagtgaggccatggccaagctccggcagaaaaatccccgggcagtgcggcaggcggaggaggttcggggtctggagcatctgcacatggatgtcgctgtcaacttcagccagggggccctgctgagcccccatctccacaacgtgtgtgccgaggccgtggatgccatctacacccgccaggaggatgtccggttctggctggagcaaggtgtggacagttctgtgttcgaggctctgcccaaggcctcagagcaggcggagctgcctcgctgcaggcaggtgggggaccgcgggaagccctgcgtctgccactatggcctgagcctggcctggtacccctgcatgctcaagtactgccacagccgcgaccggcccacgccctacaagtgtggcatccgcagctgccagaagagctacagcttcgacttctacgtgccccagaggcagctgtgtctctgggatgaggatccctacccaggctagggtgggagcaacctggcgggtggctgctctgggcccactgctcttcaccagccactagagggggtggcaacccccacctgaggccttatttccctccctccccactcccctggccctagagcctgggcccctctggccccatctcacatgactgtgaagggggtgtggcatggcagggggtctcatgaaggcacccccattcccaccctgtgccttccttgcgggcagagagggagagaagggctccccagatctacacccctccctcctgcatctcccctggagtgttcacttgcaagctgccaaaacatgatggcctctggttgttctgttgaactccttgaacgtttagacccatgcacacatctggaaggagctggcccctcagtcccttcctactccccaacaaggggctcactatccccaaagaaggagctgttggggacccacgacgcagcccctgtactggattacagcatattctcatctctggccccgaggctgcctgtggggcgagtggagacctcccatcactgagacagatcacagaccacgagtgcctttcccggacctggacgttgcctccagagcaggcaccagctctttccctctctagacagaaatatttttgtaaggttctggggcagggagggagcatgaagtacgaggaaaacttgaattccagatttttaatgcaaagtatttatcatttctaccagaaataaacgttttaagttttttacttga

SEQ ID NO: 435883 - DNA, 2463 bp, Homo sapiens
gactccgcctgggtcgctgactccgcgcggccgggcgggagggaggtcgaggaggccgctcgcacaaagccgcggaccgctgccccctctccccgccccctgcccggccaacgccgaagtgcggagagcagccgcgggccctttaagggccgcgaggtgcgcggtctctttaaggcgggtcctggtggtttctgttttctgaaggaagtgacggggggtgggattgaatgaaaagtgcaaaacacaggctcgcagcgctggagcccggggccgcggagccgggccggggcagcgccgtctccgcctcggggccgccgggggcgccctgctgagcgctacccacgtgcgtccgcgccacctcgcgggcgaccccgcggccaaggcccccggcggagcggctcccgggcgccccgaactagcccccaactttgggcgaagtttgcctgcgcctctccccgcccccacgcggcgcgccggggccgcggacggcagcggcccccggggatgcgccttcccggggtacccctggcgcgccctgcgctgctgctgctgctgccgctgctcgcgccgctgctgggaacgggtgcgccggccgagctgcgggtccgcgtgcggctgccggacggccaggtgaccgaggagagcctgcaggcggacagcgacgcggacagcatcagcctcgagctgcgcaagcccgacggcaccctcgtctccttcaccgccgacttcaagaaggatgtgaaggtcttccgggccctgatcctgggggagctggagaaggggcagagtcagttccaggccctctgctttgtcacccagctgcagcacaatgagatcatccccagtgaggccatggccaagctccggcagaaaaatccccgggcagtgcggcaggcggaggaggttcggggtctggagcatctgcacatggatgtcgctgtcaacttcagccagggggccctgctgagcccccatctccacaacgtgtgtgccgaggccgtggatgccatctacacccgccaggaggatgtccggttctggctggagcaaggtgtggacagttctgtgttcgaggctctgcccaaggcctcagagcaggcggagctgcctcgctgcaggcaggtgggggaccgcgggaagccctgcgtctgccactatggcctgagcctggcctggtacccctgcatgctcaagtactgccacagccgcgaccggcccacgccctacaagtgtggcatccgcagctgccagaagagctacagcttcgacttctacgtgccccagaggcagctgtgtctctgggatgaggatccctacccaggctagggtgggagcaacctggcgggtggctgctctgggcccactgctcttcaccagccactagagggggtggcaacccccacctgaggccttatttccctccctccccactcccctggccctagagcctgggcccctctggccccatctcacatgactgtgaagggggtgtggcatggcagggggtctcatgaaggcacccccattcccaccctgtgccttccttgcgggcagagagggagagaagggctccccagatctacacccctccctcctgcatctcccctggagtgttcacttgcaagctgccaaaacatgatggcctctggttgttctgttgaactccttgaacgtttagacccatgcacacatctggaaggagctggcccctcagtcccttcctactccccaacaaggggctcactatccccaaagaaggagctgttggggacccacgacgcagcccctgtactggattacagcatattctcatctctggccccgaggctgcctgtggggcgagtggagacctcccatcactgagacagatcacagaccacgagtgcctttcccggacctggacgttgcctccagagcaggcaccagctctttccctctctagacagaaatatttttgtaaggttctggggcagggagggagcatgaagtacgaggaaaacttgaattccagatttttaatgcaaagtatttatcatttctaccagaaataaacgttttaagttttttacttgactaatgagacccagagtttggagaaaacttttggccaatgctgccacctgatgtcagaaagtgtccccacaccctagcagtggcctatcttggaacaagaacttcgaaagcacctactgtgtgctcagccatttgaggaaggaaggaggagaaggaagatgttactagggaaggatgagataaaacttctgcacccaagacaatgagacagacatagctgcaaccgtagtaagccagtcagaaatagccagcgcgaaggcaagagatggggtggagattggaaccccgcttcagatctgggctcggctacttacctgctgtgcagccatgggtcaagttgcttgacctctctgtgcctccactcccttagctataaaatgagcttactta

SEQ ID NO: 435884 - DNA, 2364 bp, Homo sapiens
gactccgcctgggtcgctgactccgcgcggccgggcgggagggaggtcgaggaggccgctcgcacaaagccgcggaccgctgccccctctccccgccccctgcccggccaacgccgaagtgcggagagcagccgcgggccctttaagggccgcgaggtgcgcggtctctttaaggcgggtcctggtggtttctgttttctgaaggaagtgacggggggtgggattgaatgaaaagtgcaaaacacaggctcgcagcgctggagcccggggccgcggagccgggccggggcagcgccgtctccgcctcggggccgccgggggcgccctgctgagcgctacccacgtgcgtccgcgccacctcgcgggcgaccccgcggccaaggcccccggcggagcggctcccgggcgccccgaactagcccccaactttgggcgaagtttgcctgcgcctctccccgcccccacgcggcgcgccggggccgcggacggcagcggcccccggggatgcgccttcccggggtacccctggcgcgccctgcgctgctgctgctgctgccgctgctcgcgccgctgctgggaacgggtgcgccggccgagctgcgggtccgcgtgcggctgccggacggccaggtgaccgaggagagcctgcaggcggacagcgacgcggacagcatcagcctcgagctgcgcaagcccgacggcaccctcgtctccttcaccgccgacttcaagaaggatgtgaaggtcttccgggccctgatcctgggggagctggagaaggggcagagtcagttccaggccctctgctttgtcacccagctgcagcacaatgagatcatccccagtgaggccatggccaagctccggcagaaaaatccccgggcagtgcggcaggcggaggaggttcggggtctggagcatctgcacatggatgtcgctgtcaacttcagccagggggccctgctgagcccccatctccacaacgtgtgtgccgaggccgtggatgccatctacacccgccaggaggatgtccggttctggctggagcaaggtgtggacagttctgtgttcgaggctctgcccaaggcctcagagcaggcggagctgcctcgctgcaggcaggtgggggaccgcgggaagccctgcgtctgccactatggcctgagcctggcctggtacccctgcatgctcaagtactgccacagccgcgaccggcccacgccctacaagtgtggcatccgcagctgccagaagagctacagcttcgacttctacgtgccccagaggcagctgtgtctctgggatgaggatccctacccaggctagggtgggagcaacctggcgggtggctgctctgggcccactgctcttcaccagccactagagggggtggcaacccccacctgaggccttatttccctccctccccactcccctggccctagagcctgggcccctctggccccatctcacatgactgtgaagggggtgtggcatggcagggggtctcatgaaggcacccccattcccaccctgtgccttccttgcgggcagagagggagagaagggctccccagatctacacccctccctcctgcatctcccctggagtgttcacttgcaagctgccaaaacatgatggcctctggttgttctgttgaactccttgaacgtttagacccatgcacacatctggaaggagctggcccctcagtcccttcctactccccaacaaggggctcactatccccaaagaaggagctgttggggacccacgacgcagcccctgtactggattacagcatattctcatctctggccccgaggctgcctgtggggcgagtggagacctcccatcactgagacagatcacagaccacgagtgcctttcccggacctggacgttgcctccagagcaggcaccagctctttccctctctagacagaaatatttttgtaaggttctggggcagggagggagcatgaagtacgaggaaaacttgaattccagatttttaatgcaaagtatttatcatttctaccagaaataaacgttttaagttttttacttgaaaaaaagaaaagaaaagaagaaataaaaagaaagaaagaaaaagaaagacaaaaaaaaaaaaagaaaaaaaggggggggcgaacgaaaaagattcacaccaagagggggcccctgcacaagggcaccacccggggggagggagcaacggggggacccccacaagtaggtcaacgccataaacaatggacggcaggcaaggcgggggcggagttaacaaaccgaaggagcagggggaaaaggcggggacagagagggagacgaggagagaagacacgtacgaagaggggcga

SEQ ID NO: 435885 - DNA, 1460 bp, Homo sapiens
agaaagagaagtaatgaggaaggagaagaggacgacacaggaaagatgaggaggaggaggaggaggaaggatgtgaaggtcttccgggccctgatcctgggggagctggagaaggggcagagtcagttccaggccctctgctttgtcacccagctgcagcacaatgagatcatccccagtgaggccatggccaagctccggcagaaaaatccccgggcagtgcggcaggcggaggaggttcggggtctggagcatctgcacatggatgtcgctgtcaacttcagccagggggccctgctgagcccccatctccacaacgtgtgtgccgaggccgtggatgccatctacacccgccaggaggatgtccggttctggctggagcaaggtgtggacagttctgtgttcgaggctctgcccaaggcctcagagcaggcggagctgcctcgctgcaggcaggtgggggaccgcgggaagccctgcgtctgccactatggcctgagcctggcctggtacccctgcatgctcaagtactgccacagccgcgaccggcccacgccctacaagtgtggcatccgcagctgccagaagagctacagcttcgacttctacgtgccccagaggcagctgtgtctctgggatgaggatccctacccaggctagggtgggagcaacctggcgggtggctgctctgggcccactgctcttcaccagccactagagggggtggcaacccccacctgaggccttatttccctccctccccactcccctggccctagagcctgggcccctctggccccatctcacatgactgtgaagggggtgtggcatggcagggggtctcatgaaggcacccccattcccaccctgtgccttccttgcgggcagagagggagagaagggctccccagatctacacccctccctcctgcatctcccctggagtgttcacttgcaagctgccaaaacatgatggcctctggttgttctgttgaactccttgaacgtttagaccctaaaaggagtctatacctggacacccacctccccagacacaactcccttccccatgcacacatctggaaggagctggcccctcagtcccttcctactccccaacaaggggctcactatccccaaagaaggagctgttggggacccacgacgcagcccctgtactggattacagcatattctcatctctggccccgaggctgcctgtggggcgagtggagacctcccatcactgagacagatcacagaccacgagtgcctttcccggacctggacgttgcctccagagcaggcaccagctctttccctctctagacagaaatatttttgtaaggttctggggcagggagggagcatgaagtacgaggaaaacttgaattccagatttttaatgcaaagtatttatcatttctaccagaaataaacgttttaagttttttacttga

SEQ ID NO: 435886 - DNA, 2471 bp, Homo sapiens
gactccgcctgggtcgctgactccgcgcggccgggcgggagggaggtcgaggaggccgctcgcacaaagccgcggaccgctgccccctctccccgccccctgcccggccaacgccgaagtgcggagagcagccgcgggccctttaagggccgcgaggtgcgcggtctctttaaggcgggtcctggtggtttctgttttctgaaggaagtgacggggggtgggattgaatgaaaagtgcaaaacacaggctcgcagcgctggagcccggggccgcggagccgggccggggcagcgccgtctccgcctcggggccgccgggggcgccctgctgagcgctacccacgtgcgtccgcgccacctcgcgggcgaccccgcggccaaggcccccggcggagcggctcccgggcgccccgaactagcccccaactttgggcgaagtttgcctgcgcctctccccgcccccacgcggcgcgccggggccgcggacggcagcggcccccggggatgcgccttcccggggtacccctggcgcgccctgcgctgctgctgctgctgccgctgctcgcgccgctgctgggaacgggtgcgccggccgagctgcgggtccgcgtgcggctgccggacggccaggtgaccgaggagagcctgcaggcggacagcgacgcggacagcatcagcctcgagctgcgcaagcccgacggcaccctcgtctccttcaccgccgacttcaagaaggatgtgaaggtcttccgggccctgatcctgggggagctggagaaggggcagagtcagttccaggccctctgctttgtcacccagctgcagcacaatgagatcatccccagtgaggccatggccaagctccggcagaaaaatccccgggcagtgcggcaggcggaggaggttcggggtctggagcatctgcacatggatgtcgctgtcaacttcagccagggggccctgctgagcccccatctccacaacgtgtgtgccgaggccgtggatgccatctacacccgccaggaggatgtccggttctggctggagcaaggtgtggacagttctgtgttcgaggctctgcccaaggcctcagagcaggcggagctgcctcgctgcaggcaggtgggggaccgcgggaagccctgcgtctgccactatggcctgagcctggcctggtacccctgcatgctcaagtactgccacagccgcgaccggcccacgccctacaagtgtggcatccgcagctgccagaagagctacagcttcgacttctacgtgccccagaggcagctgtgtctctgggatgaggatccctacccaggctagggtgggagcaacctggcgggtggctgctctgggcccactgctcttcaccagccactagagggggtggcaacccccacctgaggccttatttccctccctccccactcccctggccctagagcctgggcccctctggccccatctcacatgactgtgaagggggtgtggcatggcagggggtctcatgaaggcacccccattcccaccctgtgccttccttgcgggcagagagggagagaagggctccccagatctacacccctccctcctgcatctcccctggagtgttcacttgcaagctgccaaaacatgatggcctctggttgttctgttgaactccttgaacgtttagaccctaaaaggagtctatacctggacacccacctccccagacacaactcccttccccatgcacacatctggaaggagctggcccctcagtcccttcctactccccaacaaggggctcactatccccaaagaaggagctgttggggacccacgacgcagcccctgtactggattacagcatattccatcactgagacagatcacagaccacgagtgcctttcccggacctggacgttgcctccagagcaggcaccagctctttccctctctagacagaaatatttttgtaaggttctggggcagggagggagcatgaagtacgaggaaaacttgaattccagatttttaatgcaaagtatttatcatttctaccagaaataaacgttttaagttttttacttgactaatgagacccagagtttggagaaaacttttggccaatgctgccacctgatgtcagaaagtgtccccacaccctagcagtggcctatcttggaacaagaacttcgaaagcacctactgtgtgctcagccatttgaggaaggaaggaggagaaggaagatgttactagggaaggatgagataaaacttctgcacccaagacaatgagacagacatagctgcaaccgtagtaagccagtcagaaatagccagcgcgaaggcaagagatggggtggagattggaaccccgcttcagatctgggctcggctacttacctgctgtgcagccatgggtcaagttgcttgacctctctgtgcctccactcccttagctataaaatgagcttactta

SEQ ID NO: 435887 - DNA, 2478 bp, Homo sapiens
  misc_feature (1833)..(1833): n is a, c, g, or t
tacagtggttcagacctccacccaggtttctaaagtctgattttcaggttagcctctgacccagaagctaccatttcatacccacctctggcatctccaatttcatcagcaagggagggaattgggagtggaagacaccgaaaggaaaccagctttcccaagtccctttaactccaggtttctccattggcctaggacggggtggagttggagagtgcagtgtgggggagaatagccttaccctcacccaggccactcactcactgcctgcactggccacagcagcttctatgtccagatccttctagggtgggtcacctctcagttctcaaggccccatgcctcatagtgtttgtcagatttccataagaaagtttggtctagaaggaatgatttttcctataagaaaaagacttcggctcggtgtggtggctcacatctgtaatcccaggatttggggaggctgaggcaggcttatcgcttgaaaccaggaatatgaaatcttcaggccaaacgagacccctgtctctacaaaaaatttaaaaattagcggagcacgctggtgtgtgccttgtagtcccagctattcaaggaggctggaaaaaaccttggtgcagaggaacaaatccacagagaccctcgtttgtacagacttgggctggaccacttcccccacgctcttacctccagtggatggagtgttggctacttggccatgcctgcaactcctctctcccctgcatggcctcttggggagctgggtgagggggatgagtttggaaaatatctcaccaaggccaggtgtggtggctcatgcctataatcccagcattttgggaggccgaggcaggcggattacttgaggccaggagttcgagaccagcctgatcaacatggtgaaaccctgtccctactgaaaatacaaaaattagccaggcatggtggtgtgtgcctataatttcagctactctggaggctgaggcgggagaatcacttgaaccggggaggcagaggttgcagtgagccgagatcacgccgttgcactccagcctgggcaacagagtgagactccatctcaaaaaaaaagaaaagaaaatatctcacagacactagtgagcaatcactatgtacgttttttcctgccacttacccactgtgtgacttggcaagtcacttaacctctctgagccccaggctccttgccggtacaccagagacaacagtgtgatgcttggggttcagtgtgcgcagtgactaagaggcccttcgcagaacagaggcccgcgtgggcatgtgaggagtgaggtgccagtgcccgcttggatgtccgtctaccccaccgttaagcatgttgctgcagctgctgcttttctgctgtagggaccaaagcatcatgaggagctaacatccttgaagttggcaagtgttgaagtggctgccactagggattcagataaagggcagggagaggcatcagggctgggagtgcgggtgagagggaagcatggagacccgtctcaggagcactgagtcagcagcacagtggggcgcagttgatccacataaagcctcacattgttcctgcagcagtcaggacagtggtgacctttgggattcggctgacaactgctctggggaggggctgggggcaggagcactgctctgggtgagtggttgtgctaatgccccaagacaagcagcctctgtccaggcctagccctgaggggatgctggcatctcatcatggggcggcctaggtccctgggcactggcctcgggatgtgcgtggcctggctctgggtggaatccatccacccccgttcctgctcgagnagcctgggcagagcagccagggtgcttccagctttgccgtggggctaggaaggcactgcttcctggctggctctgcaggctaaaccccctctcccctccccagcccagcgaagccagccacttctctagccataaagcagccccagccaggagcactgagtcagcagcacagtggggcgcagttgatccacataaagcctcacattgttcctgcagcagtcaggacagtggtgacctttgggattcggctgacagagcactgctctggggaggggctgggggcaggagcactgctctgggtgagtggttgtgctaatgccccaagacaagcagcctctgtccaggcctagccctgaggggatgctggcatctcatcatggggcggcctaggtccctaggctgcctgtggggcgagtggagacctcccatcactgagacagatcacagaccacgagtgcctttcccggacctggacgttgcctccagagcaggcaccagctctttccctctctagacagaaatatttttgtaaggttctggggcagggagggagcatgaagtacgaggaaaacttgaattccagatttttaatgcaaagtatttatcatttctaccagaaataaacgttttaagttttttacttga

SEQ ID NO: 435888 - DNA, 2477 bp, Homo sapiens
  misc_feature (1832)..(1832): n is a, c, g, or t
tacagtggttcagacctccacccaggtttctaaagtctgattttcaggttagcctctgacccagaagctaccatttcatacccacctctggcatctccaatttcatcagcaagggagggaattgggagtggaagacaccgaaaggaaaccagctttcccaagtccctttaactccaggtttctccattggcctaggacggggtggagttggagagtgcagtgtgggggagaatagccttaccctcacccaggccactcactcactgcctgcactggccacagcagcttctatgtccagatccttctagggtgggtcacctctcagttctcaaggccccatgcctcatagtgtttgtcagatttccataagaaagtttggtctagaaggaatgatttttcctataagaaaaagacttcggctcggtgtggtggctcacatctgtaatcccaggatttggggaggctgaggcaggcttatcgcttgaaaccaggaatatgaaatcttcaggccaaacgagacccctgtctctacaaaaaatttaaaaattagcggagcacgctggtgtgtgccttgtagtcccagctattcaaggaggctggaaaaaaccttggtgcagaggaacaaatccacagagaccctcgtttgtacagacttgggctggaccacttcccccacgctcttacctccagtggatggagtgttggctacttggccatgcctgcaactcctctctcccctgcatggcctcttggggagctgggtgagggggatgagtttggaaaatatctcaccaaggccaggtgtggtggctcatgcctataatcccagcattttgggaggccgaggcaggcggattacttgaggccaggagttcgagaccagcctgatcaacatggtgaaaccctgtccctactgaaaatacaaaaattagccaggcatggtggtgtgtgcctataatttcagctactctggaggctgaggcgggagaatcacttgaaccggggaggcagaggttgcagtgagccgagatcacgccgttgcactccagcctgggcaacagagtgagactccatctcaaaaaaaaagaaaagaaaatatctcacagacactagtgagcaatcactatgtacgttttttcctgccacttacccactgtgtgacttggcaagtcacttaacctctctgagccccaggctccttgccggtacaccagagacaacagtgtgatgcttggggttcagtgtgcgcagtgactaagaggcccttcgcagaacagaggcccgcgtgggcatgtgaggagtgaggtgccagtgcccgcttggatgtccgtctaccccaccgttaagcatgttgctgcagctgctgcttttctgctgtagggaccaaagcatcatgaggagctaacatccttgaagttggcaagtgttgaagtggctgccactagggattcagataaagggcagggagaggcatcagggctgggagtgcgggtgagagggaagcatggagacccgtctcaggagcactgagtcagcagcacagtggggcgcagttgatccacataaagcctcacattgttcctgcagcagtcaggacagtggtgacctttgggattcggctgacagagcactgctctggggaggggctgggggcaggagctctgggtgagtggttgtgctaatgccccaagacaagcagcctctgtccaggcctagccctgaggggatgctggcatctcatcatggggcggcctaggtccctgggcactggcctcgggatgtgcgtggcctggctctgggtggaatccatccacccccgttcctgctcgagnagcctgggcagagcagccagggtgcttccagctttgccgtggggctaggaaggcactgcttcctggctggctctgcaggctaaaccccctctcccctccccagcccagcgaagccagccacttctctagccataaagcagccccagccaggagcactgagtcagcagcacagtggggcgcagttgatccacataaagcctcacattgttcctgcagcagtcaggacagtggtgacctttgggattcggctgacagagcactgctctggggaggggctgggggcaggagcactgctctgggtgagtggttgtgctaatgccccaagacaagcagcctctgtccaggcctagccctgaggggatgctggcatctcatcatggggcggcctaggtccctaggctgcctgtggggcgagtggagacctcccatcactgagacagatcacagaccacgagtgcctttcccggacctggacgttgcctccagagcaggcaccagctctttccctctctagacagaaatatttttgtaaggttctggggcagggagggagcatgaagtacgaggaaaacttgaattccagatttttaatgcaaagtatttatcatttctaccagaaataaacgttttaagttttttacttga

SEQ ID NO: 435889 - DNA, 733 bp, Homo sapiens
tcactgacatggggctcctgggtctaatatctgtccctcctctgcgtgtgaggaattcctcctcagatcaggatggccagccctgcctgagggttcagaccccctcccgggagcttggccagcatctcccacccctgaatgctatgtccaggtggagtcctagcaaaagatcccggtaggccatgaagactgccacctgggataatggaggatcctgctgggaagctggtggggagagtgagttagttccctcccaggcttcccaaggcacagagaggtggtggagataaacttaggacagactcctgttccgctggcggagggcccagccttgaagtgaggattgcatagggtctggagatcacccattgagcagtccctcatgtcacacatgctcttatctgatcgcctggagctctcaagtgaggctgacaagatgaagcagctgatgatcccagattaggacccagggttccttccagtatatcctgactgcctgtctgccatggtaccatgagtgggctccttccagtaggctaaagaaccctggggagggaggtggaggggagaaggaggctggaaaaaaccttggtgcagaggaacaaatccacagagaccctcgtttgtacagacttgggctggaccacttcccccacgctcttacctccagtggatggagtgttggctacttggccatgcctgcaactcctctctcccctgcatggcctcttgg

SEQ ID NO: 435890 - DNA, 2126 bp, Homo sapiens
gactccgcctgggtcgctgactccgcgcggccgggcgggagggaggtcgaggaggccgctcgcacaaagccgcggaccgctgccccctctccccgccccctgcccggccaacgccgaagtgcggagagcagccgcgggccctttaagggccgcgaggtgcgcggtctctttaaggcgggtcctggtggtttctgttttctgaaggaagtgacggggggtgggattgaatgaaaagtgcaaaacacaggctcgcagcgctggagcccggggccgcggagccgggccggggcagcgccgtctccgcctcggggccgccgggggcgccctgctgagcgctacccacgtgcgtccgcgccacctcgcgggcgaccccgcggccaaggcccccggcggagcggctcccgggcgccccgaactagcccccaactttgggcgaagtttgcctgcgcctctccccgcccccacgcggcgcgccggggccgcggacggcagcggcccccggggatgcgccttcccggggtacccctggcgcgccctgcgctgctgctgctgctgccgctgctcgcgccgctgctgggaacgggtgcgccggccgagctgcgggtccgcgtgcggctgccggacggccaggtgaccgaggagagcctgcaggcggacagcgacgcggacagcatcagcctcgagctgcgcaagcccgacggcaccctcgtctccttcaccgccgacttcaagaaggatgtgaaggtcttccgggccctgatcctgggggagctggagaaggggcagagtcagttccaggccctctgctttgtcacccagctgcagcacaatgagatcatccccagtgaggccatggccaagctccggcagaaaaatccccgggcagtgcggcaggcggaggaggttcggggtctggagcatctgcacatggatgtcgctgtcaacttcagccagggggccctgctgagcccccatctccacaacgtgtgtgccgaggccgtggatgccatctacacccgccaggaggatgtccggttctggctggagcaaggtgtggacagttctgtgttcgaggctctgcccaaggcctcagagcaggcggagctgcctcgctgcaggcaggtgggggaccgcgggaagccctgcgtctgccactatggcctgagcctggcctggtacccctgcatgctcaagtactgccacagccgcgaccggcccacgccctacaagtgtggcatccgcagctgccagaagagctacagcttcgacttctacgtgccccagaggcagctgtgtctctgggatgaggatccctacccaggctagggtgggagcaacctggcgggtggctgctctgggcccactgctcttcaccagccactagagggggtggcaacccccacctgaggccttatttccctccctccccactcccctggccctagagcctgggcccctctggccccatctcacatgactgtgaagggggtgtggcatggcagggggtctcatgaaggcacccccattcccaccctgtgccttccttgcgggcagagagggagagaagggctccccagatctacacccctccctcctgcatctcccctggagtgttcacttgcaagctgccaaaacatgatggcctctggttgttctgttgaactccttgaacgtttagaccctaaaaggagtctatacctggacacccacctccccagacacaactcccttccccatgcacacatctggaaggagctggcccctcagtcccttcctactccccaacaaggggctcactatccccaaagaaggagctgttggggacccacgacgcagcccctgtactggattacagcatattctcatctctggccccgaggctgcctgtggggcgagtggagacctcccatcactgagacagatcacagaccacgagtgcctttcccggacctggacgttgcctccagagcaggcaccagctctttccctctctagacagaaatatttttgtaaggttctggggcagggagggagcatgaagtacgaggaaaacttgaattccagatttttaatgcaaagtatttatcatttctaccagaaataaacgttttaagttttttacttga

SEQ ID NO: 435891 - DNA, 1980 bp, Homo sapiens
gactccgcctgggtcgctgactccgcgcggccgggcgggagggaggtcgaggaggccgctcgcacaaagccgcggaccgctgccccctctccccgccccctgcccggccaacgccgaagtgcggagagcagccgcgggccctttaagggccgcgaggtgcgcggtctctttaaggcgggtcctggtggtttctgttttctgaaggaagtgacggggggtgggattgaatgaaaagtgcaaaacacaggctcgctcccgggcgccccgaactagcccccaactttgggcgaagtttgcctgcgcctctccccgcccccacgcggcgcgccggggccgcggacggcagcggcccccggggatgcgccttcccggggtacccctggcgcgccctgcgctgctgctgctgctgccgctgctcgcgccgctgctgggaacgggtgcgccggccgagctgcgggtccgcgtgcggctgccggacggccaggtgaccgaggagagcctgcaggcggacagcgacgcggacagcatcagcctcgagctgcgcaagcccgacggcaccctcgtctccttcaccgccgacttcaagaaggatgtgaaggtcttccgggccctgatcctgggggagctggagaaggggcagagtcagttccaggccctctgctttgtcacccagctgcagcacaatgagatcatccccagtgaggccatggccaagctccggcagaaaaatccccgggcagtgcggcaggcggaggaggttcggggtctggagcatctgcacatggatgtcgctgtcaacttcagccagggggccctgctgagcccccatctccacaacgtgtgtgccgaggccgtggatgccatctacacccgccaggaggatgtccggttctggctggagcaaggtgtggacagttctgtgttcgaggctctgcccaaggcctcagagcaggcggagctgcctcgctgcaggcaggtgggggaccgcgggaagccctgcgtctgccactatggcctgagcctggcctggtacccctgcatgctcaagtactgccacagccgcgaccggcccacgccctacaagtgtggcatccgcagctgccagaagagctacagcttcgacttctacgtgccccagaggcagctgtgtctctgggatgaggatccctacccaggctagggtgggagcaacctggcgggtggctgctctgggcccactgctcttcaccagccactagagggggtggcaacccccacctgaggccttatttccctccctccccactcccctggccctagagcctgggcccctctggccccatctcacatgactgtgaagggggtgtggcatggcagggggtctcatgaaggcacccccattcccaccctgtgccttccttgcgggcagagagggagagaagggctccccagatctacacccctccctcctgcatctcccctggagtgttcacttgcaagctgccaaaacatgatggcctctggttgttctgttgaactccttgaacgtttagaccctaaaaggagtctatacctggacacccacctccccagacacaactcccttccccatgcacacatctggaaggagctggcccctcagtcccttcctactccccaacaaggggctcactatccccaaagaaggagctgttggggacccacgacgcagcccctgtactggattacagcatattctcatctctggccccgaggctgcctgtggggcgagtggagacctcccatcactgagacagatcacagaccacgagtgcctttcccggacctggacgttgcctccagagcaggcaccagctctttccctctctagacagaaatatttttgtaaggttctggggcagggagggagcatgaagtacgaggaaaacttgaattccagatttttaatgcaaagtatttatcatttctaccagaaataaacgttttaagttttttacttga

SEQ ID NO: 435892 - DNA, 2042 bp, Homo sapiens
gactccgcctgggtcgctgactccgcgcggccgggcgggagggaggtcgaggaggccgctcgcacaaagccgcggaccgctgccccctctccccgccccctgcccggccaacgccgaagtgcggagagcagccgcgggccctttaagggccgcgaggtgcgcggtctctttaaggcgggtcctggtggtttctgttttctgaaggaagtgacggggggtgggattgaatgaaaagtgcaaaacacaggctcgcagcgctggagcccggggccgcggagccgggccggggcagcgccgtctccgcctcggggccgccgggggcgccctgctgagcgctacccacgtgcgtccgcgccacctcgcgggcgaccccgcggccaaggcccccggcggagcggctcccgggcgccccgaactagcccccaactttgggcgaagtttgcctgcgcctctccccgcccccacgcggcgcgccggggccgcggacggcagcggcccccggggatgcgccttcccggggtacccctggcgcgccctgcgctgctgctgctgctgccgctgctcgcgccgctgctgggaacgggtgcgccggccgagctgcgggtccgcgtgcggctgccggacggccaggtgaccgaggagagcctgcaggcggacagcgacgcggacagcatcagcctcgagctgcgcaagcccgacggcaccctcgtctccttcaccgccgacttcaagaagctgcagcacaatgagatcatccccagtgaggccatggccaagctccggcagaaaaatccccgggcagtgcggcaggcggaggaggttcggggtctggagcatctgcacatggatgtcgctgtcaacttcagccagggggccctgctgagcccccatctccacaacgtgtgtgccgaggccgtggatgccatctacacccgccaggaggatgtccggttctggctggagcaaggtgtggacagttctgtgttcgaggctctgcccaaggcctcagagcaggcggagctgcctcgctgcaggcaggtgggggaccgcgggaagccctgcgtctgccactatggcctgagcctggcctggtacccctgcatgctcaagtactgccacagccgcgaccggcccacgccctacaagtgtggcatccgcagctgccagaagagctacagcttcgacttctacgtgccccagaggcagctgtgtctctgggatgaggatccctacccaggctagggtgggagcaacctggcgggtggctgctctgggcccactgctcttcaccagccactagagggggtggcaacccccacctgaggccttatttccctccctccccactcccctggccctagagcctgggcccctctggccccatctcacatgactgtgaagggggtgtggcatggcagggggtctcatgaaggcacccccattcccaccctgtgccttccttgcgggcagagagggagagaagggctccccagatctacacccctccctcctgcatctcccctggagtgttcacttgcaagctgccaaaacatgatggcctctggttgttctgttgaactccttgaacgtttagaccctaaaaggagtctatacctggacacccacctccccagacacaactcccttccccatgcacacatctggaaggagctggcccctcagtcccttcctactccccaacaaggggctcactatccccaaagaaggagctgttggggacccacgacgcagcccctgtactggattacagcatattctcatctctggccccgaggctgcctgtggggcgagtggagacctcccatcactgagacagatcacagaccacgagtgcctttcccggacctggacgttgcctccagagcaggcaccagctctttccctctctagacagaaatatttttgtaaggttctggggcagggagggagcatgaagtacgaggaaaacttgaattccagatttttaatgcaaagtatttatcatttctaccagaaataaacgttttaagttttttacttga

SEQ ID NO: 435893 - DNA, 1096 bp, Homo sapiens
cttgcctctctccacccgacggtgtggacagttctgtgttcgaggctctgcccaaggcctcagagcaggcggagctgcctcgctgcaggcaggtgggggaccgcgggaagccctgcgtctgccactatggcctgagcctggcctggtacccctgcatgctcaagtactgccacagccgcgaccggcccacgccctacaagtgtggcatccgcagctgccagaagagctacagcttcgacttctacgtgccccagaggcagctgtgtctctgggatgaggatccctacccaggctagggtgggagcaacctggcgggtggctgctctgggcccactgctcttcaccagccactagagggggtggcaacccccacctgaggccttatttccctccctccccactcccctggccctagagcctgggcccctctggccccatctcacatgactgtgaagggggtgtggcatggcagggggtctcatgaaggcacccccattcccaccctgtgccttccttgcgggcagagagggagagaagggctccccagatctacacccctccctcctgcatctcccctggagtgttcacttgcaagctgccaaaacatgatggcctctggttgttctgttgaactccttgaacgtttagaccctaaaaggagtctatacctggacacccacctccccagacacaactcccttccccatgcacacatctggaaggagctggcccctcagtcccttcctactccccaacaaggggctcactatccccaaagaaggagctgttggggacccacgacgcagcccctgtactggattacagcatattctcatctctggccccgaggctgcctgtggggcgagtggagacctcccatcactgagacagatcacagaccacgagtgcctttcccggacctggacgttgcctccagagcaggcaccagctctttccctctctagacagaaatatttttgtaaggttctggggcagggagggagcatgaagtacgaggaaaacttgaattccagatttttaatgcaaagtatttatcatttctaccagaaataaacgttttaagttttttacttga

SEQ ID NO: 435894 - DNA, 124 bp, Homo sapiens
ctcggtctcagtctcctctgaactctcaacttaaagccttgactctggattctatcattcttgttaaagtatcgggtctaggctttaagttgagagttcagagggagactggggaaggtggagg

SEQ ID NO: 435895 - DNA, 1777 bp, Homo sapiens
ccttcacctcactttaccttctcctccagcacaggaactaggaactacggagagagaagccaagggagaggaggaggaggaaactaacgattccctgcccacccccacacccagcaccaccaacaggtgggcaagcttgccgagaaaacgcagagggcatcctgtgagcagcaaacacatctgagcctggaaaagacgcagagaagtaaaagatcaaagtctgattggcaccggctcccattccggctccagcctccaatccgacccccatttcggctgcagcctcggacctagctccggccctcggtctatccggttgcatcctccctccctgttccggatcttatcttgcgccagcgcctactccaggatcccgtagccagacctcaagccatggctggtcccttctcccgtctgctgtccgcccgcccgggactcaggctcctggctttggccggagcggggtctctagccgctgggtttctgctccgaccggaacctgtacgagctgccagtgaacgacggaggctgtatcccccgagcgctgagtacccagacctccgaaagcacaacaactgcatggccagtcacctgaccccagcagtctatgcacggctctgcgacaagaccacacccactggttggacgctagatcagtgtatccagactggcgtggacaaccctggccaccccttcatcaagactgtgggcatggtggctggagatgaggagacctatgaggtatttgctgacctgtttgaccctgtgatccaagagcgacacaatggatatgacccccggacaatgaagcacaccacggatctagatgccagtaaaatccgttctggctactttgatgagaggtatgtattgtcctctagagtcagaactggccgaagcatccgaggactcagtctgcctccagcttgcactcgagcagagcgacgagaggtggaacgtgttgtggtggatgcactgagtggcctgaagggtgacctggctggacgttactataggctcagtgagatgacagaggctgaacagcagcagcttattgatgaccactttctgtttgataagcctgtgtccccgttgctgactgcagcaggaatggctcgagactggccagatgctcgtggaatttggcacaacaatgagaagagcttcctgatctgggtgaatgaggaggatcatacacgggtgatctccatggagaagggtggtaacatgaagagagtgtttgaaagattctgccgaggcctcaaagaggtggagagacttatccaagaacgtggctgggagttcatgtggaatgagcgtttgggatacatcttgacctgtccatctaacctgggcactggacttcgggcaggagtgcacatcaaactgcccctgctaagcaaagatagccgcttcccaaagatcctggagaacctaagactccaaaagcgtggtactggaggagtggacactgctgccacaggcggtgtctttgatatttctaatttggaccgactaggcaaatcagaggtggagctggtgcaactggtcatcgatggagtaaactatttgattgattgtgaacggcgtctggagagaggccaggatatccgcatccccacacctgtcatccacaccaagcattaactccccatcgccagctgatgactcaagattccaaggagttctgctcattctaatgatggcccattctacttgctctggacctgccctcgcatcccctgcctccatcctagtaaagactccttgctatgct

SEQ ID NO: 435896 - DNA, 1800 bp, Homo sapiens
cagcacagagagcaaaagaatacgctagtacaggctccggttattcggccgaggcaggaactaggaactacggagagagaagccaagggagaggaggaggaggaaactaacgattccctgcccacccccacacccagcaccaccaacaggtgggcaagcttgccgagaaaacgcagagggcatcctgtgagcagcaaacacatctgagcctggaaaagacgcagagaagtaaaagatcaaagtctgattggcaccggctcccattccggctccagcctccaatccgacccccatttcggctgcagcctcggacctagctccggccctcggtctatccggttgcatcctccctccctgttccggatcttatcttgcgccagcgcctactccaggatcccgtagccagacctcaagccatggctggtcccttctcccgtctgctgtccgcccgcccgggactcaggctcctggctttggccggagcggggtctctagccgctgggtttctgctccgaccggaacctgtacgagctgccagtgaacgacggaggctgtatcccccgagcgctgagtacccagacctccgaaagcacaacaactgcatggccagtcacctgaccccagcagtctatgcacggctctgcgacaagaccacacccactggttggacgctagatcagtgtatccagactggcgtggacaaccctggccaccccttcatcaagactgtgggcatggtggctggagatgaggagacctatgaggtatttgctgacctgtttgaccctgtgatccaagagcgacacaatggatatgacccccggacaatgaagcacaccacggatctagatgccagtaaaatccgttctggctactttgatgagaggtatgtattgtcctctagagtcagaactggccgaagcatccgaggactcagtctgcctccagcttgcactcgagcagagcgacgagaggtggaacgtgttgtggtggatgcactgagtggcctgaagggtgacctggctggacgttactataggctcagtgagatgacagaggctgaacagcagcagcttattgatgaccactttctgtttgataagcctgtgtccccgttgctgactgcagcaggaatggctcgagactggccagatgctcgtggaatttggcacaacaatgagaagagcttcctgatctgggtgaatgaggaggatcatacacgggtgatctccatggagaagggtggtaacatgaagagagtgtttgaaagattctgccgaggcctcaaagaggtggagagacttatccaagaacgtggctgggagttcatgtggaatgagcgtttgggatacatcttgacctgtccatctaacctgggcactggacttcgggcaggagtgcacatcaaactgcccctgctaagcaaagatagccgcttcccaaagatcctggagaacctaagactccaaaagcgtggtactggaggagtggacactgctgccacaggcggtgtctttgatatttctaatttggaccgactaggcaaatcagaggtggagctggtgcaactggtcatcgatggagtaaactatttgattgattgtgaacggcgtctggagagaggccaggatatccgcatccccacacctgtcatccacaccaagcattaactccccatcgccagctgatgactcaagattccaaggagttctgctcattctaatgatggcccattctacttgctctggacctgccctcgcatcccctgcctccatcctagtaaagactccttgctatgct

SEQ ID NO: 435897 - DNA, 1775 bp, Homo sapiens
aaacgggggctagggagcgagggccccgtgcgcgtgttaaaaactctggcaccgaaggtgagggagaggaggaggaggaaactaacgattccctgcccacccccacacccagcaccaccaacaggtgggcaagcttgccgagaaaacgcagagggcatcctgtgagcagcaaacacatctgagcctggaaaagacgcagagaagtaaaagatcaaagtctgattggcaccggctcccattccggctccagcctccaatccgacccccatttcggctgcagcctcggacctagctccggccctcggtctatccggttgcatcctccctccctgttccggatcttatcttgcgccagcgcctactccaggatcccgtagccagacctcaagccatggctggtcccttctcccgtctgctgtccgcccgcccgggactcaggctcctggctttggccggagcggggtctctagccgctgggtttctgctccgaccggaacctgtacgagctgccagtgaacgacggaggctgtatcccccgagcgctgagtacccagacctccgaaagcacaacaactgcatggccagtcacctgaccccagcagtctatgcacggctctgcgacaagaccacacccactggttggacgctagatcagtgtatccagactggcgtggacaaccctggccaccccttcatcaagactgtgggcatggtggctggagatgaggagacctatgaggtatttgctgacctgtttgaccctgtgatccaagagcgacacaatggatatgacccccggacaatgaagcacaccacggatctagatgccagtaaaatccgttctggctactttgatgagaggtatgtattgtcctctagagtcagaactggccgaagcatccgaggactcagtctgcctccagcttgcactcgagcagagcgacgagaggtggaacgtgttgtggtggatgcactgagtggcctgaagggtgacctggctggacgttactataggctcagtgagatgacagaggctgaacagcagcagcttattgatgaccactttctgtttgataagcctgtgtccccgttgctgactgcagcaggaatggctcgagactggccagatgctcgtggaatttggcacaacaatgagaagagcttcctgatctgggtgaatgaggaggatcatacacgggtgatctccatggagaagggtggtaacatgaagagagtgtttgaaagattctgccgaggcctcaaagaggtggagagacttatccaagaacgtggctgggagttcatgtggaatgagcgtttgggatacatcttgacctgtccatctaacctgggcactggacttcgggcaggagtgcacatcaaactgcccctgctaagcaaagatagccgcttcccaaagatcctggagaacctaagactccaaaagcgtggtactggaggagtggacactgctgccacaggcggtgtctttgatatttctaatttggaccgactaggcaaatcagaggtggagctggtgcaactggtcatcgatggagtaaactatttgattgattgtgaacggcgtctggagagaggccaggatatccgcatccccacacctgtcatccacaccaagcattaactccccatcgccagctgatgactcaagattccaaggagttctgctcattctaatgatggcccattctacttgctctggacctgccctcgcatcccctgcctccatcctagtaaagactccttgctatgct

SEQ ID NO: 435898 - DNA, 1766 bp, Homo sapiens
caaacctaatcggctagggacgaggccggggtgtttaatcggcaccgagggagggagaggaggaggaggaaactaacgattccctgcccacccccacacccagcaccaccaacaggtgggcaagcttgccgagaaaacgcagagggcatcctgtgagcagcaaacacatctgagcctggaaaagacgcagagaagtaaaagatcaaagtctgattggcaccggctcccattccggctccagcctccaatccgacccccatttcggctgcagcctcggacctagctccggccctcggtctatccggttgcatcctccctccctgttccggatcttatcttgcgccagcgcctactccaggatcccgtagccagacctcaagccatggctggtcccttctcccgtctgctgtccgcccgcccgggactcaggctcctggctttggccggagcggggtctctagccgctgggtttctgctccgaccggaacctgtacgagctgccagtgaacgacggaggctgtatcccccgagcgctgagtacccagacctccgaaagcacaacaactgcatggccagtcacctgaccccagcagtctatgcacggctctgcgacaagaccacacccactggttggacgctagatcagtgtatccagactggcgtggacaaccctggccaccccttcatcaagactgtgggcatggtggctggagatgaggagacctatgaggtatttgctgacctgtttgaccctgtgatccaagagcgacacaatggatatgacccccggacaatgaagcacaccacggatctagatgccagtaaaatccgttctggctactttgatgagaggtatgtattgtcctctagagtcagaactggccgaagcatccgaggactcagtctgcctccagcttgcactcgagcagagcgacgagaggtggaacgtgttgtggtggatgcactgagtggcctgaagggtgacctggctggacgttactataggctcagtgagatgacagaggctgaacagcagcagcttattgatgaccactttctgtttgataagcctgtgtccccgttgctgactgcagcaggaatggctcgagactggccagatgctcgtggaatttggcacaacaatgagaagagcttcctgatctgggtgaatgaggaggatcatacacgggtgatctccatggagaagggtggtaacatgaagagagtgtttgaaagattctgccgaggcctcaaagaggtggagagacttatccaagaacgtggctgggagttcatgtggaatgagcgtttgggatacatcttgacctgtccatctaacctgggcactggacttcgggcaggagtgcacatcaaactgcccctgctaagcaaagatagccgcttcccaaagatcctggagaacctaagactccaaaagcgtggtactggaggagtggacactgctgccacaggcggtgtctttgatatttctaatttggaccgactaggcaaatcagaggtggagctggtgcaactggtcatcgatggagtaaactatttgattgattgtgaacggcgtctggagagaggccaggatatccgcatccccacacctgtcatccacaccaagcattaactccccatcgccagctgatgactcaagattccaaggagttctgctcattctaatgatggcccattctacttgctctggacctgccctcgcatcccctgcctccatcctagtaaagactccttgctatgct

SEQ ID NO: 435899 - DNA, 1912 bp, Homo sapiens
cccttgcacacccacagggtagacggatcgagtttcagcttaaaccgaggggtgtgggggaagggtgttgggttcagctagtccacgtgggtgctgtcctccacttggtgctgaaatctgggcggccacatccccggggcgggagggggctacatccccggctttagacgcgcgagtctcaggtcccgctaattacctggcgggtgctgcccacccctgccctcgcgcacctagcgcggtggcaggcgggaaggcggggcctgggggagccccacccctggagactgcggctggggcctccctctcctccgcccgcccgcctgccactagctcattgcgcctctcctgcagtctgattggcaccggctcccattccggctccagcctccaatccgacccccatttcggctgcagcctcggacctagctccggccctcggtctatccggttgcatcctccctccctgttccggatcttatcttgcgccagcgcctactccaggatcccgtagccagacctcaagccatggctggtcccttctcccgtctgctgtccgcccgcccgggactcaggctcctggctttggccggagcggggtctctagccgctgggtttctgctccgaccggaacctgtacgagctgccagtgaacgacggaggctgtatcccccgagcgctgagtacccagacctccgaaagcacaacaactgcatggccagtcacctgaccccagcagtctatgcacggctctgcgacaagaccacacccactggttggacgctagatcagtgtatccagactggcgtggacaaccctggccaccccttcatcaagactgtgggcatggtggctggagatgaggagacctatgaggtatttgctgacctgtttgaccctgtgatccaagagcgacacaatggatatgacccccggacaatgaagcacaccacggatctagatgccagtaaaatccgttctggctactttgatgagaggtatgtattgtcctctagagtcagaactggccgaagcatccgaggactcagtctgcctccagcttgcactcgagcagagcgacgagaggtggaacgtgttgtggtggatgcactgagtggcctgaagggtgacctggctggacgttactataggctcagtgagatgacagaggctgaacagcagcagcttattgatgaccactttctgtttgataagcctgtgtccccgttgctgactgcagcaggaatggctcgagactggccagatgctcgtggaatttggcacaacaatgagaagagcttcctgatctgggtgaatgaggaggatcatacacgggtgatctccatggagaagggtggtaacatgaagagagtgtttgaaagattctgccgaggcctcaaagaggtggagagacttatccaagaacgtggctgggagttcatgtggaatgagcgtttgggatacatcttgacctgtccatctaacctgggcactggacttcgggcaggagtgcacatcaaactgcccctgctaagcaaagatagccgcttcccaaagatcctggagaacctaagactccaaaaacgtggtactggaggagtggacactgctgctacaggcggtgtctttgatatttctaatttggaccgactaggcaaatcagaggtggagctggtgcaactggtcatcgatggagtaaactatttgattgattgtgaacggcgtctggagagaggccaggatatccgcatccccacacctgtcatccacaccaagcattaactccccatcgccagctgatgactcaagattcccaggagttctgctcattctaatgatggcccattctacttgctctggacctgcccccgcatcccctgcctccatcctagtaaagactccttgctatgctgca

SEQ ID NO: 435900 - DNA, 1808 bp, Homo sapiens
ccttcacctcactttaccttctcctccagcacaggaactaggaactacggagagagaagccaagggagaggaggaggaggaaactaacgattccctgcccacccccacacccagcaccaccaacaggtgggcaagcttgccgagaaaacgcagagggcatcctgtgagcagcaaacacatctgagcctggaaaagacgcagagaagtaaaagatcaaagtctgattggcaccggctcccattccggctccagcctccaatccgacccccatttcggctgcagcctcggacctagctccggccctcggtctatccggttgcatcctccctccctgttccggatcttatcttgcgccagcgcctactccaggatcccgtagccagacctcaagccatggctggtcccttctcccgtctgctgtccgcccgcccgggactcaggctcctggctttggccggagcggggtctctagccgctgggtttctgctccgaccggaacctgtacgagctgccagtgaacgacggaggctgtatcccccgagcgctgagtacccagacctccgaaagcacaacaactgcatggccagtcacctgaccccagcagtctatgcacggctctgcgacaagaccacacccactggttggacgctagatcagtgtatccagactggcgtggacaaccctggccaccccttcatcaagactgtgggcatggtggctggagatgaggagacctatgaggtatttgctgacctgtttgaccctgtgatccaagagcgacacaatggatatgacccccggacaatgaagcacaccacggatctagatgccagtaaaatccgttctggctactttgatgagaggtatgtattgtcctctagagtcagaactggccgaagcatccgaggactcagtctgcctccagcttgcactcgagcagagcgacgagaggtggaacgtgttgtggtggatgcactgagtggcctgaagggtgacctggctggacgttactataggctcagtgagatgacagaggctgaacagcagcagcttattgatgaccactttctgtttgataagcctgtgtccccgttgctgactgcagcaggaatggctcgagactggccagatgctcgtggaatttggcacaacaatgagaagagcttcctgatctgggtgaatgaggaggatcatacacgggtgatctccatggagaagggtggtaacatgaagagagtgtttgaaagattctgccgaggcctcaaagaggtggagagacttatccaagaacgtggctgggagttcatgtggaatgagcgtttgggatacatcttgacctgtccatctaacctgggcactggacttcgggcaggagtgcacatcaaactgcccctgctaagcaaagatagccgcttcccaaagatcctggagaacctaagactccaaaagcgtggtactggaggagtggacactgctgccacaggcggtgtctttgatatttctaatttggaccgactaggcaaatcagaggtggagctggtgcaactggtcatcgatggagtaaactatttgattgattgtgaacggcgtctggagagaggccaggatatccgcatccccacacctgtcatccacaccaagcattaactccccatcgccagctgatgactcaagattccaaggagttctgctcattctaatgatggcccattctacttgctctggacctgccctcgcatcccctgcctccatcctagtaaagactccttgctatgctgcagctgtctgtgttacttctaatggtgggg

SEQ ID NO: 435901 - DNA, 1642 bp, Homo sapiens
ccttcacctcactttaccttctcctccagcacaggaactaggaactacggagagagaagccaagggagaggaggaggaggaaactaacgattccctgcccacccccacacccagcaccaccaacaggtgggcaagcttgccgagaaaacgcagagggcatcctgtgagcagcaaacacatctgagcctggaaaagacgcagagaagtaaaagatcaaagtctgattggcaccggctcccattccggctccagcctccaatccgacccccatttcggctgcagcctcggacctagctccggccctcggtctatccggttgcatcctccctccctgttccggatcttatcttgcgccagcgcctactccaggatcccgtagccagacctcaagccatggctggtcccttctcccgtctgctgtccgcccgcccgggactcaggctcctggctttggccggagcggggtctctagccgctgggtttctgctccgaccggaacctgtacgagctgccagtgaacgacggaggctgtatcccccgagcgctgagtacccagacctccgaaagcacaacaactgcatggccagtcacctgaccccagcagtctatgcacggctctgcgacaagaccacacccactggttggacgctagatcagtgtatccagactggcgtggacaaccctggccaccccttcatcaagactgtgggcatggtggctggagatgaggagacctatgaggtatttgctgacctgtttgaccctgtgatccaagagcgacacaatggatatgacccccggacaatgaagcacaccacggatctagatgccagtaaaatccgttctggctactttgatgagaggtatgtattgtcctctagagtcagaactggccgaagcatccgaggactcagtctgcctccagcttgcactcgagcagagcgacgagaggtggaacgtgttgtggtggatgcactgagtggcctgaagggtgacctggctggacgttactataggctcagtgagatgacagaggctgaacagcagcagcttattgatgaccactttctgtttgataagcctgtgtccccgttgctgactgcagcaggaatggctcgagactggccagatgctcgtggaatttggcacaacaatgagaagagcttcctgatctgggtgaatgaggaggatcatacacgggtgatctccatggagaagggtggtaacatgaagagagtgtttgaaagattctgccgaggcctcaaagaggatagccgcttcccaaagatcctggagaacctaagactccaaaagcgtggtactggaggagtggacactgctgccacaggcggtgtctttgatatttctaatttggaccgactaggcaaatcagaggtggagctggtgcaactggtcatcgatggagtaaactatttgattgattgtgaacggcgtctggagagaggccaggatatccgcatccccacacctgtcatccacaccaagcattaactccccatcgccagctgatgactcaagattccaaggagttctgctcattctaatgatggcccattctacttgctctggacctgccctcgcatcccctgcctccatcctagtaaagactccttgctatgct

SEQ ID NO: 435902 - DNA, 3574 bp, Homo sapiens
cccttgcacacccacagggtagacggatcgagtttcagcttaaaccgaggggtgtgggggaagggtgttgggttcagctagtccacgtgggtgctgtcctccacttggtgctgaaatctgggcggccacatccccggggcgggagggggctacatccccggctttagacgcgcgagtctcaggtcccgctaattacctggcgggtgctgcccacccctgccctcgcgcacctagcgcggtggcaggcgggaaggcggggcctgggggagccccacccctggagactgcggctggggcctccctctcctccgcccgcccgcctgccactagctcattgcgcctctcctgcagtctgattggcaccggctcccattccggctccagcctccaatccgacccccatttcggctgcagcctcggacctagctccggccctcggtctatccggttgcatcctccctccctgttccggatcttatcttgcgccagcgcctactccaggatcccgtagccagacctcaagccatggctggtcccttctcccgtctgctgtccgcccgcccgggactcaggctcctggctttggccggagcggggtctctagccgctgggtttctgctccgaccggaacctgtacgagctgccagtgaacgacggaggctgtatcccccgagcgctgagtacccagacctccgaaagcacaacaactgcatggccagtcacctgaccccagcagtctatgcacggctctgcgacaagaccacacccactggttggacgctagatcagtgtatccagactggcgtggacaaccctggccaccccttcatcaagactgtgggcatggtggctggagatgaggagacctatgaggtatttgctgacctgtttgaccctgtgatccaagagcgacacaatggatatgacccccggacaatgaagcacaccacggatctagatgccagtaaaatccgttctggctactttgatgagaggtatgtattgtcctctagagtcagaactggccgaagcatccgaggactcagtctgcctccagcttgcactcgagcagagcgacgagaggtggaacgtgttgtggtggatgcactgagtggcctgaagggtgacctggctggacgttactataggctcagtgagatgacagaggctgaacagcagcagcttattgatgaccactttctgtttgataagcctgtgtccccgttgctgactgcagcaggaatggctcgagactggccagatgctcgtggaatttggcacaacaatgagaagagcttcctgatctgggtgaatgaggaggatcatacacgggtgatctccatggagaagggtggtaacatgaagagagtgtttgaaagattctgccgaggcctcaaagaggttagagaagactatgtaggggagctaggtgggaggacataaggaaaaccaaagagtagcataaatagattatgtaatttaccaaccaacccaggacatgtcttatagtaaaaaggactatctaggactcactccaggactaaaggtgtaaaccagctgggaccatactgggaaaaccaggacatgtggtcacactaagattaggaaaagaaagagtgtcaggaatcttaggaagtgaacaaggctgttgacagagagtgcaaagaaggaataaatgagatggcacgtcagtgcctgggatgtgtgcagtgggatggtgaggtgtgcagataaggaaaacattcgagcttagattgatgttggcggggagaggttgctgtgttcatgactctaatataaccacccagttctgagacaaggtaggccttgactctggattctatcattcttgttaaagtatcgggtctaggctttaagttgagagttcggagagagactggggaaggtggaggatagaatggttcaagttctagaatatgtggctctagatgagaggttgaactgaatcatcaatcctacatggattgggtctccgtattcaagtctacattagaaatccccataaactcaattcaattcttactgtatgttctcaaacatacagttctattttaggtttgcaaagaaaaagagctcctcttttagattctgagaagtttctactatttttggcaagtaatagataacatattctgactatgagtgggtagggaagtacctttaaattatatgcctcagtttcctcatctgtaaaattgggataatgagattttctacattttaggttgttgtggggattaagtgaaatacaggtaaagtacttggtccacagtaagtgcttaataagtgttaaagtgttagctgcaatattattctggatggaagagtttccccccatgttcagcacataagatatccctggtggcatggttccttctgaactacaaacaggatccctttactcatgttggatagtggtctttgtgatcatcactctgctagatcccttgtctcttgaactctaatagtcatcttcatgactacatggttaagtggaagccaaatgccttccccctgtcccctattcctatgaatctggctttcctgctctgttttcatctttctctgcattcacacaggtgctccgttcacagctaacagaatgttatcttacctcttcctggcaaagcttacaccttcatcttctgtctgaagggacccttctaagctctaggctcattagcaaagcaaagataatcgatgcatgcagacctcattgaataatcagtcatctctcagttcagtttaccacctctgttcatttccctagatcatccttaatacaccactccttcgagttttcttcttccacataagatattttttcacaatctcattattatgcacatcataattttgcatcatgcatgcatgaaaacaataacaaacctttttcatttaaaaaaagaccaatgtcattcattcacagccaagtttctgttctagacatatttctagtgttcttgtgggtctagctaagggagggtccagggttaatgaaatatccctgatttttcgttaacaaaacctttgtggactcaggtggagagacttatccaagaacgtggctgggagttcatgtggaatgagcgtttgggatacatcttgacctgtccatctaacctgggcactggacttcgggcaggagtgcacatcaaactgcccctgctaagcaaagatagccgcttcccaaagatcctggagaacctaagactccaaaaacgtggtactggaggagtggacactgctgctacaggcggtgtctttgatatttctaatttggaccgactaggcaaatcagaggtggagctggtgcaactggtcatcgatggagtaaactatttgattgattgtgaacggcgtctggagagaggccaggatatccgcatccccacacctgtcatccacaccaagcattaactccccatcgccagctgatgactcaagattcccaggagttctgctcattctaatgatggcccattctacttgctctggacctgcccccgcatcccctgcctccatcctagtaaagactccttgctatgctgca

SEQ ID NO: 435903 - DNA, 1609 bp, Homo sapiens
  misc_feature (9)..(9): n is a, c, g, or t
attggctgngaggcgggggtaatcggcacgagggcgcctctcctgcagtctgattggcaccggctcccattccggctccagcctccaatccgacccccatttcggctgcagcctcggacctagctccggccctcggtctatccggttgcatcctccctccctgttccggatcttatcttgcgccagcgcctactccaggatcccgtagccagacctcaagccatggctggtcccttctcccgtctgctgtccgcccgcccgggactcaggctcctggctttggccggagcggggtctctagccgctgggtttctgctccgaccggaacctgtacgagctgccagtgaacgacggaggctgtatcccccgagcgctgagtacccagacctccgaaagcacaacaactgcatggccagtcacctgaccccagcagtctatgcacggctctgcgacaagaccacacccactggttggacgctagatcagtgtatccagactggcgtggacaaccctggccaccccttcatcaagactgtgggcatggtggctggagatgaggagacctatgaggtatttgctgacctgtttgaccctgtgatccaagagcgacacaatggatatgacccccggacaatgaagcacaccacggatctagatgccagtaaaatccgttctggctactttgatgagaggtatgtattgtcctctagagtcagaactggccgaagcatccgaggactcagtctgcctccagcttgcactcgagcagagcgacgagaggtggaacgtgttgtggtggatgcactgagtggcctgaagggtgacctggctggacgttactataggctcagtgagatgacagaggctgaacagcagcagcttattgatgaccactttctgtttgataagcctgtgtccccgttgctgactgcagcaggaatggctcgagactggccagatgctcgtggaatttggcacaacaatgagaagagcttcctgatctgggtgaatgaggaggatcatacacgggtgatctccatggagaagggtggtaacatgaagagagtgtttgaaagattctgccgaggcctcaaagaggtggagagacttatccaagaacgtggctgggagttcatgtggaatgagcgtttgggatacatcttgacctgtccatctaacctgggcactggacttcgggcaggagtgcacatcaaactgcccctgctaagcaaagatagccgcttcccaaagatcctggagaacctaagactccaaaaacgtggtactggaggagtggacactgctgctacaggcggtgtctttgatatttctaatttggaccgactaggcaaatcagaggtggagctggtgcaactggtcatcgatggagtaaactatttgattgattgtgaacggcgtctggagagaggccaggatatccgcatccccacacctgtcatccacaccaagcattaactccccatcgccagctgatgactcaagattcccaggagttctgctcattctaatgatggcccattctacttgctctggacctgcccccgcatcccctgcctccatcctagtaaagactccttgctatgctgca

SEQ ID NO: 435904 - DNA, 3530 bp, Homo sapiens
cccttgcacacccacagggtagacggatcgagtttcagcttaaaccgaggggtgtgggggaagggtgttgggttcagctagtccacgtgggtgctgtcctccacttggtgctgaaatctgggcggccacatccccggggcgggagggggctacatccccggctttagacgcgcgagtctcaggtcccgctaattacctggcgggtgctgcccacccctgccctcgcgcacctagcgcggtggcaggcgggaaggcggggcctgggggagccccacccctggagactgcggctggggcctccctctcctccgcccgcccgcctgccactagctcattgcgcctctcctgcagtctgattggcaccggctcccattccggctccagcctccaatccgacccccatttcggctgcagcctcggacctagctccggccctcggtctatccggttgcatcctccctccctgttccggatcttatcttgcgccagcgcctactccaggatcccgtagccagacctcaagccatggctggtcccttctcccgtctgctgtccgcccgcccgggactcaggctcctggctttggccggagcggggtctctagccgctgggtttctgctccgaccggaacctgtacgagctgccagtgaacgacggaggctgtatcccccgagcgctgagtacccagacctccgaaagcacaacaactgcatggccagtcacctgaccccagcagtctatgcacggctctgcgacaagaccacacccactggttggacgctagatcagtgtatccagactggcgtggacaaccctggccaccccttcatcaagactgtgggcatggtggctggagatgaggagacctatgaggtatttgctgacctgtttgaccctgtgatccaagagcgacacaatggatatgacccccggacaatgaagcacaccacggatctagatgccagtaaaagtcagaactggccgaagcatccgaggactcagtctgcctccagcttgcactcgagcagagcgacgagaggtggaacgtgttgtggtggatgcactgagtggcctgaagggtgacctggctggacgttactataggctcagtgagatgacagaggctgaacagcagcagcttattgatgaccactttctgtttgataagcctgtgtccccgttgctgactgcagcaggaatggctcgagactggccagatgctcgtggaatttggcacaacaatgagaagagcttcctgatctgggtgaatgaggaggatcatacacgggtgatctccatggagaagggtggtaacatgaagagagtgtttgaaagattctgccgaggcctcaaagaggttagagaagactatgtaggggagctaggtgggaggacataaggaaaaccaaagagtagcataaatagattatgtaatttaccaaccaacccaggacatgtcttatagtaaaaaggactatctaggactcactccaggactaaaggtgtaaaccagctgggaccatactgggaaaaccaggacatgtggtcacactaagattaggaaaagaaagagtgtcaggaatcttaggaagtgaacaaggctgttgacagagagtgcaaagaaggaataaatgagatggcacgtcagtgcctgggatgtgtgcagtgggatggtgaggtgtgcagataaggaaaacattcgagcttagattgatgttggcggggagaggttgctgtgttcatgactctaatataaccacccagttctgagacaaggtaggccttgactctggattctatcattcttgttaaagtatcgggtctaggctttaagttgagagttcggagagagactggggaaggtggaggatagaatggttcaagttctagaatatgtggctctagatgagaggttgaactgaatcatcaatcctacatggattgggtctccgtattcaagtctacattagaaatccccataaactcaattcaattcttactgtatgttctcaaacatacagttctattttaggtttgcaaagaaaaagagctcctcttttagattctgagaagtttctactatttttggcaagtaatagataacatattctgactatgagtgggtagggaagtacctttaaattatatgcctcagtttcctcatctgtaaaattgggataatgagattttctacattttaggttgttgtggggattaagtgaaatacaggtaaagtacttggtccacagtaagtgcttaataagtgttaaagtgttagctgcaatattattctggatggaagagtttccccccatgttcagcacataagatatccctggtggcatggttccttctgaactacaaacaggatccctttactcatgttggatagtggtctttgtgatcatcactctgctagatcccttgtctcttgaactctaatagtcatcttcatgactacatggttaagtggaagccaaatgccttccccctgtcccctattcctatgaatctggctttcctgctctgttttcatctttctctgcattcacacaggtgctccgttcacagctaacagaatgttatcttacctcttcctggcaaagcttacaccttcatcttctgtctgaagggacccttctaagctctaggctcattagcaaagcaaagataatcgatgcatgcagacctcattgaataatcagtcatctctcagttcagtttaccacctctgttcatttccctagatcatccttaatacaccactccttcgagttttcttcttccacataagatattttttcacaatctcattattatgcacatcataattttgcatcatgcatgcatgaaaacaataacaaacctttttcatttaaaaaaagaccaatgtcattcattcacagccaagtttctgttctagacatatttctagtgttcttgtgggtctagctaagggagggtccagggttaatgaaatatccctgatttttcgttaacaaaacctttgtggactcaggtggagagacttatccaagaacgtggctgggagttcatgtggaatgagcgtttgggatacatcttgacctgtccatctaacctgggcactggacttcgggcaggagtgcacatcaaactgcccctgctaagcaaagatagccgcttcccaaagatcctggagaacctaagactccaaaaacgtggtactggaggagtggacactgctgctacaggcggtgtctttgatatttctaatttggaccgactaggcaaatcagaggtggagctggtgcaactggtcatcgatggagtaaactatttgattgattgtgaacggcgtctggagagaggccaggatatccgcatccccacacctgtcatccacaccaagcattaactccccatcgccagctgatgactcaagattcccaggagttctgctcattctaatgatggcccattctacttgctctggacctgcccccgcatcccctgcctccatcctagtaaagactccttgctatgctgca

SEQ ID NO: 435905 - DNA, 3375 bp, Homo sapiens
cccttgcacacccacagggtagacggatcgagtttcagcttaaaccgaggggtgtgggggaagggtgttgggttcagctagtccacgtgggtgctgtcctccacttggtgctgaaatctgggcggccacatccccggggcgggagggggctacatccccggctttagacgcgcgagtctcaggtcccgctaattacctggcgggtgctgcccacccctgccctcgcgcacctagcgcggtggcaggcgggaaggcggggcctgggggagccccacccctggagactgcggctggggcctccctctcctccgcccgcccgcctgccactagctcattgcgcctctcctgcagtctgattggcaccggctcccattccggctccagcctccaatccgacccccatttcggctgcagcctcggacctagctccggccctcggtctatccggttgcatcctccctccctgttccggatcttatcttgcgccagcgcctactccaggatcccgtagccagacctcaagccatggctggtcccttctcccgtctgctgtccgcccgcccgggactcaggctcctggctttggccggagcggggtctctagccgctgggtttctgctccgaccggaacctgtacgagctgccagtgaacgacggaggctgtatcccccgaggtatttgctgacctgtttgaccctgtgatccaagagcgacacaatggatatgacccccggacaatgaagcacaccacggatctagatgccagtaaaatccgttctggctactttgatgagaggtatgtattgtcctctagagtcagaactggccgaagcatccgaggactcagtctgcctccagcttgcactcgagcagagcgacgagaggtggaacgtgttgtggtggatgcactgagtggcctgaagggtgacctggctggacgttactataggctcagtgagatgacagaggctgaacagcagcagcttattgatgaccactttctgtttgataagcctgtgtccccgttgctgactgcagcaggaatggctcgagactggccagatgctcgtggaatttggcacaacaatgagaagagcttcctgatctgggtgaatgaggaggatcatacacgggtgatctccatggagaagggtggtaacatgaagagagtgtttgaaagattctgccgaggcctcaaagaggttagagaagactatgtaggggagctaggtgggaggacataaggaaaaccaaagagtagcataaatagattatgtaatttaccaaccaacccaggacatgtcttatagtaaaaaggactatctaggactcactccaggactaaaggtgtaaaccagctgggaccatactgggaaaaccaggacatgtggtcacactaagattaggaaaagaaagagtgtcaggaatcttaggaagtgaacaaggctgttgacagagagtgcaaagaaggaataaatgagatggcacgtcagtgcctgggatgtgtgcagtgggatggtgaggtgtgcagataaggaaaacattcgagcttagattgatgttggcggggagaggttgctgtgttcatgactctaatataaccacccagttctgagacaaggtaggccttgactctggattctatcattcttgttaaagtatcgggtctaggctttaagttgagagttcggagagagactggggaaggtggaggatagaatggttcaagttctagaatatgtggctctagatgagaggttgaactgaatcatcaatcctacatggattgggtctccgtattcaagtctacattagaaatccccataaactcaattcaattcttactgtatgttctcaaacatacagttctattttaggtttgcaaagaaaaagagctcctcttttagattctgagaagtttctactatttttggcaagtaatagataacatattctgactatgagtgggtagggaagtacctttaaattatatgcctcagtttcctcatctgtaaaattgggataatgagattttctacattttaggttgttgtggggattaagtgaaatacaggtaaagtacttggtccacagtaagtgcttaataagtgttaaagtgttagctgcaatattattctggatggaagagtttccccccatgttcagcacataagatatccctggtggcatggttccttctgaactacaaacaggatccctttactcatgttggatagtggtctttgtgatcatcactctgctagatcccttgtctcttgaactctaatagtcatcttcatgactacatggttaagtggaagccaaatgccttccccctgtcccctattcctatgaatctggctttcctgctctgttttcatctttctctgcattcacacaggtgctccgttcacagctaacagaatgttatcttacctcttcctggcaaagcttacaccttcatcttctgtctgaagggacccttctaagctctaggctcattagcaaagcaaagataatcgatgcatgcagacctcattgaataatcagtcatctctcagttcagtttaccacctctgttcatttccctagatcatccttaatacaccactccttcgagttttcttcttccacataagatattttttcacaatctcattattatgcacatcataattttgcatcatgcatgcatgaaaacaataacaaacctttttcatttaaaaaaagaccaatgtcattcattcacagccaagtttctgttctagacatatttctagtgttcttgtgggtctagctaagggagggtccagggttaatgaaatatccctgatttttcgttaacaaaacctttgtggactcaggtggagagacttatccaagaacgtggctgggagttcatgtggaatgagcgtttgggatacatcttgacctgtccatctaacctgggcactggacttcgggcaggagtgcacatcaaactgcccctgctaagcaaagatagccgcttcccaaagatcctggagaacctaagactccaaaaacgtggtactggaggagtggacactgctgctacaggcggtgtctttgatatttctaatttggaccgactaggcaaatcagaggtggagctggtgcaactggtcatcgatggagtaaactatttgattgattgtgaacggcgtctggagagaggccaggatatccgcatccccacacctgtcatccacaccaagcattaactccccatcgccagctgatgactcaagattcccaggagttctgctcattctaatgatggcccattctacttgctctggacctgcccccgcatcccctgcctccatcctagtaaagactccttgctatgctgca

SEQ ID NO: 435906 - DNA, 3364 bp, Homo sapiens
  misc_feature (9)..(9): n is a, c, g, or t
attggctgngaggcgggggtaatcggcacgagggcgcctctcctgcagtctgattggcaccggctcccattccggctccagcctccaatccgacccccatttcggctgcagcctcggacctagctccggccctcggtctatccggttgcatcctccctccctgttccggatcttatcttgcgccagcgcctactccaggatcccgtagccagacctcaagccatggctggtcccttctcccgtctgctgtccgcccgcccgggactcaggctcctggctttggccggagcggggtctctagccgctgggtttctgctccgaccggaacctgtacgagctgccagtgaacgacggaggctgtatcccccgagccagacatggccaactggacagctcccaggtaactgcactaggtctaggcgtctgtgccctccctccatggttactgggtaccccctccccagcgctgagtacccagacctccgaaagcacaacaactgcatggccagtcacctgaccccagcagtctatgcacggctctgcgacaagaccacacccactggttggacgctagatcagtgtatccagactggcgtggacaaccctggccaccccttcatcaagactgtgggcatggtggctggagatgaggagacctatgaggtatttgctgacctgtttgaccctgtgatccaagagcgacacaatggatatgacccccggacaatgaagcacaccacggatctagatgccagtaaaatccgttctggctactttgatgagaggtatgtattgtcctctagagtcagaactggccgaagcatccgaggactcagtctgcctccagcttgcactcgagcagagcgacgagaggtggaacgtgttgtggtggatgcactgagtggcctgaagggtgacctggctggacgttactataggctcagtgagatgacagaggctgaacagcagcagcttattgatgaccactttctgtttgataagcctgtgtccccgttgctgactgcagcaggaatggctcgagactggccagatgctcgtggaatttggcacaacaatgagaagagcttcctgatctgggtgaatgaggaggatcatacacgggtgatctccatggagaagggtggtaacatgaagagagtgtttgaaagattctgccgaggcctcaaagaggttagagaagactatgtaggggagctaggtgggaggacataaggaaaaccaaagagtagcataaatagattatgtaatttaccaaccaacccaggacatgtcttatagtaaaaaggactatctaggactcactccaggactaaaggtgtaaaccagctgggaccatactgggaaaaccaggacatgtggtcacactaagattaggaaaagaaagagtgtcaggaatcttaggaagtgaacaaggctgttgacagagagtgcaaagaaggaataaatgagatggcacgtcagtgcctgggatgtgtgcagtgggatggtgaggtgtgcagataaggaaaacattcgagcttagattgatgttggcggggagaggttgctgtgttcatgactctaatataaccacccagttctgagacaaggtaggccttgactctggattctatcattcttgttaaagtatcgggtctaggctttaagttgagagttcggagagagactggggaaggtggaggatagaatggttcaagttctagaatatgtggctctagatgagaggttgaactgaatcatcaatcctacatggattgggtctccgtattcaagtctacattagaaatccccataaactcaattcaattcttactgtatgttctcaaacatacagttctattttaggtttgcaaagaaaaagagctcctcttttagattctgagaagtttctactatttttggcaagtaatagataacatattctgactatgagtgggtagggaagtacctttaaattatatgcctcagtttcctcatctgtaaaattgggataatgagattttctacattttaggttgttgtggggattaagtgaaatacaggtaaagtacttggtccacagtaagtgcttaataagtgttaaagtgttagctgcaatattattctggatggaagagtttccccccatgttcagcacataagatatccctggtggcatggttccttctgaactacaaacaggatccctttactcatgttggatagtggtctttgtgatcatcactctgctagatcccttgtctcttgaactctaatagtcatcttcatgactacatggttaagtggaagccaaatgccttccccctgtcccctattcctatgaatctggctttcctgctctgttttcatctttctctgcattcacacaggtgctccgttcacagctaacagaatgttatcttacctcttcctggcaaagcttacaccttcatcttctgtctgaagggacccttctaagctctaggctcattagcaaagcaaagataatcgatgcatgcagacctcattgaataatcagtcatctctcagttcagtttaccacctctgttcatttccctagatcatccttaatacaccactccttcgagttttcttcttccacataagatattttttcacaatctcattattatgcacatcataattttgcatcatgcatgcatgaaaacaataacaaacctttttcatttaaaaaaagaccaatgtcattcattcacagccaagtttctgttctagacatatttctagtgttcttgtgggtctagctaagggagggtccagggttaatgaaatatccctgatttttcgttaacaaaacctttgtggactcaggtggagagacttatccaagaacgtggctgggagttcatgtggaatgagcgtttgggatacatcttgacctgtccatctaacctgggcactggacttcgggcaggagtgcacatcaaactgcccctgctaagcaaagatagccgcttcccaaagatcctggagaacctaagactccaaaaacgtggtactggaggagtggacactgctgctacaggcggtgtctttgatatttctaatttggaccgactaggcaaatcagaggtggagctggtgcaactggtcatcgatggagtaaactatttgattgattgtgaacggcgtctggagagaggccaggatatccgcatccccacacctgtcatccacaccaagcattaactccccatcgccagctgatgactcaagattcccaggagttctgctcattctaatgatggcccattctacttgctctggacctgcccccgcatcccctgcctccatcctagtaaagactccttgctatgctgca

SEQ ID NO: 435907 - DNA, 2723 bp, Homo sapiens
  misc_feature (46)..(46): n is a, c, g, or t
  misc_feature (54)..(55): n is a, c, g, or t
tttcgcctagtttcccggtttcgccatgtttcctggtttcgccatntttcccanngagcgacacaatggatatgacccccggacaatgaagcacaccacggatctagatgccagtaaaatccgttctggctactttgatgagaggtatgtattgtcctctagagtcagaactggccgaagcatccgaggactcagtctgcctccagcttgcactcgagcagagcgacgagaggtggaacgtgttgtggtggatgcactgagtggcctgaagggtgacctggctggacgttactataggctcagtgagatgacagaggctgaacagcagcagcttattgatgaccactttctgtttgataagcctgtgtccccgttgctgactgcagcaggaatggctcgagactggccagatgctcgtggaatttggcacaacaatgagaagagcttcctgatctgggtgaatgaggaggatcatacacgggtgatctccatggagaagggtggtaacatgaagagagtgtttgaaagattctgccgaggcctcaaagaggttagagaagactatgtaggggagctaggtgggaggacataaggaaaaccaaagagtagcataaatagattatgtaatttaccaaccaacccaggacatgtcttatagtaaaaaggactatctaggactcactccaggactaaaggtgtaaaccagctgggaccatactgggaaaaccaggacatgtggtcacactaagattaggaaaagaaagagtgtcaggaatcttaggaagtgaacaaggctgttgacagagagtgcaaagaaggaataaatgagatggcacgtcagtgcctgggatgtgtgcagtgggatggtgaggtgtgcagataaggaaaacattcgagcttagattgatgttggcggggagaggttgctgtgttcatgactctaatataaccacccagttctgagacaaggtaggccttgactctggattctatcattcttgttaaagtatcgggtctaggctttaagttgagagttcggagagagactggggaaggtggaggatagaatggttcaagttctagaatatgtggctctagatgagaggttgaactgaatcatcaatcctacatggattgggtctccgtattcaagtctacattagaaatccccataaactcaattcaattcttactgtatgttctcaaacatacagttctattttaggtttgcaaagaaaaagagctcctcttttagattctgagaagtttctactatttttggcaagtaatagataacatattctgactatgagtgggtagggaagtacctttaaattatatgcctcagtttcctcatctgtaaaattgggataatgagattttctacattttaggttgttgtggggattaagtgaaatacaggtaaagtacttggtccacagtaagtgcttaataagtgttaaagtgttagctgcaatattattctggatggaagagtttccccccatgttcagcacataagatatccctggtggcatggttccttctgaactacaaacaggatccctttactcatgttggatagtggtctttgtgatcatcactctgctagatcccttgtctcttgaactctaatagtcatcttcatgactacatggttaagtggaagccaaatgccttccccctgtcccctattcctatgaatctggctttcctgctctgttttcatctttctctgcattcacacaggtgctccgttcacagctaacagaatgttatcttacctcttcctggcaaagcttacaccttcatcttctgtctgaagggacccttctaagctctaggctcattagcaaagcaaagataatcgatgcatgcagacctcattgaataatcagtcatctctcagttcagtttaccacctctgttcatttccctagatcatccttaatacaccactccttcgagttttcttcttccacataagatattttttcacaatctcattattatgcacatcataattttgcatcatgcatgcatgaaaacaataacaaacctttttcatttaaaaaaagaccaatgtcattcattcacagccaagtttctgttctagacatatttctagtgttcttgtgggtctagctaagggagggtccagggttaatgaaatatccctgatttttcgttaacaaaacctttgtggactcaggtggagagacttatccaagaacgtggctgggagttcatgtggaatgagcgtttgggatacatcttgacctgtccatctaacctgggcactggacttcgggcaggagtgcacatcaaactgcccctgctaagcaaagatagccgcttcccaaagatcctggagaacctaagactccaaaaacgtggtactggaggagtggacactgctgctacaggcggtgtctttgatatttctaatttggaccgactaggcaaatcagaggtggagctggtgcaactggtcatcgatggagtaaactatttgattgattgtgaacggcgtctggagagaggccaggatatccgcatccccacacctgtcatccacaccaagcattaactccccatcgccagctgatgactcaagattcccaggagttctgctcattctaatgatggcccattctacttgctctggacctgcccccgcatcccctgcctccatcctagtaaagactccttgctatgctgca

SEQ ID NO: 435908 - DNA, 2775 bp, Homo sapiens
gaaatcaatgcacaattgaagtctggggagggattccctctccttaaccatctctccctcttaactccccttaggtatttgctgacctgtttgaccctgtgatccaagagcgacacaatggatatgacccccggacaatgaagcacaccacggatctagatgccagtaaaatccgttctggctactttgatgagaggtatgtattgtcctctagagtcagaactggccgaagcatccgaggactcagtctgcctccagcttgcactcgagcagagcgacgagaggtggaacgtgttgtggtggatgcactgagtggcctgaagggtgacctggctggacgttactataggctcagtgagatgacagaggctgaacagcagcagcttattgatgaccactttctgtttgataagcctgtgtccccgttgctgactgcagcaggaatggctcgagactggccagatgctcgtggaatttggcacaacaatgagaagagcttcctgatctgggtgaatgaggaggatcatacacgggtgatctccatggagaagggtggtaacatgaagagagtgtttgaaagattctgccgaggcctcaaagaggttagagaagactatgtaggggagctaggtgggaggacataaggaaaaccaaagagtagcataaatagattatgtaatttaccaaccaacccaggacatgtcttatagtaaaaaggactatctaggactcactccaggactaaaggtgtaaaccagctgggaccatactgggaaaaccaggacatgtggtcacactaagattaggaaaagaaagagtgtcaggaatcttaggaagtgaacaaggctgttgacagagagtgcaaagaaggaataaatgagatggcacgtcagtgcctgggatgtgtgcagtgggatggtgaggtgtgcagataaggaaaacattcgagcttagattgatgttggcggggagaggttgctgtgttcatgactctaatataaccacccagttctgagacaaggtaggccttgactctggattctatcattcttgttaaagtatcgggtctaggctttaagttgagagttcggagagagactggggaaggtggaggatagaatggttcaagttctagaatatgtggctctagatgagaggttgaactgaatcatcaatcctacatggattgggtctccgtattcaagtctacattagaaatccccataaactcaattcaattcttactgtatgttctcaaacatacagttctattttaggtttgcaaagaaaaagagctcctcttttagattctgagaagtttctactatttttggcaagtaatagataacatattctgactatgagtgggtagggaagtacctttaaattatatgcctcagtttcctcatctgtaaaattgggataatgagattttctacattttaggttgttgtggggattaagtgaaatacaggtaaagtacttggtccacagtaagtgcttaataagtgttaaagtgttagctgcaatattattctggatggaagagtttccccccatgttcagcacataagatatccctggtggcatggttccttctgaactacaaacaggatccctttactcatgttggatagtggtctttgtgatcatcactctgctagatcccttgtctcttgaactctaatagtcatcttcatgactacatggttaagtggaagccaaatgccttccccctgtcccctattcctatgaatctggctttcctgctctgttttcatctttctctgcattcacacaggtgctccgttcacagctaacagaatgttatcttacctcttcctggcaaagcttacaccttcatcttctgtctgaagggacccttctaagctctaggctcattagcaaagcaaagataatcgatgcatgcagacctcattgaataatcagtcatctctcagttcagtttaccacctctgttcatttccctagatcatccttaatacaccactccttcgagttttcttcttccacataagatattttttcacaatctcattattatgcacatcataattttgcatcatgcatgcatgaaaacaataacaaacctttttcatttaaaaaaagaccaatgtcattcattcacagccaagtttctgttctagacatatttctagtgttcttgtgggtctagctaagggagggtccagggttaatgaaatatccctgatttttcgttaacaaaacctttgtggactcaggtggagagacttatccaagaacgtggctgggagttcatgtggaatgagcgtttgggatacatcttgacctgtccatctaacctgggcactggacttcgggcaggagtgcacatcaaactgcccctgctaagcaaagatagccgcttcccaaagatcctggagaacctaagactccaaaaacgtggtactggaggagtggacactgctgctacaggcggtgtctttgatatttctaatttggaccgactaggcaaatcagaggtggagctggtgcaactggtcatcgatggagtaaactatttgattgattgtgaacggcgtctggagagaggccaggatatccgcatccccacacctgtcatccacaccaagcattaactccccatcgccagctgatgactcaagattcccaggagttctgctcattctaatgatggcccattctacttgctctggacctgcccccgcatcccctgcctccatcctagtaaagactccttgctatgctgca

SEQ ID NO: 435909 - DNA, 1712 bp, Homo sapiens
aaacgggggctagggagcgagggccccgtgcgcgtgttaaaaactctggcaccgaaggtgagggagaggaggaggaggaaactaacgattccctgcccacccccacacccagcaccaccaacaggtgggcaagcttgccgagaaaacgcagagggcatcctgtgagcagcaaacacatctgagcctggaaaagacgcagagaagtaaaagatcaaagcctcggacctagctccggccctcggtctatccggttgcatcctccctccctgttccggatcttatcttgcgccagcgcctactccaggatcccgtagccagacctcaagccatggctggtcccttctcccgtctgctgtccgcccgcccgggactcaggctcctggctttggccggagcggggtctctagccgctgggtttctgctccgaccggaacctgtacgagctgccagtgaacgacggaggctgtatcccccgagcgctgagtacccagacctccgaaagcacaacaactgcatggccagtcacctgaccccagcagtctatgcacggctctgcgacaagaccacacccactggttggacgctagatcagtgtatccagactggcgtggacaaccctggccaccccttcatcaagactgtgggcatggtggctggagatgaggagacctatgaggtatttgctgacctgtttgaccctgtgatccaagagcgacacaatggatatgacccccggacaatgaagcacaccacggatctagatgccagtaaaatccgttctggctactttgatgagaggtatgtattgtcctctagagtcagaactggccgaagcatccgaggactcagtctgcctccagcttgcactcgagcagagcgacgagaggtggaacgtgttgtggtggatgcactgagtggcctgaagggtgacctggctggacgttactataggctcagtgagatgacagaggctgaacagcagcagcttattgatgaccactttctgtttgataagcctgtgtccccgttgctgactgcagcaggaatggctcgagactggccagatgctcgtggaatttggcacaacaatgagaagagcttcctgatctgggtgaatgaggaggatcatacacgggtgatctccatggagaagggtggtaacatgaagagagtgtttgaaagattctgccgaggcctcaaagaggtggagagacttatccaagaacgtggctgggagttcatgtggaatgagcgtttgggatacatcttgacctgtccatctaacctgggcactggacttcgggcaggagtgcacatcaaactgcccctgctaagcaaagatagccgcttcccaaagatcctggagaacctaagactccaaaagcgtggtactggaggagtggacactgctgccacaggcggtgtctttgatatttctaatttggaccgactaggcaaatcagaggtggagctggtgcaactggtcatcgatggagtaaactatttgattgattgtgaacggcgtctggagagaggccaggatatccgcatccccacacctgtcatccacaccaagcattaactccccatcgccagctgatgactcaagattccaaggagttctgctcattctaatgatggcccattctacttgctctggacctgccctcgcatcccctgcctccatcctagtaaagactccttgctatgct

SEQ ID NO: 435910 - DNA, 1035 bp, Homo sapiens
ccttcacctcactttaccttctcctccagcacaggaactaggaactacggagagagaagccaagggagaggaggaggaggaaactaacgattccctgcccacccccacacccagcaccaccaacaggtgggcaagcttgccgagaaaacgcagagggcatcctgtgagcagcaaacacatctgagcctggaaaagacgcagagaagtaaaagatcaaagtctgattggcaccggctcccattccggctccagcctccaatccgacccccatttcggctgcagcctcggacctagctccggccctcggtctatccggttgcatcctccctccctgttccggatcttatcttgcgccagcgcctactccaggatcccgtagccagacctcaagccatggctggtcccttctcccgtctgctgtccgcccgcccgggactcaggctcctggctttggccggagcggggtctctagccgctgggtttctgctccgaccggaacctgtacgagctgccagtgaacgacggaggctgtatcccccgagcgctgagtacccagacctccgaaagcacaacaactgcatggccagtcacctgaccccagcagtctatgcacggctctgcgacaagaccacacccactggttggacgctagatcagtgtatccagactggcgtggacaaccctggccaccccttcatcaagactgtgggcatggtggctggagatgaggagacctatgaggtatttgctgacctgtttgaccctgtgatccaagagcgacacaatggatatgacccccggacaatgaagcacaccacggatctagatgccagtaaaatccgttctggctactttgatgagaggtatgtattgtcctctagagtcagaactggccgaagcatccgaggactcagtctgcctccagcttgcactcgagcagagcgacgagaggtggaacgtgttgtggtggatgcactgatctagcgtccaaccagtgggtgtggtcttgtcgcagagccgtgcatagactgctgg

SEQ ID NO: 435911 - DNA, 1940 bp, Homo sapiens
cccttgcacacccacagggtagacggatcgagtttcagcttaaaccgaggggtgtgggggaagggtgttgggttcagctagtccacgtgggtgctgtcctccacttggtgctgaaatctgggcggccacatccccggggcgggagggggctacatccccggctttagacgcgcgagtctcaggtcccgctaattacctggcgggtgctgcccacccctgccctcgcgcacctagcgcggtggcaggcgggaaggcggggcctgggggagccccacccctggagactgcggctggggcctccctctcctccgcccgcccgcctgccactagctcattgcgcctctcctgcagtctgattggcaccggctcccattccggctccagcctccaatccgacccccatttcggctgcagcctcggacctagctccggccctcggtctatccggttgcatcctccctccctgttccggatcttatcttgcgccagcgcctactccaggatcccgtagccagacctcaagccatggctggtcccttctcccgtctgctgtccgcccgcccgggactcaggctcctggctttggccggagcggggtctctagccgctgggtttctgctccgaccggaacctgtacgagctgccagtgaacgacggaggctgtatcccccgagcgctgagtacccagacctccgaaagcacaacaactgcatggccagtcacctgaccccagcagtctatgcacggctctgcgacaagaccacacccactggttggacgctagatcagtgtatccagactggcgtggacaaccctggccaccccttcatcaagactgtgggcatggtggctggagatgaggagacctatgaggtatttgctgacctgtttgaccctgtgatccaagagcgacacaatggatatgacccccggacaatgaagcacaccacggatctagatgccagtaaaatccgttctggctactttgatgagaggtatgtattgtcctctagagtcagaactggccgaagcatccgaggactcagtctgcctccagcttgcactcgagcagagcgacgagaggtggaacgtgttgtggtggatgcactgagtggcctgaagggtgacctggctggacgttactataggctcagtgagatgacagaggctgaacagcagcagcttattgatgaccactttctgtttgataagcctgtgtccccgttgctgactgcagcaggaatggctcgagactggccagatgctcgtggaatttggcacaacaatgagaagagcttcctgatctgggtgaatgaggaggatcatacacgggtgatctccatggagaagggtggtaacatgaagagagtgtttgaaagattctgccgaggcctcaaagaggtggagagacttatccaagaacgtggctgggagttcatgtggaatgagcgtttgggatacatcttgacctgtccatctaacctgggcactggacttcgggcaggagtgcacatcaaactgcccctgctaagcaaagatagccgcttcccaaagatcctggagaacctaagactccaaaagcgtggtactggaggagtggacactgctgccacaggcggtgtctttgatatttctaatttggaccgactaggcaaatcagaggtggagctggtgcaactggtcatcgatggagtaaactatttgattgattgtgaacggcgtctggagagaggccaggatatccgcatccccacacctgtcatccacaccaagcattaactccccatcgccagctgatgactcaagattccaaggagttctgctcattctaatgatggcccattctacttgctctggacctgccctcgcatcccctgcctccatcctagtaaagactccttgctatgctgcagctgtctgtgttacttctaatggtgggg

SEQ ID NO: 435912 - DNA, 744 bp, Homo sapiens
tatgaagaatagggcgaaggggcctgcggcgtattcgatgttgaagcctgagactagttcggactgcagcaggaatggctcgagactggccagatgctcgtggaatttggcacaacaatgagaagagcttcctgatctgggtgaatgaggaggatcatacacgggtgatctccatggagaagggtggtaacatgaagagagtgtttgaaagattctgccgaggcctcaaagaggtggagagacttatccaagaacgtggctgggagttcatgtggaatgagcgtttgggatacatcttgacctgtccatctaacctgggcactggacttcgggcaggagtgcacatcaaactgcccctgctaagcaaagatagccgcttcccaaagatcctggagaacctaagactccaaaaacgtggtactggaggagtggacactgctgctacaggcggtgtctttgatatttctaatttggaccgactaggcaaatcagaggtggagctggtgcaactggtcatcgatggagtaaactatttgattgattgtgaacggcgtctggagagaggccaggatatccgcatccccacacctgtcatccacaccaagcattaactccccatcgccagctgatgactcaagattcccaggagttctgctcattctaatgatggcccattctacttgctctggacctgcccccgcatcccctgcctccatcctagtaaagactccttgctatgctgca

SEQ ID NO: 435913 - DNA, 1369 bp, Homo sapiens
cccttgcacacccacagggtagacggatcgagtttcagcttaaaccgaggggtgtgggggaagggtgttgggttcagctagtccacgtgggtgctgtcctccacttggtgctgaaatctgggcggccacatccccggggcgggagggggctacatccccggctttagacgcgcgagtctcaggtcccgctaattacctggcgggtgctgcccacccctgccctcgcgcacctagcgcggtggcaggcgggaaggcggggcctgggggagccccacccctggagactgcggctggggcctccctctcctccgcccgcccgcctgccactagctcattgcgcctctcctgcagtctgattggcaccggctcccattccggctccagcctccaatccgacccccatttcggctgcagcctcggacctagctccggccctcggtctatccggttgcatcctccctccctgttccggatcttatcttgcgccagcgcctactccaggatcccgtagccagacctcaagccatggctggtcccttctcccgtctgctgtccgcccgcccgggactcaggctcctggctttggccggagcggggtctctagccgctgggtttctgctccgaccggaacctgtacgagctgccagtgaacgacggaggctgtatcccccgagcgctgagtacccagacctccgaaagcacaacaactgcatggccagtcacctgaccccagcagtctatgcacggctctgcgacaagaccacacccactggttggacgctagatcagtgtatccagactggcgtggacaaccctggccaccccttcatcaagactgtgggcatggtggctggagatgaggagacctatgaggtatttgctgacctgtttgaccctgtgatccaagagcgacacaatggatatgacccccggacaatgaagcacaccacggatctagatgccagtaaaatccgttctggctactttgatgagaggtatgtattgtcctctagagtcagaactggccgaagcatccgaggactcagtctgcctccagcttgcactcgagcagagcgacgagaggtggaacgtgttgtggtggatgcactgagtggcctgaagggtgacctggctggacgttactataggctcagtgagatgacagaggctgaacagcagcagcttattgatgaccactttctgtttgataagcctgtgtccccgttgctgactgcagcaggaatggctcgagactggccagatgctcgtggaatttggcacaacaatgagaagagcttcctgatctgggtgaatgagcctcctcattcacccaggcgcacttctctattagtgccgactgtcatctcag

SEQ ID NO: 435914 - DNA, 2052 bp, Homo sapiens
aaacgggggctagggagcgagggccccgtgcgcgtgttaaaaactctggcaccgaaggtgagggagaggaggaggaggaaactaacgattccctgcccacccccacacccagcaccaccaacaggtgggcaagcttgccgagaaaacgcagagggcatcctgtgagcagcaaacacatctgagcctggaaaagacgcagagaagtaaaagatcaaagtctgattggcaccggctcccattccggctccagcctccaatccgacccccatttcggctgcagcctcggacctagctccggccctcggtctatccggttgcatcctccctccctgttccggatcttatcttgcgccagcgcctactccaggatcccgtagccagacctcaagccatggctggtcccttctcccgtctgctgtccgcccgcccgggactcaggctcctggctttggccggagcggggtctctagccgctgggtttctgctccgaccggaacctgtacgagctgccagtgaacgacggaggctgtatcccccgaggcttttcccctcctccatccgtagtgttgtgtcatgggaggaaagaactgagcagatctgaagaaactgagctggccagccagaggcaactagaactattaggaaagcatagactctgaaagtccctaaagagattaccaaggtttaccctctttctaattccccctcctcccgcggagcaaagccagacatggccaactggacagctcccaggtaactgcactaggtctaggcgtctgtgccctccctccatggttactgggtaccccctccccagcgctgagtacccagacctccgaaagcacaacaactgcatggccagtcacctgaccccagcagtctatgcacggctctgcgacaagaccacacccactggttggacgctagatcagtgtatccagactggcgtggacaaccctggccaccccttcatcaagactgtgggcatggtggctggagatgaggagacctatgaggtatttgctgacctgtttgaccctgtgatccaagagcgacacaatggatatgacccccggacaatgaagcacaccacggatctagatgccagtaaaatccgttctggctactttgatgagaggtatgtattgtcctctagagtcagaactggccgaagcatccgaggactcagtctgcctccagcttgcactcgagcagagcgacgagaggtggaacgtgttgtggtggatgcactgagtggcctgaagggtgacctggctggacgttactataggctcagtgagatgacagaggctgaacagcagcagcttattgatgaccactttctgtttgataagcctgtgtccccgttgctgactgcagcaggaatggctcgagactggccagatgctcgtggaatttggcacaacaatgagaagagcttcctgatctgggtgaatgaggaggatcatacacgggtgatctccatggagaagggtggtaacatgaagagagtgtttgaaagattctgccgaggcctcaaagaggtggagagacttatccaagaacgtggctgggagttcatgtggaatgagcgtttgggatacatcttgacctgtccatctaacctgggcactggacttcgggcaggagtgcacatcaaactgcccctgctaagcaaagatagccgcttcccaaagatcctggagaacctaagactccaaaagcgtggtactggaggagtggacactgctgccacaggcggtgtctttgatatttctaatttggaccgactaggcaaatcagaggtggagctggtgcaactggtcatcgatggagtaaactatttgattgattgtgaacggcgtctggagagaggccaggatatccgcatccccacacctgtcatccacaccaagcattaactccccatcgccagctgatgactcaagattccaaggagttctgctcattctaatgatggcccattctacttgctctggacctgccctcgcatcccctgcctccatcctagtaaagactccttgctatgct

SEQ ID NO: 435915 - DNA, 2075 bp, Homo sapiens
aaacgggggctagggagcgagggccccgtgcgcgtgttaaaaactctggcaccgaaggtgagggagaggaggaggaggaaactaacgattccctgcccacccccacacccagcaccaccaacaggtgggcaagcttgccgagaaaacgcagagggcatcctgtgagcagcaaacacatctgagcctggaaaagacgcagagaagtaaaagatcaaagtctgattggcaccggctcccattccggctccagcctccaatccgacccccatttcggctgcagcctcggacctagctccggccctcggtctatccggttgcatcctccctccctgttccggatcttatcttgcgccagcgcctactccaggatcccgtagccagacctcaagccatggctggtcccttctcccgtctgctgtccgcccgcccgggactcaggctcctggctttggccggagcggggtctctagccgctgggtttctgctccgaccggaacctgtacgagctgccagtgaacgacggaggctgtatcccccgaggcttttcccctcctccatccgtagtgttgtgtcatgggaggaaagaactgagcagatctgaagaaactgagctggccagccagaggcaactagaactattaggaaagcatagactctgaaagtccctaaagagattaccaaggtttaccctctttctaattccccctcctcccgcggagcaaagccagacatggccaactggacagctcccaggtaactgcactaggtctaggcgtctgtgccctccctccatggttactgggtaccccctccccagcgctgagtacccagacctccgaaagcacaacaactgcatggccagtcacctgaccccagcagtctatgcacggctctgcgacaagaccacacccactggttggacgctagatcagtgtatccagactggcgtggacaaccctggccaccccttcatcaagactgtgggcatggtggctggagatgaggagacctatgaggtatttgctgacctgtttgaccctgtgatccaagagcgacacaatggatatgacccccggacaatgaagcacaccacggatctagatgccagtaaaatccgttctggcatacatatctggaaattggcacggcaacgcgggttactgctaatccgtcctctagagtcagaactggccgaagcatccgaggactcagtctgcctccagcttgcactcgagcagagcgacgagaggtggaacgtgttgtggtggatgcactgagtggcctgaagggtgacctggctggacgttactataggctcagtgagatgacagaggctgaacagcagcagcttattgatgaccactttctgtttgataagcctgtgtccccgttgctgactgcagcaggaatggctcgagactggccagatgctcgtggaatttggcacaacaatgagaagagcttcctgatctgggtgaatgaggaggatcatacacgggtgatctccatggagaagggtggtaacatgaagagagtgtttgaaagattctgccgaggcctcaaagaggtggagagacttatccaagaacgtggctgggagttcatgtggaatgagcgtttgggatacatcttgacctgtccatctaacctgggcactggacttcgggcaggagtgcacatcaaactgcccctgctaagcaaagatagccgcttcccaaagatcctggagaacctaagactccaaaagcgtggtactggaggagtggacactgctgccacaggcggtgtctttgatatttctaatttggaccgactaggcaaatcagaggtggagctggtgcaactggtcatcgatggagtaaactatttgattgattgtgaacggcgtctggagagaggccaggatatccgcatccccacacctgtcatccacaccaagcattaactccccatcgccagctgatgactcaagattccaaggagttctgctcattctaatgatggcccattctacttgctctggacctgccctcgcatcccctgcctccatcctagtaaagactccttgctatgct

SEQ ID NO: 435916 - DNA, 428 bp, Homo sapiens
tccactagtgtaggcccactagtgtaggctcaaactgcccctgctaagcaaagatagccgcttcccaaagatcctggagaacctaagactccaaaaacgtggtactggaggagtggacactgctgctacaggcggtgtctttgatatttctaatttggaccgactaggcaaatcagaggtggagctggtgcaactggtcatcgatggagtaaactatttgattgattgtgaacggcgtctggagagaggccaggatatccgcatccccacacctgtcatccacaccaagcattaactccccatcgccagctgatgactcaagattcccaggagttctgctcattctaatgatggcccattctacttgctctggacctgcccccgcatcccctgcctccatcctagtaaagactccttgctatgctgca

SEQ ID NO: 435917 - DNA, 1067 bp, Homo sapiens
ctgtctgtgttacttctaatggtggggtgaggagggagcagccttcaggaaatgaaaagaggcagtgggattatttatgatggaaagagactccagatatggcaacccaggaacactgattctcaggaatccaaccaaagggcctaaggtctccagcacttcccctgagactggagtctcctttggagcctggagaagagcatcagaacttggacaatgcacttctgactcagaataccagacaccttgatcaagacaccaagccccctgaccttccctccctcctgctcccaactcagcaccctatgatgctcactacctttgttcactttcttaagcaatgagaccagataggagcaggcagaaagactgagaggtggactccaagagatttctcggactccaagaggtatggacaagtaacgtgaagcatattatcaaggaacagaacccagaggcaaaacgggccaggccttgtagacaggaacctgtttggcagcaagaaagcaagaagtagagggttggaggacagtcagagagcattgtctgaggagcaagaattgcccagggcagcaaatctgagtctggtagggtggactcttaccaggttttgtagtgccctctctgccagggctgcctggtggaggggggtcagtgccagcagctgctctggagctctttgcaccagctccaccaccaacataatggattcattggatagtctgtccatcaactggattctattatagcaatttgacaacaatatcattcaagtggagctgggccaagtcgagaagggaccacagaaccccacagtccccagctaagatgtgaccccagaccaaatttagtgaagctggacaggaactgacagtaaacagctccagggccaattcccaccatcaagcttgagtgggggagaaaaagggagcaacatatttctagtcttcctaaaaaaaaaaaataacgaacaatcctacctgatctaatggactcaaaagctccaaatattaagtaccattaacatttccccattttatagattaaaaaactgaggttcacagaga

SEQ ID NO: 435918 - DNA, 1487 bp, Homo sapiens
ctgtctgtgttacttctaatggtggggtgaggagggagcagccttcaggaaatgaaaagaggcagtgggattatttatgatggaaagagactccagatatggcaacccaggaacactgattctcaggaatccaaccaaagggcctaaggtctccagcacttcccctgagactggagtctcctttggagcctggagaagagcatcagaacttggacaatgcacttctgactcagaataccagacaccttgatcaagacaccaagccccctgaccttccctccctcctgctcccaactcagcaccctatgatgctcactacctttgttcactttcttaagcaatgagaccagataggagcaggcagaaagactgagaggtggactccaagagatttctcggactccaagaggtatggacaagtaacgtgaagcatattatcaaggaacagaacccagaggcaaaacgggccaggccttgtagacaggaacctgtttggcagcaagaaagcaagaagtagagggttggaggacagtcagagagcattgtctgaggagcaagaattgcccagggcagcaaatctgagtctggtagggtggactcttaccaggttttgtagtgccctctctgccagggctgcctggtggaggggggtcagtgccagcagctgctctggagctctttgcaccagctccaccaccaacataatggattcattggatagtctgtccatcaactggattctattatagcaatttgacaacaatatcattcaagtggagctgggccaagtcgagaagggaccacagaaccccacagtccccagctaagatgtgaccccagaccaaatttagtgaagctggacaggaactgacagtaaacagctccagggccaattcccaccatcaagcttgagtgggggagaaaaagggagcaacatatttctagtcttcctaaaaaaaaaaaataacgaacaatcctacctgatctaatggactcaaaagctccaaatattaagtaccattaacatttccccattttatagattaaaaaactgaggttcacagagatcaaatgttgaggtctctcactcccaattcccgtttttttccacaggaccacccttcctctgcttgtgaagaggtcccttcttgtttgtacgtgctatacaatttacaaagttctttcaggtgttatctcatttgatcctacaacaagacctggcctcactccatcactcaggctggagcacagtggtgctgcgatctcagttcactgcaacccgcacctcccaggttcaagcaattctcgtgcctcagcctcccgaatagctggaattacacgcacgtgccaccacgcccagctaacttttgtatttttagtagagatggtgttttgccatgttggccagtctggtcttgaacacctgacctccgtgatccacccaccttggcctccccaaatgctgggattataggcatgagccactg

SEQ ID NO: 435919 - DNA, 335 bp, Homo sapiens
aaaaaaagttcaggagacagagctctgagcaggttcagggctctttcaggtaggactagtctctgcctctattgaccctgctcccaatccctatctcctctctaggatagccgcttcccaaagatcctggagaacctaagactccaaaagcgtggtactggaggagtggacactgctgccacaggcggtgtctttgatatttctaatttggaccgactaggcaaatcagaggtgagatcctaagggattaggatgaggagaggtataggtctgtgggggctgaaatatggcagtgagtgagcctccgggatgtaacataatctgaaatgaaattc

SEQ ID NO: 435920 - DNA, 2607 bp, Homo sapiens
cgcggagggcgggccctgctctagcgggccgcgtagcggacatggcgggctcccggctcccgcggcagctcttcctccagggcgtggcggccgtcttcatgtttgctttcgcttccctctacacgcaaatcccaggcctgtatggccccgagggcatcctacctgcaaggaggacgctgcggcctcagggcaaggggcgctggcagcagctgtgggagaccccgacgctgctgtgggaagcgccgagactggggctggacacggcccagggcctggagctgctgagcctgctgggtgcactagtggccctgggagccctgctgctgagcccactgcgccaccctgtcatctacttgctgctttgggccgcctacctgtcagcctgccaggtgggccaggtgttcctttatttccagtgggactccctgctgctagagactggcttcctggccgtgctggtggccccgctgaggccagcctcccaccgcaaggaggccccccagggcaggcaggcaggggccctgccccacgaagacctccccttctggctggtgcgatggctgctgttccgcctcatgttcgcctcaggcgtggtcaagctgaccagccgctgccctgcgtggtgggggctcactgccctcacctaccactacgagacccagtgcctgcccacgcccgccgcctggttcgcacaccacctgccggtctggctgcacaagctcagcgtggtggccaccttcctaattgagatcgctgtgccgcccctgttcttcgcccccattcgacgcctgcgcttggctgctttctactcgcaggtgctgctgcaggtcctgattatcatcaccggcaactacaacttcttcaacctgatgacgctggtgcttaccactgcgctgttggacgaccagcacctggctgctgagcctggccacggcagccgcaagaagacggccacctcctggcccaaggccctgctggccaccctgtcgctgctgctggaactagccgtctacgggcttctggcctatggcactgtgcactactttggcctggaggttgactggcagcagcgcaccatccactccagaaccactttcaccttccaccagttttctcagtggctgaagacactgacgctgcccactgtgtggctgggtgtggcctccctggtctgggagctgctgagtgccctgtggaggtggacccaggtgcggggctggctacggaagctcagtgctgtagtccaactgtcccttgtgggcactgcgaccgtggccttgttcctgattagcctggtgccgtactcctacgtggagcccgggacccacgggcgcctctggaccggggcccaccgcctgtttggtgccgtggagcacctacagctggccaactcctacggcctcttccgccgcatgactgggcttggtggacggcctgaggtggtgctggagggcagttacgacggccaccactggacggagatcgagttcatgtacaagcctgggaacctgagccggccgcccccggttgtggtgccccaccagccacgcctggactggcagatgtggtttgcagccctgggcccacacacgcacagcccgtggttcacaagcctggtcttgcgcctgctgcagggcaaggagccagtgatccgccttgtccagagccaagtggccaggtatcccttccacaagcagccgcccacctacgtccgagcccagcgctacaagtactggttctcccagcctggggagcagggccagtggtggcggcgccagtgggtggaggagttcttcccatccgtgtccctgggggaccccacgctggagacgctgctcaggcagtttggactacaggagaaaagcccacctcgcacccgcagcgccaacagcaccctggcccaggccctccactggactcgctctcagctgtctcccctggaggcccccgccctgctctgggggctcctcatggccgtgggggctgtcagatttgtgcaggccctgctagcaccctgttctctccggtcctccccgctggcaccagtcagcggggagaagcgcaggccagcctcccagaaagactccggagctgcctccgaacaggccaccgcagcccccaacccctgctccagtagttcgaggaccacccggcgaaagaagtagctgtgttctcccagctgcacgtcctgagagggccaggtcgccgggagtgctctggcctccggcaggacaggacccagccactgtgccttagctgaccctgcagggccaggcacaggttggggggctgcccctggggtttgcagggtgctgcattgagggctccaggccccacccccacgccagccatgcccctccccaggactcccactattgcctctgtgattggcccaggaggaaaacacgaccaagctcaagacccttcccctgccctgggctgtgggggtctgagtctagagcccccaaccctaggccccgtgccagaggggaagaggctgactcccaggggaagaggggaagcactgtcatcttccacgtcatcttcacaccagcccatcctgccctttagatctgggcaccaataaaggcgtcttttgtgcttggc

SEQ ID NO: 435921 - DNA, 2692 bp, Homo sapiens
cgcggagggcgggccctgctctagcgggccgcgtagcggacatggcgggctcccggctcccgcggcagctcttcctccagggcgtggcggccgtcttcatgtttgctttcgcttccctctacacgcaaatcccaggctgggggatctgcaggccctgactcagaggtagtctagtctgcaagggctgtccagggcctggccatgacatgccctcccacaggcctgtatggccccgagggcatcctacctgcaaggaggacgctgcggcctcagggcaaggggcgctggcagcagctgtgggagaccccgacgctgctgtgggaagcgccgagactggggctggacacggcccagggcctggagctgctgagcctgctgggtgcactagtggccctgggagccctgctgctgagcccactgcgccaccctgtcatctacttgctgctttgggccgcctacctgtcagcctgccaggtgggccaggtgttcctttatttccagtgggactccctgctgctagagactggcttcctggccgtgctggtggccccgctgaggccagcctcccaccgcaaggaggccccccagggcaggcaggcaggggccctgccccacgaagacctccccttctggctggtgcgatggctgctgttccgcctcatgttcgcctcaggcgtggtcaagctgaccagccgctgccctgcgtggtgggggctcactgccctcacctaccactacgagacccagtgcctgcccacgcccgccgcctggttcgcacaccacctgccggtctggctgcacaagctcagcgtggtggccaccttcctaattgagatcgctgtgccgcccctgttcttcgcccccattcgacgcctgcgcttggctgctttctactcgcaggtgctgctgcaggtcctgattatcatcaccggcaactacaacttcttcaacctgatgacgctggtgcttaccactgcgctgttggacgaccagcacctggctgctgagcctggccacggcagccgcaagaagacggccacctcctggcccaaggccctgctggccaccctgtcgctgctgctggaactagccgtctacgggcttctggcctatggcactgtgcactactttggcctggaggttgactggcagcagcgcaccatccactccagaaccactttcaccttccaccagttttctcagtggctgaagacactgacgctgcccactgtgtggctgggtgtggcctccctggtctgggagctgctgagtgccctgtggaggtggacccaggtgcggggctggctacggaagctcagtgctgtagtccaactgtcccttgtgggcactgcgaccgtggccttgttcctgattagcctggtgccgtactcctacgtggagcccgggacccacgggcgcctctggaccggggcccaccgcctgtttggtgccgtggagcacctacagctggccaactcctacggcctcttccgccgcatgactgggcttggtggacggcctgaggtggtgctggagggcagttacgacggccaccactggacggagatcgagttcatgtacaagcctgggaacctgagccggccgcccccggttgtggtgccccaccagccacgcctggactggcagatgtggtttgcagccctgggcccacacacgcacagcccgtggttcacaagcctggtcttgcgcctgctgcagggcaaggagccagtgatccgccttgtccagagccaagtggccaggtatcccttccacaagcagccgcccacctacgtccgagcccagcgctacaagtactggttctcccagcctggggagcagggccagtggtggcggcgccagtgggtggaggagttcttcccatccgtgtccctgggggaccccacgctggagacgctgctcaggcagtttggactacaggagaaaagcccacctcgcacccgcagcgccaacagcaccctggcccaggccctccactggactcgctctcagctgtctcccctggaggcccccgccctgctctgggggctcctcatggccgtgggggctgtcagatttgtgcaggccctgctagcaccctgttctctccggtcctccccgctggcaccagtcagcggggagaagcgcaggccagcctcccagaaagactccggagctgcctccgaacaggccaccgcagcccccaacccctgctccagtagttcgaggaccacccggcgaaagaagtagctgtgttctcccagctgcacgtcctgagagggccaggtcgccgggagtgctctggcctccggcaggacaggacccagccactgtgccttagctgaccctgcagggccaggcacaggttggggggctgcccctggggtttgcagggtgctgcattgagggctccaggccccacccccacgccagccatgcccctccccaggactcccactattgcctctgtgattggcccaggaggaaaacacgaccaagctcaagacccttcccctgccctgggctgtgggggtctgagtctagagcccccaaccctaggccccgtgccagaggggaagaggctgactcccaggggaagaggggaagcactgtcatcttccacgtcatcttcacaccagcccatcctgccctttagatctgggcaccaataaaggcgtcttttgtgcttggc

SEQ ID NO: 435922 - DNA, 2750 bp, Homo sapiens
cgcggagggcgggccctgctctagcgggccgcgtagcggacatggcgggctcccggctcccgcggcagctcttcctccagggcgtggcggccgtcttcatgtttgctttcgcttccctctacacgcaaatcccaggcctgtatggccccgagggcatcctacctgcaaggaggacgctgcggcctcagggcaaggggcgctggcagcagctgtgggagaccccgacgctgctgtgggaagcgccgagactggggctggacacggcccagggcctggagctgctgagcctgctgggtgcactagtggccctgggagccctgctgctgagcccactgcgccaccctgtcatctacttgctgctttgggccgcctacctgtcagcctgccaggtgggccaggtgttcctttatttccagtgggactccctgctgctagagactggcttcctggccgtgctggtggccccgctgaggccagcctcccaccgcaaggaggccccccagggcaggcaggcaggggccctgccccacgaagacctccccttctggctggtgcgatggctgctgttccgcctcatgttcgcctcaggcgtggtcaagctgaccagccgctgccctgcgtggtgggggctcactgccctcacctaccactacgagacccagtgcctgcccacgcccgccgcctggttcgcacaccacctgccggtctggctgcacaagctcagcgtggtggccaccttcctaattgagatcgctgtgccgcccctgttcttcgcccccattcgacgcctgcgcttggctgctttctactcgcaggtgctgctgcaggtcctgattatcatcaccggcaactacaacttcttcaacctgatgacgctggtgcttaccactgcgctgttggacgaccagcacctggctgctgagcctggccacggcagccgcaagaagacggccacctcctggcccaaggccctgctggccaccctgtcgctgctgctggaactagccgtctacgggcttctggcctatggcactgtgcactactttggcctggaggttgactggcagcagcgcaccatccactccagaaccagtgagtgccgacctgggggggccagagggcaggggcggaccagtcctcacacccccctcctccaccagctttcaccttccaccagttttctcagtggctgaagacactgacgctgcccactgtgtggctgggtgtggcctccctggtctgggagctgctgagtgccctgtggaggtacatggcccaggaagcagggagggggcacaggtgtgcagggccggcctgacgaccttgggtccttgcccacaggtggacccaggtgcggggctggctacggaagctcagtgctgtagtccaactgtcccttgtgggcactgcgaccgtggccttgttcctgattagcctggtgccgtactcctacgtggagcccgggacccacgggcgcctctggaccggggcccaccgcctgtttggtgccgtggagcacctacagctggccaactcctacggcctcttccgccgcatgactgggcttggtggacggcctgaggtggtgctggagggcagttacgacggccaccactggacggagatcgagttcatgtacaagcctgggaacctgagccggccgcccccggttgtggtgccccaccagccacgcctggactggcagatgtggtttgcagccctgggcccacacacgcacagcccgtggttcacaagcctggtcttgcgcctgctgcagggcaaggagccagtgatccgccttgtccagagccaagtggccaggtatcccttccacaagcagccgcccacctacgtccgagcccagcgctacaagtactggttctcccagcctggggagcagggccagtggtggcggcgccagtgggtggaggagttcttcccatccgtgtccctgggggaccccacgctggagacgctgctcaggcagtttggactacaggagaaaagcccacctcgcacccgcagcgccaacagcaccctggcccaggccctccactggactcgctctcagctgtctcccctggaggcccccgccctgctctgggggctcctcatggccgtgggggctgtcagatttgtgcaggccctgctagcaccctgttctctccggtcctccccgctggcaccagtcagcggggagaagcgcaggccagcctcccagaaagactccggagctgcctccgaacaggccaccgcagcccccaacccctgctccagtagttcgaggaccacccggcgaaagaagtagctgtgttctcccagctgcacgtcctgagagggccaggtcgccgggagtgctctggcctccggcaggacaggacccagccactgtgccttagctgaccctgcagggccaggcacaggttggggggctgcccctggggtttgcagggtgctgcattgagggctccaggccccacccccacgccagccatgcccctccccaggactcccactattgcctctgtgattggcccaggaggaaaacacgaccaagctcaagacccttcccctgccctgggctgtgggggtctgagtctagagcccccaaccctaggccccgtgccagaggggaagaggctgactcccaggggaagaggggaagcactgtcatcttccacgtcatcttcacaccagcccatcctgccctttagatctgggcaccaataaaggcgtcttttgtgcttggc

SEQ ID NO: 435923 - DNA, 3160 bp, Homo sapiens
  misc_feature (2622)..(2623): n is a, c, g, or t
  misc_feature (2958)..(2958): n is a, c, g, or t
cgcggagggcgggccctgctctagcgggccgcgtagcggacatggcgggctcccggctcccgcggcagctcttcctccagggcgtggcggccgtcttcatgtttgctttcgcttccctctacacgcaaatcccaggcctgtatggccccgagggcatcctacctgcaaggaggacgctgcggcctcagggcaaggggcgctggcagcagctgtgggagaccccgacgctgctgtgggaagcgccgagactggggctggacacggcccagggcctggagctgctgagcctgctgggtgcactagtggccctgggagccctgctgctgagcccactgcgccaccctgtcatctacttgctgctttgggccgcctacctgtcagcctgccaggtgggccaggtgttcctttatttccagtgggactccctgctgctagagactggcttcctggccgtgctggtggccccgctgaggccagcctcccaccgcaaggaggccccccagggcaggcaggcaggggccctgccccacgaagacctccccttctggctggtgcgatggctgctgttccgcctcatgttcgcctcaggcgtggtcaagctgaccagccgctgccctgcgtggtgggggctcactgccctcacctaccactacgagacccagtgcctgcccacgcccgccgcctggttcgcacaccacctgccggtctggctgcacaagctcagcgtggtggccaccttcctaattgagatcgctgtgccgcccctgttcttcgcccccattcgacgcctgcgcttggctgctttctactcgcaggtgctgctgcaggtcctgattatcatcaccggcaactacaacttcttcaacctgatgacgctggtgcttaccactgcgctgttggacgaccagcacctggctgctgagcctggccacggcagccgcaagaagacggccacctcctggcccaaggccctgctggccaccctgtcgctgctgctggaactagccgtctacgggcttctggcctatggcactgtgcactactttggcctggaggttgactggcagcagcgcaccatccactccagaaccactttcaccttccaccagttttctcagtggctgaagacactgacgctgcccactgtgtggctgggtgtggcctccctggtctgggagctgctgagtgccctgtggaggtggacccaggtgcggggctggctacggaagctcagtgctgtagtccaactgtcccttgtgggcactgcgaccgtggccttgttcctgattagcctggtgccgtactcctacgtggagcccgggacccacgggcgcctctggaccggggcccaccgcctgtttggtgccgtggagcacctacagctggccaactcctacggcctcttccgccgcatgactgggcttggtggacggcctgaggtggtgctggagggcagttacgacggccaccactggacggagatcgagttcatgtacaagcctgggaacctgagccggccgcccccggttgtggtgccccaccagccacgcctggactggcagatgtggtttgcagccctgggcccacacacgcacagcccgtggttcacaagcctggtcttgcgcctgctgcagggcaaggagccagtgatccgccttgtccagagccaagtggccaggtatcccttccacaagcagccgcccacctacgtccgagcccagcgctacaagtactggttctcccagcctggggagcagggccagtggtggcggcgccagtgggtggaggagttcttcccatccgtgtccctgggggaccccacgctggagacgctgctcaggcagtttggactacaggagaaaagcccacctcgcacccgcagcgccaacagcaccctggcccaggccctccactggactcgctctcagctgtctcccctggaggcccccgccctgctctgggggctcctcatggccgtgggggctgtcagatttgtgcaggccctgctagcaccctgttctctccggtcctccccgctggcaccagtcagcggggagaagcgcaggccagcctcccagaaagactccggagctgcctccgaacaggccaccgcagcccccaacccctgctccagtagttcgaggaccacccggcgaaagaagtagctgtgttctcccagctgcacgtcctgagagggccaggtcgccgggagtgctctggcctccggcaggacaggacccagccactgtgccttagctgaccctgcagggccaggcacaggttggggggctgcccctggggtttgcagggtgctgcattgagggctccaggccccacccccacgccagccatgcccctccccaggactcccactattgcctctgtgattggcccaggaggaaaacacgaccaagctcaagacccttcccctgccctgggctgtgggggtctgagtctagagcccccaaccctaggccccgtgccagaggggaagaggctgactcccaggggaagaggggaagcactgtcatcttccacgtcatcttcacaccagcccatcctgccctttagatctgggcaccaataaaggcgtcttttgtgcttggcaaaaaaaaaaaaaannaaaaaaaaaaaaaagggggggcccaaaaaatttccccggaaggggccccaaggtgttaccgcgacccccaggcttttcgtggtccccaagggtggcccctaaatggggaactcgaatatataaagcaaggaaatgggaccgtcgtttataacaaacgactcgaggaactggggaaaaacacgtgcctaacacctgggagacatctgtggggaaagagaaaccttacactgtccggggggcgggggtgacaatagtctggggacaaacttatcccctctagagaaaggaaattttaaaagaggctctctagaggggggagaacatgtattagacanatcttttaaacagggtagctataaacaggggtggtaaacaacattaggaactgcgaaaatattagactagagcattgattgagaaaaacgtattggcgcctaccacgagagaaagatattaggagtttagtggaacagaatattctaattcacacggggggaagtctctttttgttaataaaatcgcggtaagacaatagtt

SEQ ID NO: 435924 - DNA, 2497 bp, Homo sapiens
tgcagactctgacctagggatggaggcctgtatggccccgagggcatcctacctgcaaggaggacgctgcggcctcagggcaaggggcgctggcagcagctgtgggagaccccgacgctgctgtgggaagcgccgagactggggctggacacggcccagggcctggagctgctgagcctgctgggtgcactagtggccctgggagccctgctgctgagcccactgcgccaccctgtcatctacttgctgctttgggccgcctacctgtcagcctgccaggtgggccaggtgttcctttatttccagtgggactccctgctgctagagactggcttcctggccgtgctggtggccccgctgaggccagcctcccaccgcaaggaggccccccagggcaggcaggcaggggccctgccccacgaagacctccccttctggctggtgcgatggctgctgttccgcctcatgttcgcctcaggcgtggtcaagctgaccagccgctgccctgcgtggtgggggctcactgccctcacctaccactacgagacccagtgcctgcccacgcccgccgcctggttcgcacaccacctgccggtctggctgcacaagctcagcgtggtggccaccttcctaattgagatcgctgtgccgcccctgttcttcgcccccattcgacgcctgcgcttggctgctttctactcgcaggtgctgctgcaggtcctgattatcatcaccggcaactacaacttcttcaacctgatgacgctggtgcttaccactgcgctgttggacgaccagcacctggctgctgagcctggccacggcagccgcaagaagacggccacctcctggcccaaggccctgctggccaccctgtcgctgctgctggaactagccgtctacgggcttctggcctatggcactgtgcactactttggcctggaggttgactggcagcagcgcaccatccactccagaaccactttcaccttccaccagttttctcagtggctgaagacactgacgctgcccactgtgtggctgggtgtggcctccctggtctgggagctgctgagtgccctgtggaggtggacccaggtgcggggctggctacggaagctcagtgctgtagtccaactgtcccttgtgggcactgcgaccgtggccttgttcctgattagcctggtgccgtactcctacgtggagcccgggacccacgggcgcctctggaccggggcccaccgcctgtttggtgccgtggagcacctacagctggccaactcctacggcctcttccgccgcatgactgggcttggtggacggcctgaggtggtgctggagggcagttacgacggccaccactggacggagatcgagttcatgtacaagcctgggaacctgagccggccgcccccggttgtggtgccccaccagccacgcctggactggcagatgtggtttgcagccctgggcccacacacgcacagcccgtggttcacaagcctggtcttgcgcctgctgcagggcaaggagccagtgatccgccttgtccagagccaagtggccaggtatcccttccacaagcagccgcccacctacgtccgagcccagcgctacaagtactggttctcccagcctggggagcagggccagtggtggcggcgccagtgggtggaggagttcttcccatccgtgtccctgggggaccccacgctggagacgctgctcaggcagtttggactacaggagaaaagcccacctcgcacccgcagcgccaacagcaccctggcccaggccctccactggactcgctctcagctgtctcccctggaggcccccgccctgctctgggggctcctcatggccgtgggggctgtcagatttgtgcaggccctgctagcaccctgttctctccggtcctccccgctggcaccagtcagcggggagaagcgcaggccagcctcccagaaagactccggagctgcctccgaacaggccaccgcagcccccaacccctgctccagtagttcgaggaccacccggcgaaagaagtagctgtgttctcccagctgcacgtcctgagagggccaggtcgccgggagtgctctggcctccggcaggacaggacccagccactgtgccttagctgaccctgcagggccaggcacaggttggggggctgcccctggggtttgcagggtgctgcattgagggctccaggccccacccccacgccagccatgcccctccccaggactcccactattgcctctgtgattggcccaggaggaaaacacgaccaagctcaagacccttcccctgccctgggctgtgggggtctgagtctagagcccccaaccctaggccccgtgccagaggggaagaggctgactcccaggggaagaggggaagcactgtcatcttccacgtcatcttcacaccagcccatcctgccctttagatctgggcaccaataaaggcgtcttttgtgcttggc

SEQ ID NO: 435925 - DNA, 2522 bp, Homo sapiens
cgcggagggcgggccctgctctagcgggccgcgtagcggacatggcgggctcccggctcccgcggcagctcttcctccagggcgtggcggccgtcttcatgtttgctttcgcttccctctacacgcaaatcccaggcctgtatggccccgagggcatcctacctgcaaggaggacgctgcggcctcagggcaaggggcgctggcagcagctgtgggagaccccgacgctgctgtgggaagcgccgagactggggctggacacggcccagggcctggagctgctgagcctgctgggtgcactagtggccctgggagccctgctgctgagcccactgcgccaccctgtcatctacttgctgctttgggccgcctacctgtcagcctgccaggtgggccaggtgttcctttatttccagtgggactccctgctgctagagactggcttcctggccgtgctggtggccccgctgaggccagcctcccaccgcaaggaggccccccagggcaggcaggcaggggccctgccccacgaagacctccccttctggctgccctcacctaccactacgagacccagtgcctgcccacgcccgccgcctggttcgcacaccacctgccggtctggctgcacaagctcagcgtggtggccaccttcctaattgagatcgctgtgccgcccctgttcttcgcccccattcgacgcctgcgcttggctgctttctactcgcaggtgctgctgcaggtcctgattatcatcaccggcaactacaacttcttcaacctgatgacgctggtgcttaccactgcgctgttggacgaccagcacctggctgctgagcctggccacggcagccgcaagaagacggccacctcctggcccaaggccctgctggccaccctgtcgctgctgctggaactagccgtctacgggcttctggcctatggcactgtgcactactttggcctggaggttgactggcagcagcgcaccatccactccagaaccactttcaccttccaccagttttctcagtggctgaagacactgacgctgcccactgtgtggctgggtgtggcctccctggtctgggagctgctgagtgccctgtggaggtggacccaggtgcggggctggctacggaagctcagtgctgtagtccaactgtcccttgtgggcactgcgaccgtggccttgttcctgattagcctggtgccgtactcctacgtggagcccgggacccacgggcgcctctggaccggggcccaccgcctgtttggtgccgtggagcacctacagctggccaactcctacggcctcttccgccgcatgactgggcttggtggacggcctgaggtggtgctggagggcagttacgacggccaccactggacggagatcgagttcatgtacaagcctgggaacctgagccggccgcccccggttgtggtgccccaccagccacgcctggactggcagatgtggtttgcagccctgggcccacacacgcacagcccgtggttcacaagcctggtcttgcgcctgctgcagggcaaggagccagtgatccgccttgtccagagccaagtggccaggtatcccttccacaagcagccgcccacctacgtccgagcccagcgctacaagtactggttctcccagcctggggagcagggccagtggtggcggcgccagtgggtggaggagttcttcccatccgtgtccctgggggaccccacgctggagacgctgctcaggcagtttggactacaggagaaaagcccacctcgcacccgcagcgccaacagcaccctggcccaggccctccactggactcgctctcagctgtctcccctggaggcccccgccctgctctgggggctcctcatggccgtgggggctgtcagatttgtgcaggccctgctagcaccctgttctctccggtcctccccgctggcaccagtcagcggggagaagcgcaggccagcctcccagaaagactccggagctgcctccgaacaggccaccgcagcccccaacccctgctccagtagttcgaggaccacccggcgaaagaagtagctgtgttctcccagctgcacgtcctgagagggccaggtcgccgggagtgctctggcctccggcaggacaggacccagccactgtgccttagctgaccctgcagggccaggcacaggttggggggctgcccctggggtttgcagggtgctgcattgagggctccaggccccacccccacgccagccatgcccctccccaggactcccactattgcctctgtgattggcccaggaggaaaacacgaccaagctcaagacccttcccctgccctgggctgtgggggtctgagtctagagcccccaaccctaggccccgtgccagaggggaagaggctgactcccaggggaagaggggaagcactgtcatcttccacgtcatcttcacaccagcccatcctgccctttagatctgggcaccaataaaggcgtcttttgtgcttggc

SEQ ID NO: 435926 - DNA, 2353 bp, Homo sapiens
cgcggagggcgggccctgctctagcgggccgcgtagcggacatggcgggctcccggctcccgcggcagctcttcctccagggcgtggcggccgtcttcatgtttgctttcgcttccctctacacgcaaatcccaggtgggccaggtgttcctttatttccagtgggactccctgctgctagagactggcttcctggccgtgctggtggccccgctgaggccagcctcccaccgcaaggaggccccccagggcaggcaggcaggggccctgccccacgaagacctccccttctggctggtgcgatggctgctgttccgcctcatgttcgcctcaggcgtggtcaagctgaccagccgctgccctgcgtggtgggggctcactgccctcacctaccactacgagacccagtgcctgcccacgcccgccgcctggttcgcacaccacctgccggtctggctgcacaagctcagcgtggtggccaccttcctaattgagatcgctgtgccgcccctgttcttcgcccccattcgacgcctgcgcttggctgctttctactcgcaggtgctgctgcaggtcctgattatcatcaccggcaactacaacttcttcaacctgatgacgctggtgcttaccactgcgctgttggacgaccagcacctggctgctgagcctggccacggcagccgcaagaagacggccacctcctggcccaaggccctgctggccaccctgtcgctgctgctggaactagccgtctacgggcttctggcctatggcactgtgcactactttggcctggaggttgactggcagcagcgcaccatccactccagaaccactttcaccttccaccagttttctcagtggctgaagacactgacgctgcccactgtgtggctgggtgtggcctccctggtctgggagctgctgagtgccctgtggaggtggacccaggtgcggggctggctacggaagctcagtgctgtagtccaactgtcccttgtgggcactgcgaccgtggccttgttcctgattagcctggtgccgtactcctacgtggagcccgggacccacgggcgcctctggaccggggcccaccgcctgtttggtgccgtggagcacctacagctggccaactcctacggcctcttccgccgcatgactgggcttggtggacggcctgaggtggtgctggagggcagttacgacggccaccactggacggagatcgagttcatgtacaagcctgggaacctgagccggccgcccccggttgtggtgccccaccagccacgcctggactggcagatgtggtttgcagccctgggcccacacacgcacagcccgtggttcacaagcctggtcttgcgcctgctgcagggcaaggagccagtgatccgccttgtccagagccaagtggccaggtatcccttccacaagcagccgcccacctacgtccgagcccagcgctacaagtactggttctcccagcctggggagcagggccagtggtggcggcgccagtgggtggaggagttcttcccatccgtgtccctgggggaccccacgctggagacgctgctcaggcagtttggactacaggagaaaagcccacctcgcacccgcagcgccaacagcaccctggcccaggccctccactggactcgctctcagctgtctcccctggaggcccccgccctgctctgggggctcctcatggccgtgggggctgtcagatttgtgcaggccctgctagcaccctgttctctccggtcctccccgctggcaccagtcagcggggagaagcgcaggccagcctcccagaaagactccggagctgcctccgaacaggccaccgcagcccccaacccctgctccagtagttcgaggaccacccggcgaaagaagtagctgtgttctcccagctgcacgtcctgagagggccaggtcgccgggagtgctctggcctccggcaggacaggacccagccactgtgccttagctgaccctgcagggccaggcacaggttggggggctgcccctggggtttgcagggtgctgcattgagggctccaggccccacccccacgccagccatgcccctccccaggactcccactattgcctctgtgattggcccaggaggaaaacacgaccaagctcaagacccttcccctgccctgggctgtgggggtctgagtctagagcccccaaccctaggccccgtgccagaggggaagaggctgactcccaggggaagaggggaagcactgtcatcttccacgtcatcttcacaccagcccatcctgccctttagatctgggcaccaataaaggcgtcttttgtgcttggc

SEQ ID NO: 435927 - DNA, 1197 bp, Homo sapiens
  misc_feature (20)..(20): n is a, c, g, or t
  misc_feature (27)..(27): n is a, c, g, or t
cggatatttgggatcaccanattaaancaaacccgctgggcattttaaaagcagctgtcggtcgattccggatgaggagatgagtcatgtcagctggactgagccggccgcccccggttgtggtgccccaccagccacgcctggactggcagatgtggtttgcagccctgggcccacacacgcacagcccgtggttcacaagcctggtcttgcgcctgctgcagggcaaggagccagtgatccgccttgtccagagccaagtggccaggtatcccttccacaagcagccgcccacctacgtccgagcccagcgctacaagtactggttctcccagcctggggagcagggccagtggtggcggcgccagtgggtggaggagttcttcccatccgtgtccctgggggaccccacgctggagacgctgctcaggcagtttggactacaggagaaaagcccacctcgcacccgcagcgccaacagcaccctggcccaggccctccactggactcgctctcagctgtctcccctggaggcccccgccctgctctgggggctcctcatggccgtgggggctgtcagatttgtgcaggccctgctagcaccctgttctctccggtcctccccgctggcaccagtcagcggggagaagcgcaggccagcctcccagaaagactccggagctgcctccgaacaggccaccgcagcccccaacccctgctccagtagttcgaggaccacccggcgaaagaagtagctgtgttctcccagctgcacgtcctgagagggccaggtcgccgggagtgctctggcctccggcaggacaggacccagccactgtgccttagctgaccctgcagggccaggcacaggttggggggctgcccctggggtttgcagggtgctgcattgagggctccaggccccacccccacgccagccatgcccctccccaggactcccactattgcctctgtgattggcccaggaggaaaacacgaccaagctcaagacccttcccctgccctgggctgtgggggtctgagtctagagcccccaaccctaggccccgtgccagaggggaagaggctgactcccaggggaagaggggaagcactgtcatcttccacgtcatcttcacaccagcccatcctgccctttagatctgggcaccaataaaggcgtcttttgtgcttggc

SEQ ID NO: 435928 - DNA, 1158 bp, Homo sapiens
ggcccagctgacctcggcctgcctggcaggagatcgagttcatgtacaagcctgggaacctgagccggccgcccccggttgtggtgccccaccagccacgcctggactggcagatgtggtttgcagccctgggcccacacacgcacagcccgtggttcacaagcctggtcttgcgcctgctgcagggcaaggagccagtgatccgccttgtccagagccaagtggccaggtatcccttccacaagcagccgcccacctacgtccgagcccagcgctacaagtactggttctcccagcctggggagcagggccagtggtggcggcgccagtgggtggaggagttcttcccatccgtgtccctgggggaccccacgctggagacgctgctcaggcagtttggactacaggagaaaagcccacctcgcacccgcagcgccaacagcaccctggcccaggccctccactggactcgctctcagctgtctcccctggaggcccccgccctgctctgggggctcctcatggccgtgggggctgtcagatttgtgcaggccctgctagcaccctgttctctccggtcctccccgctggcaccagtcagcggggagaagcgcaggccagcctcccagaaagactccggagctgcctccgaacaggccaccgcagcccccaacccctgctccagtagttcgaggaccacccggcgaaagaagtagctgtgttctcccagctgcacgtcctgagagggccaggtcgccgggagtgctctggcctccggcaggacaggacccagccactgtgccttagctgaccctgcagggccaggcacaggttggggggctgcccctggggtttgcagggtgctgcattgagggctccaggccccacccccacgccagccatgcccctccccaggactcccactattgcctctgtgattggcccaggaggaaaacacgaccaagctcaagacccttcccctgccctgggctgtgggggtctgagtctagagcccccaaccctaggccccgtgccagaggggaagaggctgactcccaggggaagaggggaagcactgtcatcttccacgtcatcttcacaccagcccatcctgccctttagatctgggcaccaataaaggcgtcttttgtgcttggc

SEQ ID NO: 435929 - DNA, 935 bp, Homo sapiens
cgcggagggcgggccctgctctagcgggccgcgtagcggacatggcgggctcccggctcccgcggcagctcttcctccagggcgtggcggccgtcttcatgtttgctttcgcttccctctacacgcaaatcccaggcctgtatggccccgagggcatcctacctgcaaggaggacgctgcggcctcagggcaaggggcgctggcagcagctgtgggagaccccgacgctgctgtgggaagcgccgagactggggctggacacggcccagggcctggagctgctgagcctgctgggtgcactagtggccctgggagccctgctgctgagcccactgcgccaccctgtcatctacttgctgctttgggccgcctacctgtcagcctgccaggtgggccaggtgttcctttatttccagtgggactccctgctgctagagactggcttcctggccgtgctggtggccccgctgaggccagcctcccaccgcaaggaggccccccagggcaggcaggcaggggccctgccccacgaagacctccccttctggctggtgcgatggctgctgttccgcctcatgttcgcctcaggcgtggtcaagctgaccagccgctgccctgcgtggtgggggctcactgccctcacctaccactacgagacccagtgcctgcccacgcccgccgcctggttcgcacaccacctgccggtctggctgcacaagctcagcgtggtggccaccttcctaattgagatcgctgtgccgcccctgttcttcgcccccattcgacgcctgcgcttggctgctttctactcgcaggtgctgctgcaggtcctgattatcatcaccggcaactacaacttcttcaacctgatgacgctggtgcttaccactgcgctgttggacgaccacaacgaattccggcacgacgacgacgaa

SEQ ID NO: 435930 - DNA, 579 bp, Homo sapiens
gcctggggctgtgggaggctgggtagggggtgggggagggctctgcccttcctgggaggactttccgagggaagcagctgtgtggggaggggctcttggtgctatttgctctccccatagggactccctgctgctagagactggcttcctggccgtgctggtggccccgctgaggccagcctcccaccgcaaggaggccccccagggcaggcaggcaggggccctgccccacgaagacctccccttctggctggtgcgatggctgctgttccgccggcggcttggggtctgtaggacccagtttgaaaccccagtgttatgtgatgctaaaatgctgactttccttccctgcctgtcagctttgctctttggaggtgcctaatggccccagttgctgacctaattgcggccggtgtactggttggtacctgaattgcgtgatgaggtgataggggggctttgatactctgggtggctggtctgctatattataagtctaggggaaatgatttctctgaaagcagtaaaaggtgtaaataatgcttcattgcaaatcatcaagactattattatattcag

SEQ ID NO: 435931 - DNA, 2682 bp, Homo sapiens
cgcggagggcgggccctgctctagcgggccgcgtagcggacatggcgggctcccggctcccgcggcagctcttcctccagggcgtggcggccgtcttcatgtttgctttcgcttccctctacacgcaaatcccaggcctgtatggccccgagggcatcctacctgcaaggaggacgctgcggcctcagggcaaggggcgctggcagcagctgtgggagaccccgacgctgctgtgggaagcgccgagactggggctggacacggcccagggcctggagctgctgagcctgctgggtgcactagtggccctgggagccctgctgctgagcccactgcgccaccctgtcatctacttgctgctttgggccgcctacctgtcagcctgccaggtgggccaggtgttcctttatttccagtgggactccctgctgctagagactggcttcctggccgtgctggtggccccgctgaggccagcctcccaccgcaaggaggccccccagggcaggcaggcaggggccctgccccacgaagacctccccttctggctggtgcgatggctgctgttccgcctcatgttcgcctcaggcgtggtcaagctgaccagccgctgccctgcgtggtgggggctcactgccctcacctaccactacgagacccagtgcctgcccacgcccgccgcctggttcgcacaccacctgccggtctggctgcacaagctcagcgtggtggccaccttcctaattgagatcgctgtgccgcccctgttcttcgcccccattcgacgcctgcgcttggctgctttctactcgcaggtgctgctgcaggtcctgattatcatcaccggcaactacaacttcttcaacctgatgacgctggtgcttaccactgcgctgttggacgaccagcacctggctgctgagcctggccacggcagccgcaagaagacggccacctcctggcccaaggccctgctggccaccctgtcgctgctgctggaactagccgtctacgggcttctggcctatggcactgtgcactactttggcctggaggttgactggcagcagcgcaccatccactccagaaccactttcaccttccaccagttttctcagtggctgaagacactgacgctgcccactgtgtggctgggtgtggcctccctggtctgggagctgctgagtgccctgtggaggtacatggcccaggaagcagggagggggcacaggtgtgcagggccggcctgacgaccttgggtccttgcccacaggtggacccaggtgcggggctggctacggaagctcagtgctgtagtccaactgtcccttgtgggcactgcgaccgtggccttgttcctgattagcctggtgccgtactcctacgtggagcccgggacccacgggcgcctctggaccggggcccaccgcctgtttggtgccgtggagcacctacagctggccaactcctacggcctcttccgccgcatgactgggcttggtggacggcctgaggtggtgctggagggcagttacgacggccaccactggacggagatcgagttcatgtacaagcctgggaacctgagccggccgcccccggttgtggtgccccaccagccacgcctggactggcagatgtggtttgcagccctgggcccacacacgcacagcccgtggttcacaagcctggtcttgcgcctgctgcagggcaaggagccagtgatccgccttgtccagagccaagtggccaggtatcccttccacaagcagccgcccacctacgtccgagcccagcgctacaagtactggttctcccagcctggggagcagggccagtggtggcggcgccagtgggtggaggagttcttcccatccgtgtccctgggggaccccacgctggagacgctgctcaggcagtttggactacaggagaaaagcccacctcgcacccgcagcgccaacagcaccctggcccaggccctccactggactcgctctcagctgtctcccctggaggcccccgccctgctctgggggctcctcatggccgtgggggctgtcagatttgtgcaggccctgctagcaccctgttctctccggtcctccccgctggcaccagtcagcggggagaagcgcaggccagcctcccagaaagactccggagctgcctccgaacaggccaccgcagcccccaacccctgctccagtagttcgaggaccacccggcgaaagaagtagctgtgttctcccagctgcacgtcctgagagggccaggtcgccgggagtgctctggcctccggcaggacaggacccagccactgtgccttagctgaccctgcagggccaggcacaggttggggggctgcccctggggtttgcagggtgctgcattgagggctccaggccccacccccacgccagccatgcccctccccaggactcccactattgcctctgtgattggcccaggaggaaaacacgaccaagctcaagacccttcccctgccctgggctgtgggggtctgagtctagagcccccaaccctaggccccgtgccagaggggaagaggctgactcccaggggaagaggggaagcactgtcatcttccacgtcatcttcacaccagcccatcctgccctttagatctgggcaccaataaaggcgtcttttgtgcttggc

SEQ ID NO: 435932 - DNA, 2714 bp, Homo sapiens
cgcggagggcgggccctgctctagcgggccgcgtagcggacatggcgggctcccggctcccgcggcagctcttcctccagggcgtggcggccgtcttcatgtttgctttcgcttccctctacacgcaaatcccaggcctgtatggccccgagggcatcctacctgcaaggaggacgctgcggcctcagggcaaggggcgctggcagcagctgtgggagaccccgacgctgctgtgggaagcgccgagactggggctggacacggcccagggcctggagctgctgagcctgctgggtgcactagtggccctgggagccctgctgctgagcccactgcgccaccctgtcatctacttgctgctttgggccgcctacctgtcagcctgccaggtgggccaggtgttcctttatttccagtgggactccctgctgctagagactggcttcctggccgtgctggtggccccgctgaggccagcctcccaccgcaaggaggccccccagggcaggcaggcaggggccctgccccacgaagacctccccttctggctggtgcgatggctgctgttccgcctcatgttcgcctcaggcgtggtcaagctgaccagccgctgccctgcgtggtgggggctcactgccctcacctaccactacgagacccagtgcctgcccacgcccgccgcctggttcgcacaccacctgccggtctggctgcacaagctcagcgtggtggccaccttcctaattgagatcgctgtgccgcccctgttcttcgcccccattcgacgcctgcgcttggctgctttctactcgcaggtgctgctgcaggtcctgattatcatcaccggcaactacaacttcttcaacctgatgacgctggtgcttaccactgcgctgttggacgaccagcacctggctgctgagcctggccacggcagccgcaagaagacggccacctcctggcccaaggccctgctggccaccctgtcgctgctgctggaactagccgtctacgggcttctggcctatggcactgtgcactactttggcctggaggttgactggcagcagcgcaccatccactccagaaccactttcaccttccaccagttttctcagtggctgaagacactgacgctgcccactgtgtggctgggtgtggcctccctggtctgggagctgctgagtgccctgtggaggtggacccaggtgcggggctggctacggaagctcagtgctgtagtccaactgtcccttgtgggcactgcgaccgtggccttgttcctgattagcctggtgccgtactcctacgtggagcccgggacccacgggcgcctctggaccggggcccaccgcctgtttggtgccgtggagcacctacagctggccaactcctacggcctcttccgccgcatgactgggcttggtggacggcctgaggtggtgctggagggcagttacgacggccaccactggacggagatcgagttcatgtacaagcctgggaacctgagccggccgcccccggttgtggtgccccaccagccacgcctggactggcagatgtggtttgcagccctgggcccacacacgcacagcccgtggttcacaagcctggtcttgcgcctgctgcagggcaaggagccaggtgcggagcgggcttggggggtgtggagtgggctggggtggagcggggtggggaggggaggggcagggcgggtactgtgggggccacgctgatgcctctcgctgcagtgatccgccttgtccagagccaagtggccaggtatcccttccacaagcagccgcccacctacgtccgagcccagcgctacaagtactggttctcccagcctggggagcagggccagtggtggcggcgccagtgggtggaggagttcttcccatccgtgtccctgggggaccccacgctggagacgctgctcaggcagtttggactacaggagaaaagcccacctcgcacccgcagcgccaacagcaccctggcccaggccctccactggactcgctctcagctgtctcccctggaggcccccgccctgctctgggggctcctcatggccgtgggggctgtcagatttgtgcaggccctgctagcaccctgttctctccggtcctccccgctggcaccagtcagcggggagaagcgcaggccagcctcccagaaagactccggagctgcctccgaacaggccaccgcagcccccaacccctgctccagtagttcgaggaccacccggcgaaagaagtagctgtgttctcccagctgcacgtcctgagagggccaggtcgccgggagtgctctggcctccggcaggacaggacccagccactgtgccttagctgaccctgcagggccaggcacaggttggggggctgcccctggggtttgcagggtgctgcattgagggctccaggccccacccccacgccagccatgcccctccccaggactcccactattgcctctgtgattggcccaggaggaaaacacgaccaagctcaagacccttcccctgccctgggctgtgggggtctgagtctagagcccccaaccctaggccccgtgccagaggggaagaggctgactcccaggggaagaggggaagcactgtcatcttccacgtcatcttcacaccagcccatcctgccctttagatctgggcaccaataaaggcgtcttttgtgcttggc

SEQ ID NO: 435933 - DNA, 3404 bp, Homo sapiens
cgcggagggcgggccctgctctagcgggccgcgtagcggacatggcgggctcccggctcccgcggcagctcttcctccagggcgtggcggccgtcttcatgtttgctttcgcttccctctacacgcaaatcccaggcctgtatggccccgagggcatcctacctgcaaggaggacgctgcggcctcagggcaaggggcgctggcagcagctgtgggagaccccgacgctgctgtgggaagcgccgagactggggctggacacggcccagggcctggagctgctgagcctgctgggtgcactagtggccctgggagccctgctgctgagcccactgcgccaccctgtcatctacttgctgctttgggccgcctacctgtcagcctgccaggtgggccaggtgttcctttatttccagtgggactccctgctgctagagactggcttcctggccgtgctggtggccccgctgaggccagcctcccaccgcaaggaggccccccagggcaggcaggcaggggccctgccccacgaagacctccccttctggctggtgcgatggctgctgttccgcctcatgttcgcctcaggcgtggtcaagctgaccagccgctgccctgcgtggtgggggctcactgccctcacctaccactacgagacccagtgcctgcccacgcccgccgcctggttcgcacaccacctgccggtctggctgcacaagctcagcgtggtggccaccttcctaattgagatcgctgtgccgcccctgttcttcgcccccattcgacgcctgcgcttggctgctttctactcgcaggtgctgctgcaggtcctgattatcatcaccggcaactacaacttcttcaacctgatgacgctggtgcttaccactgcgctgttggacgaccagcacctggctgctgagcctggccacggcagccgcaagaagacggccacctcctggcccaaggccctgctggccaccctgtcgctgctgctggaactagccgtctacgggcttctggcctatggcactgtgcactactttggcctggaggttgactggcagcagcgcaccatccactccagaaccactttcaccttccaccagttttctcagtggctgaagacactgacgctgcccactgtgtggctgggtgtggcctccctggtctgggagctgctgagtgccctgtggaggtggacccaggtgcggggctggctacggaagctcagtgctgtagtccaactgtcccttgtgggcactgcgaccgtggccttgttcctgattagcctggtgccgtactcctacgtggagcccgggacccacgggcgcctctggaccggggcccaccgcctgtttggtgccgtggagcacctacagctggccaactcctacggcctcttccgccgcatgactgggcttggtggacggcctgaggtggtgctggagggcagttacgacggccaccactggacggagatcgagttcatgtacaagcctgggaacctgagccggccgcccccggttgtggtgccccaccagccacgcctggactggcagatgtggtttgcagccctgggcccacacacgcacagcccgtggttcacaagcctggtcttgcgcctgctgcagggcaaggagccagtgatccgccttgtccagagccaagtggccaggtatcccttccacaagcagccgcccacctacgtccgagcccagcgctacaagtactggttctcccagcctggggagcagggccagtggtggcggcgccagtgggtggaggagttcttcccatccgtgtccctgggggaccccacgctggagacgctgctcaggcagtttggactacaggagaaaagcccacctcgcacccgcagcgccaacagcaccctggcccaggccctccactggactcgctctcagctgtctcccctggaggcccccgccctgctctgggggctcctcatggccgtgggggctgtcagatttgtgcaggccctgctagcaccctgttctctccggtcctccccgctggcaccagtcagcggggagaagcgcaggccagcctcccagaaagactccggagctgcctccgaacaggccaccgcagcccccaacccctgctccagtagttcgaggaccacccggcgaaagaagtagctgtgttctcccagctgcacgtcctgagagggccaggtcgccgggagtgctctggcctccggcaggacaggacccagccactgtgccttagctgaccctgcagggccaggcacaggttggggggctgcccctggggtttgcagggtgctgcattgagggctccaggccccacccccacgccagccatgcccctccccaggactcccactattgcctctgtgattggcccaggaggaaaacacgaccaagctcaagacccttcccctgccctgggctgtgggggtctgagtctagagcccccaaccctaggccccgtgccagaggggaagaggctgactcccaggggaagaggggaagcactgtcatcttccacgtcatcttcacaccagcccatcctgccctttagatctgggcaccaataaaggcgtcttttgtgcttggcaaaaaacacacaaaacaaacacaaagcaaacaacacaaacagaaacacacaaaccagaaacaaaaaacaagaacaaacaacagcacagaacacaacagaaaacaaaccacagacaacaaaagaaagacagaaacaaaagaaaaaaatagggccagcgcggagcgcaacaagaaatatacaggcggaacgggaggcacacgcacaaaaaaagacgcagcacctagcaaataaacaaacagagaaaggagcgacccgcagaaagcgagcgaggaccactaaagaccacaacacgagagagcagagacgcacgacgaagaaaagagacagagtcagagcgagaggacgagaaagacgaaagacgagaacagaaggcgacgagcgacggcggtagcagagggcgcacaacacacaaaactagaacgggcgaggcgcgaggaaagcaaagaaaaggggggcgcgacccgacgcacggtccacacgcacgagaaagcgcaatgccgaccgagcagagggggcagacgccacagacacagaccgagaagaggagcgagcgcgcaggctgggcggcgagcaccacccacgccgagacatagcgacacgggggacgagaagacgaagaagaagaggggagagcgcaacaggtagaagccagacagacccagaccagcaaaagagcacaacaccacccagcgcagcgagcagcgagccacagagacagcaacggcgccacacaccgcagagagagcagcaagaacaacagaccaccagcaggaccgagcacagcagagcacacagca

SEQ ID NO: 435934 - DNA, 2683 bp, Homo sapiens
  misc_feature (2624)..(2624): n is a, c, g, or t
cgcggagggcgggccctgctctagcgggccgcgtagcggacatggcgggctcccggctcccgcggcagctcttcctccagggcgtggcggccgtcttcatgtttgctttcgcttccctctacacgcaaatcccaggcctgtatggccccgagggcatcctacctgcaaggaggacgctgcggcctcagggcaaggggcgctggcagcagctgtgggagaccccgacgctgctgtgggaagcgccgagactggggctggacacggcccagggcctggagctgctgagcctgctgggtgcactagtggccctgggagccctgctgctgagcccactgcgccaccctgtcatctacttgctgctttgggccgcctacctgtcagcctgccaggtgggccaggtgttcctttatttccagtgggactccctgctgctagagactggcttcctggccgtgctggtggccccgctgaggccagcctcccaccgcaaggaggccccccagggcaggcaggcaggggccctgccccacgaagacctccccttctggctggtgcgatggctgctgttccgcctcatgttcgcctcaggcgtggtcaagctgaccagccgctgccctgcgtggtgggggctcactgccctcacctaccactacgagacccagtgcctgcccacgcccgccgcctggttcgcacaccacctgccggtctggctgcacaagctcagcgtggtggccaccttcctaattgagatcgctgtgccgcccctgttcttcgcccccattcgacgcctgcgcttggctgctttctactcgcaggtgctgctgcaggtcctgattatcatcaccggcaactacaacttcttcaacctgatgacgctggtgcttaccactgcgctgttggacgaccagcacctggctgctgagcctggccacggcagccgcaagaagacggccacctcctggcccaaggccctgctggccaccctgtcgctgctgctggaactagccgtctacgggcttctggcctatggcactgtgcactactttggcctggaggttgactggcagcagcgcaccatccactccagaaccactttcaccttccaccagttttctcagtggctgaagacactgacgctgcccactgtgtggctgggtgtggcctccctggtctgggagctgctgagtgccctgtggaggtggacccaggtgcggggctggctacggaagctcagtgctgtagtccaactgtcccttgtgggcactgcgaccgtggccttgttcctgattagcctggtgccgtactcctacgtggagcccgggacccacgggcgcctctggaccggggcccaccgcctgtttggtgccgtggagcacctacagctggccaactcctacggcctcttccgccgcatgactgggcttggtggacggcctgaggtggtgctggagggcagttacgacggccaccactggacggagatcgagttcatgtacaagcctgggaacctgagccggccgcccccggttgtggtgccccaccagccacgcctggactggcagatgtggtttgcagccctgggcccacacacgcacagcccgtggttcacaagcctggtcttgcgcctgctgcagggcaaggagccagtgatccgccttgtccagagccaagtggccaggtatcccttccacaagcagccgcccacctacgtccgagcccagcgctacaagtactggttctcccagcctggggagcagggccagtggtggcggcgccagtgggtggaggagttcttcccatccgtgtccctgggggaccccacgctggagacgctgctcaggcagtttggactacaggagaaaagcccacctcgcacccgcagcgccaacagcaccctggcccaggccctccactggactcgctctcagctgtctcccctggaggcccccgccctgctctgggggctcctcatggccgtgggggctgtcagatttgtgcaggccctgctagcaccctgttctctccggtcctccccgctggcaccagtcagcggggagaagcgcaggccagcctcccagaaagactccggagctgcctccgaacaggccaccgcagcccccaacccctgctccagtagttcgaggaccacccggcgaaagaagtagctgtgttctcccagctgcacgtcctgagagggccaggtcgccgggagtgctctggcctccggcaggacaggacccagccactgtgccttagctgaccctgcagggccaggcacaggttggggggctgcccctggggtttgcagggtgctgcattgagggctccaggccccacccccacgccagccatgcccctccccaggactcccactattgcctctgtgattggcccaggaggaaaacacgaccaagctcaagacccttcccctgccctgggctgtgggggtctgagtctagagcccccaaccctaggccccgtgccagaggggaagaggctgactcccaggggaagaggggaagcactgtcatcttccacgtcatcttcacaccagcccatcctgccctttagatctgggcaccaataaaggcgtcttttgtgcttggcaaaaaaaaaatattttnaaattaaataataaaattaaacttcaggggggggcccggaccccaatcgcccttttggg

SEQ ID NO: 435935 - DNA, 1748 bp, Homo sapiens
cctccttgcaggtaggatgccctcgggcgcatacaggcctgggatttgcgtgtcgagggaagcgaaacaagacatgaagacggccgccacgccctggagaagagtgcgcggaccgggagcccgcctgtcgctgctgctggaactagccgtctacgggcttctggcctatggcactgtgcactactttggcctggaggttgactggcagcagcgcaccatccactccagaaccactttcaccttccaccagttttctcagtggctgaagacactgacgctgcccactgtgtggctgggtgtggcctccctggtctgggagctgctgagtgccctgtggaggtggacccaggtgcggggctggctacggaagctcagtgctgtagtccaactgtcccttgtgggcactgcgaccgtggccttgttcctgattagcctggtgccgtactcctacgtggagcccgggacccacgggcgcctctggaccggggcccaccgcctgtttggtgccgtggagcacctacagctggccaactcctacggcctcttccgccgcatgactgggcttggtggacggcctgaggtggtgctggagggcagttacgacggccaccactggacggagatcgagttcatgtacaagcctgggaacctgagccggccgcccccggttgtggtgccccaccagccacgcctggactggcagatgtggtttgcagccctgggcccacacacgcacagcccgtggttcacaagcctggtcttgcgcctgctgcagggcaaggagccagtgatccgccttgtccagagccaagtggccaggtatcccttccacaagcagccgcccacctacgtccgagcccagcgctacaagtactggttctcccagcctggggagcagggccagtggtggcggcgccagtgggtggaggagttcttcccatccgtgtccctgggggaccccacgctggagacgctgctcaggcagtttggactacaggagaaaagcccacctcgcacccgcagcgccaacagcaccctggcccaggccctccactggactcgctctcagctgtctcccctggaggcccccgccctgctctgggggctcctcatggccgtgggggctgtcagatttgtgcaggccctgctagcaccctgttctctccggtcctccccgctggcaccagtcagcggggagaagcgcaggccagcctcccagaaagactccggagctgcctccgaacaggccaccgcagcccccaacccctgctccagtagttcgaggaccacccggcgaaagaagtagctgtgttctcccagctgcacgtcctgagagggccaggtcgccgggagtgctctggcctccggcaggacaggacccagccactgtgccttagctgaccctgcagggccaggcacaggttggggggctgcccctggggtttgcagggtgctgcattgagggctccaggccccacccccacgccagccatgcccctccccaggactcccactattgcctctgtgattggcccaggaggaaaacacgaccaagctcaagacccttcccctgccctgggctgtgggggtctgagtctagagcccccaaccctaggccccgtgccagaggggaagaggctgactcccaggggaagaggggaagcactgtcatcttccacgtcatcttcacaccagcccatcctgccctttagatctgggcaccaataaaggcgtcttttgtgcttggc

SEQ ID NO: 435936 - DNA, 1636 bp, Homo sapiens
cgcggagggcgggccctgctctagcgggccgcgtagcggacatggcgggctcccggctcccgcggcagctcttcctccagggcgtggcggccgtcttcatgtttgctttcgcttccctctacacgcaaatcccaggcctgtatggccccgagggcatcctacctgcaaggaggacgctgcggcctcagggcaaggggcgctggcagcagctgtgggagaccccgacgctgctgtgggaagcgccgagactggggctggacacggcccagggcctggagctgctgagcctgctgggtgcactagtggccctgggagccctgctgctgagcccactgcgccaccctgtcatctacttgctgctttgggccgcctacctgtcagcctgccaggtgggccaggtgttcctttatttccagtgggactccctgctgctagagactggcttcctggccgtgctggtggccccgctgaggccagcctcccaccgcaaggaggccccccagggcaggcaggcaggggccctgccccacgaagacctccccttctggctggtgcgatggctgctgttccgcctcatgttcgcctcaggcgtggtcaagctgaccagccgctgccctgcgtggtgggggctcactgccctcacctaccactacgagacccagtgcctgcccacgcccgccgcctggttcgcacaccacctgccggtctggctgcacaagctcagcgtggtggccaccttcctaattgagatcgctgtgccgcccctgttcttcgcccccattcgacgcctgcgcttggctgctttctactcgcaggtgctgctgcaggtcctgattatcatcaccggcaactacaacttcttcaacctgatgacgctggtgcttaccactgcgctgttggacgaccagcacctggctgctgagcctggccacggcagccgcaagaagacggccacctcctggcccaaggccctgctggccaccctgtcgctgctgctggaactagccgtctacgggcttctggcctatggcactgtgcactactttggcctggaggttgactggcagcagcgcaccatccactccagaaccactttcaccttccaccagttttctcagtggctgaagacactgacgctgcccactgtgtggctgggtgtggcctccctggtctgggagctgctgagtgccctgtggaggtggacccaggtgcggggctggctacggaagctcagtgctgtagtccaactgtcccttgtgggcactgcgaccgtggccttgttcctgattagcctggtgccgtactcctacgtggagcccgggacccacgggcgcctctggaccggggcccaccgcctgtttggtgccgtggagcacctacagctggccaactcctacggcctcttccgccgcatgactgggcttggtggacggcctgaggtggtgctggagggcagttacgacggccaccactggacggagatcgagttcatgtacaagcctgggaacctgagccggccgcccccggttgtggtgccccaccagccacgcctggactggcagatgtggtttggaaacccctggggccaaaacaacggtatcagggccgggggataaaaaaaccctgggtctttgcg

SEQ ID NO: 435937 - DNA, 239 bp, Homo sapiens
gggggctcggccagccctgactcctgccctcgcctgcagccctcacctaccactacgagacccagtgcctgcccacgcccgccgcctggttcgcacaccacctgccggtctggctgcacaagctcagcgtggtggccaccttcctaattgagatcgctgtgccgcccctgttcttcgcccccattcgacgcctgcgcttggctgctttctactcgcaggtgggtgagggccgcagctgt

SEQ ID NO: 435938 - DNA, 3625 bp, Homo sapiens
cgcctccccgcgcctcgttcgccgccgctgtcgccgccgccgcccgagactcgcgcagagcagttatggcggatcccgcagcccccacgcccgcagctcccgctccagcccaggccccggctccagccccggaggcagtcccggccccagccgcagcccccgtcccggcgccggcgcccgcctcggactcggcctccgggccgtcctcggactccggcccagaagccggctcgcagcgcctgctgttttctcacgacctggtgtcgggccgttaccgtggctccgtgcacttcgggctggtgcgcctcatccacggcgaggactcggactcggagggcgaggaggagggccgcgggagctcggggtgctccgaggccgggggcgcgggccacgaggagggccgggccagccccctgcgccgcggctacgtgcgcgtccagtggtacccggagggcgtcaagcagcatgtgaaggagaccaagctgaaactagaggaccgttctgtggtgccccgagatgtggtccggcacatgcgatccaccgacagtcagtgtggcacggtgatcgacgtcaacatcgactgtgccgtcaagctcatcggcaccaactgcatcatctatcccgtcaacagcaaggacctgcagcacatctggcccttcatgtatggggactacattgcctatgactgctggctggggaaggtctacgacttgaagaaccagatcatcctgaagctatccaacggcgccaggtgctccatgaacacggaagatggcgccaagctctacgacgtctgcccgcacgtcagcgactcgggtctcttcttcgatgattcctatggcttctacccaggccaggtgctcattggccctgccaagatcttctccagcgtccagtggctgtcaggtgtcaagcccgtgctcagcaccaagagcaagttccgagtggtggtggaagaggtgcaggttgtagagttgaaagttacatggattaccaagagtttctgtccagggggcacggacagcgtcagccccccaccctctgtcatcacccaggaaaacctaggcagggtgaagcgtctcggatgctttgaccatgctcagcggcagcttggggagcgctgtctgtatgtcttcccagccaaggtagagccagccaagattgcctgggaatgtccagaaaaaaactgcgcccagggggagggctctatggccaagaaggtgaagcgcctgttgaagaagcaggttgtgcggatcatgtcatgctccccagacacccagtgttcccgggaccattccatggaagacccagacaagaagggggaatccaaaaccaagagcgaagcggagtctgccagccctgaggagacgcccgatggctctgccagtccagtggagatgcaggacgagggtgcagaggagccccacgaggcaggagagcagctgcccccattcctgctaaaagaaggcagagatgacaggctgcactcggcagagcaggacgcagatgatgaggctgctgatgacacggacgacaccagttcggtgacctcctctgccagctccaccacttcctcccagagcggcagcggcacgagtcgcaaaaagagcatccccttgtccatcaagaacttaaagcgcaaacacaagaggaagaagaataaaatcactcgagacttcaagccaggggacagggtggcagtggaggtggtgaccacgatgacctcagccgacgtgatgtggcaggatggctccgtggaatgcaacatccgctccaacgacctcttccctgtgcaccacctggacaacaacgagttctgccctggagacttcgtggtagataagcgagtccagagctgtccagaccctgctgtctacggtgtggtacagtctggggaccacatcggccgtacctgcatggtgaagtggttcaagctgaggccgagtggggacgacgtggagctgattggagaagaggaagatgtgagtgtttacgacattgctgaccaccctgactttaggttccgtacaactgacatcgtcatccgcatcggcaatactgaggatggggctcctcacaaggaggatgagccatcggtgggccaggtggcccgtgtggacgtcagcagcaaggtggaggtggtgtgggctgacaactcaaagaccatcatcctgccccagcacttgtacaacatagagtctgagattgaggagtcagactacgattcggtagaaggcagcaccagcggggcatcctcggatgaatgggaagatgatagtgacagctgggagacggacaatgggctggtggaggacgagcaccccaagatagaggagccccccatcccacccctggagcagccggtggcccctgaggacaagggagtggtgatcagtgaagaggcagccacagctgccgtccagggggctgtggccatggctgcccccatggccgggctgatggagaaggctggcaaggacgggccacccaagagcttccgggagttgaaagaggccatcaagatcctggagagcctcaagaacatgactgtggagcagctgctgacgggctcgcccacctctccgactgtggagcctgagaagccaactcgggagaagaagtttctggatgacatcaagaagctacaggaaaacctcaagaagaccctggacaatgtggccattgtagaggaggagaagatggaagcagtgcccgacgtagagcgcaaggaggacaagcccgaggggcagtcacctgtgaaggctgagtggcccagcgaaaccccggtgctgtgccagcagtgtggcggcaagcctggcgtcaccttcaccagcgccaagggcgaggtcttctccgtactggagtttgcaccctgtgagtcagcccttgcctggtcttcgccttcccccgccttctcggggctcctgtttgtgtcaccagatctgggtgcagggtggttagtcccctcgccagaccccagctactgccccagggcaaaccatttccctgtgtggtcacagtgctgaggccagcagcggcgagtgggaagtctgtgggtgtgctcacctgtccagccaggttggcagatggagctccagggcctctccatgagggactgactattctcttcccccctctagcaaatcattcttttaagaaaattgagttccagcctccagaagccaagaagttcttcagcacagtgcggaaggagatggcgctgctggctacctcactgcctgagggcatcatggtcaagacttttgaagatagaatggcaagtaggcttggcatgggcaggtgcagatgtgctgtgtgggcacccagccaagaggccaccaaccttgggtccccaaacctccggggctgactggcacctgcgaggacactcacccacccaccttttacaggggcggtcacaggctcagtcaggtgagggctgactcagccgtgtgtccaggccagatggttctttctttcctccctcctttaaaaaattactttctcggccgggcgcagtggctcacacccgtaatcccagcactttgggaggccgaggtgggtggatcacgaggtcaggagatcgagaccatcctggctaacacagtgaaaccccgtctccact

SEQ ID NO: 435939 - DNA, 5355 bp, Homo sapiens
cgcctccccgcgcctcgttcgccgccgctgtcgccgccgccgcccgagactcgcgcagagcagttatggcggatcccgcagcccccacgcccgcagctcccgctccagcccaggccccggctccagccccggaggcagtcccggccccagccgcagcccccgtcccggcgccggcgcccgcctcggactcggcctccgggccgtcctcggactccggcccagaagccggctcgcagcgcctgctgttttctcacgacctggtgtcgggccgttaccgtggctccgtgcacttcgggctggtgcgcctcatccacggcgaggactcggactcggagggcgaggaggagggccgcgggagctcggggtgctccgaggccgggggcgcgggccacgaggagggccgggccagccccctgcgccgcggctacgtgcgcgtccagtggtacccggagggcgtcaagcagcatgtgaaggagaccaagctgaaactagaggaccgttctgtggtgccccgagatgtggtccggcacatgcgatccaccgacagtcagtgtggcacggtgatcgacgtcaacatcgactgtgccgtcaagctcatcggcaccaactgcatcatctatcccgtcaacagcaaggacctgcagcacatctggcccttcatgtatggggactacattgcctatgactgctggctggggaaggtctacgacttgaagaaccagatcatcctgaagctatccaacggcgccaggtgctccatgaacacggaagatggcgccaagctctacgacgtctgcccgcacgtcagcgactcgggtctcttcttcgatgattcctatggcttctacccaggccaggtgctcattggccctgccaagatcttctccagcgtccagtggctgtcaggtgtcaagcccgtgctcagcaccaagagcaagttccgagtggtggtggaagaggtgcaggttgtagagttgaaagttacatggattaccaagagtttctgtccagggggcacggacagcgtcagccccccaccctctgtcatcacccaggaaaacctaggcagggtgaagcgtctcggatgctttgaccatgctcagcggcagcttggggagcgctgtctgtatgtcttcccagccaaggtagagccagccaagattgcctgggaatgtccagaaaaaaactgcgcccagggggagggctctatggccaagaaggtgaagcgcctgttgaagaagcaggttgtgcggatcatgtcatgctccccagacacccagtgttcccgggaccattccatggaagacccagacaagaagggggaatccaaaaccaagagcgaagcggagtctgccagccctgaggagacgcccgatggctctgccagtccagtggagatgcaggacgagggtgcagaggagccccacgaggcaggagagcagctgcccccattcctgctaaaagaaggcagagatgacaggctgcactcggcagagcaggacgcagatgatgaggctgctgatgacacggacgacaccagttcggtgacctcctctgccagctccaccacttcctcccagagcggcagcggcacgagtcgcaaaaagagcatccccttgtccatcaagaacttaaagcgcaaacacaagaggaagaagaataaaatcactcgagacttcaagccaggggacagggtggcagtggaggtggtgaccacgatgacctcagccgacgtgatgtggcaggatggctccgtggaatgcaacatccgctccaacgacctcttccctgtgcaccacctggacaacaacgagttctgccctggagacttcgtggtagataagcgagtccagagctgtccagaccctgctgtctacggtgtggtacagtctggggaccacatcggccgtacctgcatggtgaagtggttcaagctgaggccgagtggggacgacgtggagctgattggagaagaggaagatgtgagtgtttacgacattgctgaccaccctgactttaggttccgtacaactgacatcgtcatccgcatcggcaatactgaggatggggctcctcacaaggaggatgagccatcggtgggccaggtggcccgtgtggacgtcagcagcaaggtggaggtggtgtgggctgacaactcaaagaccatcatcctgccccagcacttgtacaacatagagtctgagattgaggagtcagactacgattcggtagaaggcagcaccagcggggcatcctcggatgaatgggaagatgatagtgacagctgggagacggacaatgggctggtggaggacgagcaccccaagatagaggagccccccatcccacccctggagcagccggtggcccctgaggacaagggagtggtgatcagtgaagaggcagccacagctgccgtccagggggctgtggccatggctgcccccatggccgggctgatggagaaggctggcaaggacgggccacccaagagcttccgggagttgaaagaggccatcaagatcctggagagcctcaagaacatgactgtggagcagctgctgacgggctcgcccacctctccgactgtggagcctgagaagccaactcgggagaagaagtttctggatgacatcaagaagctacaggaaaacctcaagaagaccctggacaatgtggccattgtagaggaggagaagatggaagcagtgcccgacgtagagcgcaaggaggacaagcccgaggggcagtcacctgtgaaggctgagtggcccagcgaaaccccggtgctgtgccagcagtgtggcggcaagcctggcgtcaccttcaccagcgccaagggcgaggtcttctccgtactggagtttgcaccctcaaatcattcttttaagaaaattgagttccagcctccagaagccaagaagttcttcagcacagtgcggaaggagatggcgctgctggctacctcactgcctgagggcatcatggtcaagacttttgaagatagaatggacctcttctcagctctcatcaagggccccactcgaaccccctacgaggatggcctctacttgtttgacatccagctccccaacatctacccagccgtgcccccccacttctgctacctctcccaatgcagtggccgcctgaaccccaacctgtatgacaatgggaaggtgtgtgtcagcctcctgggcacctggattggaaaggggacagagaggtggacaagcaagtccagccttctccaggtgctcatctccatccaaggtctgatcctggtaaatgaaccatactacaacgaagccggcttcgacagtgaccgaggcctgcaggaaggctatgaaaacagtcgctgttacaatgagatggcgctgatccgcgtggtgcagtccatgacccagctggtgcggcggccccccgaggtctttgagcaggagatcaggcaacactttagcactggtggctggcggctggtgaaccgtatcgagtcctggctggaaacccatgccctgctggagaaggcccaggcactgcccaacggggtgcccaaggccagcagctcgccagagcccccagctgtagccgagctgtcagactccggccaacaagaacctgaggatggagggccagccccaggagaggcctcccagggctcagactcagagggcggtgcccagagcctggcctcagctagcagggaccacacagaccagacttcggagaccgcaccagacgcatcggtgccacccagtgtgaaaccaaagaagcggagaaagagctaccggagcttcttacctgagaagagtggctaccctgacatcggcttccccctcttcccactttccaagggtttcatcaagagcatccggggtgtcctgacgcagttccgggctgccctgctagaggcaggcatgccggagtgcacagaggacaagtagctgccaggcacagaggaaagagcatcaccgtgggagaggccagccgccgcctgctcactcccccccggaatcacccctcttcccatgcccctctgtccccactgcaaacccactgccctcttctccccaaggtgagtttgatgctgaagtgcaagaagtgtgttgagatgctgccgtttctattttgaagcgagctttcaacaggcgggtcccctgtggcaaagaaaatcggaaccctgttgccgattttccatttgtcaccccagcagaatgtccggcacttgctcccttgctgccccttctcaggtcagaggcgggtgttccagggcctgccgcggggctctctgggccggttccctgcagacccgcaggagagcacatgtgccttgcatgaagtgtgggttgcgccaacaattcccctggtccctttcaacctgtttagttcaactcaagcctccctgtgtcccagaccctcctgctgccaccaccacccaggtcctccctagtcctccagcgtcaacactatcccttgggagttgtagctgctgtcactgactcccggctatacatggcctgtcgaccacgttatagccctcaggcctgttgaacttgctctctaagagaggttgggaccaggctaggttccgggtgacgcccaggagaggtggtggccttcacacatgcacatggagttgaggaccagggagctgcagggaaagcaacagctataggtgccttgctcttctgtcggaggctgctgggggcaagagcagctgcacaaggccagggcaagtgctagggcccctcccccatcacatggtcacactgggacaggcgtgcagctcactgaactccaagcgagccagccctctcttggactagaaggcctactgtcagcccttcgcttacaaactgcaggctcaatccgaaggggacggccggcgggggctctcctagtgcccagagacaggcccagaggtttacaagttttctaagcttttgataatgtgaagctccaggccgagaggatgctgttgagcacattgcagctatgtaatttttggtgtatgtatgtaatatttaaggttggaaaaaaaactcaaaagcaaagatattaactcttattagaaaaaaagacaaaaaaaaagccaaagcatgatgcgtcttgtcagccttaagtgggctccacacctgtgctgtgctgtgaccgcccagccagcagagctgcgggaggatggagccggaccacacaccgtggcatttggaaccgagtcggtatcttgtttgagaaacacccggagtgactggtggggctgtgcttcccagtgcattgtacatgtggagatgtgaatgcctactgcttacgatatctgtataaagtgctgtgtgattaaacttttttttacttgca

SEQ ID NO: 435940 - DNA, 5440 bp, Homo sapiens
cgcctccccgcgcctcgttcgccgccgctgtcgccgccgccgcccgagactcgcgcagagcagttatggcggatcccgcagcccccacgcccgcagctcccgctccagcccaggccccggctccagccccggaggcagtcccggccccagccgcagcccccgtcccggcgccggcgcccgcctcggactcggcctccgggccgtcctcggactccggcccagaagccggctcgcagcgcctgctgttttctcacgacctggtgtcgggccgttaccgtggctccgtgcacttcgggctggtgcgcctcatccacggcgaggactcggactcggagggcgaggaggagggccgcgggagctcggggtgctccgaggccgggggcgcgggccacgaggagggccgggccagccccctgcgccgcggctacgtgcgcgtccagtggtacccggagggcgtcaagcagcatgtgaaggagaccaagctgaaactagaggaccgttctgtggtgccccgagatgtggtccggcacatgcgatccaccgacagtcagtgtggcacggtgatcgacgtcaacatcgactgtgccgtcaagctcatcggcaccaactgcatcatctatcccgtcaacagcaaggacctgcagcacatctggcccttcatgtatggggactacattgcctatgactgctggctggggaaggtctacgacttgaagaaccagatcatcctgaagctatccaacggcgccaggtgctccatgaacacggaagatggcgccaagctctacgacgtctgcccgcacgtcagcgactcgggtctcttcttcgatgattcctatggcttctacccaggccaggtgctcattggccctgccaagatcttctccagcgtccagtggctgtcaggtgtcaagcccgtgctcagcaccaagagcaagttccgagtggtggtggaagaggtgcaggttgtagagttgaaagttacatggattaccaagagtttctgtccagggggcacggacagcgtcagccccccaccctctgtcatcacccaggaaaacctaggcagggtgaagcgtctcggatgctttgaccatgctcagcggcagcttggggagcgctgtctgtatgtcttcccagccaaggtagagccagccaagattgcctgggaatgtccagaaaaaaactgcgcccagggggagggctctatggccaagaaggtgaagcgcctgttgaagaagcaggttgtgcggatcatgtcatgctccccagacacccagtgttcccgggaccattccatggaagacccagacaagaagggggaatccaaaaccaagagcgaagcggagtctgccagccctgaggagacgcccgatggctctgccagtccagtggagatgcaggacgagggtgcagaggagccccacgaggcaggagagcagctgcccccattcctgctaaaagaaggcagagatgacaggctgcactcggcagagcaggacgcagatgatgaggctgctgatgacacggacgacaccagttcggtgacctcctctgccagctccaccacttcctcccagagcggcagcggcacgagtcgcaaaaagagcatccccttgtccatcaagaacttaaagcgcaaacacaagaggaagaagaataaaatcactcgagacttcaagccaggggacagggtggcagtggaggtggtgaccacgatgacctcagccgacgtgatgtggcaggatggctccgtggaatgcaacatccgctccaacgacctcttccctgtgcaccacctggacaacaacgagttctgccctggagacttcgtggtagataagcgagtccagagctgtccagaccctgctgtctacggtgtggtacagtctggggaccacatcggccgtacctgcatggtgaagtggttcaagctgaggccgagtggggacgacgtggagctgattggagaagaggaagatgtgagtgtttacgacattgctgaccaccctgactttaggttccgtacaactgacatcgtcatccgcatcggcaatactgaggatggggctcctcacaaggaggatgagccatcggtgggccaggtggcccgtgtggacgtcagcagcaaggtggaggtggtgtgggctgacaactcaaagaccatcatcctgccccagcacttgtacaacatagagtctgagattgaggagtcagactacgattcggtagaaggcagcaccagcggggcatcctcggatgaatgggaagatgatagtgacagctgggagacggacaatgggctggtggaggacgagcaccccaagatagaggagccccccatcccacccctggagcagccggtggcccctgaggacaagggagtggtgatcagtgaagaggcagccacagctgccgtccagggggctgtggccatggctgcccccatggccgggctgatggagaaggctggcaaggacgggccacccaagagcttccgggagttgaaagaggccatcaagatcctggagagcctcaagaacatgactgtggagcagctgctgacgggctcgcccacctctccgactgtggagcctgagaagccaactcgggagaagaagtttctggatgacatcaagaagctacaggaaaacctcaagaagaccctggacaatgtggccattgtagaggaggagaagatggaagcagtgcccgacgtagagcgcaaggaggacaagcccgaggggcagtcacctgtgaaggctgagtggcccagcgaaaccccggtgctgtgccagcagtgtggcggcaagcctggcgtcaccttcaccagcgccaagggcgaggtcttctccgtactggagtttgcaccctcaaatcattcttttaagaaaattgagttccagcctccagaagccaagaagttcttcagcacagtgcggaaggagatggcgctgctggctacctcactgcctgagggcatcatggtcaagacttttgaagatagaatggacctcttctcagctctcatcaagggccccactcgaaccccctacgaggatggcctctacttgtttgacatccagctccccaacatctacccagccgtgcccccccacttctgctacctctcccaatgcagtggccgcctgaaccccaacctgtatgacaatgggaaggtgtgtgtcagcctcctgggcacctggattggaaaggggacagagaggtggacaagcaagtccagccttctccaggtgctcatctccatccaaggtctgatcctggtaaatgaaccatactacaacgaagccggcttcgacagtgaccgaggcctgcaggaaggctatgaaaacagtcgctgttacaatgagatggcgctgatccgcgtggtgcagtccatgacccagctggtgcggcggccccccgaggtctttgagcaggagatcaggcaacactttagcactggtggctggcggctggtgaaccgtatcgagtcctggctggaaacccatgccctgctggagaaggcccaggcactgcccaacggggtgcccaaggccagcagctcgccagagcccccagctgtagccgagctgtcagactccggccaacaagaacctgaggatggagggccagccccaggagaggcctcccagggctcagactcagagggcggtgcccagagcctggcctcagctagcagggaccacacagaccagacttcggagaccgcaccagacgcatcggtgccacccagtgtgaaaccaaagaagcggagaaagagctaccggagcttcttacctgagaagagtggctaccctgacatcggcttccccctcttcccactttccaagggtttcatcaagagcatccggggtgtcctgacgcagttccgggctgccctgctagaggcaggcatgccggagtgcacagaggacaagtagctgccaggcacagaggaaagagcatcaccgtgggagaggccagccgccgcctgctcactcccccccggaatcacccctcttcccatgcccctctgtccccactgcaaacccactgccctcttctccccaaggtgagtttgatgctgaagtgcaagaagtgtgttgagatgctgccgtttctattttgaagcgagctttcaacaggcgggtcccctgtggcaaagaaaatcggaaccctgttgccgattttccatttgtcaccccagcagaatgtccggcacttgctcccttgctgccccttctcaggtcagaggcgggtgttccagggcctgccgcggggctctctgggccggttccctgcagacccgcaggagagcacatgtgccttgcatgaagtgtgggttgcgccaacaattcccctggtccctttcaacctgtttagttcaactcaagcctccctgtgtcccagaccctcctgctgccaccaccacccaggtcctccctagtcctccagcgtcaacactatcccttgggagttgtagctgctgtcactgactcccggctatacatggcctgtcgaccacgttatagccctcaggcctgttgaacttgctctctaagagaggttgggaccaggctaggttccgggtgacgcccaggagaggtggtggccttcacacatgcacatggagttgaggaccagggagctgcagggaaagcaacagctataggtgccttgctcttctgtcggaggctgctgggggcaagagcagctgcacaaggccagggcaagtgctagggcccctcccccatcacatggtcacactgggacaggcgtgcagctcactgaactccaagcgagccagccctctcttggactagaaggcctactgtcagcccttcgcttacaaactgcaggctcaatccgaaggggacggccggcgggggctctcctagtgcccagagacaggcccagaggtttacaagttttctaagcttttgataatgtgaagctccaggccgagaggatgctgttgagcacattgcagctatgtaatttttggtgtatgtatgtaatatttaaggttggaaaaaaaactcaaaagcaaagatattaactcttattagaaaaaaagacaaaaaaaaagccaaagcatgatgcgtcttgtcagccttaagtgggctccacacctgtgctgtgctgtgaccgcccagccagcagagctgcgggaggatggagccggaccacacaccgtggcatttggaaccgagtcggtatcttgtttgagaaacacccggagtgactggtggggctgtgcttcccagtgcattgtacatgtggagatgtgaatgcctactgcttacgatatctgtataaagtgctgtgtgattaaacttttttttacttgcattttttttttttttttttttttgttggctcattagcaagacaaggtgacaccattaaacctccctctgccattcatctgggctcc

SEQ ID NO: 435941 - DNA, 3602 bp, Homo sapiens
aatacgtttgaagatcctcttcagtctatctgaactgatccaaacgcttgagtatctggccgtcgtattatcagatcggtcgagtactggaatactccagagctgtccagaccctgctgtctacggtgtggtacagtctggggaccacatcggccgtacctgcatggtgaagtggttcaagctgaggccgagtggggacgacgtggagctgattggagaagaggaagatgtgagtgtttacgacattgctgaccaccctgactttaggttccgtacaactgacatcgtcatccgcatcggcaatactgaggatggggctcctcacaaggaggatgagccatcggtgggccaggtggcccgtgtggacgtcagcagcaaggtggaggtggtgtgggctgacaactcaaagaccatcatcctgccccagcacttgtacaacatagagtctgagattgaggagtcagactacgattcggtagaaggcagcaccagcggggcatcctcggatgaatgggaagatgatagtgacagctgggagacggacaatgggctggtggaggacgagcaccccaagatagaggagccccccatcccacccctggagcagccggtggcccctgaggacaagggagtggtgatcagtgaagaggcagccacagctgccgtccagggggctgtggccatggctgcccccatggccgggctgatggagaaggctggcaaggacgggccacccaagagcttccgggagttgaaagaggccatcaagatcctggagagcctcaagaacatgactgtggagcagctgctgacgggctcgcccacctctccgactgtggagcctgagaagccaactcgggagaagaagtttctggatgacatcaagaagctacaggaaaacctcaagaagaccctggacaatgtggccattgtagaggaggagaagatggaagcagtgcccgacgtagagcgcaaggaggacaagcccgaggggcagtcacctgtgaaggctgagtggcccagcgaaaccccggtgctgtgccagcagtgtggcggcaagcctggcgtcaccttcaccagcgccaagggcgaggtcttctccgtactggagtttgcaccctcaaatcattcttttaagaaaattgagttccagcctccagaagccaagaagttcttcagcacagtgcggaaggagatggcgctgctggctacctcactgcctgagggcatcatggtcaagacttttgaagatagaatggacctcttctcagctctcatcaagggccccactcgaaccccctacgaggatggcctctacttgtttgacatccagctccccaacatctacccagccgtgcccccccacttctgctacctctcccaatgcagtggccgcctgaaccccaacctgtatgacaatgggaaggtgtgtgtcagcctcctgggcacctggattggaaaggggacagagaggtggacaagcaagtccagccttctccaggtgctcatctccatccaaggtctgatcctggtaaatgaaccatactacaacgaagccggcttcgacagtgaccgaggcctgcaggaaggctatgaaaacagtcgctgttacaatgagatggcgctgatccgcgtggtgcagtccatgacccagctggtgcggcggccccccgaggtctttgagcaggagatcaggcaacactttagcactggtggctggcggctggtgaaccgtatcgagtcctggctggaaacccatgccctgctggagaaggcccaggcactgcccaacggggtgcccaaggccagcagctcgccagagcccccagctgtagccgagctgtcagactccggccaacaagaacctgaggatggagggccagccccaggagaggcctcccagggctcagactcagagggcggtgcccagagcctggcctcagctagcagggaccacacagaccagacttcggagaccgcaccagacgcatcggtgccacccagtgtgaaaccaaagaagcggagaaagagctaccggagcttcttacctgagaagagtggctaccctgacatcggcttccccctcttcccactttccaagggtttcatcaagagcatccggggtgtcctgacgcagttccgggctgccctgctagaggcaggcatgccggagtgcacagaggacaagtagctgccaggcacagaggaaagagcatcaccgtgggagaggccagccgccgcctgctcactcccccccggaatcacccctcttcccatgcccctctgtccccactgcaaacccactgccctcttctccccaaggtgagtttgatgctgaagtgcaagaagtgtgttgagatgctgccgtttctattttgaagcgagctttcaacaggcgggtcccctgtggcaaagaaaatcggaaccctgttgccgattttccatttgtcaccccagcagaatgtccggcacttgctcccttgctgccccttctcaggtcagaggcgggtgttccagggcctgccgcggggctctctgggccggttccctgcagacccgcaggagagcacatgtgccttgcatgaagtgtgggttgcgccaacaattcccctggtccctttcaacctgtttagttcaactcaagcctccctgtgtcccagaccctcctgctgccaccaccacccaggtcctccctagtcctccagcgtcaacactatcccttgggagttgtagctgctgtcactgactcccggctatacatggcctgtcgaccacgttatagccctcaggcctgttgaacttgctctctaagagaggttgggaccaggctaggttccgggtgacgcccaggagaggtggtggccttcacacatgcacatggagttgaggaccagggagctgcagggaaagcaacagctataggtgccttgctcttctgtcggaggctgctgggggcaagagcagctgcacaaggccagggcaagtgctagggcccctcccccatcacatggtcacactgggacaggcgtgcagctcactgaactccaagcgagccagccctctcttggactagaaggcctactgtcagcccttcgcttacaaactgcaggctcaatccgaaggggacggccggcgggggctctcctagtgcccagagacaggcccagaggtttacaagttttctaagcttttgataatgtgaagctccaggccgagaggatgctgttgagcacattgcagctatgtaatttttggtgtatgtatgtaatatttaaggttggaaaaaaaactcaaaagcaaagatattaactcttattagaaaaaaagacaaaaaaaaagccaaagcatgatgcgtcttgtcagccttaagtgggctccacacctgtgctgtgctgtgaccgcccagccagcagagctgcgggaggatggagccggaccacacaccgtggcatttggaaccgagtcggtatcttgtttgagaaacacccggagtgactggtggggctgtgcttcccagtgcattgtacatgtggagatgtgaatgcctactgcttacgatatctgtataaagtgctgtgtgattaaacttttttttacttgca

SEQ ID NO: 435942 - DNA, 2971 bp, Homo sapiens
caatctcaggctctatgttgtacaagtgctggggcaggatgatggtctttgagttgtcagcccacaccacctccaccttgctgctgacgtccagacgggccacccaagagcttccgggagttgaaagaggccatcaagatcctggagagcctcaagaacatgactgtggagcagctgctgacgggctcgcccacctctccgactgtggagcctgagaagccaactcgggagaagaagtttctggatgacatcaagaagctacaggaaaacctcaagaagaccctggacaatgtggccattgtagaggaggagaagatggaagcagtgcccgacgtagagcgcaaggaggacaagcccgaggggcagtcacctgtgaaggctgagtggcccagcgaaaccccggtgctgtgccagcagtgtggcggcaagcctggcgtcaccttcaccagcgccaagggcgaggtcttctccgtactggagtttgcaccctcaaatcattcttttaagaaaattgagttccagcctccagaagccaagaagttcttcagcacagtgcggaaggagatggcgctgctggctacctcactgcctgagggcatcatggtcaagacttttgaagatagaatggacctcttctcagctctcatcaagggccccactcgaaccccctacgaggatggcctctacttgtttgacatccagctccccaacatctacccagccgtgcccccccacttctgctacctctcccaatgcagtggccgcctgaaccccaacctgtatgacaatgggaaggtgtgtgtcagcctcctgggcacctggattggaaaggggacagagaggtggacaagcaagtccagccttctccaggtgctcatctccatccaaggtctgatcctggtaaatgaaccatactacaacgaagccggcttcgacagtgaccgaggcctgcaggaaggctatgaaaacagtcgctgttacaatgagatggcgctgatccgcgtggtgcagtccatgacccagctggtgcggcggccccccgaggtctttgagcaggagatcaggcaacactttagcactggtggctggcggctggtgaaccgtatcgagtcctggctggaaacccatgccctgctggagaaggcccaggcactgcccaacggggtgcccaaggccagcagctcgccagagcccccagctgtagccgagctgtcagactccggccaacaagaacctgaggatggagggccagccccaggagaggcctcccagggctcagactcagagggcggtgcccagagcctggcctcagctagcagggaccacacagaccagacttcggagaccgcaccagacgcatcggtgccacccagtgtgaaaccaaagaagcggagaaagagctaccggagcttcttacctgagaagagtggctaccctgacatcggcttccccctcttcccactttccaagggtttcatcaagagcatccggggtgtcctgacgcagttccgggctgccctgctagaggcaggcatgccggagtgcacagaggacaagtagctgccaggcacagaggaaagagcatcaccgtgggagaggccagccgccgcctgctcactcccccccggaatcacccctcttcccatgcccctctgtccccactgcaaacccactgccctcttctccccaaggtgagtttgatgctgaagtgcaagaagtgtgttgagatgctgccgtttctattttgaagcgagctttcaacaggcgggtcccctgtggcaaagaaaatcggaaccctgttgccgattttccatttgtcaccccagcagaatgtccggcacttgctcccttgctgccccttctcaggtcagaggcgggtgttccagggcctgccgcggggctctctgggccggttccctgcagacccgcaggagagcacatgtgccttgcatgaagtgtgggttgcgccaacaattcccctggtccctttcaacctgtttagttcaactcaagcctccctgtgtcccagaccctcctgctgccaccaccacccaggtcctccctagtcctccagcgtcaacactatcccttgggagttgtagctgctgtcactgactcccggctatacatggcctgtcgaccacgttatagccctcaggcctgttgaacttgctctctaagagaggttgggaccaggctaggttccgggtgacgcccaggagaggtggtggccttcacacatgcacatggagttgaggaccagggagctgcagggaaagcaacagctataggtgccttgctcttctgtcggaggctgctgggggcaagagcagctgcacaaggccagggcaagtgctagggcccctcccccatcacatggtcacactgggacaggcgtgcagctcactgaactccaagcgagccagccctctcttggactagaaggcctactgtcagcccttcgcttacaaactgcaggctcaatccgaaggggacggccggcgggggctctcctagtgcccagagacaggcccagaggtttacaagttttctaagcttttgataatgtgaagctccaggccgagaggatgctgttgagcacattgcagctatgtaatttttggtgtatgtatgtaatatttaaggttggaaaaaaaactcaaaagcaaagatattaactcttattagaaaaaaagacaaaaaaaaagccaaagcatgatgcgtcttgtcagccttaagtgggctccacacctgtgctgtgctgtgaccgcccagccagcagagctgcgggaggatggagccggaccacacaccgtggcatttggaaccgagtcggtatcttgtttgagaaacacccggagtgactggtggggctgtgcttcccagtgcattgtacatgtggagatgtgaatgcctactgcttacgatatctgtataaagtgctgtgtgattaaacttttttttacttgca

SEQ ID NO: 435943 - DNA, 5621 bp, Homo sapiens
cgcctccccgcgcctcgttcgccgccgctgtcgccgccgccgcccgagactcgcgcagagcagttatggcggatcccgcagcccccacgcccgcagctcccgctccagcccaggccccggctccagccccggaggcagtcccggccccagccgcagcccccgtcccggcgccggcgcccgcctcggactcggcctccgggccgtcctcggactccggcccagaagccggctcgcagcgcctgctgttttctcacgacctggtgtcgggccgttaccgtggctccgtgcacttcgggctggtgcgcctcatccacggcgaggactcggactcggagggcgaggaggagggccgcgggagctcggggtgctccgaggccgggggcgcgggccacgaggagggccgggccagccccctgcgccgcggctacgtgcgcgtccagtggtacccggagggcgtcaagcagcatgtgaaggagaccaagctgaaactagaggaccgttctgtggtgccccgagatgtggtccggcacatgcgatccaccgacagtcagtgtggcacggtgatcgacgtcaacatcgactgtgccgtcaagctcatcggcaccaactgcatcatctatcccgtcaacagcaaggacctgcagcacatctggcccttcatgtatggggactacattgcctatgactgctggctggggaaggtctacgacttgaagaaccagatcatcctgaagctatccaacggcgccaggtgctccatgaacacggaagatggcgccaagctctacgacgtctgcccgcacgtcagcgactcgggtctcttcttcgatgattcctatggcttctacccaggccaggtgctcattggccctgccaagatcttctccagcgtccagtggctgtcaggtgtcaagcccgtgctcagcaccaagagcaagttccgagtggtggtggaagaggtgcaggttgtagagttgaaagttacatggattaccaagagtttctgtccagggggcacggacagcgtcagccccccaccctctgtcatcacccaggaaaacctaggcagggtgaagcgtctcggatgctttgaccatgctcagcggcagcttggggagcgctgtctgtatgtcttcccagccaaggtagagccagccaagattgcctgggaatgtccagaaaaaaactgcgcccagggggagggctctatggccaagaaggtgaagcgcctgttgaagaagcaggttgtgcggatcatgtcatgctccccagacacccagtgttcccgggaccattccatggaagacccagacaagaagggggaatccaaaaccaagagcgaagcggagtctgccagccctgaggagacgcccgatggctctgccagtccagtggagatgcaggacgagggtgcagaggagccccacgaggcaggagagcagctgcccccattcctgctaaaagaaggcagagatgacaggctgcactcggcagagcaggacgcagatgatgaggctgctgatgacacggacgacaccagttcggtgacctcctctgccagctccaccacttcctcccagagcggcagcggcacgagtcgcaaaaagagcatccccttgtccatcaagaacttaaagcgcaaacacaagaggaagaagaataaaatcactcgagacttcaagccaggggacagggtggcagtggaggtggtgaccacgatgacctcagccgacgtgatgtggcaggatggctccgtggaatgcaacatccgctccaacgacctcttccctgtgcaccacctggacaacaacgagttctgccctggagacttcgtggtagataagcgagtccagagctgtccagaccctgctgtctacggtgtggtacagtctggggaccacatcggccgtacctgcatggtgaagtggttcaagctgaggccgagtggggacgacgtggagctgattggagaagaggaagatgtgagtgtttacgacattgctgaccaccctgactttaggttccgtacaactgacatcgtcatccgcatcggcaatactgaggatggggctcctcacaaggaggatgagccatcggtgggccaggtggcccgtgtggacgtcagcagcaaggtggaggtggtgtgggctgacaactcaaagaccatcatcctgccccagcacttgtacaacatagagtctgagattgaggagtcagactacgattcggtagaaggcagcaccagcggggcatcctcggatgaatgggaagatgatagtgacagctgggagacggacaatgggctggtggaggacgagcaccccaagatagaggagccccccatcccacccctggagcagccggtggcccctgaggacaagggagtggtgatcagtgaagaggcagccacagctgccgtccagggggctgtggccatggctgcccccatggccgggctgatggagaaggctggcaaggacgggccacccaagagcttccgggagttgaaagaggccatcaagatcctggagagcctcaagaacatgactgtggagcagctgctgacgggctcgcccacctctccgactgtggagcctgagaagccaactcgggagaagaagtttctggatgacatcaagaagctacaggaaaacctcaagaagaccctggacaatgtggccattgtagaggaggagaagatggaagcagtgcccgacgtagagcgcaaggaggacaagcccgaggggcagtcacctgtgaaggctgagtggcccagcgaaaccccggtgctgtgccagcagtgtggcggcaagcctggcgtcaccttcaccagcgccaagggcgaggtcttctccgtactggagtttgcaccctgtgagtcagcccttgcctggtcttcgccttcccccgccttctcggggctcctgtttgtgtcaccagatctgggtgcagggtggttagtcccctcgccagaccccagctactgccccagggcaaaccatttccctgtgtggtcacagtgctgaggccagcagcggcgagtgggaagtctgtgggtgtgctcacctgtccagccaggttggcagatggagctccagggcctctccatgagggactgactattctcttcccccctctagcaaatcattcttttaagaaaattgagttccagcctccagaagccaagaagttcttcagcacagtgcggaaggagatggcgctgctggctacctcactgcctgagggcatcatggtcaagacttttgaagatagaatggacctcttctcagctctcatcaagggccccactcgaaccccctacgaggatggcctctacttgtttgacatccagctccccaacatctacccagccgtgcccccccacttctgctacctctcccaatgcagtggccgcctgaaccccaacctgtatgacaatgggaaggtgtgtgtcagcctcctgggcacctggattggaaaggggacagagaggtggacaagcaagtccagccttctccaggtgctcatctccatccaaggtctgatcctggtaaatgaaccatactacaacgaagccggcttcgacagtgaccgaggcctgcaggaaggctatgaaaacagtcgctgttacaatgagatggcgctgatccgcgtggtgcagtccatgacccagctggtgcggcggccccccgaggtctttgagcaggagatcaggcaacactttagcactggtggctggcggctggtgaaccgtatcgagtcctggctggaaacccatgccctgctggagaaggcccaggcactgcccaacggggtgcccaaggccagcagctcgccagagcccccagctgtagccgagctgtcagactccggccaacaagaacctgaggatggagggccagccccaggagaggcctcccagggctcagactcagagggcggtgcccagagcctggcctcagctagcagggaccacacagaccagacttcggagaccgcaccagacgcatcggtgccacccagtgtgaaaccaaagaagcggagaaagagctaccggagcttcttacctgagaagagtggctaccctgacatcggcttccccctcttcccactttccaagggtttcatcaagagcatccggggtgtcctgacgcagttccgggctgccctgctagaggcaggcatgccggagtgcacagaggacaagtagctgccaggcacagaggaaagagcatcaccgtgggagaggccagccgccgcctgctcactcccccccggaatcacccctcttcccatgcccctctgtccccactgcaaacccactgccctcttctccccaaggtgagtttgatgctgaagtgcaagaagtgtgttgagatgctgccgtttctattttgaagcgagctttcaacaggcgggtcccctgtggcaaagaaaatcggaaccctgttgccgattttccatttgtcaccccagcagaatgtccggcacttgctcccttgctgccccttctcaggtcagaggcgggtgttccagggcctgccgcggggctctctgggccggttccctgcagacccgcaggagagcacatgtgccttgcatgaagtgtgggttgcgccaacaattcccctggtccctttcaacctgtttagttcaactcaagcctccctgtgtcccagaccctcctgctgccaccaccacccaggtcctccctagtcctccagcgtcaacactatcccttgggagttgtagctgctgtcactgactcccggctatacatggcctgtcgaccacgttatagccctcaggcctgttgaacttgctctctaagagaggttgggaccaggctaggttccgggtgacgcccaggagaggtggtggccttcacacatgcacatggagttgaggaccagggagctgcagggaaagcaacagctataggtgccttgctcttctgtcggaggctgctgggggcaagagcagctgcacaaggccagggcaagtgctagggcccctcccccatcacatggtcacactgggacaggcgtgcagctcactgaactccaagcgagccagccctctcttggactagaaggcctactgtcagcccttcgcttacaaactgcaggctcaatccgaaggggacggccggcgggggctctcctagtgcccagagacaggcccagaggtttacaagttttctaagcttttgataatgtgaagctccaggccgagaggatgctgttgagcacattgcagctatgtaatttttggtgtatgtatgtaatatttaaggttggaaaaaaaactcaaaagcaaagatattaactcttattagaaaaaaagacaaaaaaaaagccaaagcatgatgcgtcttgtcagccttaagtgggctccacacctgtgctgtgctgtgaccgcccagccagcagagctgcgggaggatggagccggaccacacaccgtggcatttggaaccgagtcggtatcttgtttgagaaacacccggagtgactggtggggctgtgcttcccagtgcattgtacatgtggagatgtgaatgcctactgcttacgatatctgtataaagtgctgtgtgattaaacttttttttacttgca

SEQ ID NO: 435944 - DNA, 5060 bp, Homo sapiens
cgcctccccgcgcctcgttcgccgccgctgtcgccgccgccgcccgagactcgcgcagagcagttatggcggatcccgcagcccccacgcccgcagctcccgctccagcccaggccccggctccagccccggaggcagtcccggccccagccgcagcccccgtcccggcgccggcgcccgcctcggactcggcctccgggccgtcctcggactccggcccagaagccggctcgcagcgcctgctgttttctcacgacctggtgtcgggccgttaccgtggctccgtgcacttcgggctggtgcgcctcatccacggcgaggactcggactcggagggcgaggaggagggccgcgggagctcggggtgctccgaggccgggggcgcgggccacgaggagggccgggccagccccctgcgccgcggctacgtgcgcgtccagtggtacccggagggcgtcaagcagcatgtgaaggagaccaagctgaaactagaggaccgttctgtggtgccccgagatgtggtccggcacatgcgatccaccgacagtcagtgtggcacggtgatcgacgtcaacatcgactgtgccgtcaagctcatcggcaccaactgcatcatctatcccgtcaacagcaaggacctgcagcacatctggcccttcatgtatggggactacattgcctatgactgctggctggggaaggtctacgacttgaagaaccagatcatcctgaagctatccaacggcgccaggtgctccatgaacacggaagatggcgccaagctctacgacgtctgcccgcacgtcagcgactcgggtctcttcttcgatgattcctatggcttctacccaggccaggtgctcattggccctgccaagatcttctccagcgtccagtggctgtcaggtgtcaagcccgtgctcagcaccaagagcaagttccgagtggtggtggaagaggtgcaggttgtagagttgaaagttacatggattaccaagagtttctgtccagggggcacggacagcgtcagccccccaccctctgtcatcacccaggaaaacctaggcagggtgaagcgtctcggatgctttgaccatgctcagcggcagcttggggagcgctgtctgtatgtcttcccagccaaggtagagccagccaagattgcctgggaatgtccagaaaaaaactgcgcccagggggagggctctatggccaagaaggtgaagcgcctgttgaagaagcaggttgtgcggatcatgtcatgctccccagacacccagtgttcccgggaccattccatggaagacccagacaagaagggggaatccaaaaccaagagcgaagcggagtctgccagccctgaggagacgcccgatggctctgccagtccagtggagatgcaggacgagggtgcagaggagccccacgaggcaggagagcagctgcccccattcctgctaaaagaaggcagagatgacaggctgcactcggcagagcaggacgcagatgatgaggctgctgatgacacggacgacaccagttcggtgacctcctctgccagctccaccacttcctcccagagcggcagcggcacgagtcgcaaaaagagcatccccttgtccatcaagaacttaaagcgcaaacacaagaggaagaagaataaaatcactcgagacttcaagccaggggacagggtggcagtggaggtggtgaccacgatgacctcagccgacgtgatgtggcaggatggctccgtggaatgcaacatccgctccaacgacctcttccctgtgcaccacctggacaacaacgagttctgccctggagacttcgtggtagataagcgagtccagagctgtccagaccctgctgtctacggtgtggtacagtctggggaccacatcggccgtacctgcatggtgaagtggttcaagctgaggccgagtggggacgacgtggagctgattggagaagaggaagatgtgagtgtttacgacattgctgaccaccctgactttaggttccgtacaactgacatcgtcatccgcatcggcaatactgaggatggggctcctcacaaggaggatgagccatcggtgggccaggtggcccgtgtggacgtcagcagcaaggtggaggtggtgtgggctgacaactcaaagaccatcatcctgccccagcacttgtacaacatagagtctgagattgaggagtcagactacgattcggtagaaggcagcaccagcggggcatcctcggatgaatgggaagatgatagtgacagctgggagacggacaatgggctggtggaggacgagcaccccaagatagaggagccccccatcccacccctggagcagccggtggcccctgaggacaagggagtggtgatcagtgaagaggcagccacagctgccgtccagggggctgtggccatggctgcccccatggccgggctgatggagaaggctggcaaggacgggccacccaagagcttccgggagttgaaagaggccatcaagatcctggagagcctcaagaacatgactgtggagcagctgctgacgggctcgcccacctctccgactgtggagcctgagaagccaactcgggagaagaagtttctggatgacatcaagaagctacaggaaaacctcaagaagaccctggacaatgtggccattgtagaggaggagaagatggaagcagtgcccgacgtagagcgcaaggaggacaagcccgaggggcagtcacctgtgaaggctgagtggcccagcgaaaccccggtgctgtgccagcagtgtggcggcaagcctggcgtcaccttcaccagcgccaagggcgaggtcttctccgtactggagtttgcaccctcaaatcattcttttaagaaaattgagttccagcctccagaagccaagaagttcttcagcacagtgcggaaggagatggcgctgctggctacctcactgcctgagggcatcatggtcaagacttttgaagatagaatggacctcttctcagctctcatcaagggccccactcgaaccccctacgaggatggcctctacttgtttgacatccagctccccaacatctacccagccgtgcccccccacttctgctacctctcccaatgcagtggccgcctgaaccccaacctgtatgacaatgggaaggtgtgtgtcagcctcctgggcacctggattggaaaggggacagagaggtggacaagcaagtccagccttctccaggtgctcatctccatccaaggtctgatcctggtaaatgaaccatactacaacgaagccggcttcgacagtgaccgaggcctgcaggaaggctatgaaaacagtcgctgttacaatgagatggcgctgatccgcgtggtgcagtccatgacccagctggtgcggcggccccccgaggtctttgagcaggagatcaggcaacactttagcactggtggctggcggctggtgaaccgtatcgagtcctggctggaaacccatgccctgctggagaaggcccaggcactgcccaacggggtgcccaaggccagcagctcgccagagcccccagctgtagccgagctgtcagactccggccaacaagaacctgaggatggagggccagccccaggagaggcctcccagggctcagactcagagggcggtgcccagagcctggcctcagctagcagggaccacacagaccagacttcggagaccgcaccagacgcatcggtgccacccagtgtgaaaccaaagaagcggagaaagagctaccggagcttcttacctgagaagagtggctaccctgacatcggcttccccctcttcccactttccaagggtttcatcaagagcatccggggtgtcctgacgcagttccgggctgccctgctagaggcaggcatgccggagtgcacagaggacaagtagctgccaggcacagaggaaagagcatcaccgtgggagaggccagccgccgcctgctcactcccccccggaatcacccctcttcccatgcccctctgtccccactgcaaacccactgccctcttctccccaaggtgagtttgatgctgaagtgcaagaagtgtgttgagatgctgccgtttctattttgaagcgagctttcaacaggcgggtcccctgtggcaaagaaaatcggaaccctgttgccgattttccatttgtcaccccagcagaatgtccggcacttgctcccttgctgccccttctcaggtcagaggcgggtgttccagggcctgccgcggggctctctgggccggttccctgcagacccgcaggagagcacatgtgccttgcatgaagtgtgggttgcgccaacaattcccctggtccctttcaacctgtttagttcaactcaagcctccctgtgtcccagaccctcctgctgccaccaccacccaggtcctccctagtcctccagcgtcaacactatcccttgggagttgtagctgctctcactgaactccaagcgagccagccctctcttggactagaaggcctactgtcagcccttcgcttacaaactgcaggctcaatccgaaggggacggccggcgggggctctcctagtgcccagagacaggcccagaggtttacaagttttctaagcttttgataatgtgaagctccaggccgagaggatgctgttgagcacattgcagctatgtaatttttggtgtatgtatgtaatatttaaggttggaaaaaaaactcaaaagcaaagatattaactcttattagaaaaaaagacaaaaaaaaagccaaagcatgatgcgtcttgtcagccttaagtgggctccacacctgtgctgtgctgtgaccgcccagccagcagagctgcgggaggatggagccggaccacacaccgtggcatttggaaccgagtcggtatcttgtttgagaaacacccggagtgactggtggggctgtgcttcccagtgcattgtacatgtggagatgtgaatgcctactgcttacgatatctgtataaagtgctgtgtgattaaacttttttttacttgca

SEQ ID NO: 435945 - DNA, 4196 bp, Homo sapiens
cgcctccccgcgcctcgttcgccgccgctgtcgccgccgccgcccgagactcgcgcagagcagttatggcggatcccgcagcccccacgcccgcagctcccgctccagcccaggccccggctccagccccggaggcagtcccggccccagccgcagcccccgtcccggcgccggcgcccgcctcggactcggcctccgggccgtcctcggactccggcccagaagccggctcgcagcgcctgctgttttctcacgacctggtgtcgggccgttaccgtggctccgtgcacttcgggctggtgcgcctcatccacggcgaggactcggactcggagggcgaggaggagggccgcgggagctcggggtgctccgaggccgggggcgcgggccacgaggagggccgggccagccccctgcgccgcggctacgtgcgcgtccagtggtacccggagggcgtcaagcagcatgtgaaggagaccaagctgaaactagaggaccgttctgtggtgccccgagatgtggtccggcacatgcgatccaccgacagtcagtgtggcacggtgatcgacgtcaacatcgactgtgccgtcaagctcatcggcaccaactgcatcatctatcccgtcaacagcaaggacctgcagcacatctggcccttcatgtatggggactacattgcctatgactgctggctggggaaggtctacgacttgaagaaccagatcatcctgaagctatccaacggcgccaggtgctccatgaacacggaagatggcgccaagctctacgacgtctgcccgcacgtcagcgactcgggtctcttcttcgatgattcctatggcttctacccaggccaggtgctcattggccctgccaagatcttctccagcgtccagtggctgtcaggtgtcaagcccgtgctcagcaccaagagcaagttccgagtggtggtggaagaggtgcaggttgtagagttgaaagttacatggattaccaagagtttctgtccagggggcacggacagcgtcagccccccaccctctgtcatcacccaggaaaacctaggcagggtgaagcgtctcggatgctttgaccatgctcagcggcagcttggggagcgctgtctgtatgtcttcccagccaaggtagagccagccaagattgcctgggaatgtccagaaaaaaactgcgcccagggggagggctctatggccaagaaggtgaagcgcctgttgaagaagcaggttgtgcggatcatgtcatgctccccagacacccagtgttcccgggaccattccatggaagacccagacaagaagggggaatccaaaaccaagagcgaagcggagtctgccagccctgaggagacgcccgatggctctgccagtccagtggagatgcaggacgagggtgcagaggagccccacgaggcaggagagcagctgcccccattcctgctaaaagaaggcagagatgacaggctgcactcggcagagcaggacgcagatgatgaggctgctgatgacacggacgacaccagttcggtgacctcctctgccagctccaccacttcctcccagagcggcagcggcacgagtcgcaaaaagagcatccccttgtccatcaagaacttaaagcgcaaacacaagaggaagaagaataaaatcactcgagacttcaagccaggggacagggtggcagtggaggtggtgaccacgatgacctcagccgacgtgatgtggcaggatggctccgtggaatgcaacatccgctccaacgacctcttccctgtgcaccacctggacaacaacgagttctgccctggagacttcgtggtagataagcgagtccagagctgtccagaccctgctgtctacggtgtggtacagtctggggaccacatcggccgtacctgcatggtgaagtggttcaagctgaggccgagtggggacgacgtggagctgattggagaagaggaagatgtgagtgtttacgacattgctgaccaccctgactttaggttccgtacaactgacatcgtcatccgcatcggcaatactgaggatggggctcctcacaaggaggatgagccatcggtgggccaggtggcccgtgtggacgtcagcagcaaggtggaggtggtgtgggctgacaactcaaagaccatcatcctgccccagcacttgtacaacatagagtctgagattgaggagtcagactacgattcggtagaaggcagcaccagcggggcatcctcggatgaatgggaagatgatagtgacagctgggagacggacaatgggctggtggaggacgagcaccccaagatagaggagccccccatcccacccctggagcagccggtggcccctgaggacaagggagtggtgatcagtgaagaggcagccacagctgccgtccagggggctgtggccatggctgcccccatggccgggctgatggagaaggctggcaaggacgggccacccaagagcttccgggagttgaaagaggccatcaagatcctggagagcctcaagaacatgactgtggagcagctgctgacgggctcgcccacctctccgactgtggagcctgagaagccaactcgggagaagaagtttctggatgacatcaagaagctacaggaaaacctcaagaagaccctggacaatgtggccattgtagaggaggagaagatggaagcagtgcccgacgtagagcgcaaggaggacaagcccgaggggcagtcacctgtgaaggctgagtggcccagcgaaaccccggtgctgtgccagcagtgtggcggcaagcctggcgtcaccttcaccagcgccaagggcgaggtcttctccgtactggagtttgcaccctcaaatcattcttttaagaaaattgagttccagcctccagaagccaagaagttcttcagcacagtgcggaaggagatggcgctgctggctacctcactgcctgagggcatcatggtcaagacttttgaagatagaatggacctcttctcagctctcatcaagggccccactcgaaccccctacgaggatggcctctacttgtttgacatccagctccccaacatctacccagccgtgcccccccacttctgctacctctcccaatgcagtggccgcctgaaccccaacctgtatgacaatgggaaggtgtgtgtcagcctcctgggcacctggattggaaaggggacagagaggtggacaagcaagtccagccttctccaggtgctcatctccatccaaggtctgatcctggtaaatgaaccatactacaacgaagccggcttcgacagtgaccgaggcctgcaggaaggctatgaaaacagtcgctgttacaatgagatggcgctgatccgcgtggtgcagtccatgacccagctggtgcggcggccccccgaggtctttgagcaggagatcaggcaacactttagcactggtggctggcggctggtgaaccgtatcgagtcctggctggaaacccatgccctgctggagaaggcccaggcactgcccaacggggtgcccaaggccagcagctcgccagagcccccagctgtagccgagctgtcagactccggccaacaagaacctgaggatggagggccagccccaggagaggcctcccagggctcagactcagagggcggtgcccagagcctggcctcagctagcagggaccacacagaccagacttcggagaccgcaccagacgcatcggtgccacccagtgtgaaaccaaagaagcggagaaagagctaccggagcttcttacctgagaagagtggctaccctgacatcggcttccccctcttcccactttccaagggtttcatcaagagcatccggggtgtcctgacgcagttccgggctgccctgctagaggcaggcatgccggagtgcacagaggacaagtagctgccaggcacagaggaaagagcatcaccgtgggagaggccagccgccgcctgctcactcccccccggaatcacccctcttcccatgcccctctgtccccactgcaaacccactgccctcttctccccaaggtgagtttgatgctgaagtgcaagaagtgtgttgagatgctgccgtttctattttgaagcgagctttcaacaggcgggtcccctgtggcaagctcgcttcaaaaaaaaaccggcgcggccg

SEQ ID NO: 435946 - DNA, 2243 bp, Homo sapiens
tgccctgtgtgtgttcaggggacagagaggtggacaagcaagtccagccttctccaggtgctcatctccatccaaggtctgatcctggtaaatgaaccatactacaacgaagccggcttcgacagtgaccgaggcctgcaggaaggctatgaaaacagtcgctgttacaatgagatggcgctgatccgcgtggtgcagtccatgacccagctggtgcggcggccccccgaggtctttgagcaggagatcaggcaacactttagcactggtggctggcggctggtgaaccgtatcgagtcctggctggaaacccatgccctgctggagaaggcccaggcactgcccaacggggtgcccaaggccagcagctcgccagagcccccagctgtagccgagctgtcagactccggccaacaagaacctgaggatggagggccagccccaggagaggcctcccagggctcagactcagagggcggtgcccagagcctggcctcagctagcagggaccacacagaccagacttcggagaccgcaccagacgcatcggtgccacccagtgtgaaaccaaagaagcggagaaagagctaccggagcttcttacctgagaagagtggctaccctgacatcggcttccccctcttcccactttccaagggtttcatcaagagcatccggggtgtcctgacgcagttccgggctgccctgctagaggcaggcatgccggagtgcacagaggacaagtagctgccaggcacagaggaaagagcatcaccgtgggagaggccagccgccgcctgctcactcccccccggaatcacccctcttcccatgcccctctgtccccactgcaaacccactgccctcttctccccaaggtgagtttgatgctgaagtgcaagaagtgtgttgagatgctgccgtttctattttgaagcgagctttcaacaggcgggtcccctgtggcaaagaaaatcggaaccctgttgccgattttccatttgtcaccccagcagaatgtccggcacttgctcccttgctgccccttctcaggtcagaggcgggtgttccagggcctgccgcggggctctctgggccggttccctgcagacccgcaggagagcacatgtgccttgcatgaagtgtgggttgcgccaacaattcccctggtccctttcaacctgtttagttcaactcaagcctccctgtgtcccagaccctcctgctgccaccaccacccaggtcctccctagtcctccagcgtcaacactatcccttgggagttgtagctgctgtcactgactcccggctatacatggcctgtcgaccacgttatagccctcaggcctgttgaacttgctctctaagagaggttgggaccaggctaggttccgggtgacgcccaggagaggtggtggccttcacacatgcacatggagttgaggaccagggagctgcagggaaagcaacagctataggtgccttgctcttctgtcggaggctgctgggggcaagagcagctgcacaaggccagggcaagtgctagggcccctcccccatcacatggtcacactgggacaggcgtgcagctcactgaactccaagcgagccagccctctcttggactagaaggcctactgtcagcccttcgcttacaaactgcaggctcaatccgaaggggacggccggcgggggctctcctagtgcccagagacaggcccagaggtttacaagttttctaagcttttgataatgtgaagctccaggccgagaggatgctgttgagcacattgcagctatgtaatttttggtgtatgtatgtaatatttaaggttggaaaaaaaactcaaaagcaaagatattaactcttattagaaaaaaagacaaaaaaaaagccaaagcatgatgcgtcttgtcagccttaagtgggctccacacctgtgctgtgctgtgaccgcccagccagcagagctgcgggaggatggagccggaccacacaccgtggcatttggaaccgagtcggtatcttgtttgagaaacacccggagtgactggtggggctgtgcttcccagtgcattgtacatgtggagatgtgaatgcctactgcttacgatatctgtataaagtgctgtgtgattaaacttttttttacttgcattttttttttttttttttttttgttggctcattagcaagacaaggtgacaccattaaacctccctctgccattcatctgggctcc

SEQ ID NO: 435947 - DNA, 747 bp, Homo sapiens
ggaagagccactggtggataggggcctggggaacagaattgatggtgccctgtgtgtgttcaggggacagagaggtggacaagcaagtccagccttctccaggtgctcatctccatccaaggtacagttgggctgaagcgggggtgcggacaagggagggccggtggaggaaagtgactctgatagtccccctggcaggtggagggtaggcctgcattgtgggcctctctcacccactgagggaaggtgtcccgcccacacaggtctgatcctggtaaatgaaccatactacaacgaagccggcttcgacagtgaccgaggcctgcaggaaggctatgaaaacagtcgctgttacaatgagatggcgctgatccgcgtggtgcagtccatgacccagctggtgcggcggccccccgaggtctttgagcaggagatcaggcaacactttagcactggtggctggcggctggtgaaccgtatcgagtcctggctggaaacccatgccctgctggagaaggcccaggcactgcccaacggggtgcccaaggccagcagctcgccagagcccccagctgtagccgagctgtcagactccggccaacaagaacctgaggatggagggccagccccaggagaggcctcccagggctcagactcagagggcggtgcccagagcctggcctcagctagcagggaccacacagaccagacttcggagaccgcaccagacgcatcggtgccacccag

SEQ ID NO: 435948 - DNA, 3302 bp, Homo sapiens
ggctcgggctccggctcgggctcccgcggcgtgggctgggcagcagccaggcggcggctccgcggcgccgggcaggggccgtccgcgggtccgcgccctcgggcggcggcgtctcctgggtcccggcagccgtccgcgcgcccgggcgcaggtttggttttcctaaacaaatcctttcacagggaccgacggcacttgataatgtgacaaaaaccagcctcttccaccccactgcagtgacttttgccggaaagtggagcagtgggcacggccaaccttgtcgttcatcaatgccgcccctggcagtatctgaggatcggtggcagccatgcctccccctgccccagccgctccttcccccccacgctaatctgcatggtgtgggcgcccttgggacccccgaggactgattgtctgaccttgcttcacacgcccagtaaggactcccccaagatgtcgctcgagtggctggtggcctggagctggtcgctggatggcctgagggactgcatcgccaccggcatccagtccgtgcgggactgcgacaccaccgctgtcatcactgtggcctgcctcctggtcctcttcgtgtggtactgttatcacgtgggcagggagcagccccggccctacgtctccgtcaactccctcatgcaggctgccgatgccaacgggctgcagaatggctacgtgtactgccagtcccctgagtgcgtgcgctgcacccacaacgagggcctcaaccagaagctgtaccacaacctgcaggagtacgccaagcgctactcctggtccggcatgggccgcatccacaagggcatccgcgagcagggccggtacctcaacagccggccctccatccagaagcccgaggtcttcttcctgcccgacctgcccaccacgccctatttctcccgggacgcacagaaacatgatgtggaagtgctggaacggaacttccagaccatcctgtgtgagtttgagaccctctacaaagctttctcaaactgcagcctcccgcaaggatggaaaatgaacagcacccccagcggggagtggttcaccttttacttggtcaatcagggggtttgtgttcccaggaactgtaggaagtgcccacggacgtaccgcttgctcggaagccttcggacctgtattgggaacaatgtttttgggaacgcgtgcatctctgtgctgagccctgggactgtgataacggagcactatggacccaccaacatccgcatccgatgccatttaggtctgaaaactccaaatggctgtgagctggtggtggggggagagccccagtgctgggcagaagggcgctgccttctctttgatgactctttcctgcatgctgcgttccatgaaggttcagcagaggatggcccacgggtggttttcatggtggatttgtggcatccaaacgtcgcagcggccgaacggcaggctcttgatttcatctttgctccgggacgatgagagtatttcccatgctggagtcggcgagaagggccgaggcggggcctgggcagactgtggtccggtccagtccctaccggtgttgtttccatgctcagaaacctgcctcagcggaaagctcttatttgggattttatatcatgtcgggtccctctttcccttggttattgtaaatggaaacttttcggcttgtatttccttagattttttttttttccttccaatcatttgcttcagagactcctttctggcctaacagcgcattcctttgattggtccttgagtgaccagagacttagtgcccttgtaagtctgtcttctgttgctacttgtttttttcagtgctctgaaatagagtaactaaatggttatttgtctgaatataataatgtaaaacttcttgtggtcatcttaaaaaaaaaaaaaaaaaactaaaaactgcaaaccagagagctagagaacttggcctctgatgctggcacactggggacccttcagccacctgacggcagggggacagtctgcagcccccacacctgactggcttcagtagccaggtggaggggctgccagacacagtcagggtggcacacagtgtccaggcccagggatactgtcaccatcgctcacctcattctaaaccttgtcaggtccctgatggcaaaagcattgggccagtaggactggaggctactctttaaacatggctttcctgcaaagctgaagctggtgtcccccagcaccaagctgcggctcacacagatcagccacggaacgtgtgatccgcttacctcactgcctacagaagccctactgccaaactgggcctggaaaattcccagttttaggtgttttgagtccacagtgatgaacgttaaggccaccaggttggctgataggagctgtagggggataggaccgcgctcacccagcgacatttggggaaagcctttctctggcaaaactggaataatagatctgaccaaagtttctgttttgctttggagttctgttgcctatgtttttttttttttcatttatttgtctgtacataaatgttcaaacactagacttggagatagtggaagagttggccctgtgtctttgtcatggcacaaaggtgtgcactgcgtgacaatgacccaagccagtgtgtgctagtgaggagacagagaagacctacatgcccagaggacccgtggccgttgtgctggttttctggtctcctgtgaagaacatgtggatctcttcccgaaggaaaaggtcccaggagaccagtttgaggcactcactctagaaatagcctgtgttagctgatgtgtgaaagcgtagccggccagccacactagagatgccttttctgaataatgtattatgagcagtgtcagatttataaagccgaggagtggtttggaatatacagctggtcgcaggtgcaggtccagtgtttagatccaaatggaaaacagcagcttctaagaggtacaactgttggaagaaaacacagttgaaatgcaccaggcaggtactagcaagtgtgcaaagagcacgtctacatttgagtaaaatgtctacacagatatttgtcagtgatgagaatgcaggaaaaggcagacatttcaaacatacctgaagtctttttactcattatcttgttaaagaatcactgaggtgcatgatttctacacatcgtgactgctctgctctgcgtttacaaaaccaacagcccgcgcaggtacctagctacctgcattcatgtgacatgtctggggaacagaagataaataaaggatcttgctgaaaaccaaaatgaagtg

SEQ ID NO: 435949 - DNA, 3162 bp, Homo sapiens
ggctcgggctccggctcgggctcccgcggcgtgggctgggcagcagccaggcggcggctccgcggcgccgggcaggggccgtccgcgggtccgcgccctcgggcggcggcgtctcctgggtcccggcagccgtccgcgcgcccgggcgcaggtttggttttcctaaacaaatcctttcacagggaccgacggcacttgataatgtgacaaaaaccagcctcttccaccccactgcagtgacttttgccggaaagtggagcagtgggcacggccaaccttgtcgttcatcaatgccgcccctggcagtatctgaggatcggtggcagccatgcctccccctgccccagccgctccttcccccccacgctaatctgcatggtgtgggcgcccttgggacccccgaggactgattgtctgaccttgcttcacacgcccagtaaggactcccccaagatgtcgctcgagtggctggtggcctggagctggtcgctggatggcctgagggactgcatcgccaccggcatccagtccgtgcgggactgcgacaccaccgctgtcatcactgtggcctgcctcctggtcctcttcgtgtggtactgttatcacgtgggcagggagcagccccggccctacgtctccgtcaactccctcatgcaggctgccgatgccaacgggctgcagaatggctacgtgtactgccagtcccctgagtgcgtgcgctgcacccacaacgagggcctcaaccagaagctgtaccacaacctgcaggagtacgccaagcgctactcctggtccggcatgggccgcatccacaagggcatccgcgagcagggccggtacctcaacagccggccctccatccagaagcccgaggtcttcttcctgcccgacctgcccaccacgccctatttctcccgggacgcacagaaacatgatgtggaagtgctggaacggaacttccagaccatcctgtgtgagtttgagaccctctacaaagctttctcaaactgcagcctcccgcaaggatggaaaatgaacagcacccccagcggggagtggttcaccttttacttggtcaatcagggggtttgtgttcccaggaactgtaggaagtgcccacggacgtaccgcttgctcggaagccttcggacctgtattgggaacaatgtttttgggaacgcgtgcatctctgtgctgagccctgggactgtgataacggagcactatggacccaccaacatccgcatccgatgccatttaggtctgaaaactccaaatggctgtgagctggtggtggggggagagccccagtgctgggcagaagggcgctgccttctctttgatgactctttcctgcatgctgcgttccatgaaggttcagcagaggatggcccacgggtggttttcatggtggatttgtggcatccaaacgtcgcagcggccgaacggcaggctcttgatttcatctttgctccgggacgatgagagtatttcccatgctggagtcggcgagaagggccgaggcggggcctgggcagactgtggtccggtccagtccctaccggtgttgtttccatgctcagaaacctgcctcagcggaaagctcttatttgggattttatatcatgtcgggtccctctttcccttggttattgtaaatggaaacttttcggcttgtatttccttagattttttttttttccttccaatcatttgcttcagagactcctttctggcctaacagcgcattcctttgattggtccttgagtgaccagagacttagtgcccttgtaagtctgtcttctgttgctacttgtttttttcagtgctctgaaatagagtaactaaatggttatttgtctgaatataataatgtaaaacttcttgtggtcatcttaaaaaaaaaaaaaaaaaactaaaaactgcaaaccagagagctagagaacttggcctctgatgctggcacactggggacccttcagccacctgacggcagggggacagtctgcagcccccacacctgactggcttcagtagccaggtggaggggctgccagacacagtcagggtggcacacagtgtccaggcccagggatactgtcaccatcgctcacctcattctaaaccttgtcaggtccctgatggcaaaagcattgggccagtaggactggaggctactctttaaacatggctttcctgcaaagctgaagctggtgtcccccagcaccaagctgcggctcacacagatcagccacggaacgtgtgatccgcttacctcactgcctacagaagccctactgccaaactgggcctggaaaattcccagttttaggtgttttgagtccacagtgatgaacgttaaggccaccaggttggctgataggagctgtagggggataggaccgcgctcacccagcgacatttggggaaagcctttctctggcaaaactggaataatagatctgaccaaagtttctgttttgctttggagttctgttgcctatgtttttttttttttcatttatttgtctgtacataaatgttcaaacactagacttggagatagtggaagagttggccctgtgtctttgtcatggcacaaaggtgtgcactgcgtgacaatgacccaagccagtgtgtgctagtgaggagacagagaagacctacatgcccagaggacccgtggccgttgtgctggttttctggtctcctgtgaagaacatgtggatctcttcccgaaggaaaaggtcccaggagaccagtttgaggcactcactctagaaatagcctgtgttagctgatgtgtgaaagcgtagccggccagccacactagagatgccttttctgaataatgtattatgagcagtgtcagatttataaagccgaggagtggtttggaatatacagctggtcgcaggtgcaggtccagtgtttagatccaaatggaaaacagcagcttctaagaggtacaactgttggaagaaaacacagttgaaatgcaccagaatcactgaggtgcatgatttctacacatcgtgactgctctgctctgcgtttacaaaaccaacagcccgcgcaggtacctagctacctgcattcatgtgacatgtctggggaacagaagataaataaaggatcttgctgaaaaccaaaatgaagtg

SEQ ID NO: 435950 - DNA, 2348 bp, Homo sapiens
ggctcgggctccggctcgggctcccgcggcgtgggctgggcagcagccaggcggcggctccgcggcgccgggcaggggccgtccgcgggtccgcgccctcgggcggcggcgtctcctgggtcccggcagccgtccgcgcgcccgggcgcaggtttggttttcctaaacaaatcctttcacagggaccgacggcacttgataatgtgacaaaaaccagcctcttccaccccactgcagtgacttttgccggaaagtggagcagtgggcacggccaaccttgtcgttcatcaatgccgcccctggcagtatctgaggatcggtggcagccatgcctccccctgccccagccgctccttcccccccacgctaatctgcatggtgtgggcgcccttgggacccccgaggactgattgtctgaccttgcttcacacgcccagtaaggactcccccaagatgtcgctcgagtggctggtggcctggagctggtcgctggatggcctgagggactgcatcgccaccggcatccagtccgtgcgggactgcgacaccaccgctgtcatcactgtggcctgcctcctggtcctcttcgtgtggtactgttatcacgtgggcagggagcagccccggccctacgtctccgtcaactccctcatgcaggctgccgatgccaacgggctgcagaatggctacgtgtactgccagtcccctgagtgcgtgcgctgcacccacaacgagggcctcaaccagaagctgtaccacaacctgcaggagtacgccaagcgctactcctggtccggcatgggccgcatccacaagggcatccgcgagcagggccggtacctcaacagccggccctccatccagaagcccgaggtcttcttcctgcccgacctgcccaccacgccctatttctcccgggacgcacagaaacatgatgtggaagtgctggaacggaacttccagaccatcctgtgtgagtttgagaccctctacaaagctttctcaaactgcagcctcccgcaaggatggaaaatgaacagcacccccagcggggagtggttcaccttttacttggtcaatcagggggtttgtgttcccaggaactgtaggaagtgcccacggacgtaccgcttgctcggaagccttcggacctgtattgggaacaatgtttttgggaacgcgtgcatctctgtgctgagccctgggactgtgataacggagcactatggacccaccaacatccgcatccgatgccatttaggtctgaaaactccaaatggctgtgagctggtggtggggggagagccccagtgctgggcagaagggcgctgccttctctttgatgactctttcctgcatgctgcgttccatgaaggttcagcagaggatggcccacgggtggttttcatggtggatttgtggcatccaaacgtcgcagcggccgaacggcaggctcttgatttcatctttgctccgggacgatgagagtatttcccatgctggagtcggcgagaagggccgaggcggggcctgggcagactgtggtccggtccagtccctaccggtgttgtttccatgctcagaaacctgcctcagcggaaagctcttatttgggattttatatcatgtcgggtccctctttcccttggttattgtaaatggaaacttttcggcttgtatttccttagattttttttttttccttccaatcatttgcttcagagactcctttctggcctaacagcgcattcctttgattggtccttgagtgaccagagacttagtgcccttgtaagtctgtcttctgttgctacttgtttttttcagtgctctgaaatagagtaactaaatggttatttgtctgaatataataatgtacaaaaaaaaaaaaaaaaaaaaaacaaaaaaaaaaaaacaaaaaaaaaagggggggggcggccattaagatattcacccccggaaggggcccccagtttatagcggcataacacagattttttgttaacaaggggggcgcccaataaggggacggcctatatataacacaggggacacggggcggggttaaaaagaaggagacggggggaaacaagtgcttacggggagaacttttggagagaagaacacccatatagcggggggggggggggacaccaagtggggggcggagacagacctacctacggagatttttagagacggcgcagaggagggagaataataagacaagtttagagggggttatatagtgaggtttggtcaacaagggggaatattggatctgcgggtgttggaaaaattcttggcatcacggagggaatgattcttggagaaagatattttagcgc

SEQ ID NO: 435951 - DNA, 624 bp, Homo sapiens
cgagggacaggatggggtccctgccccgaagctgagcacgtagggtccagccctgcctggatcctgggtcctgactccagggtggtttgaacctgtcctctcacccctccttcccccccaggttcagcagaggatggcccacgggtggttttcatggtggatttgtggcatccaaacgtcgcagcggccgaacggcaggctcttgatttcatctttgctccgggacgatgagagtatttcccatgctggagtcggcgagaagggccgaggcggggcctgggcagactgtggtccggtccagtccctaccggtgttgtttccatgctcagaaacctgcctcagcggaaagctcttatttgggattttatatcatgtcgggtccctctttcccttggttattgtaaatggaaacttttcggcttgtatttccttagattttttttttttccttccaatcatttgcttcagagactcctttctggcctaacagcgcattcctttgattggtccttgagtgaccagagacttagtgcccttgtaagtctgtcttctgttgctacttgtttttttcagtgctctgaaatagagtaactaaatggttatttgtctgaatataataatgta

SEQ ID NO: 435952 - DNA, 346 bp, Homo sapiens
accctgtctacacaactattaggctcttacagggcagagaacgtgtatcctgtgtatgtgcacacacatacacatacataaaagtatcataagtacttaataaatatttgctaaacgaatagtaattgaaaatgacattcttactcaaatccttccgcatatacccccataaaagcagctgtatttaaattaatattttataatataatgaacaaatcagtggttgtttctaaaccttttgcatttcaaaagaaatacaacaaatacaaaagattatgttttataaactttatatatacagacttatattcaggatccaaaccatctttttcaaacaacttttttt

SEQ ID NO: 435953 - DNA, 379 bp, Homo sapiens
tgcctggtgtcagaaaggttgcgggccactgccgtaaagtattaatagtctgtttctagagtgtcttcttcctaactattctgtgcctcttctgtctgattactttcacctttattttattctaagtctgtctttctcaactaggttcttcttttgaaccacagatcatagaaaattatttgtgactattttcttaattccgccccctcaaagtggtacataataggatgattctatgtccatctggaggccttaggcttactttcaaggaaatcctgattattcatgagacagttgtgatatgctgaataatgggcttcccatgccctaatctccaggacttgtatataacaaaaggaacttttcagatcaagttaag

SEQ ID NO: 435954 - DNA, 859 bp, Homo sapiens
gtgtactaaaggccactagcctgtgggatatatgacgtttcgatctatgtttccccctcatcgcacagccgtgagtgaggacgagtcggtattcggcgagtgtttcaaggatctttatggccggcacaaggagtatctcagcagcctcgtaggcaccgactttgagatgactgtcccaggtgccctccggctctttgtaaatggagaggtcgtttcagcccaaggctatgagtatgacaatctctacgtccacttctttgtagaattgccaactgctcactggtcaagcccagcattccagcagctctcaggagtaacacagacctgcaccaccaagtccctggcaatggacaaggtggctcacttctcctacccattcacgtttgaagccttcttcctccatgaggatgaatcttctgatgcactcccggagtggcctgtgctctactgtgaggtcctctcgctggacttctggcagaggtaccgtgtggaaggctatggggctgtggtgctgcctgccactccaggtaaccgctcgtctctgcccttctgtggcccacatgccctaggccctaagaacaagactaacactcgaatgcttctggtgaggggtggagataattgggaattggaaatgtttggcttgaaagagttcctgttcctctgaggactttctgcccccctccattagcgacaatgacgtggccttggcactgacttcctgacagtctctccatgtgcttcatgctcctctgattggactcagggtgagaagctgtatggcaaaattggctcatagcatatgtgtattgaatgaatcagcattcagtttggaataaaagcatctgtcttttactgt

SEQ ID NO: 435955 - DNA, 2172 bp, Homo sapiens
gcgtctccgttgccaggaaaacagagcggcgcgctttccggcgcagtcgcggcgcgtcgcagctgtcatggcggagaccgtctggagcactgacaccggggaggcagtgtatcgctcccgggaccccgtgcgcaacttgcgcctccgagtccacctgcaaagaatcacatcaagcaactttcttcattatcagcctgctgccgagctcgggaaggacctcatagacttggccacttttaggcctcagccaactgccagtggacaccgcccagaggaagacgaagaggaggagattgtgattgggtggcaggagaagctctttagccagtttgaagtagatctgtaccaaaatgaaacagcctgtcagagtcctttggattatcagtaccgtcaggagatcctgaagctggagaattcgggtggcaagaaaaaccgacgaatctttacctacactgactctgatagatacaccaatttggaggagcactgtcagagaatgaccactgcagccagcgaggtgccttcattcttggtcgagcgaatggcaaatgtcaggcgtcgccggcaggacaggcgagggatggagggcggcatcctcaagtcacgcatcgtcacctgggagccctcagaagagtttgtcaggaacaaccacgtcattaacacccctcttcagacaatgcacatcatggcagacctggggccctataaaaagcttggctataagaagtatgaacatgtcctgtgtactctgaaggtggatagcaatggtgtgatcacagtaaagcctgacttcacgggcctcaaaggaccctacaggattgagacggagggggagaagcaggagctgtggaaatatacgatcgacaatgtttccccccacgcacagccggaggaggaggagcgggaacggcgagtgttcaaggatctttatggccggcacaaggagtatctcagcagcctcgtaggcaccgactttgagatgactgtcccaggtgccctccggctctttgtaaatggagaggtcgtttcagcccaaggctatgagtatgacaatctctacgtccacttctttgtagaattgccaactgctcactggtcaagcccagcattccagcagctctcaggagtaacacagacctgcaccaccaagtccctggcaatggacaaggtggctcacttctcctacccattcacgtttgaagccttcttcctccatgaggatgaatcttctgatgcactcccggagtggcctgtgctctactgtgaggtcctctcgctggacttctggcagaggtaccgtgtggaaggctatggggctgtggtgctgcctgccactccagggccttcatggaatcgagctcccttcagaaaaggatgcggagtgtgttggaccgtctggaagggttcagccagcagagttccattcacaatgtgctagaggccttccgtcgagcccggcgccgcatgcaggaggcccgggaaagcctcccgcaggacctagtgagcccctctggaaccctggtctcctagctcacagcagccctggcccacagtgcaagaggacaagatgggggatatctgaggccagtgctctcctgcctcttcgtctttctgattagagaccacgttggtctgctgagaaccagaaaagctgggaaattcccggctggcccctctgcctagccttctgcagggtcttctccctaccctgtggaaataaagccagagaccctgtggccccccctttatatttgcagccactgtcaatgggcatcacagcaaggcaggctttttgatctgaagctgtttggggtgaccccatagtgagtctggccttgactcacttttctggcttgtctcacagtagcaggggatctgctgttctccaccctttaaaaatggagcctttcatcttccaagaccaaagaaggaaggaaggtggacggtgagagggtcttaaatccccagcctgtgagtctcagcctctttccagggaagcctcattctactgcttggggcttgctgaggttgagatatgagttatttctgagtaagtgaaggctgaaggcagtgctgagtcctttctgctagctgggtggtatcttttactgtgtttttttgtttgtttgtttttttgttttttgttacataaaccccttttattttgactga

SEQ ID NO: 435956 - DNA, 2449 bp, Homo sapiens
gcgtctccgttgccaggaaaacagagcggcgcgctttccggcgcagtcgcggcgcgtcgcagctgtcatggcggagaccgtctggagcactgacaccggggaggcagtgtatcgctcccgggaccccgtgcgcaacttgcgcctccgagtccacctgcaaagaatcacatcaagcaactttcttcattatcagcctgctgccgagctcgggaaggacctcatagacttggccacttttaggcctcagccaactgccagtggacaccgcccagaggaagacgaagaggaggagattgtgattgggtggcaggagaagctctttagccagtttgaagtagatctgtaccaaaatgaaacagcctgtcagagtcctttggattatcagtaccgtcaggagatcctgaagctggagaattcgggtggcaagaaaaaccgacgaatctttacctacactgactctgatagatacaccaatttggaggaggtacttggctccatgtggccctgaccagatggcgtacacagggctgcttgcttttcccagcactgtcagagaatgaccactgcagccagcgaggtgccttcattcttggtcgagcgaatggcaaatgtcaggcgtcgccggcaggacaggcgagggatggagggcggcatcctcaagtcacgcatcgtcacctgggagccctcagaagagtttgtcaggaacaaccacgtcattaacacccctcttcagacaatgcacatcatggcagacctggggccctataaaaagcttggctataagaagtatgaacatgtcctgtgtactctgaaggtggatagcaatggtgtgatcacagtaaagcctgacttcacgggcctcaaaggaccctacaggattgagacggagggggagaagcaggagctgtggaaatatacgatcgacaatgtttccccccacgcacagccggaggaggaggagcgggaacggcgagtgttcaaggatctttatggccggcacaaggagtatctcagcagcctcgtaggcaccgactttgagatgactgtcccaggtgccctccggctctttgtaaatggagaggtcgtttcagcccaaggctatgagtatgacaatctctacgtccacttctttgtagaattgccaactgctcactggtcaagcccagcattccagcagctctcaggagtaacacagacctgcaccaccaagtccctggcaatggacaaggtggctcacttctcctacccattcacgtttgaagccttcttcctccatgaggatgaatcttctgatgcactcccggagtggcctgtgctctactgtgaggtcctctcgctggacttctggcagaggtaccgtgtggaaggctatggggctgtggtgctgcctgccactccaggctcacacaccctgacagtctccacgtggagacctgtggagcttggcacggtggctgagctgaggaggtttttcattggcggttctctggaactggaggacctctcctatgtacggataccaggatccttcaagggggaacgcctgagccgctttggactccgcacagagaccacaggcactgtcaccttccgcttgcactgtctgcagcagtccagggccttcatggaatcgagctcccttcagaaaaggatgcggagtgtgttggaccgtctggaagggttcagccagcagagttccattcacaatgtgctagaggccttccgtcgagcccggcgccgcatgcaggaggcccgggaaagcctcccgcaggacctagtgagcccctctggaaccctggtctcctagctcacagcagccctggcccacagtgcaagaggacaagatgggggatatctgaggccagtgctctcctgcctcttcgtctttctgattagagaccacgttggtctgctgagaaccagaaaagctgggaaattcccggctggcccctctgcctagccttctgcagggtcttctccctaccctgtggaaataaagccagagaccctgtggccccccctttatatttgcagccactgtcaatgggcatcacagcaaggcaggctttttgatctgaagctgtttggggtgaccccatagtgagtctggccttgactcacttttctggcttgtctcacagtagcaggggatctgctgttctccaccctttaaaaatggagcctttcatcttccaagaccaaagaaggaaggaaggtggacggtgagagggtcttaaatccccagcctgtgagtctcagcctctttccagggaagcctcattctactgcttggggcttgctgaggttgagatatgagttatttctgagtaagtgaaggctgaaggcagtgctgagtcctttctgctagctgggtggtatcttttactgtgtttttttgtttgtttgtttttttgttttttgttacataaaccccttttattttgactga

SEQ ID NO: 435957 - DNA, 1750 bp, Homo sapiens
gcgtctccgttgccaggaaaacagagcggcgcgctttccggcgcagtcgcggcgcgtcgcagctgtcatggcggagaccgtctggagcactgacaccggggaggcagtgtatcgctcccgggaccccgtgcgcaacttgcgcctccgagtccacctgcaaagaatcacatcaagcaactttcttcattatcagcctgctgccgagctcgggaaggacctcatagacttggccacttttaggcctcagccaactgccagtggacaccgcccagaggaagacgaagaggaggagattgtgattgggtggcaggagaagctctttagccagtttgaagtagatctgtaccaaaatgaaacagcctgtcagagtcctttggattatcagtaccgtcaggagatcctgaagctggagaattcgggtggcaagaaaaaccgacgaatctttacctacactgactctgatagatacaccaatttggaggagcactgtcagagaatgaccactgcagccagcgaggtgccttcattcttggtcgagcgaatggcaaatgtcaggcgtcgccggcaggacaggcgagggatggagggcggcatcctcaagtcacgcatcgtcacctgggagccctcagaagagtttgtcaggaacaaccacgtcattaacacccctcttcagacaatgcacatcatggcagacctggggccctataaaaagcttggctataagaagtatgaacatgtcctgtgtactctgaaggtggatagcaatggtgtgatcacagtaaagcctgacttcacgggcctcaaaggaccctacaggattgagacggagggggagaagcaggagctgtggaaatatacgatcgacaatgtttccccccacgcacagccggaggaggaggagcgggaacggcgagtgttcaaggatctttatggccggcacaaggagtatctcagcagcctcgtaggcaccgactttgagatgactgtcccaggtgccctccggctctttgtaaatggagaggtcgtttcagcccaaggctatgagtatgacaatctctacgtccacttctttgtagaattgccaactgctcactggtcaagcccagcattccagcagctctcaggagtaacacagacctgcaccaccaagtccctggcaatggacaaggtggctcacttctcctacccattcacgtttgaagccttcttcctccatgaggatgaatcttctgatgcactcccggagtggcctgtgctctactgtgaggtcctctcgctggacttctggcagaggtaccgtgtggaaggctatggggctgtggtgctgcctgccactccaggctcacacaccctgacagtctccacgtggagacctgtggagcttggcacggtggctgagctgaggaggtttttcattggcggttctctggaactggaggacctctcctatgtacggataccaggatccttcaagaaatggagcctttcatcttccaagaccaaagaaggaaggaaggtggacggtgagagggtcttaaatccccagcctgtgagtctcagcctctttccagggaagcctcattctactgcttggggcttgctgaggttgagatatgagttatttctgagtaagtgaaggctgaaggcagtgctgagtcctttctgctagctgggtggtatcttttactgtgtttttttgtttgtttgtttttttgttttttgttacataaaccccttttattttgactga

SEQ ID NO: 435958 - DNA, 1672 bp, Homo sapiens
gcgtctccgttgccaggaaaacagagcggcgcgctttccggcgcagtcgcggcgcgtcgcagctgtcatggcggagaccgtctggagcactgacaccggggaggcagtgtatcgctcccgggaccccgtgcgcaacttgcgcctccgagtccacctgcaaagaatcacatcaagcaactttcttcattatcagcctgctgccgagctcgggaaggacctcatagacttggccacttttaggcctcagccaactgccagtggacaccgcccagaggaagacgaagaggaggagattgtgattgggtggcaggagaagctctttagccagtttgaagtagatctgtaccaaaatgaaacagcctgtcagagtcctttggattatcagtaccgtcaggagatcctgaagctggagaattcgggtggcaagaaaaaccgacgaatctttacctacactgactctgatagatacaccaatttggaggagcactgtcagagaatgaccactgcagccagcgaggtgccttcattcttggtcgagcgaatggcaaatgtcaggcgtcgccggcaggacaggcgagggatggagggcggcatcctcaagtcacgcatcgtcacctgggagccctcagaagagtttgtcaggaacaaccacgtcattaacacccctcttcagacaatgcacatcatggcagacctggggccctataaaaagcttggctataagaagtatgaacatgtcctgtgtactctgaaggtggatagcaatggtgtgatcacagtaaagcctgacttcacgggcctcaaaggaccctacaggattgagacggagggggagaagcaggagctgtggaaatatacgatcgacaatgtttccccccacgcacagccggaggaggaggagcgggaacggcgagtgttcaaggatctttatggccggcacaaggagtatctcagcagcctcgtaggcaccgactttgagatgactgtcccaggtgccctccggctctttgtaaatggagaggtcgtttcagcccaaggctatgagtatgacaatctctacgtccacttctttgtagaattgccaactgctcactggtcaagcccagcattccagcagctctcaggagtaacacagacctgcaccaccaagtccctggcaatggacaaggtggctcacttctcctacccattcacgtttgaagccttcttcctccatgaggatgaatcttctgatgcactcccggagtggcctgtgctctactgtgaggtcctctcgctggacttctggcagaggtaccgtgtggaaggctatggggctgtggtgctgcctgccactccaggtaaccgctcgtctctgcccttctgtggcccacatgccctaggccctaagaacaagactaacactcgaatgcttctggtgaggggtggagataattgggaattggaaatgtttggcttgaaagagttcctgttcctctgaggactttctgcccccctccattagcgacaatgacgtggccttggcactgacttcctgacagtctctccatgtgcttcatgctcctctgattggactcagggtgagaagctgtatggcaaaattggctcatagcatatgtgtattgaatgaatcagcattcagtttggaataaaagcatctgtcttttactgt

SEQ ID NO: 435959 - DNA, 788 bp, Homo sapiens
gcgtctccgttgccaggaaaacagagcggcgcgctttccggcgcagtcgcggcgcgtcgcagctgtcatggcggagaccgtctggagcactgacaccggggaggcagtgtatcgctcccgggaccccgtgcgcaacttgcgcctccgagtccacctgcaaagaatcacatcaagcaactttcttcattatcagcctgctgccgagctcgggaaggacctcatagacttggccacttttaggcctcagccaactgccagtggacaccgcccagaggaagacgaagaggaggagattgtgattgggtggcaggagaagctctttagccagtttgaagtagatctgtaccaaaatgaaacagcctgtcagagtcctttggattatcagtaccgtcaggagatcctgaagctggagaattcgggtggcaagaaaaaccgacgaatctttacctacactgactctgatagatacaccaatttggaggagcactgtcagagaatgaccactgcagccaaaatggagcctttcatcttccaagaccaaagaaggaaggaaggtggacggtgagagggtcttaaatccccagcctgtgagtctcagcctctttccagggaagcctcattctactgcttggggcttgctgaggttgagatatgagttatttctgagtaagtgaaggctgaaggcagtgctgagtcctttctgctagctgggtggtatcttttactgtgtttttttgtttgtttgtttttttgttttttgttacataaaccccttttattttgactga

SEQ ID NO: 435960 - DNA, 758 bp, Homo sapiens
gcgtctccgttgccaggaaaacagagcggcgcgctttccggcgcagtcgcggcgcgtcgcagctgtcatggcggagaccgtctggagcactgacaccggggaggcagtgtatcgctcccgggaccccgtgcgcaacttgcgcctccgagtccacctgcaaagaatcacatcaagcaactttcttcattatcagcctgctgccgagctcgggaaggacctcatagacttggccacttttaggcctcagccaactgccagtggacaccgcccagaggaagacgaagaggaggagattgtgattgggtggcaggagaagctctttagccagtttgaagtagatctgtaccaaaatgaaacagcctgtcagagtcctttggattatcagtaccgtcaggagatcctgaagctggagaattcgggtggcaagaaaaaccgacgaatctttacctacactgactctgatagatacaccaatttggaggaggtattgttctttctagggtctcatagcttccatctttgcttcctctagcttttttgcctcactgagttctgtgtgttatgtcagagcctagtaaggggagacaagtagcctgtctaggaactgctgtgagctgctgctgctggcagccagcctggaatagaatgggcacagtctacaggtggtgaggctgctgctcccttctctgcctgctagagggcctgggggagctgccagtatctctgattatatgcttgcagagtgcatactgggagaa

SEQ ID NO: 435961 - DNA, 684 bp, Homo sapiens
gttcccatcagaataactggctctttcccccatcactgaaggcctcagtaatcagatgtggggaggattcacagtaagcatataagaccgccgcttctcaaatgaggttggaatgttccctggtttagttgggggagcccaatagcccagtattagccttgaggtaatagagtctgggtgatggaataaggtttccccaacagaactgcgcttcccaagaatgggaataagaatgggggtgaggccagcatggtgcgggggtgtctagagagagcagaaacctgaggctgtcccaatggcatgccacagggggaacgcctgagccgctttggactccgcacagagaccacaggcactgtcaccttccgcttgcactgtctgcagcagtccaggtgagtgacttggccctctgcctcagggcaccttagccctgaggggtggagacagccgtaaccatgtggctggcctccctgcagggccttcatggaatcgagctcccttcagaaaaggatgcggagtgtgttggaccgtctggaagggttcagccagcagagttccattcacaatgtgctaggtatgtcccctcccccagctggccaccccaggtcagcatgggcctgtttctctctgcagtgcagagagaaataccatatggcagccaaatagcatatctcctttccttac

SEQ ID NO: 435962 - DNA, 2389 bp, Homo sapiens
gcgtctccgttgccaggaaaacagagcggcgcgctttccggcgcagtcgcggcgcgtcgcagctgtcatggcggagaccgtctggagcactgacaccggggaggcagtgtatcgctcccgggaccccgtgcgcaacttgcgcctccgagtccacctgcaaagaatcacatcaagcaactttcttcattatcagcctgctgccgagctcgggaaggacctcatagacttggccacttttaggcctcagccaactgccagtggacaccgcccagaggaagacgaagaggaggagattgtgattgggtggcaggagaagctctttagccagtttgaagtagatctgtaccaaaatgaaacagcctgtcagagtcctttggattatcagtaccgtcaggagatcctgaagctggagaattcgggtggcaagaaaaaccgacgaatctttacctacactgactctgatagatacaccaatttggaggagcactgtcagagaatgaccactgcagccagcgaggtgccttcattcttggtcgagcgaatggcaaatgtcaggcgtcgccggcaggacaggcgagggatggagggcggcatcctcaagtcacgcatcgtcacctgggagccctcagaagagtttgtcaggaacaaccacgtcattaacacccctcttcagacaatgcacatcatggcagacctggggccctataaaaagcttggctataagaagtatgaacatgtcctgtgtactctgaaggtggatagcaatggtgtgatcacagtaaagcctgacttcacgggcctcaaaggaccctacaggattgagacggagggggagaagcaggagctgtggaaatatacgatcgacaatgtttccccccacgcacagccggaggaggaggagcgggaacggcgagtgttcaaggatctttatggccggcacaaggagtatctcagcagcctcgtaggcaccgactttgagatgactgtcccaggtgccctccggctctttgtaaatggagaggtcgtttcagcccaaggctatgagtatgacaatctctacgtccacttctttgtagaattgccaactgctcactggtcaagcccagcattccagcagctctcaggagtaacacagacctgcaccaccaagtccctggcaatggacaaggtggctcacttctcctacccattcacgtttgaagccttcttcctccatgaggatgaatcttctgatgcactcccggagtggcctgtgctctactgtgaggtcctctcgctggacttctggcagaggtaccgtgtggaaggctatggggctgtggtgctgcctgccactccaggctcacacaccctgacagtctccacgtggagacctgtggagcttggcacggtggctgagctgaggaggtttttcattggcggttctctggaactggaggacctctcctatgtacggataccaggatccttcaagggggaacgcctgagccgctttggactccgcacagagaccacaggcactgtcaccttccgcttgcactgtctgcagcagtccagggccttcatggaatcgagctcccttcagaaaaggatgcggagtgtgttggaccgtctggaagggttcagccagcagagttccattcacaatgtgctagaggccttccgtcgagcccggcgccgcatgcaggaggcccgggaaagcctcccgcaggacctagtgagcccctctggaaccctggtctcctagctcacagcagccctggcccacagtgcaagaggacaagatgggggatatctgaggccagtgctctcctgcctcttcgtctttctgattagagaccacgttggtctgctgagaaccagaaaagctgggaaattcccggctggcccctctgcctagccttctgcagggtcttctccctaccctgtggaaataaagccagagaccctgtggccccccctttatatttgcagccactgtcaatgggcatcacagcaaggcaggctttttgatctgaagctgtttggggtgaccccatagtgagtctggccttgactcacttttctggcttgtctcacagtagcaggggatctgctgttctccaccctttaaaaatggagcctttcatcttccaagaccaaagaaggaaggaaggtggacggtgagagggtcttaaatccccagcctgtgagtctcagcctctttccagggaagcctcattctactgcttggggcttgctgaggttgagatatgagttatttctgagtaagtgaaggctgaaggcagtgctgagtcctttctgctagctgggtggtatcttttactgtgtttttttgtttgtttgtttttttgttttttgttacataaaccccttttattttgactga

SEQ ID NO: 435963 - DNA, 2291 bp, Homo sapiens
gcgtctccgttgccaggaaaacagagcggcgcgctttccggcgcagtcgcggcgcgtcgcagctgtcatggcggagaccgtctggagcactgacaccggggaggcagtgtatcgctcccgggaccccgtgcgcaacttgcgcctccgagtccacctgcaaagaatcacatcaagcaactttcttcattatcagcctgctgccgagctcgggaaggacctcatagacttggccacttttaggcctcagccaactgccagtggacaccgcccagaggaagacgaagaggaggagattgtgattgggtggcaggagaagctctttagccagtttgaagtagatctgtaccaaaatgaaacagcctgtcagagtcctttggattatcagtaccgtcaggagatcctgaagctggagaattcgggtggcaagaaaaaccgacgaatctttacctacactgactctgatagatacaccaatttggaggagggagggcggcatcctcaagtcacgcatcgtcacctgggagccctcagaagagtttgtcaggaacaaccacgtcattaacacccctcttcagacaatgcacatcatggcagacctggggccctataaaaagcttggctataagaagtatgaacatgtcctgtgtactctgaaggtggatagcaatggtgtgatcacagtaaagcctgacttcacgggcctcaaaggaccctacaggattgagacggagggggagaagcaggagctgtggaaatatacgatcgacaatgtttccccccacgcacagccggaggaggaggagcgggaacggcgagtgttcaaggatctttatggccggcacaaggagtatctcagcagcctcgtaggcaccgactttgagatgactgtcccaggtgccctccggctctttgtaaatggagaggtcgtttcagcccaaggctatgagtatgacaatctctacgtccacttctttgtagaattgccaactgctcactggtcaagcccagcattccagcagctctcaggagtaacacagacctgcaccaccaagtccctggcaatggacaaggtggctcacttctcctacccattcacgtttgaagccttcttcctccatgaggatgaatcttctgatgcactcccggagtggcctgtgctctactgtgaggtcctctcgctggacttctggcagaggtaccgtgtggaaggctatggggctgtggtgctgcctgccactccaggctcacacaccctgacagtctccacgtggagacctgtggagcttggcacggtggctgagctgaggaggtttttcattggcggttctctggaactggaggacctctcctatgtacggataccaggatccttcaagggggaacgcctgagccgctttggactccgcacagagaccacaggcactgtcaccttccgcttgcactgtctgcagcagtccagggccttcatggaatcgagctcccttcagaaaaggatgcggagtgtgttggaccgtctggaagggttcagccagcagagttccattcacaatgtgctagaggccttccgtcgagcccggcgccgcatgcaggaggcccgggaaagcctcccgcaggacctagtgagcccctctggaaccctggtctcctagctcacagcagccctggcccacagtgcaagaggacaagatgggggatatctgaggccagtgctctcctgcctcttcgtctttctgattagagaccacgttggtctgctgagaaccagaaaagctgggaaattcccggctggcccctctgcctagccttctgcagggtcttctccctaccctgtggaaataaagccagagaccctgtggccccccctttatatttgcagccactgtcaatgggcatcacagcaaggcaggctttttgatctgaagctgtttggggtgaccccatagtgagtctggccttgactcacttttctggcttgtctcacagtagcaggggatctgctgttctccaccctttaaaaatggagcctttcatcttccaagaccaaagaaggaaggaaggtggacggtgagagggtcttaaatccccagcctgtgagtctcagcctctttccagggaagcctcattctactgcttggggcttgctgaggttgagatatgagttatttctgagtaagtgaaggctgaaggcagtgctgagtcctttctgctagctgggtggtatcttttactgtgtttttttgtttgtttgtttttttgttttttgttacataaaccccttttattttgactga

SEQ ID NO: 435964 - DNA, 1748 bp, Homo sapiens
gcgtctccgttgccaggaaaacagagcggcgcgctttccggcgcagtcgcggcgcgtcgcagctgtcatggcggagaccgtctggagcactgacaccggggaggcagtgtatcgctcccgggaccccgtgcgcaacttgcgcctccgagtccacctgcaaagaatcacatcaagcaactttcttcattatcagcctgctgccgagctcgggaaggacctcatagacttggccacttttaggcctcagccaactgccagtggacaccgcccagaggaagacgaagaggaggagattgtgattgggtggcaggagaagctctttagccagtttgaagtagatctgtaccaaaatgaaacagcctgtcagagtcctttggattatcagtaccgtcaggagatcctgaagctggagaattcgggtggcaagaaaaaccgacgaatctttacctacactgactctgatagatacaccaatttggaggagcactgtcagagaatgaccactgcagccagcgaggtgccttcattcttggtcgagcgaatggcaaatgtcaggcgtcgccggcaggacaggcgagggatggagggcggcatcctcaagtcacgcatcgtcacctgggagccctcagaagagtttgtcaggaacaaccacgtcattaacacccctcttcagacaatgcacatcatggcagacctggggccctataaaaagcttggctataagaagtatgaacatgtcctgtgtactctgaaggtggatagcaatggtgtgatcacagtaaagcctgacttcacgggcctcaaaggaccctacaggattgagacggagggggagaagcaggagctgtggaaatatacgatcgacaatgtttccccccacgcacagccggaggaggaggagcgggaacggcgagtgttcaaggatctttatggccggcacaaggagtatctcagcagcctcgtaggcaccgactttgagatgactgtcccaggtgccctccggctctttgtaaatggagaggtcgtttcagcccaaggctatgagtatgacaatctctacgtccacttctttgtagaattgccaactgctcactggtcaagcccagcattccagcagctctcaggagtaacacagacctgcaccaccaagtccctggcaatgataaccttgtcattggccacaaggagaacagattccaagggaggccttgcccaccctatgacactcctttttataggacaaggtggctcacttctcctacccattcacgtttgaagccttcttcctccatgaggatgaatcttctgatgcactcccggagtggcctgtgctctactgtgaggtcctctcgctggacttctggcagaggtaccgtgtggaaggctatggggctgtggtgctgcctgccactccaggtaaccgctcgtctctgcccttctgtggcccacatgccctaggccctaagaacaagactaacactcgaatgcttctggtgaggggtggagataattgggaattggaaatgtttggcttgaaagagttcctgttcctctgaggactttctgcccccctccattagcgacaatgacgtggccttggcactgacttcctgacagtctctccatgtgcttcatgctcctctgattggactcagggtgagaagctgtatggcaaaattggctcatagcatatgtgtattgaatgaatcagcattcagtttggaataaaagcatctgtcttttactgt

SEQ ID NO: 435965 - DNA, 1508 bp, Homo sapiens
gcgtctccgttgccaggaaaacagagcggcgcgctttccggcgcagtcgcggcgcgtcgcagctgtcatggcggagaccgtctggagcactgacaccggggaggcagtgtatcgctcccgggaccccgtgcgcaacttgcgcctccgagtccacctgcaaagaatcacatcaagcaactttcttcattatcagcctgctgccgagctcgggaaggacctcatagacttggccacttttaggcctcagccaactgccagtggacaccgcccagaggaagacgaagaggaggagattgtgattgggtggcaggagaagctctttagccagtttgaagtagatctgtaccaaaatgaaacagcctgtcagagtcctttggattatcagtaccgtcaggagatcctgaagctggagaattcgggtggcaagaaaaaccgacgaatctttacctacactgactctgatagatacaccaatttggaggagcactgtcagagaatgaccactgcagccagcgaggtgccttcattcttggtcgagcgaatggcaaatgtcaggcgtcgccggcaggacaggcgagggatggagggcggcatcctcaagtcacgcatcgtcacctgggagccctcagaagagtttgtcaggaacaaccacgtcattaacacccctcttcagacaatgcacatcatggcagacctggggccctataaaaagcttggctataagaagtatgaacatgtcctgtgtactctgaaggtggatagcaatggtgtgatcacagtaaagcctgacttcacgggcctcaaaggaccctacaggattgagacggagggggagaagcaggagctgtggaaatatacgatcgacaatgtttccccccacgcacagccggaggaggaggagcgggaacggcgagtgttcaaggatctttatggccggcacaaggagtatctcagcagcctcgtaggcaccgactttgagatgactgtcccaggtgccctccggctctttgtaaatggagaggtcgtttcagcccaaggctatgagtatgacaatctctacgtccacttctttgtagaattgccaactgctcactggtcaagcccagcattccagcagctctcaggagtaacacagacctgcaccaccaagtccctggcaatggacaaggtggctcacttctcctacccattcacgtttgaagccttcttcctccatgaggatgaatcttctgatgcactcccggagtggcctgtgctctactgtgaggtcctctcgctggacttctggcagaggtaccgtgtggaaggctatggggctgtggtgctgcctgccactccagcgacaatgacgtggccttggcactgacttcctgacagtctctccatgtgcttcatgctcctctgattggactcagggtgagaagctgtatggcaaaattggctcatagcatatgtgtattgaatgaatcagcattcagtttggaataaaagcatctgtcttttactgt

SEQ ID NO: 435966 - DNA, 2667 bp, Homo sapiens
ggcggcgaggggtcaatccgcgccgggggtggggttggctgtgaggccgtcggaggtggttgggtgggaggagatccgctcacacacacgaggaggagggttgagctgctgccgccgccgcctctgtcgtcgtcgcgagtgtggagtcgggactggagctgctgccgcggcgacgccggggatctttgtcgctagctcccggcccttctgccccgccgccttccctcagtcagcgttgcccactcctctccggccgggcgcccctgcctccatttctcgctctctgtccaccacacacacggcccccccgatcatggatccgggcagtggcggcggcggcggcggcggcggcggcggcgggagcagcagcggcagcagcagcagcgactcggcgcctgactgctgggaccaggcggacatggaagcccccgggccgggcccttgcggcggcggcggctccctggcggcggcggccgaggcccagcgggagaacctcagcgcggccttcagccggcaactcaacgtcaacgccaagcccttcgtgcccaacgtccacgccgccgagttcgtgccgtccttcctgcggtgcccggcagcgccgccacccccagctggcggcgccgccaataaccacggagccggcagcggcgcgggaggccgtgcggcacctgtggaatcctctcaagaggaacagtcattgtgtgaaggttcaaattcagctgttagcatggaactttcagaacctattgtagaaaatggagagacagaaatgtctccagaagaatcatgggagcacaaagaagaaataagtgaagcagagccagggggtggttccttgggagatggaaggccgccagaggaaagtgcccatgaaatgatggaggaggaagaggaaatcccaaaacctaagtctgtggttgcaccgccaggtgctcctaagaaagagcatgtaaatgtagtattcattgggcacgtagatgctggcaagtcaaccattggaggacaaataatgtatttgactggaatggttgacaaaaggacgcttgaaaagtatgaaagagaagctaaagagaaaaacagagaaacttggtacttgtcttgggccttagacacaaatcaggaagaacgagacaagggtaaaacagtagaagtgggtcgtgcctattttgaaaccgaaaagaagcatttcacaattctagatgcccctggccacaagagttttgtcccaaatatgattggtggtgcctctcaagctgatttggctgtgctggtaatctcagccaggaaaggagagtttgaaactggatttgaaaaaggaggacagacaagagaacatgcaatgttggcaaagacagcaggtgtaaaacacctaattgtgctaattaataagatggatgatccaacagtaaattggagcaatgagagatatgaagaatgtaaggagaaactagtgccatttttgaaaaaagttggcttcaatcccaaaaaggacattcactttatgccctgctcaggacttactggagcaaatctcaaagagcagtcggatttctgtccttggtacattggattaccgtttattccatatctggataatttgccgaacttcaatagatcagttgatggaccaatcaggctgccaattgtggataagtacaaggatatgggcactgtggtcctgggaaagctggaatcaggatctatttgtaaaggccagcagcttgtgatgatgccaaacaagcacaacgtggaagttcttggaatactttccgatgatgtagagactgataccgtagccccaggtgaaaacctcaaaatcagactgaaaggaattgaagaagaggagattcttccagggtttatactttgtgatcctaataatctttgtcattctggacgcacatttgatgcccagatagtgattatagagcacaaatccatcatctgcccaggctataatgcggtgctgcatattcatacctgtattgaggaggtggaaataacagccttaatctgcttggtagacaaaaaatcaggagaaaaaagtaagacccgaccccgttttgtgaaacaagatcaagtatgcattgctcgcttaaggacagcaggaaccatctgccttgagacctttaaagacttccctcagatgggtcgtttcaccttaagagatgagggtaagaccattgcaattggaaaagttctgaaactggttccagagaaagactaagcattttcttgatgaccctgcacaatactgtgaggaaaattgactgcagaagcctacttcacaccgccttctcttattttctgcccattgataaacctctccccatattttgcaaagaggaaattcacagcaaaagtccacattatgtcagctttctcatattgagagctctgctatgccactgttgaatttttcccaagattcctgtccctagccctcacttcaaactctgcttccttggacagatttggcaatagctttgtaagtgatgtggacataattgcctacaataatgaaaacctacaggaatttttttatttttcattttccccttaggcatatttagtatttttcccccaggcagatcattctgagtgtgcgagtgtgtgtgcacatgttacaaaggcaactaccatgttaataaaatattcaatttgaaa

SEQ ID NO: 435967 - DNA, 722 bp, Homo sapiens
ggattacaggcggccgccaccacgcctagctaatttttgtatttttagcagagacggggtttcaccatgttggccaggctggtctcgaactcctgacctgaggtcatccgccctcgctggcctcccaaagtgctggaattacaggcgtgagccaccgagcccagccttgaggctcattttcaaaaggagaagggtaatgaactaggatttatgccccaaattcatatggaagatttaattatgtatgttaaagggtgctgttgtttgcatatttagccattggtttttggttttaacctatggtttgcatgttgatgttacttttagatgctggcaagtcaaccattggaggacaaataatgtatttgactggaatggttgacaaaaggacgcttgaaaagtatgaaagagaagctaaagagaaaaacagagaaacttggtatagtaaacttttatgacacttataaattacttttaaggagacgatgcccacttagtgcttttggagcctgttaaaatataaattgttgaagtctaaaatcgtatcacaacaaaggaaatttcccctctcctcataatacacagtagatgagttcctaatgctttaataacttacacagggaaatttggaaacaatccatatatctggtgatagacttgttgaaaatactataaaccatccatttaattgggtgattttgcaaccactgaaaacttacatt

SEQ ID NO: 435968 - DNA, 795 bp, Homo sapiens
ggcggcgaggggtcaatccgcgccgggggtggggttggctgtgaggccgtcggaggtggttgggtgggaggagatccgctcacacacacgaggaggagggttgagctgctgccgccgccgcctctgtcgtcgtcgcgacacctgtggaatcctctcaagaggaacagtcattgtgtgaaggttcaaattcagctgttagcatggaactttcagaacctattgtagaaaatggagagacagaaatgtctccagaagaatcatgggagcacaaagaagaaataagtgaagcagagccagggggtggttccttgggagatggaaggccgccagaggaaagtgcccatgaaatgatggaggaggaagaggaaatcccaaaacctaagtctgtggttgcaccgccaggtgctcctaagaaagagcatgtaaatgtagtattcattgggcacgtagatgctggcaagtcaaccattggaggacaaataatgtatttgactggaatggttgacaaaaggacgcttgaaaagtatgaaagagaagctaaaaaaaacacataccaacaccccacaagaaaacacggttggggcgccctaggccctcgagaaaggttcaaaaaccaatctctggtggcggcccgggccccagatgtgaagtaacactggccaacgttggccgaaaggagcccgcgcactgcaaaggcgcgggctcccccaaaaaaaccgcggggacccagccgtctgacacaccagaggggccgcgccaagcggctaaaagggccaggagcgaaaacgcgcgcgg

SEQ ID NO: 435969 - DNA, 7436 bp, Homo sapiens
ggcggcgaggggtcaatccgcgccgggggtggggttggctgtgaggccgtcggaggtggttgggtgggaggagatccgctcacacacacgaggaggagggttgagctgctgccgccgccgcctctgtcgtcgtcgcgagtgtggagtcgggactggagctgctgccgcggcgacgccggggatctttgtcgctagctcccggcccttctgccccgccgccttccctcagtcagcgttgcccactcctctccggccgggcgcccctgcctccatttctcgctctctgtccaccacacacacggcccccccgatcatggatccgggcagtggcggcggcggcggcggcggcggcggcggcgggagcagcagcggcagcagcagcagcgactcggcgcctgactgctgggaccaggcggacatggaagcccccgggccgggcccttgcggcggcggcggctccctggcggcggcggccgaggcccagcgggagaacctcagcgcggccttcagccggcaactcaacgtcaacgccaagcccttcgtgcccaacgtccacgccgccgagttcgtgccgtccttcctgcggtgcccggcagcgccgccacccccagctggcggcgccgccaataaccacggagccggcagcggcgcgggaggccgtgcggcacctgtggaatcctctcaagaggaacagtcattgtgtgaaggttcaaattcagctgttagcatggaactttcagaacctattgtagaaaatggagagacagaaatgtctccagaagaatcatgggagcacaaagaagaaataagtgaagcagagccagggggtggttccttgggagatggaaggccgccagaggaaagtgcccatgaaatgatggaggaggaagaggaaatcccaaaacctaagtctgtggttgcaccgccaggtgctcctaagaaagagcatgtaaatgtagtattcattgggcacgtagatgctggcaagtcaaccattggaggacaaataatgtatttgactggaatggttgacaaaaggacgcttgaaaagtatgaaagagaagctaaagagaaaaacagagaaacttggtacttgtcttgggccttagacacaaatcaggaagaacgagacaagggtaaaacagtagaagtgggtcgtgcctattttgaaaccgaaaagaagcatttcacaattctagatgcccctggccacaagagttttgtcccaaatatgattggtggtgcctctcaagctgatttggctgtgctggtaatctcagccaggaaaggagagtttgaaactggatttgaaaaaggaggacagacaagagaacatgcaatgttggcaaagacagcaggtgtaaaacacctaattgtgctaattaataagatggatgatccaacagtaaattggagcaatgagagatatgaagaatgtaaggagaaactagtgccatttttgaaaaaagttggcttcaatcccaaaaaggacattcactttatgccctgctcaggacttactggagcaaatctcaaagagcagtcggatttctgtccttggtacattggattaccgtttattccatatctggataatttgccgaacttcaatagatcagttgatggaccaatcaggctgccaattgtggataagtacaaggatatgggcactgtggtcctgggaaagctggaatcaggatctatttgtaaaggccagcagcttgtgatgatgccaaacaagcacaacgtggaagttcttggaatactttccgatgatgtagagactgataccgtagccccaggtgaaaacctcaaaatcagactgaaaggaattgaagaagaggagattcttccagggtttatactttgtgatcctaataatctttgtcattctggacgcacatttgatgcccagatagtgattatagagcacaaatccatcatctgcccaggctataatgcggtgctgcatattcatacctgtattgaggaggtggaaataacagccttaatctgcttggtagacaaaaaatcaggagaaaaaagtaagacccgaccccgttttgtgaaacaagatcaagtatgcattgctcgcttaaggacagcaggaaccatctgccttgagacctttaaagacttccctcagatgggtcgtttcaccttaagagatgagggtaagaccattgcaattggaaaagttctgaaactggttccagagaaagactaagcattttcttgatgaccctgcacaatactgtgaggaaaattgactgcagaagcctacttcacaccgccttctcttattttctgcccattgataaacctctccccatattttgcaaagaggaaattcacagcaaaagtccacattatgtcagctttctcatattgagagctctgctatgccactgttgaatttttcccaagattcctgtccctagccctcacttcaaactctgcttccttggacagatttggcaatagctttgtaagtgatgtggacataattgcctacaataatgaaaacctacaggaatttttttatttttcattttccccttaggcatatttagtatttttcccccaggcagatcattctgagtgtgcgagtgtgtgtgcacatgttacaaaggcaactaccatgttaataaaatattcaatttgaaatccttttcggtatttgaattgcttttgaataatgttttttatctggatgtaacattgttgcattagctttttaactttcccaagtaattgaatacattttattacttggacttttataaactctttccctacccactataaatgagacattcacagcgttcaagtttgtattaaaggaaaggattagtttgaccccttcttttgatggttaatgcatacatgcagttaaatccctttatgcaaatgtgacactgctttactaggtcttttagttatttatttattttttttttttttgccaatttatattgtaacatgatttcttgaacacagtaagttgttttaaaataaaagaacagcatactgtagtttttataagtaaagcgtaatgaaattgtacccctagagaaaattccattaacttgttaaattagtggaattaacaacaaataaagcatgtttgagacctggaaaaaattcctctggtagtatttataaatagagctgcatgcctctagtatgaaaaccgtatcagttgcaagtgccacttctacaagttactcagtttactctttgtatcagtaactttaaaggttggatgatccttgctggttaaagctaaatctcaacctagcaactaaatgaaaatatttagaatcatcagaatctgaacagactaaaattatcagcgataagcagaatcaagcagggtataagttttatctcaattatttgaaattgactgagttttcttaagtgtaaagctgaaatttgctaaccatgtttttgatgaaccacagtgcagcattgtgtgggttttagattgaatgactctctgctataattatcatgactttgaaatttttcatgagaataaatgaggaatggaggcaatttgtgggtttatccaaagcccccttgatgttgagtgttgccattgatcaaagatagcctcttttagattgtgatttctctctaaataagatactttgtatatttaatgacaagtctcttccctataattttgctcctcagaaaagaaaagcctagacagactgtatttccagtcacagaacataaaacttaatctaatgggtgttttgttttgttttgagacagaggctcactctgtcacctaggctggagtgcagtggctcgatctcagctcactgcagcctccacctcccggattcaagcaatttcctgcctcagcctcttgagtagctgggattacaggagccctccacgaggcccagttaatttttgtatctttagtggagacgaggtttccccctattggtcaggctggtctcaaacttctgacctcaagtgatccactcgcctcagcctctcaaaagtgctgggattacaggcatgaggcgccgcacttggcctagtgttttcttaactgtgaaattcccattcatttcttgaatgaggctacatcttatggacagagcaaagttattgtcctacagattcttaaaactataattatggctattgcatgaaatttaaatagattttattatgtctgcaaatctctgggcttttatttttctggaaaatataggagctttaatcaaaacataatagttctttttgtaattccatgttaataaaaacaaatactagcaattgcttgaattttaatgaatatttaaaagttcaagagccacggaaatcacttccagagataagagttccctttctaaatagaacacatttttaaaaaataagttatgtttgctactaaaacatttacactgttagactattatgtgcatgttgccaagactcttaagtaacttggatatcaactgtgaagggcctacctctaaaaagtaacaggtcatacaaatacaaatgtaactgtaaaaattccactggattcttgcatatttgcaagattagattattcaaaagaaatttcagtgctaaaattaaccagcaacataagttctatgggctttgaaaattgttctcatctttttaaagttgatgcattttcaatcctgcttacacaggctgttcatttggataagtaaataaaatgtctaaggtgaacttggcattatgtggagatgttggaccgttatagagcaatacaaattcctatgctgtcattctgttttctgcaaatgcaaacgtgcttatatggtcaacagtgcaaaaatagggtagttggctgcatatttagggtattacctaagcatttgttctctaacgttgctctactagaatgatttttttcttgcatcttttcacattaatgatgttctttatataactttcatgcgattatttagttttttaaattaataaagtgaatttaagaaatattgaaataaacatctaagtaattgccattttaaacccttgtttcttactgtgggagagggggaaatacagcactcatttcttgtttttaatttgcagaagtaagtgaaaatctatgtaaaatcaaaccaaaagagttggactgagtgtgtattgtcttgagattaagtgacaaatagtaaagtgttactgagtaattaagcccatgtatttttttttttgtgagttgaaaatctttgaaatatgtgataaccgaatgtcaaaagttcctaaactctaacagtgcaggttgttcactgtaacgaggtaactcatatttgctggttacataaactacaagtactgctctcacaatatgggactttgaactgtgatgtagttcaacagttgccggcatcctctcagctgatacgctgcgaatattttgggttagacttgcagccagatgcagttttgcaacccaagaaaaaagttgaacctatgatcaaaaactgctcccaagatgaacctgggaaaaaaatcagctaagctcccttggcgatctgcaggaacactagtaatgactggaattactccgtgatctttgatgactattacacataacagcactctagcaccttttcttactggcatggacttcctcatggactgctacttcatggatgatagcttcattgctttgggtagggatttaaggtagtcaaggggaaaatacgcagttttattacaggtcttaacatcaggcaactttcaactttaaaaccctttgtgaaaaatgtggttatagcactatagctctgattttaggatggttaaatgttatattcattgttggcttaccttatcaaactgtgccattaatcctttcacagacataggtaaggaagagaacaaccagtggattcaggggacaattatctatctccaaataataggcttttatttcttgcagctaactttttcagtgattctagcagatgccatctagtacatccttgatcttgtttctttcgtgagagatctcgccatggcagcatcttgttaagtaagtgtaattgcacatgcacaaaagacttaactagctttacatttagcagtcagttggttagattaggtttcatagtaaatgaataggaatagaaagaataggaagtgtttttattttccagtagtaattccgtggattccatttgacccagtttactatcagttcagttcaggtagatttggttcaacttttggtggtttttggctctaggatattcttgactttaatatcctagaacttactgagtcttcccttcaataaatacacttctcacatacctctaatcctatgcttccttgaaacaataatgctagctgagttgtttactaaggattattataagggcctgaaggtgtgggagtggagattaattaaaacctttatgttctccaatataagggaaaagcaggttggtactacttctgattaggcagaaaacaccaggattccttaagtgatccttgaaatggttattgttttctgccttgtcacatttgccactgtgccctttaaaacgatgtggaaacctcaggtttgtggacagcacaggtggaatgacatcttgtgcttcctgaggctcccctctaccaggcacattagcttagtgcttcagatgtcagcccaagtccttgttacctccttttcctgctgcccagggaagagtgtgtgtgctggagctggagcgcttgcactcttcaggtgactattctcacctccatttcctccacatgcattaggtgaaactgaggtctaagcctcctgcaaggtctacattttaaggactcacacatcaggctctcagaaatgtacacaggtattagttctgtttgttctaaaggaaatgtgggtatctctcaggccaggacttagtgactagttttcgctagacagcaggttaatacctagatctcatttaaaaaaaaaaaaaaaaaaacaggattaaagggaactgatcaggtttgttgagttttttagcctaattccaaagcatggaagagtgctctaggtaggaaagaaagctttttcttacgatttgtagctacctactgtgcctgacttggtgcctgtgtgaggattaagcccttagtctgctcttgcaattattcaaatgacaaattaaatttgcttttgtaataacaataaaagttgtcatcttcccttttgaaggatttgtcgtttgtaattacctgtgttgtaacaagcaaaaaccatgcccttttttgtacaatccttttatttttgtatcaggtactggaaccatctaccaaaaggtttgttggatggatctaataagctctgtcacataagggattcacaaacgtcatctgcttgcatatggcatgcaagtcttttgtataatgtaacaacaaccttaggaaac

SEQ ID NO: 435970 - DNA, 7275 bp, Homo sapiens
ggcggcgaggggtcaatccgcgccgggggtggggttggctgtgaggccgtcggaggtggttgggtgggaggagatccgctcacacacacgaggaggagggttgagctgctgccgccgccgcctctgtcgtcgtcgcgagtgtggagtcgggactggagctgctgccgcggcgacgccggggatctttgtcgctagctcccggcccttctgccccgccgccttccctcagtcagcgttgcccactcctctccggccgggcgcccctgcctccatttctcgctctctgtccaccacacacacggcccccccgatcatggatccgggcagtggcggcggcggcggcggcggcggcggcggcgggagcagcagcggcagcagcagcagcgactcggcgcctgactgctgggaccaggcggacatggaagcccccggcagcgccgccacccccagctggcggcgccgccaataaccacggagccggcagcggcgcgggaggccgtgcggcacctgtggaatcctctcaagaggaacagtcattgtgtgaaggttcaaattcagctgttagcatggaactttcagaacctattgtagaaaatggagagacagaaatgtctccagaagaatcatgggagcacaaagaagaaataagtgaagcagagccagggggtggttccttgggagatggaaggccgccagaggaaagtgcccatgaaatgatggaggaggaagaggaaatcccaaaacctaagtctgtggttgcaccgccaggtgctcctaagaaagagcatgtaaatgtagtattcattgggcacgtagatgctggcaagtcaaccattggaggacaaataatgtatttgactggaatggttgacaaaaggacgcttgaaaagtatgaaagagaagctaaagagaaaaacagagaaacttggtacttgtcttgggccttagacacaaatcaggaagaacgagacaagggtaaaacagtagaagtgggtcgtgcctattttgaaaccgaaaagaagcatttcacaattctagatgcccctggccacaagagttttgtcccaaatatgattggtggtgcctctcaagctgatttggctgtgctggtaatctcagccaggaaaggagagtttgaaactggatttgaaaaaggaggacagacaagagaacatgcaatgttggcaaagacagcaggtgtaaaacacctaattgtgctaattaataagatggatgatccaacagtaaattggagcaatgagagatatgaagaatgtaaggagaaactagtgccatttttgaaaaaagttggcttcaatcccaaaaaggacattcactttatgccctgctcaggacttactggagcaaatctcaaagagcagtcggatttctgtccttggtacattggattaccgtttattccatatctggataatttgccgaacttcaatagatcagttgatggaccaatcaggctgccaattgtggataagtacaaggatatgggcactgtggtcctgggaaagctggaatcaggatctatttgtaaaggccagcagcttgtgatgatgccaaacaagcacaacgtggaagttcttggaatactttccgatgatgtagagactgataccgtagccccaggtgaaaacctcaaaatcagactgaaaggaattgaagaagaggagattcttccagggtttatactttgtgatcctaataatctttgtcattctggacgcacatttgatgcccagatagtgattatagagcacaaatccatcatctgcccaggctataatgcggtgctgcatattcatacctgtattgaggaggtggaaataacagccttaatctgcttggtagacaaaaaatcaggagaaaaaagtaagacccgaccccgttttgtgaaacaagatcaagtatgcattgctcgcttaaggacagcaggaaccatctgccttgagacctttaaagacttccctcagatgggtcgtttcaccttaagagatgagggtaagaccattgcaattggaaaagttctgaaactggttccagagaaagactaagcattttcttgatgaccctgcacaatactgtgaggaaaattgactgcagaagcctacttcacaccgccttctcttattttctgcccattgataaacctctccccatattttgcaaagaggaaattcacagcaaaagtccacattatgtcagctttctcatattgagagctctgctatgccactgttgaatttttcccaagattcctgtccctagccctcacttcaaactctgcttccttggacagatttggcaatagctttgtaagtgatgtggacataattgcctacaataatgaaaacctacaggaatttttttatttttcattttccccttaggcatatttagtatttttcccccaggcagatcattctgagtgtgcgagtgtgtgtgcacatgttacaaaggcaactaccatgttaataaaatattcaatttgaaatccttttcggtatttgaattgcttttgaataatgttttttatctggatgtaacattgttgcattagctttttaactttcccaagtaattgaatacattttattacttggacttttataaactctttccctacccactataaatgagacattcacagcgttcaagtttgtattaaaggaaaggattagtttgaccccttcttttgatggttaatgcatacatgcagttaaatccctttatgcaaatgtgacactgctttactaggtcttttagttatttatttattttttttttttttgccaatttatattgtaacatgatttcttgaacacagtaagttgttttaaaataaaagaacagcatactgtagtttttataagtaaagcgtaatgaaattgtacccctagagaaaattccattaacttgttaaattagtggaattaacaacaaataaagcatgtttgagacctggaaaaaattcctctggtagtatttataaatagagctgcatgcctctagtatgaaaaccgtatcagttgcaagtgccacttctacaagttactcagtttactctttgtatcagtaactttaaaggttggatgatccttgctggttaaagctaaatctcaacctagcaactaaatgaaaatatttagaatcatcagaatctgaacagactaaaattatcagcgataagcagaatcaagcagggtataagttttatctcaattatttgaaattgactgagttttcttaagtgtaaagctgaaatttgctaaccatgtttttgatgaaccacagtgcagcattgtgtgggttttagattgaatgactctctgctataattatcatgactttgaaatttttcatgagaataaatgaggaatggaggcaatttgtgggtttatccaaagcccccttgatgttgagtgttgccattgatcaaagatagcctcttttagattgtgatttctctctaaataagatactttgtatatttaatgacaagtctcttccctataattttgctcctcagaaaagaaaagcctagacagactgtatttccagtcacagaacataaaacttaatctaatgggtgttttgttttgttttgagacagaggctcactctgtcacctaggctggagtgcagtggctcgatctcagctcactgcagcctccacctcccggattcaagcaatttcctgcctcagcctcttgagtagctgggattacaggagccctccacgaggcccagttaatttttgtatctttagtggagacgaggtttccccctattggtcaggctggtctcaaacttctgacctcaagtgatccactcgcctcagcctctcaaaagtgctgggattacaggcatgaggcgccgcacttggcctagtgttttcttaactgtgaaattcccattcatttcttgaatgaggctacatcttatggacagagcaaagttattgtcctacagattcttaaaactataattatggctattgcatgaaatttaaatagattttattatgtctgcaaatctctgggcttttatttttctggaaaatataggagctttaatcaaaacataatagttctttttgtaattccatgttaataaaaacaaatactagcaattgcttgaattttaatgaatatttaaaagttcaagagccacggaaatcacttccagagataagagttccctttctaaatagaacacatttttaaaaaataagttatgtttgctactaaaacatttacactgttagactattatgtgcatgttgccaagactcttaagtaacttggatatcaactgtgaagggcctacctctaaaaagtaacaggtcatacaaatacaaatgtaactgtaaaaattccactggattcttgcatatttgcaagattagattattcaaaagaaatttcagtgctaaaattaaccagcaacataagttctatgggctttgaaaattgttctcatctttttaaagttgatgcattttcaatcctgcttacacaggctgttcatttggataagtaaataaaatgtctaaggtgaacttggcattatgtggagatgttggaccgttatagagcaatacaaattcctatgctgtcattctgttttctgcaaatgcaaacgtgcttatatggtcaacagtgcaaaaatagggtagttggctgcatatttagggtattacctaagcatttgttctctaacgttgctctactagaatgatttttttcttgcatcttttcacattaatgatgttctttatataactttcatgcgattatttagttttttaaattaataaagtgaatttaagaaatattgaaataaacatctaagtaattgccattttaaacccttgtttcttactgtgggagagggggaaatacagcactcatttcttgtttttaatttgcagaagtaagtgaaaatctatgtaaaatcaaaccaaaagagttggactgagtgtgtattgtcttgagattaagtgacaaatagtaaagtgttactgagtaattaagcccatgtatttttttttttgtgagttgaaaatctttgaaatatgtgataaccgaatgtcaaaagttcctaaactctaacagtgcaggttgttcactgtaacgaggtaactcatatttgctggttacataaactacaagtactgctctcacaatatgggactttgaactgtgatgtagttcaacagttgccggcatcctctcagctgatacgctgcgaatattttgggttagacttgcagccagatgcagttttgcaacccaagaaaaaagttgaacctatgatcaaaaactgctcccaagatgaacctgggaaaaaaatcagctaagctcccttggcgatctgcaggaacactagtaatgactggaattactccgtgatctttgatgactattacacataacagcactctagcaccttttcttactggcatggacttcctcatggactgctacttcatggatgatagcttcattgctttgggtagggatttaaggtagtcaaggggaaaatacgcagttttattacaggtcttaacatcaggcaactttcaactttaaaaccctttgtgaaaaatgtggttatagcactatagctctgattttaggatggttaaatgttatattcattgttggcttaccttatcaaactgtgccattaatcctttcacagacataggtaaggaagagaacaaccagtggattcaggggacaattatctatctccaaataataggcttttatttcttgcagctaactttttcagtgattctagcagatgccatctagtacatccttgatcttgtttctttcgtgagagatctcgccatggcagcatcttgttaagtaagtgtaattgcacatgcacaaaagacttaactagctttacatttagcagtcagttggttagattaggtttcatagtaaatgaataggaatagaaagaataggaagtgtttttattttccagtagtaattccgtggattccatttgacccagtttactatcagttcagttcaggtagatttggttcaacttttggtggtttttggctctaggatattcttgactttaatatcctagaacttactgagtcttcccttcaataaatacacttctcacatacctctaatcctatgcttccttgaaacaataatgctagctgagttgtttactaaggattattataagggcctgaaggtgtgggagtggagattaattaaaacctttatgttctccaatataagggaaaagcaggttggtactacttctgattaggcagaaaacaccaggattccttaagtgatccttgaaatggttattgttttctgccttgtcacatttgccactgtgccctttaaaacgatgtggaaacctcaggtttgtggacagcacaggtggaatgacatcttgtgcttcctgaggctcccctctaccaggcacattagcttagtgcttcagatgtcagcccaagtccttgttacctccttttcctgctgcccagggaagagtgtgtgtgctggagctggagcgcttgcactcttcaggtgactattctcacctccatttcctccacatgcattaggtgaaactgaggtctaagcctcctgcaaggtctacattttaaggactcacacatcaggctctcagaaatgtacacaggtattagttctgtttgttctaaaggaaatgtgggtatctctcaggccaggacttagtgactagttttcgctagacagcaggttaatacctagatctcatttaaaaaaaaaaaaaaaaaaacaggattaaagggaactgatcaggtttgttgagttttttagcctaattccaaagcatggaagagtgctctaggtaggaaagaaagctttttcttacgatttgtagctacctactgtgcctgacttggtgcctgtgtgaggattaagcccttagtctgctcttgcaattattcaaatgacaaattaaatttgcttttgtaataacaataaaagttgtcatcttcccttttgaaggatttgtcgtttgtaattacctgtgttgtaacaagcaaaaaccatgcccttttttgtacaatccttttatttttgtatcaggtactggaaccatctaccaaaaggtttgttggatggatctaataagctctgtcacataagggattcacaaacgtcatctgcttgcatatggcatgcaagtcttttgtataatgtaacaacaaccttaggaaac

SEQ ID NO: 435971 - DNA, 7001 bp, Homo sapiens
cgggagccggccttcgcggggcggcccgcggcggtggccgggcggggagcggacagcgggcagcgcgcccaaagacccggacccgagtgccgcccctccgcgcccctgccctgctctggagtccgcagttacccacttgagatgggaaccgtatggaacggagtgggggccgcggcggatccctgccacgaggcgcagaatgaggacagatggagccaggagtcatttggcacctgtggaatcctctcaagaggaacagtcattgtgtgaaggttcaaattcagctgttagcatggaactttcagaacctattgtagaaaatggagagacagaaatgtctccagaagaatcatgggagcacaaagaagaaataagtgaagcagagccagggggtggttccttgggagatggaaggccgccagaggaaagtgcccatgaaatgatggaggaggaagaggaaatcccaaaacctaagtctgtggttgcaccgccaggtgctcctaagaaagagcatgtaaatgtagtattcattgggcacgtagatgctggcaagtcaaccattggaggacaaataatgtatttgactggaatggttgacaaaaggacgcttgaaaagtatgaaagagaagctaaagagaaaaacagagaaacttggtacttgtcttgggccttagacacaaatcaggaagaacgagacaagggtaaaacagtagaagtgggtcgtgcctattttgaaaccgaaaagaagcatttcacaattctagatgcccctggccacaagagttttgtcccaaatatgattggtggtgcctctcaagctgatttggctgtgctggtaatctcagccaggaaaggagagtttgaaactggatttgaaaaaggaggacagacaagagaacatgcaatgttggcaaagacagcaggtgtaaaacacctaattgtgctaattaataagatggatgatccaacagtaaattggagcaatgagagatatgaagaatgtaaggagaaactagtgccatttttgaaaaaagttggcttcaatcccaaaaaggacattcactttatgccctgctcaggacttactggagcaaatctcaaagagcagtcggatttctgtccttggtacattggattaccgtttattccatatctggataatttgccgaacttcaatagatcagttgatggaccaatcaggctgccaattgtggataagtacaaggatatgggcactgtggtcctgggaaagctggaatcaggatctatttgtaaaggccagcagcttgtgatgatgccaaacaagcacaacgtggaagttcttggaatactttccgatgatgtagagactgataccgtagccccaggtgaaaacctcaaaatcagactgaaaggaattgaagaagaggagattcttccagggtttatactttgtgatcctaataatctttgtcattctggacgcacatttgatgcccagatagtgattatagagcacaaatccatcatctgcccaggctataatgcggtgctgcatattcatacctgtattgaggaggtggaaataacagccttaatctgcttggtagacaaaaaatcaggagaaaaaagtaagacccgaccccgttttgtgaaacaagatcaagtatgcattgctcgcttaaggacagcaggaaccatctgccttgagacctttaaagacttccctcagatgggtcgtttcaccttaagagatgagggtaagaccattgcaattggaaaagttctgaaactggttccagagaaagactaagcattttcttgatgaccctgcacaatactgtgaggaaaattgactgcagaagcctacttcacaccgccttctcttattttctgcccattgataaacctctccccatattttgcaaagaggaaattcacagcaaaagtccacattatgtcagctttctcatattgagagctctgctatgccactgttgaatttttcccaagattcctgtccctagccctcacttcaaactctgcttccttggacagatttggcaatagctttgtaagtgatgtggacataattgcctacaataatgaaaacctacaggaatttttttatttttcattttccccttaggcatatttagtatttttcccccaggcagatcattctgagtgtgcgagtgtgtgtgcacatgttacaaaggcaactaccatgttaataaaatattcaatttgaaatccttttcggtatttgaattgcttttgaataatgttttttatctggatgtaacattgttgcattagctttttaactttcccaagtaattgaatacattttattacttggacttttataaactctttccctacccactataaatgagacattcacagcgttcaagtttgtattaaaggaaaggattagtttgaccccttcttttgatggttaatgcatacatgcagttaaatccctttatgcaaatgtgacactgctttactaggtcttttagttatttatttattttttttttttttgccaatttatattgtaacatgatttcttgaacacagtaagttgttttaaaataaaagaacagcatactgtagtttttataagtaaagcgtaatgaaattgtacccctagagaaaattccattaacttgttaaattagtggaattaacaacaaataaagcatgtttgagacctggaaaaaattcctctggtagtatttataaatagagctgcatgcctctagtatgaaaaccgtatcagttgcaagtgccacttctacaagttactcagtttactctttgtatcagtaactttaaaggttggatgatccttgctggttaaagctaaatctcaacctagcaactaaatgaaaatatttagaatcatcagaatctgaacagactaaaattatcagcgataagcagaatcaagcagggtataagttttatctcaattatttgaaattgactgagttttcttaagtgtaaagctgaaatttgctaaccatgtttttgatgaaccacagtgcagcattgtgtgggttttagattgaatgactctctgctataattatcatgactttgaaatttttcatgagaataaatgaggaatggaggcaatttgtgggtttatccaaagcccccttgatgttgagtgttgccattgatcaaagatagcctcttttagattgtgatttctctctaaataagatactttgtatatttaatgacaagtctcttccctataattttgctcctcagaaaagaaaagcctagacagactgtatttccagtcacagaacataaaacttaatctaatgggtgttttgttttgttttgagacagaggctcactctgtcacctaggctggagtgcagtggctcgatctcagctcactgcagcctccacctcccggattcaagcaatttcctgcctcagcctcttgagtagctgggattacaggagccctccacgaggcccagttaatttttgtatctttagtggagacgaggtttccccctattggtcaggctggtctcaaacttctgacctcaagtgatccactcgcctcagcctctcaaaagtgctgggattacaggcatgaggcgccgcacttggcctagtgttttcttaactgtgaaattcccattcatttcttgaatgaggctacatcttatggacagagcaaagttattgtcctacagattcttaaaactataattatggctattgcatgaaatttaaatagattttattatgtctgcaaatctctgggcttttatttttctggaaaatataggagctttaatcaaaacataatagttctttttgtaattccatgttaataaaaacaaatactagcaattgcttgaattttaatgaatatttaaaagttcaagagccacggaaatcacttccagagataagagttccctttctaaatagaacacatttttaaaaaataagttatgtttgctactaaaacatttacactgttagactattatgtgcatgttgccaagactcttaagtaacttggatatcaactgtgaagggcctacctctaaaaagtaacaggtcatacaaatacaaatgtaactgtaaaaattccactggattcttgcatatttgcaagattagattattcaaaagaaatttcagtgctaaaattaaccagcaacataagttctatgggctttgaaaattgttctcatctttttaaagttgatgcattttcaatcctgcttacacaggctgttcatttggataagtaaataaaatgtctaaggtgaacttggcattatgtggagatgttggaccgttatagagcaatacaaattcctatgctgtcattctgttttctgcaaatgcaaacgtgcttatatggtcaacagtgcaaaaatagggtagttggctgcatatttagggtattacctaagcatttgttctctaacgttgctctactagaatgatttttttcttgcatcttttcacattaatgatgttctttatataactttcatgcgattatttagttttttaaattaataaagtgaatttaagaaatattgaaataaacatctaagtaattgccattttaaacccttgtttcttactgtgggagagggggaaatacagcactcatttcttgtttttaatttgcagaagtaagtgaaaatctatgtaaaatcaaaccaaaagagttggactgagtgtgtattgtcttgagattaagtgacaaatagtaaagtgttactgagtaattaagcccatgtatttttttttttgtgagttgaaaatctttgaaatatgtgataaccgaatgtcaaaagttcctaaactctaacagtgcaggttgttcactgtaacgaggtaactcatatttgctggttacataaactacaagtactgctctcacaatatgggactttgaactgtgatgtagttcaacagttgccggcatcctctcagctgatacgctgcgaatattttgggttagacttgcagccagatgcagttttgcaacccaagaaaaaagttgaacctatgatcaaaaactgctcccaagatgaacctgggaaaaaaatcagctaagctcccttggcgatctgcaggaacactagtaatgactggaattactccgtgatctttgatgactattacacataacagcactctagcaccttttcttactggcatggacttcctcatggactgctacttcatggatgatagcttcattgctttgggtagggatttaaggtagtcaaggggaaaatacgcagttttattacaggtcttaacatcaggcaactttcaactttaaaaccctttgtgaaaaatgtggttatagcactatagctctgattttaggatggttaaatgttatattcattgttggcttaccttatcaaactgtgccattaatcctttcacagacataggtaaggaagagaacaaccagtggattcaggggacaattatctatctccaaataataggcttttatttcttgcagctaactttttcagtgattctagcagatgccatctagtacatccttgatcttgtttctttcgtgagagatctcgccatggcagcatcttgttaagtaagtgtaattgcacatgcacaaaagacttaactagctttacatttagcagtcagttggttagattaggtttcatagtaaatgaataggaatagaaagaataggaagtgtttttattttccagtagtaattccgtggattccatttgacccagtttactatcagttcagttcaggtagatttggttcaacttttggtggtttttggctctaggatattcttgactttaatatcctagaacttactgagtcttcccttcaataaatacacttctcacatacctctaatcctatgcttccttgaaacaataatgctagctgagttgtttactaaggattattataagggcctgaaggtgtgggagtggagattaattaaaacctttatgttctccaatataagggaaaagcaggttggtactacttctgattaggcagaaaacaccaggattccttaagtgatccttgaaatggttattgttttctgccttgtcacatttgccactgtgccctttaaaacgatgtggaaacctcaggtttgtggacagcacaggtggaatgacatcttgtgcttcctgaggctcccctctaccaggcacattagcttagtgcttcagatgtcagcccaagtccttgttacctccttttcctgctgcccagggaagagtgtgtgtgctggagctggagcgcttgcactcttcaggtgactattctcacctccatttcctccacatgcattaggtgaaactgaggtctaagcctcctgcaaggtctacattttaaggactcacacatcaggctctcagaaatgtacacaggtattagttctgtttgttctaaaggaaatgtgggtatctctcaggccaggacttagtgactagttttcgctagacagcaggttaatacctagatctcatttaaaaaaaaaaaaaaaaaaacaggattaaagggaactgatcaggtttgttgagttttttagcctaattccaaagcatggaagagtgctctaggtaggaaagaaagctttttcttacgatttgtagctacctactgtgcctgacttggtgcctgtgtgaggattaagcccttagtctgctcttgcaattattcaaatgacaaattaaatttgcttttgtaataacaataaaagttgtcatcttcccttttgaaggatttgtcgtttgtaattacctgtgttgtaacaagcaaaaaccatgcccttttttgtacaatccttttatttttgtatcaggtactggaaccatctaccaaaaggtttgttggatggatctaataagctctgtcacataagggattcacaaacgtcatctgcttgcatatggcatgcaagtcttttgtataatgtaacaacaaccttaggaaac

SEQ ID NO: 435972 - DNA, 7025 bp, Homo sapiens
ggcggcgaggggtcaatccgcgccgggggtggggttggctgtgaggccgtcggaggtggttgggtgggaggagatccgctcacacacacgaggaggagggttgagctgctgccgccgccgcctctgtcgtcgtcgcgagtgtggagtcgggactggagctgctgccgcggcgacgccggggatctttgtcgctagctcccggcccttctgccccgccgccttccctcagtcagccggcgcgggaggccgtgcggcacctgtggaatcctctcaagaggaacagtcattgtgtgaaggttcaaattcagctgttagcatggaactttcagaacctattgtagaaaatggagagacagaaatgtctccagaagaatcatgggagcacaaagaagaaataagtgaagcagagccagggggtggttccttgggagatggaaggccgccagaggaaagtgcccatgaaatgatggaggaggaagaggaaatcccaaaacctaagtctgtggttgcaccgccaggtgctcctaagaaagagcatgtaaatgtagtattcattgggcacgtagatgctggcaagtcaaccattggaggacaaataatgtatttgactggaatggttgacaaaaggacgcttgaaaagtatgaaagagaagctaaagagaaaaacagagaaacttggtacttgtcttgggccttagacacaaatcaggaagaacgagacaagggtaaaacagtagaagtgggtcgtgcctattttgaaaccgaaaagaagcatttcacaattctagatgcccctggccacaagagttttgtcccaaatatgattggtggtgcctctcaagctgatttggctgtgctggtaatctcagccaggaaaggagagtttgaaactggatttgaaaaaggaggacagacaagagaacatgcaatgttggcaaagacagcaggtgtaaaacacctaattgtgctaattaataagatggatgatccaacagtaaattggagcaatgagagatatgaagaatgtaaggagaaactagtgccatttttgaaaaaagttggcttcaatcccaaaaaggacattcactttatgccctgctcaggacttactggagcaaatctcaaagagcagtcggatttctgtccttggtacattggattaccgtttattccatatctggataatttgccgaacttcaatagatcagttgatggaccaatcaggctgccaattgtggataagtacaaggatatgggcactgtggtcctgggaaagctggaatcaggatctatttgtaaaggccagcagcttgtgatgatgccaaacaagcacaacgtggaagttcttggaatactttccgatgatgtagagactgataccgtagccccaggtgaaaacctcaaaatcagactgaaaggaattgaagaagaggagattcttccagggtttatactttgtgatcctaataatctttgtcattctggacgcacatttgatgcccagatagtgattatagagcacaaatccatcatctgcccaggctataatgcggtgctgcatattcatacctgtattgaggaggtggaaataacagccttaatctgcttggtagacaaaaaatcaggagaaaaaagtaagacccgaccccgttttgtgaaacaagatcaagtatgcattgctcgcttaaggacagcaggaaccatctgccttgagacctttaaagacttccctcagatgggtcgtttcaccttaagagatgagggtaagaccattgcaattggaaaagttctgaaactggttccagagaaagactaagcattttcttgatgaccctgcacaatactgtgaggaaaattgactgcagaagcctacttcacaccgccttctcttattttctgcccattgataaacctctccccatattttgcaaagaggaaattcacagcaaaagtccacattatgtcagctttctcatattgagagctctgctatgccactgttgaatttttcccaagattcctgtccctagccctcacttcaaactctgcttccttggacagatttggcaatagctttgtaagtgatgtggacataattgcctacaataatgaaaacctacaggaatttttttatttttcattttccccttaggcatatttagtatttttcccccaggcagatcattctgagtgtgcgagtgtgtgtgcacatgttacaaaggcaactaccatgttaataaaatattcaatttgaaatccttttcggtatttgaattgcttttgaataatgttttttatctggatgtaacattgttgcattagctttttaactttcccaagtaattgaatacattttattacttggacttttataaactctttccctacccactataaatgagacattcacagcgttcaagtttgtattaaaggaaaggattagtttgaccccttcttttgatggttaatgcatacatgcagttaaatccctttatgcaaatgtgacactgctttactaggtcttttagttatttatttattttttttttttttgccaatttatattgtaacatgatttcttgaacacagtaagttgttttaaaataaaagaacagcatactgtagtttttataagtaaagcgtaatgaaattgtacccctagagaaaattccattaacttgttaaattagtggaattaacaacaaataaagcatgtttgagacctggaaaaaattcctctggtagtatttataaatagagctgcatgcctctagtatgaaaaccgtatcagttgcaagtgccacttctacaagttactcagtttactctttgtatcagtaactttaaaggttggatgatccttgctggttaaagctaaatctcaacctagcaactaaatgaaaatatttagaatcatcagaatctgaacagactaaaattatcagcgataagcagaatcaagcagggtataagttttatctcaattatttgaaattgactgagttttcttaagtgtaaagctgaaatttgctaaccatgtttttgatgaaccacagtgcagcattgtgtgggttttagattgaatgactctctgctataattatcatgactttgaaatttttcatgagaataaatgaggaatggaggcaatttgtgggtttatccaaagcccccttgatgttgagtgttgccattgatcaaagatagcctcttttagattgtgatttctctctaaataagatactttgtatatttaatgacaagtctcttccctataattttgctcctcagaaaagaaaagcctagacagactgtatttccagtcacagaacataaaacttaatctaatgggtgttttgttttgttttgagacagaggctcactctgtcacctaggctggagtgcagtggctcgatctcagctcactgcagcctccacctcccggattcaagcaatttcctgcctcagcctcttgagtagctgggattacaggagccctccacgaggcccagttaatttttgtatctttagtggagacgaggtttccccctattggtcaggctggtctcaaacttctgacctcaagtgatccactcgcctcagcctctcaaaagtgctgggattacaggcatgaggcgccgcacttggcctagtgttttcttaactgtgaaattcccattcatttcttgaatgaggctacatcttatggacagagcaaagttattgtcctacagattcttaaaactataattatggctattgcatgaaatttaaatagattttattatgtctgcaaatctctgggcttttatttttctggaaaatataggagctttaatcaaaacataatagttctttttgtaattccatgttaataaaaacaaatactagcaattgcttgaattttaatgaatatttaaaagttcaagagccacggaaatcacttccagagataagagttccctttctaaatagaacacatttttaaaaaataagttatgtttgctactaaaacatttacactgttagactattatgtgcatgttgccaagactcttaagtaacttggatatcaactgtgaagggcctacctctaaaaagtaacaggtcatacaaatacaaatgtaactgtaaaaattccactggattcttgcatatttgcaagattagattattcaaaagaaatttcagtgctaaaattaaccagcaacataagttctatgggctttgaaaattgttctcatctttttaaagttgatgcattttcaatcctgcttacacaggctgttcatttggataagtaaataaaatgtctaaggtgaacttggcattatgtggagatgttggaccgttatagagcaatacaaattcctatgctgtcattctgttttctgcaaatgcaaacgtgcttatatggtcaacagtgcaaaaatagggtagttggctgcatatttagggtattacctaagcatttgttctctaacgttgctctactagaatgatttttttcttgcatcttttcacattaatgatgttctttatataactttcatgcgattatttagttttttaaattaataaagtgaatttaagaaatattgaaataaacatctaagtaattgccattttaaacccttgtttcttactgtgggagagggggaaatacagcactcatttcttgtttttaatttgcagaagtaagtgaaaatctatgtaaaatcaaaccaaaagagttggactgagtgtgtattgtcttgagattaagtgacaaatagtaaagtgttactgagtaattaagcccatgtatttttttttttgtgagttgaaaatctttgaaatatgtgataaccgaatgtcaaaagttcctaaactctaacagtgcaggttgttcactgtaacgaggtaactcatatttgctggttacataaactacaagtactgctctcacaatatgggactttgaactgtgatgtagttcaacagttgccggcatcctctcagctgatacgctgcgaatattttgggttagacttgcagccagatgcagttttgcaacccaagaaaaaagttgaacctatgatcaaaaactgctcccaagatgaacctgggaaaaaaatcagctaagctcccttggcgatctgcaggaacactagtaatgactggaattactccgtgatctttgatgactattacacataacagcactctagcaccttttcttactggcatggacttcctcatggactgctacttcatggatgatagcttcattgctttgggtagggatttaaggtagtcaaggggaaaatacgcagttttattacaggtcttaacatcaggcaactttcaactttaaaaccctttgtgaaaaatgtggttatagcactatagctctgattttaggatggttaaatgttatattcattgttggcttaccttatcaaactgtgccattaatcctttcacagacataggtaaggaagagaacaaccagtggattcaggggacaattatctatctccaaataataggcttttatttcttgcagctaactttttcagtgattctagcagatgccatctagtacatccttgatcttgtttctttcgtgagagatctcgccatggcagcatcttgttaagtaagtgtaattgcacatgcacaaaagacttaactagctttacatttagcagtcagttggttagattaggtttcatagtaaatgaataggaatagaaagaataggaagtgtttttattttccagtagtaattccgtggattccatttgacccagtttactatcagttcagttcaggtagatttggttcaacttttggtggtttttggctctaggatattcttgactttaatatcctagaacttactgagtcttcccttcaataaatacacttctcacatacctctaatcctatgcttccttgaaacaataatgctagctgagttgtttactaaggattattataagggcctgaaggtgtgggagtggagattaattaaaacctttatgttctccaatataagggaaaagcaggttggtactacttctgattaggcagaaaacaccaggattccttaagtgatccttgaaatggttattgttttctgccttgtcacatttgccactgtgccctttaaaacgatgtggaaacctcaggtttgtggacagcacaggtggaatgacatcttgtgcttcctgaggctcccctctaccaggcacattagcttagtgcttcagatgtcagcccaagtccttgttacctccttttcctgctgcccagggaagagtgtgtgtgctggagctggagcgcttgcactcttcaggtgactattctcacctccatttcctccacatgcattaggtgaaactgaggtctaagcctcctgcaaggtctacattttaaggactcacacatcaggctctcagaaatgtacacaggtattagttctgtttgttctaaaggaaatgtgggtatctctcaggccaggacttagtgactagttttcgctagacagcaggttaatacctagatctcatttaaaaaaaaaaaaaaaaaaacaggattaaagggaactgatcaggtttgttgagttttttagcctaattccaaagcatggaagagtgctctaggtaggaaagaaagctttttcttacgatttgtagctacctactgtgcctgacttggtgcctgtgtgaggattaagcccttagtctgctcttgcaattattcaaatgacaaattaaatttgcttttgtaataacaataaaagttgtcatcttcccttttgaaggatttgtcgtttgtaattacctgtgttgtaacaagcaaaaaccatgcccttttttgtacaatccttttatttttgtatcaggtactggaaccatctaccaaaaggtttgttggatggatctaataagctctgtcacataagggattcacaaacgtcatctgcttgcatatggcatgcaagtcttttgtataatgtaacaacaaccttaggaaac

SEQ ID NO: 435973 - DNA, 6946 bp, Homo sapiens
cattttgcttactcatgtaatccaaaccaagataggttccactgataacagaaaccaaattaatttgcagagtttttttcccagtttttctcattattcactccagcattattgaccaaaatgtccagtcttccaaagtggtctacaacttttctaaaggtgtctctcagttgttgctggtcagccacatcgcactggatgaacagagtcttctgaggttcaaattcagctgttagcatggaactttcagaacctattgtagaaaatggagagacagaaatgtctccagaagaatcatgggagcacaaagaagaaataagtgaagcagagccagggggtggttccttgggagatggaaggccgccagaggaaagtgcccatgaaatgatggaggaggaagaggaaatcccaaaacctaagtctgtggttgcaccgccaggtgctcctaagaaagagcatgtaaatgtagtattcattgggcacgtagatgctggcaagtcaaccattggaggacaaataatgtatttgactggaatggttgacaaaaggacgcttgaaaagtatgaaagagaagctaaagagaaaaacagagaaacttggtacttgtcttgggccttagacacaaatcaggaagaacgagacaagggtaaaacagtagaagtgggtcgtgcctattttgaaaccgaaaagaagcatttcacaattctagatgcccctggccacaagagttttgtcccaaatatgattggtggtgcctctcaagctgatttggctgtgctggtaatctcagccaggaaaggagagtttgaaactggatttgaaaaaggaggacagacaagagaacatgcaatgttggcaaagacagcaggtgtaaaacacctaattgtgctaattaataagatggatgatccaacagtaaattggagcaatgagagatatgaagaatgtaaggagaaactagtgccatttttgaaaaaagttggcttcaatcccaaaaaggacattcactttatgccctgctcaggacttactggagcaaatctcaaagagcagtcggatttctgtccttggtacattggattaccgtttattccatatctggataatttgccgaacttcaatagatcagttgatggaccaatcaggctgccaattgtggataagtacaaggatatgggcactgtggtcctgggaaagctggaatcaggatctatttgtaaaggccagcagcttgtgatgatgccaaacaagcacaacgtggaagttcttggaatactttccgatgatgtagagactgataccgtagccccaggtgaaaacctcaaaatcagactgaaaggaattgaagaagaggagattcttccagggtttatactttgtgatcctaataatctttgtcattctggacgcacatttgatgcccagatagtgattatagagcacaaatccatcatctgcccaggctataatgcggtgctgcatattcatacctgtattgaggaggtggaaataacagccttaatctgcttggtagacaaaaaatcaggagaaaaaagtaagacccgaccccgttttgtgaaacaagatcaagtatgcattgctcgcttaaggacagcaggaaccatctgccttgagacctttaaagacttccctcagatgggtcgtttcaccttaagagatgagggtaagaccattgcaattggaaaagttctgaaactggttccagagaaagactaagcattttcttgatgaccctgcacaatactgtgaggaaaattgactgcagaagcctacttcacaccgccttctcttattttctgcccattgataaacctctccccatattttgcaaagaggaaattcacagcaaaagtccacattatgtcagctttctcatattgagagctctgctatgccactgttgaatttttcccaagattcctgtccctagccctcacttcaaactctgcttccttggacagatttggcaatagctttgtaagtgatgtggacataattgcctacaataatgaaaacctacaggaatttttttatttttcattttccccttaggcatatttagtatttttcccccaggcagatcattctgagtgtgcgagtgtgtgtgcacatgttacaaaggcaactaccatgttaataaaatattcaatttgaaatccttttcggtatttgaattgcttttgaataatgttttttatctggatgtaacattgttgcattagctttttaactttcccaagtaattgaatacattttattacttggacttttataaactctttccctacccactataaatgagacattcacagcgttcaagtttgtattaaaggaaaggattagtttgaccccttcttttgatggttaatgcatacatgcagttaaatccctttatgcaaatgtgacactgctttactaggtcttttagttatttatttattttttttttttttgccaatttatattgtaacatgatttcttgaacacagtaagttgttttaaaataaaagaacagcatactgtagtttttataagtaaagcgtaatgaaattgtacccctagagaaaattccattaacttgttaaattagtggaattaacaacaaataaagcatgtttgagacctggaaaaaattcctctggtagtatttataaatagagctgcatgcctctagtatgaaaaccgtatcagttgcaagtgccacttctacaagttactcagtttactctttgtatcagtaactttaaaggttggatgatccttgctggttaaagctaaatctcaacctagcaactaaatgaaaatatttagaatcatcagaatctgaacagactaaaattatcagcgataagcagaatcaagcagggtataagttttatctcaattatttgaaattgactgagttttcttaagtgtaaagctgaaatttgctaaccatgtttttgatgaaccacagtgcagcattgtgtgggttttagattgaatgactctctgctataattatcatgactttgaaatttttcatgagaataaatgaggaatggaggcaatttgtgggtttatccaaagcccccttgatgttgagtgttgccattgatcaaagatagcctcttttagattgtgatttctctctaaataagatactttgtatatttaatgacaagtctcttccctataattttgctcctcagaaaagaaaagcctagacagactgtatttccagtcacagaacataaaacttaatctaatgggtgttttgttttgttttgagacagaggctcactctgtcacctaggctggagtgcagtggctcgatctcagctcactgcagcctccacctcccggattcaagcaatttcctgcctcagcctcttgagtagctgggattacaggagccctccacgaggcccagttaatttttgtatctttagtggagacgaggtttccccctattggtcaggctggtctcaaacttctgacctcaagtgatccactcgcctcagcctctcaaaagtgctgggattacaggcatgaggcgccgcacttggcctagtgttttcttaactgtgaaattcccattcatttcttgaatgaggctacatcttatggacagagcaaagttattgtcctacagattcttaaaactataattatggctattgcatgaaatttaaatagattttattatgtctgcaaatctctgggcttttatttttctggaaaatataggagctttaatcaaaacataatagttctttttgtaattccatgttaataaaaacaaatactagcaattgcttgaattttaatgaatatttaaaagttcaagagccacggaaatcacttccagagataagagttccctttctaaatagaacacatttttaaaaaataagttatgtttgctactaaaacatttacactgttagactattatgtgcatgttgccaagactcttaagtaacttggatatcaactgtgaagggcctacctctaaaaagtaacaggtcatacaaatacaaatgtaactgtaaaaattccactggattcttgcatatttgcaagattagattattcaaaagaaatttcagtgctaaaattaaccagcaacataagttctatgggctttgaaaattgttctcatctttttaaagttgatgcattttcaatcctgcttacacaggctgttcatttggataagtaaataaaatgtctaaggtgaacttggcattatgtggagatgttggaccgttatagagcaatacaaattcctatgctgtcattctgttttctgcaaatgcaaacgtgcttatatggtcaacagtgcaaaaatagggtagttggctgcatatttagggtattacctaagcatttgttctctaacgttgctctactagaatgatttttttcttgcatcttttcacattaatgatgttctttatataactttcatgcgattatttagttttttaaattaataaagtgaatttaagaaatattgaaataaacatctaagtaattgccattttaaacccttgtttcttactgtgggagagggggaaatacagcactcatttcttgtttttaatttgcagaagtaagtgaaaatctatgtaaaatcaaaccaaaagagttggactgagtgtgtattgtcttgagattaagtgacaaatagtaaagtgttactgagtaattaagcccatgtatttttttttttgtgagttgaaaatctttgaaatatgtgataaccgaatgtcaaaagttcctaaactctaacagtgcaggttgttcactgtaacgaggtaactcatatttgctggttacataaactacaagtactgctctcacaatatgggactttgaactgtgatgtagttcaacagttgccggcatcctctcagctgatacgctgcgaatattttgggttagacttgcagccagatgcagttttgcaacccaagaaaaaagttgaacctatgatcaaaaactgctcccaagatgaacctgggaaaaaaatcagctaagctcccttggcgatctgcaggaacactagtaatgactggaattactccgtgatctttgatgactattacacataacagcactctagcaccttttcttactggcatggacttcctcatggactgctacttcatggatgatagcttcattgctttgggtagggatttaaggtagtcaaggggaaaatacgcagttttattacaggtcttaacatcaggcaactttcaactttaaaaccctttgtgaaaaatgtggttatagcactatagctctgattttaggatggttaaatgttatattcattgttggcttaccttatcaaactgtgccattaatcctttcacagacataggtaaggaagagaacaaccagtggattcaggggacaattatctatctccaaataataggcttttatttcttgcagctaactttttcagtgattctagcagatgccatctagtacatccttgatcttgtttctttcgtgagagatctcgccatggcagcatcttgttaagtaagtgtaattgcacatgcacaaaagacttaactagctttacatttagcagtcagttggttagattaggtttcatagtaaatgaataggaatagaaagaataggaagtgtttttattttccagtagtaattccgtggattccatttgacccagtttactatcagttcagttcaggtagatttggttcaacttttggtggtttttggctctaggatattcttgactttaatatcctagaacttactgagtcttcccttcaataaatacacttctcacatacctctaatcctatgcttccttgaaacaataatgctagctgagttgtttactaaggattattataagggcctgaaggtgtgggagtggagattaattaaaacctttatgttctccaatataagggaaaagcaggttggtactacttctgattaggcagaaaacaccaggattccttaagtgatccttgaaatggttattgttttctgccttgtcacatttgccactgtgccctttaaaacgatgtggaaacctcaggtttgtggacagcacaggtggaatgacatcttgtgcttcctgaggctcccctctaccaggcacattagcttagtgcttcagatgtcagcccaagtccttgttacctccttttcctgctgcccagggaagagtgtgtgtgctggagctggagcgcttgcactcttcaggtgactattctcacctccatttcctccacatgcattaggtgaaactgaggtctaagcctcctgcaaggtctacattttaaggactcacacatcaggctctcagaaatgtacacaggtattagttctgtttgttctaaaggaaatgtgggtatctctcaggccaggacttagtgactagttttcgctagacagcaggttaatacctagatctcatttaaaaaaaaaaaaaaaaaaacaggattaaagggaactgatcaggtttgttgagttttttagcctaattccaaagcatggaagagtgctctaggtaggaaagaaagctttttcttacgatttgtagctacctactgtgcctgacttggtgcctgtgtgaggattaagcccttagtctgctcttgcaattattcaaatgacaaattaaatttgcttttgtaataacaataaaagttgtcatcttcccttttgaaggatttgtcgtttgtaattacctgtgttgtaacaagcaaaaaccatgcccttttttgtacaatccttttatttttgtatcaggtactggaaccatctaccaaaaggtttgttggatggatctaataagctctgtcacataagggattcacaaacgtcatctgcttgcatatggcatgcaagtcttttgtataatgtaacaacaaccttaggaaac

SEQ ID NO: 435974 - DNA, 7390 bp, Homo sapiens
ggcggcgaggggtcaatccgcgccgggggtggggttggctgtgaggccgtcggaggtggttgggtgggaggagatccgctcacacacacgaggaggagggttgagctgctgccgccgccgcctctgtcgtcgtcgcgagtgtggagtcgggactggagctgctgccgcggcgacgccggggatctttgtcgctagctcccggcccttctgccccgccgccttccctcagtcagcgttgcccactcctctccggccgggcgcccctgcctccatttctcgctctctgtccaccacacacacggcccccccgatcatggatccgggcagtggcggcggcggcggcggcggcggcggcggcgggagcagcagcggcagcagcagcagcgactcggcgcctgactgctgggaccaggcggacatggaagcccccgggccgggcccttgcggcggcggcggctccctggcggcggcggccgaggcccagcgggagaacctcagcgcggccttcagccggcaactcaacgtcaacgccaagcccttcgtgcccaacgtccacgccgccgagttcgtgccgtccttcctgcggtgcccggcagcgccgccacccccagctggcggcgccgccaataaccacggagccggcagcggcgcgggaggccgtgcggcacctgtggaatcctctcaagaggaacagtcattgtgtgaaggttcaaattcagctgttagcatggaactttcagaacctattgtagaaaatggagagacagaaatgtctccagaagaatcatgggagcacaaagaagaaataagtgaagcagagccagggggtggttccttgggagatggaaggccgccagaggaaagtgcccatgaaatgatggaggaggaagaggaaatcccaaaacctaagtctgtggttgcaccgccaggtgctcctaagaaagagcatgtaaatgtagtattcattgggcacgtagatgctggcaagtcaaccattggaggacaaataatgtatttgactggaatggttgacaaaaggacgcttgaaaagtatgaaagagaagctaaagagaaaaacagagaaacttggtacttgtcttgggccttagacacaaatcaggaagaacgagacaagggtaaaacagtagaagtgggtcgtgcctattttgaaaccgaaaagaagcatttcacaattctagatgcccctggccacaagagttttgtcccaaatatgattggtggtgcctctcaagctgatttggctgtgctggtaatctcagccaggaaaggagagtttgaaactggatttgaaaaaggaggacagacaagagaacatgcaatgttggcaaagacagcaggtgtaaaacacctaattgtgctaattaataagatggatgatccaacagtaaattggagcaatgagagatatgaagaatgtaaggagaaactagtgccatttttgaaaaaagttggcttcaatcccaaaaaggacattcactttatgccctgctcaggacttactggagcaaatctcaaagagcagtcggatttctgtccttggtacattggattaccgtttattccatatctggataatttgccgaacttcaatagatcagttgatggaccaatcaggctgccaattgtggataagtacaaggatatgggcactgtggtcctgggaaagctggaatcaggatctatttgtaaaggccagcagcttgtgatgatgccaaacaagcacaacgtggaagttcttggaatactttccgatgatgtagagactgataccgtagccccaggcttccagggtttatactttgtgatcctaataatctttgtcattctggacgcacatttgatgcccagatagtgattatagagcacaaatccatcatctgcccaggctataatgcggtgctgcatattcatacctgtattgaggaggtggaaataacagccttaatctgcttggtagacaaaaaatcaggagaaaaaagtaagacccgaccccgttttgtgaaacaagatcaagtatgcattgctcgcttaaggacagcaggaaccatctgccttgagacctttaaagacttccctcagatgggtcgtttcaccttaagagatgagggtaagaccattgcaattggaaaagttctgaaactggttccagagaaagactaagcattttcttgatgaccctgcacaatactgtgaggaaaattgactgcagaagcctacttcacaccgccttctcttattttctgcccattgataaacctctccccatattttgcaaagaggaaattcacagcaaaagtccacattatgtcagctttctcatattgagagctctgctatgccactgttgaatttttcccaagattcctgtccctagccctcacttcaaactctgcttccttggacagatttggcaatagctttgtaagtgatgtggacataattgcctacaataatgaaaacctacaggaatttttttatttttcattttccccttaggcatatttagtatttttcccccaggcagatcattctgagtgtgcgagtgtgtgtgcacatgttacaaaggcaactaccatgttaataaaatattcaatttgaaatccttttcggtatttgaattgcttttgaataatgttttttatctggatgtaacattgttgcattagctttttaactttcccaagtaattgaatacattttattacttggacttttataaactctttccctacccactataaatgagacattcacagcgttcaagtttgtattaaaggaaaggattagtttgaccccttcttttgatggttaatgcatacatgcagttaaatccctttatgcaaatgtgacactgctttactaggtcttttagttatttatttattttttttttttttgccaatttatattgtaacatgatttcttgaacacagtaagttgttttaaaataaaagaacagcatactgtagtttttataagtaaagcgtaatgaaattgtacccctagagaaaattccattaacttgttaaattagtggaattaacaacaaataaagcatgtttgagacctggaaaaaattcctctggtagtatttataaatagagctgcatgcctctagtatgaaaaccgtatcagttgcaagtgccacttctacaagttactcagtttactctttgtatcagtaactttaaaggttggatgatccttgctggttaaagctaaatctcaacctagcaactaaatgaaaatatttagaatcatcagaatctgaacagactaaaattatcagcgataagcagaatcaagcagggtataagttttatctcaattatttgaaattgactgagttttcttaagtgtaaagctgaaatttgctaaccatgtttttgatgaaccacagtgcagcattgtgtgggttttagattgaatgactctctgctataattatcatgactttgaaatttttcatgagaataaatgaggaatggaggcaatttgtgggtttatccaaagcccccttgatgttgagtgttgccattgatcaaagatagcctcttttagattgtgatttctctctaaataagatactttgtatatttaatgacaagtctcttccctataattttgctcctcagaaaagaaaagcctagacagactgtatttccagtcacagaacataaaacttaatctaatgggtgttttgttttgttttgagacagaggctcactctgtcacctaggctggagtgcagtggctcgatctcagctcactgcagcctccacctcccggattcaagcaatttcctgcctcagcctcttgagtagctgggattacaggagccctccacgaggcccagttaatttttgtatctttagtggagacgaggtttccccctattggtcaggctggtctcaaacttctgacctcaagtgatccactcgcctcagcctctcaaaagtgctgggattacaggcatgaggcgccgcacttggcctagtgttttcttaactgtgaaattcccattcatttcttgaatgaggctacatcttatggacagagcaaagttattgtcctacagattcttaaaactataattatggctattgcatgaaatttaaatagattttattatgtctgcaaatctctgggcttttatttttctggaaaatataggagctttaatcaaaacataatagttctttttgtaattccatgttaataaaaacaaatactagcaattgcttgaattttaatgaatatttaaaagttcaagagccacggaaatcacttccagagataagagttccctttctaaatagaacacatttttaaaaaataagttatgtttgctactaaaacatttacactgttagactattatgtgcatgttgccaagactcttaagtaacttggatatcaactgtgaagggcctacctctaaaaagtaacaggtcatacaaatacaaatgtaactgtaaaaattccactggattcttgcatatttgcaagattagattattcaaaagaaatttcagtgctaaaattaaccagcaacataagttctatgggctttgaaaattgttctcatctttttaaagttgatgcattttcaatcctgcttacacaggctgttcatttggataagtaaataaaatgtctaaggtgaacttggcattatgtggagatgttggaccgttatagagcaatacaaattcctatgctgtcattctgttttctgcaaatgcaaacgtgcttatatggtcaacagtgcaaaaatagggtagttggctgcatatttagggtattacctaagcatttgttctctaacgttgctctactagaatgatttttttcttgcatcttttcacattaatgatgttctttatataactttcatgcgattatttagttttttaaattaataaagtgaatttaagaaatattgaaataaacatctaagtaattgccattttaaacccttgtttcttactgtgggagagggggaaatacagcactcatttcttgtttttaatttgcagaagtaagtgaaaatctatgtaaaatcaaaccaaaagagttggactgagtgtgtattgtcttgagattaagtgacaaatagtaaagtgttactgagtaattaagcccatgtatttttttttttgtgagttgaaaatctttgaaatatgtgataaccgaatgtcaaaagttcctaaactctaacagtgcaggttgttcactgtaacgaggtaactcatatttgctggttacataaactacaagtactgctctcacaatatgggactttgaactgtgatgtagttcaacagttgccggcatcctctcagctgatacgctgcgaatattttgggttagacttgcagccagatgcagttttgcaacccaagaaaaaagttgaacctatgatcaaaaactgctcccaagatgaacctgggaaaaaaatcagctaagctcccttggcgatctgcaggaacactagtaatgactggaattactccgtgatctttgatgactattacacataacagcactctagcaccttttcttactggcatggacttcctcatggactgctacttcatggatgatagcttcattgctttgggtagggatttaaggtagtcaaggggaaaatacgcagttttattacaggtcttaacatcaggcaactttcaactttaaaaccctttgtgaaaaatgtggttatagcactatagctctgattttaggatggttaaatgttatattcattgttggcttaccttatcaaactgtgccattaatcctttcacagacataggtaaggaagagaacaaccagtggattcaggggacaattatctatctccaaataataggcttttatttcttgcagctaactttttcagtgattctagcagatgccatctagtacatccttgatcttgtttctttcgtgagagatctcgccatggcagcatcttgttaagtaagtgtaattgcacatgcacaaaagacttaactagctttacatttagcagtcagttggttagattaggtttcatagtaaatgaataggaatagaaagaataggaagtgtttttattttccagtagtaattccgtggattccatttgacccagtttactatcagttcagttcaggtagatttggttcaacttttggtggtttttggctctaggatattcttgactttaatatcctagaacttactgagtcttcccttcaataaatacacttctcacatacctctaatcctatgcttccttgaaacaataatgctagctgagttgtttactaaggattattataagggcctgaaggtgtgggagtggagattaattaaaacctttatgttctccaatataagggaaaagcaggttggtactacttctgattaggcagaaaacaccaggattccttaagtgatccttgaaatggttattgttttctgccttgtcacatttgccactgtgccctttaaaacgatgtggaaacctcaggtttgtggacagcacaggtggaatgacatcttgtgcttcctgaggctcccctctaccaggcacattagcttagtgcttcagatgtcagcccaagtccttgttacctccttttcctgctgcccagggaagagtgtgtgtgctggagctggagcgcttgcactcttcaggtgactattctcacctccatttcctccacatgcattaggtgaaactgaggtctaagcctcctgcaaggtctacattttaaggactcacacatcaggctctcagaaatgtacacaggtattagttctgtttgttctaaaggaaatgtgggtatctctcaggccaggacttagtgactagttttcgctagacagcaggttaatacctagatctcatttaaaaaaaaaaaaaaaaaaacaggattaaagggaactgatcaggtttgttgagttttttagcctaattccaaagcatggaagagtgctctaggtaggaaagaaagctttttcttacgatttgtagctacctactgtgcctgacttggtgcctgtgtgaggattaagcccttagtctgctcttgcaattattcaaatgacaaattaaatttgcttttgtaataacaataaaagttgtcatcttcccttttgaaggatttgtcgtttgtaattacctgtgttgtaacaagcaaaaaccatgcccttttttgtacaatccttttatttttgtatcaggtactggaaccatctaccaaaaggtttgttggatggatctaataagctctgtcacataagggattcacaaacgtcatctgcttgcatatggcatgcaagtcttttgtataatgtaacaacaaccttaggaaac

SEQ ID NO: 435975 - DNA, 7382 bp, Homo sapiens
ggcggcgaggggtcaatccgcgccgggggtggggttggctgtgaggccgtcggaggtggttgggtgggaggagatccgctcacacacacgaggaggagggttgagctgctgccgccgccgcctctgtcgtcgtcgcgagtgtggagtcgggactggagctgctgccgcggcgacgccggggatctttgtcgctagctcccggcccttctgccccgccgccttccctcagtcagcgttgcccactcctctccggccgggcgcccctgcctccatttctcgctctctgtccaccacacacacggcccccccgatcatggatccgggcagtggcggcggcggcggcggcggcggcggcggcgggagcagcagcggcagcagcagcagcgactcggcgcctgactgctgggaccaggcggacatggaagcccccgggccgggcccttgcggcggcggcggctccctggcggcggcggccgaggcccagcgggagaacctcagcgcggccttcagccggcaactcaacgtcaacgccaagcccttcgtgcccaacgtccacgccgccgagttcgtgccgtccttcctgcggtgcccggcagcgccgccacccccagctggcggcgccgccaataaccacggagccggcagcggcgcgggaggccgtgcggcacctgtggaatcctctcaagaggaacagtcattgtgtgaaggttcaaattcagctgttagcatggaactttcagaacctattgtagaaaatggagagacagaaatgtctccagaagaatcatgggagcacaaagaagaaataagtgaagcagagccagggggtggttccttgggagatggaaggccgccagaggaaagtgcccatgaaatgatggaggaggaagaggaaatcccaaaacctaagtctgtggttgcaccgccaggtgctcctaagaaagagcatgtaaatgtagtattcattgggcacgtagatgctggcaagtcaaccattggaggacaaataatgtatttgactggaatggttgacaaaaggacgcttgaaaagtatgaaagagaagctaaagagaaaaacagagaaacttggtacttgtcttgggccttagacacaaatcaggaagaacgagacaagggtaaaacagtagaagtgggtcgtgcctattttgaaaccgaaaagaagcatttcacaattctagatgcccctggccacaagagttttgtcccaaatatgattggtggtgcctctcaagctgatttggctgtgctggtaatctcagccaggaaaggagagtttgaaactggatttgaaaaaggaggacagacaagagaacatgcaatgttggcaaagacagcaggtgtaaaacacctaattgtgctaattaataagatggatgatccaacagtaaattggagcaatgagagatatgaagaatgtaaggagaaactagtgccatttttgaaaaaagttggcttcaatcccaaaaaggacattcactttatgccctgctcaggacttactggagcaaatctcaaagagcagtcggatttctgtccttggtacattggattaccgtttattccatatctggataatttgccgaacttcaatagatcagttgatggaccaatcaggctgccaattgtggataagtacaaggatatgggcactgtggtcctgggaaagctggaatcaggatctatttgtaaaggccagcagcttgtgatgatgccaaacaagcacaacgtggaagttcttggaatactttccgatgatgtagagactgataccgtagccccaggtgaaaacctcaaaatcagactgaaaggaattgaagaagaggagattcttccagggtttatactttgtgatcctaataatctttgtcattctggacgcacatttgatgcccagatagtgattatagagcacaaatccatcatctgcccaggctataatgcggtgctgcatattcatacctgtattgaggaggtggaaataacagccttaatctgcttggtagacaaaaaatcaggagaaaaaagtaagacccgaccccgttttgtgaaacaagatcaagtatgcattgctcgcttaaggacagcaggaaccatctgccttgagacctttaaagacttccctcagatgggtcgtttcaccttaagagatgagggtaagaccattgcaattggaaaagttctgaaactggttccagagaaagactaagcattttcttgatgaccctgcacaatactgtgaggaaaattgactgcagaagcctacttcacaccgccttctcttattttctgcccattgataaacctctccccatattttgcaaagaggaaattcacagcaaaagtccacattatgtcagctttctcatattgagagctctgctatgccactgttgaatttttcccaagattcctgtccctagccctcacttcaaactctgcttccttggacagatttggcaatagctttgtaagtgatgtggacataattgcctacaataatgaaaacctacaggaatttttttatttttcattttccccttaggcatatttagtatttttcccccaggcagatcattctgagtgtgcgagtgtgtgtgcacatgttacaaaggcaactaccatgttaataaaatattcaatttgaaatccttttcggtatttgaattgcttttgaataatgttttttatctggatgtaacattgttgcattagctttttaactttcccaagtaattgaatacattttattacttggacttttataaactctttccctacccactataaatgagacattcacagcgttcaagtttgtattaaaggaaaggattagtttgaccccttcttttgatggttaatgcatacatgcagttaaatccctttatgcaaatgtgacactgctttactaggtcttttagttatttatttattttttttttttttgccaatttatattgtaacatgatttcttgaacacagtaagttgttttaaaataaaagaacagcatactgtagtttttataagtaaagcgtaatgaaattgtacccctagagaaaattccattaacttgttaaattagtggaattaacaacaaataaagcatgtttgagacctggaaaaaattcctctggtagtatttataaatagagctgcatgcctctagtatgaaaaccgtatcagttgcaagtgccacttctacaagttactcagtttactctttgtatcagtaactttaaaggttggatgatccttgctggttaaagctaaatctcaacctagcaactaaatgaaaatatttagaatcatcagaatctgaacagactaaaattatcagcgataagcagaatcaagcagggtataagttttatctcaattatttgaaattgactgagttttcttaagtgtaaagctgaaatttgctaaccatgtttttgatgaaccacagtgcagcattgtgtgggttttagattgaatgactctctgctataattatcatgactttgaaatttttcatgagaataaatgaggaatggaggcaatttgtgggtttatccaaagcccccttgatgttgagtgttgccattgatcaaagatagcctcttttagattgtgatttctctctaaataagatactttgtatatttaatgacaagtctcttccctataattttgctcctcagaaaagaaaagcctagacagactgtatttccagtcacagaacataaaacttaatctaatgggtgttttgttttgttttgagacagaggctcactctgtcacctaggctggagtgcagtggctcgatctcagctcactgcagcctccacctcccggattcaagcaatttcctgcctcagcctcttgagtagctgggattacaggagccctccacgaggcccagttaatttttgtatctttagtggagacgaggtttccccctattggtcaggctggtctcaaacttctgacctcaagtgatccactcgcctcagcctctcaaaagtgctgggattacaggcatgaggcgccgcacttggcctagtgttttcttaactgtgaaattcccattcatttcttgaatgaggctacatcttatggacagagcaaagttattgtcctacagattcttaaaactataattatggctattgcatgaaatttaaatagattttattatgtctgcaaatctctgggcttttatttttctggaaaatataggagctttaatcaaaacataatagttctttttgtaattccatgttaataaaaacaaatactagcaattgcttgaattttaatgaatatttaaaagttcaagagccacggaaatcacttccagagataagagttccctttctaaatagaacacatttttaaaaaataagttatgtttgctactaaaacatttacactgttagactattatgtgcatgttgccaagactcttaagtaacttggatatcaactgtgaagggcctacctctaaaaagtaacaggtcatacaaatacaaatgtaactgtaaaaattccactggattcttgcatatttgcaagattagattattcaaaagaaatttcagtgctaaaattaaccagcaacataagttctatgggctttgaaaattgttctcatctttttaaagttgatgcattttcaatcctgcttacacaggctgttcatttggataagtaaataaaatgtctaaggtgaacttggcattatgtggagatgttggaccgttatagagcaatacaaattcctatgctgtcattctgttttctgcaaatgcaaacgtgcttatatggtcaacagtgcaaaaatagggtagttggctgcatatttagggtattacctaagcatttgttctctaacgttgctctactagaatgatttttttcttgcatcttttcacattaatgatgttctttatataactttcatgcgattatttagttttttaaattaataaagtgaatttaagaaatattgaaataaacatctaagtaattgccattttaaacccttgtttcttactgtgggagagggggaaatacagcactcatttcttgtttttaatttgcagaagtaagtgaaaatctatgtaaaatcaaaccaaaagagttggactgagtgtgtattgtcttgagattaagtgacaaatagtaaagtgttactgagtaattaagcccatgtatttttttttttgtgagttgaaaatctttgaaatatgtgataaccgaatgtcaaaagttcctaaactctaacagtgcaggttgttcactgtaacgaggtaactcatatttgctggttacataaactacaagtactgctctcacaatatgggactttgaactgtgatgtagttcaacagttgccggcatcctctcagctgatacgctgcgaatattttgggttagacttgcagccagatgcagttttgcaacccaagaaaaaagttgaacctatgatcaaaaactgctcccaagatgaacctgggaaaaaaatcagctaagctcccttggcgatctgcaggaacactagtaatgactggaattactccgtgatctttgatgactattacacataacagcactctagcaccttttcttactggcatggacttcctcatggactgctacttcatggatgatagcttcattgctttgggtagggatttaaggtagtcaaggggaaaatacgcagttttattacaggtcttaacatcaggcaactttcaactttaaaaccctttgtgaaaaatgtggttatagcactatagctctgattttaggatggttaaatgttatattcattgttggcttaccttatcaaactgtgccattaatcctttcacagacataggtaaggaagagaacaaccagtggattcaggggacaattatctatctccaaataataggcttttatttcttgcagctaactttttcagtgattctagcagatgccatctagtacatccttgatcttgtttctttcgtgagagatctcgccatggcagcatcttgttaagtaagtgtaattgcacatgcacaaaagacttaactagctttacatttagcagtcagttggttagattaggtttcatagtaaatgaataggaatagaaagaataggaagtgtttttattttccagtagtaattccgtggattccatttgacccagtttactatcagttcagttcaggtagatttggttcaacttttggtggtttttggctctaggatattcttgactttaatatcctagaacttactgagtcttcccttcaataaatacacttctcacatacctctaatcctatgcttccttgaaacaataatgctagctgagttgtttactaaggattattataagggcctgaaggtgtgggagtggagattaattaaaacctttatgttctccaatataagggaaaagcaggttggtactacttctgattaggcagaaaacaccaggattccttaagtgatccttgaaatggttattgttttctgccttgtcacatttgccactgtgccctttaaaacgatgtggaaacctcaggtttgtggacagcacaggtggaatgacatcttgtgcttcctgaggctcccctctaccacctgctgcccagggaagagtgtgtgtgctggagctggagcgcttgcactcttcaggtgactattctcacctccatttcctccacatgcattaggtgaaactgaggtctaagcctcctgcaaggtctacattttaaggactcacacatcaggctctcagaaatgtacacaggtattagttctgtttgttctaaaggaaatgtgggtatctctcaggccaggacttagtgactagttttcgctagacagcaggttaatacctagatctcatttaaaaaaaaaaaaaaaaaaacaggattaaagggaactgatcaggtttgttgagttttttagcctaattccaaagcatggaagagtgctctaggtaggaaagaaagctttttcttacgatttgtagctacctactgtgcctgacttggtgcctgtgtgaggattaagcccttagtctgctcttgcaattattcaaatgacaaattaaatttgcttttgtaataacaataaaagttgtcatcttcccttttgaaggatttgtcgtttgtaattacctgtgttgtaacaagcaaaaaccatgcccttttttgtacaatccttttatttttgtatcaggtactggaaccatctaccaaaaggtttgttggatggatctaataagctctgtcacataagggattcacaaacgtcatctgcttgcatatggcatgcaagtcttttgtataatgtaacaacaaccttaggaaac

SEQ ID NO: 435976 - DNA, 6786 bp, Homo sapiens
ggattacaggcggccgccaccacgcctagctaatttttgtatttttagcagagacggggtttcaccatgttggccaggctggtctcgaactcctgacctgaggtcatccgccctcgctggcctcccaaagtgctggaattacaggcgtgagccaccgagcccagccttgaggctcattttcaaaaggagaagggtaatgaactaggatttatgccccaaattcatatggaagatttaattatgtatgttaaagggtgctgttgtttgcatatttagccattggtttttggttttaacctatggtttgcatgttgatgttacttttagatgctggcaagtcaaccattggaggacaaataatgtatttgactggaatggttgacaaaaggacgcttgaaaagtatgaaagagaagctaaagagaaaaacagagaaacttggtacttgtcttgggccttagacacaaatcaggaagaacgagacaagggtaaaacagtagaagtgggtcgtgcctattttgaaaccgaaaagaagcatttcacaattctagatgcccctggccacaagagttttgtcccaaatatgattggtggtgcctctcaagctgatttggctgtgctggtaatctcagccaggaaaggagagtttgaaactggatttgaaaaaggaggacagacaagagaacatgcaatgttggcaaagacagcaggtgtaaaacacctaattgtgctaattaataagatggatgatccaacagtaaattggagcaatgagagatatgaagaatgtaaggagaaactagtgccatttttgaaaaaagttggcttcaatcccaaaaaggacattcactttatgccctgctcaggacttactggagcaaatctcaaagagcagtcggatttctgtccttggtacattggattaccgtttattccatatctggataatttgccgaacttcaatagatcagttgatggaccaatcaggctgccaattgtggataagtacaaggatatgggcactgtggtcctgggaaagctggaatcaggatctatttgtaaaggccagcagcttgtgatgatgccaaacaagcacaacgtggaagttcttggaatactttccgatgatgtagagactgataccgtagccccaggtgaaaacctcaaaatcagactgaaaggaattgaagaagaggagattcttccagggtttatactttgtgatcctaataatctttgtcattctggacgcacatttgatgcccagatagtgattatagagcacaaatccatcatctgcccaggctataatgcggtgctgcatattcatacctgtattgaggaggtggaaataacagccttaatctgcttggtagacaaaaaatcaggagaaaaaagtaagacccgaccccgttttgtgaaacaagatcaagtatgcattgctcgcttaaggacagcaggaaccatctgccttgagacctttaaagacttccctcagatgggtcgtttcaccttaagagatgagggtaagaccattgcaattggaaaagttctgaaactggttccagagaaagactaagcattttcttgatgaccctgcacaatactgtgaggaaaattgactgcagaagcctacttcacaccgccttctcttattttctgcccattgataaacctctccccatattttgcaaagaggaaattcacagcaaaagtccacattatgtcagctttctcatattgagagctctgctatgccactgttgaatttttcccaagattcctgtccctagccctcacttcaaactctgcttccttggacagatttggcaatagctttgtaagtgatgtggacataattgcctacaataatgaaaacctacaggaatttttttatttttcattttccccttaggcatatttagtatttttcccccaggcagatcattctgagtgtgcgagtgtgtgtgcacatgttacaaaggcaactaccatgttaataaaatattcaatttgaaatccttttcggtatttgaattgcttttgaataatgttttttatctggatgtaacattgttgcattagctttttaactttcccaagtaattgaatacattttattacttggacttttataaactctttccctacccactataaatgagacattcacagcgttcaagtttgtattaaaggaaaggattagtttgaccccttcttttgatggttaatgcatacatgcagttaaatccctttatgcaaatgtgacactgctttactaggtcttttagttatttatttattttttttttttttgccaatttatattgtaacatgatttcttgaacacagtaagttgttttaaaataaaagaacagcatactgtagtttttataagtaaagcgtaatgaaattgtacccctagagaaaattccattaacttgttaaattagtggaattaacaacaaataaagcatgtttgagacctggaaaaaattcctctggtagtatttataaatagagctgcatgcctctagtatgaaaaccgtatcagttgcaagtgccacttctacaagttactcagtttactctttgtatcagtaactttaaaggttggatgatccttgctggttaaagctaaatctcaacctagcaactaaatgaaaatatttagaatcatcagaatctgaacagactaaaattatcagcgataagcagaatcaagcagggtataagttttatctcaattatttgaaattgactgagttttcttaagtgtaaagctgaaatttgctaaccatgtttttgatgaaccacagtgcagcattgtgtgggttttagattgaatgactctctgctataattatcatgactttgaaatttttcatgagaataaatgaggaatggaggcaatttgtgggtttatccaaagcccccttgatgttgagtgttgccattgatcaaagatagcctcttttagattgtgatttctctctaaataagatactttgtatatttaatgacaagtctcttccctataattttgctcctcagaaaagaaaagcctagacagactgtatttccagtcacagaacataaaacttaatctaatgggtgttttgttttgttttgagacagaggctcactctgtcacctaggctggagtgcagtggctcgatctcagctcactgcagcctccacctcccggattcaagcaatttcctgcctcagcctcttgagtagctgggattacaggagccctccacgaggcccagttaatttttgtatctttagtggagacgaggtttccccctattggtcaggctggtctcaaacttctgacctcaagtgatccactcgcctcagcctctcaaaagtgctgggattacaggcatgaggcgccgcacttggcctagtgttttcttaactgtgaaattcccattcatttcttgaatgaggctacatcttatggacagagcaaagttattgtcctacagattcttaaaactataattatggctattgcatgaaatttaaatagattttattatgtctgcaaatctctgggcttttatttttctggaaaatataggagctttaatcaaaacataatagttctttttgtaattccatgttaataaaaacaaatactagcaattgcttgaattttaatgaatatttaaaagttcaagagccacggaaatcacttccagagataagagttccctttctaaatagaacacatttttaaaaaataagttatgtttgctactaaaacatttacactgttagactattatgtgcatgttgccaagactcttaagtaacttggatatcaactgtgaagggcctacctctaaaaagtaacaggtcatacaaatacaaatgtaactgtaaaaattccactggattcttgcatatttgcaagattagattattcaaaagaaatttcagtgctaaaattaaccagcaacataagttctatgggctttgaaaattgttctcatctttttaaagttgatgcattttcaatcctgcttacacaggctgttcatttggataagtaaataaaatgtctaaggtgaacttggcattatgtggagatgttggaccgttatagagcaatacaaattcctatgctgtcattctgttttctgcaaatgcaaacgtgcttatatggtcaacagtgcaaaaatagggtagttggctgcatatttagggtattacctaagcatttgttctctaacgttgctctactagaatgatttttttcttgcatcttttcacattaatgatgttctttatataactttcatgcgattatttagttttttaaattaataaagtgaatttaagaaatattgaaataaacatctaagtaattgccattttaaacccttgtttcttactgtgggagagggggaaatacagcactcatttcttgtttttaatttgcagaagtaagtgaaaatctatgtaaaatcaaaccaaaagagttggactgagtgtgtattgtcttgagattaagtgacaaatagtaaagtgttactgagtaattaagcccatgtatttttttttttgtgagttgaaaatctttgaaatatgtgataaccgaatgtcaaaagttcctaaactctaacagtgcaggttgttcactgtaacgaggtaactcatatttgctggttacataaactacaagtactgctctcacaatatgggactttgaactgtgatgtagttcaacagttgccggcatcctctcagctgatacgctgcgaatattttgggttagacttgcagccagatgcagttttgcaacccaagaaaaaagttgaacctatgatcaaaaactgctcccaagatgaacctgggaaaaaaatcagctaagctcccttggcgatctgcaggaacactagtaatgactggaattactccgtgatctttgatgactattacacataacagcactctagcaccttttcttactggcatggacttcctcatggactgctacttcatggatgatagcttcattgctttgggtagggatttaaggtagtcaaggggaaaatacgcagttttattacaggtcttaacatcaggcaactttcaactttaaaaccctttgtgaaaaatgtggttatagcactatagctctgattttaggatggttaaatgttatattcattgttggcttaccttatcaaactgtgccattaatcctttcacagacataggtaaggaagagaacaaccagtggattcaggggacaattatctatctccaaataataggcttttatttcttgcagctaactttttcagtgattctagcagatgccatctagtacatccttgatcttgtttctttcgtgagagatctcgccatggcagcatcttgttaagtaagtgtaattgcacatgcacaaaagacttaactagctttacatttagcagtcagttggttagattaggtttcatagtaaatgaataggaatagaaagaataggaagtgtttttattttccagtagtaattccgtggattccatttgacccagtttactatcagttcagttcaggtagatttggttcaacttttggtggtttttggctctaggatattcttgactttaatatcctagaacttactgagtcttcccttcaataaatacacttctcacatacctctaatcctatgcttccttgaaacaataatgctagctgagttgtttactaaggattattataagggcctgaaggtgtgggagtggagattaattaaaacctttatgttctccaatataagggaaaagcaggttggtactacttctgattaggcagaaaacaccaggattccttaagtgatccttgaaatggttattgttttctgccttgtcacatttgccactgtgccctttaaaacgatgtggaaacctcaggtttgtggacagcacaggtggaatgacatcttgtgcttcctgaggctcccctctaccaggcacattagcttagtgcttcagatgtcagcccaagtccttgttacctccttttcctgctgcccagggaagagtgtgtgtgctggagctggagcgcttgcactcttcaggtgactattctcacctccatttcctccacatgcattaggtgaaactgaggtctaagcctcctgcaaggtctacattttaaggactcacacatcaggctctcagaaatgtacacaggtattagttctgtttgttctaaaggaaatgtgggtatctctcaggccaggacttagtgactagttttcgctagacagcaggttaatacctagatctcatttaaaaaaaaaaaaaaaaaaacaggattaaagggaactgatcaggtttgttgagttttttagcctaattccaaagcatggaagagtgctctaggtaggaaagaaagctttttcttacgatttgtagctacctactgtgcctgacttggtgcctgtgtgaggattaagcccttagtctgctcttgcaattattcaaatgacaaattaaatttgcttttgtaataacaataaaagttgtcatcttcccttttgaaggatttgtcgtttgtaattacctgtgttgtaacaagcaaaaaccatgcccttttttgtacaatccttttatttttgtatcaggtactggaaccatctaccaaaaggtttgttggatggatctaataagctctgtcacataagggattcacaaacgtcatctgcttgcatatggcatgcaagtcttttgtataatgtaacaacaaccttaggaaac

SEQ ID NO: 435977 - DNA, 6788 bp, Homo sapiens
gcccagccctattctttcaatttctttgttttcttttgagacggagccttgctctgtcgcccaggctggagtgcaatggcacggtcttggctcgctgcaacctcctcctcccaggttcaggcgattctcctgcctcagtctcctaagtactacaggtgggctcctccacacccagctaatttttgtattttcggtagagacggggcttcaccatgttggtcaggctggtgacgaacccctgaccttgtgatccgccgccttggcctcccaaagtgctcagtttacagatgtgagccaccgcacccggctcaattttcatttcaccaatcttgttcgtgatttaggtgttgtgtgtcatccattatatctttaatggtgaagaatatcctaaaaactctgatgttcttaggaatattgttctttttttaaaaattatttcaggtacttgtcttgggccttagacacaaatcaggaagaacgagacaagggtaaaacagtagaagtgggtcgtgcctattttgaaaccgaaaagaagcatttcacaattctagatgcccctggccacaagagttttgtcccaaatatgattggtggtgcctctcaagctgatttggctgtgctggtaatctcagccaggaaaggagagtttgaaactggatttgaaaaaggaggacagacaagagaacatgcaatgttggcaaagacagcaggtgtaaaacacctaattgtgctaattaataagatggatgatccaacagtaaattggagcaatgagagatatgaagaatgtaaggagaaactagtgccatttttgaaaaaagttggcttcaatcccaaaaaggacattcactttatgccctgctcaggacttactggagcaaatctcaaagagcagtcggatttctgtccttggtacattggattaccgtttattccatatctggataatttgccgaacttcaatagatcagttgatggaccaatcaggctgccaattgtggataagtacaaggatatgggcactgtggtcctgggaaagctggaatcaggatctatttgtaaaggccagcagcttgtgatgatgccaaacaagcacaacgtggaagttcttggaatactttccgatgatgtagagactgataccgtagccccaggtgaaaacctcaaaatcagactgaaaggaattgaagaagaggagattcttccagggtttatactttgtgatcctaataatctttgtcattctggacgcacatttgatgcccagatagtgattatagagcacaaatccatcatctgcccaggctataatgcggtgctgcatattcatacctgtattgaggaggtggaaataacagccttaatctgcttggtagacaaaaaatcaggagaaaaaagtaagacccgaccccgttttgtgaaacaagatcaagtatgcattgctcgcttaaggacagcaggaaccatctgccttgagacctttaaagacttccctcagatgggtcgtttcaccttaagagatgagggtaagaccattgcaattggaaaagttctgaaactggttccagagaaagactaagcattttcttgatgaccctgcacaatactgtgaggaaaattgactgcagaagcctacttcacaccgccttctcttattttctgcccattgataaacctctccccatattttgcaaagaggaaattcacagcaaaagtccacattatgtcagctttctcatattgagagctctgctatgccactgttgaatttttcccaagattcctgtccctagccctcacttcaaactctgcttccttggacagatttggcaatagctttgtaagtgatgtggacataattgcctacaataatgaaaacctacaggaatttttttatttttcattttccccttaggcatatttagtatttttcccccaggcagatcattctgagtgtgcgagtgtgtgtgcacatgttacaaaggcaactaccatgttaataaaatattcaatttgaaatccttttcggtatttgaattgcttttgaataatgttttttatctggatgtaacattgttgcattagctttttaactttcccaagtaattgaatacattttattacttggacttttataaactctttccctacccactataaatgagacattcacagcgttcaagtttgtattaaaggaaaggattagtttgaccccttcttttgatggttaatgcatacatgcagttaaatccctttatgcaaatgtgacactgctttactaggtcttttagttatttatttattttttttttttttgccaatttatattgtaacatgatttcttgaacacagtaagttgttttaaaataaaagaacagcatactgtagtttttataagtaaagcgtaatgaaattgtacccctagagaaaattccattaacttgttaaattagtggaattaacaacaaataaagcatgtttgagacctggaaaaaattcctctggtagtatttataaatagagctgcatgcctctagtatgaaaaccgtatcagttgcaagtgccacttctacaagttactcagtttactctttgtatcagtaactttaaaggttggatgatccttgctggttaaagctaaatctcaacctagcaactaaatgaaaatatttagaatcatcagaatctgaacagactaaaattatcagcgataagcagaatcaagcagggtataagttttatctcaattatttgaaattgactgagttttcttaagtgtaaagctgaaatttgctaaccatgtttttgatgaaccacagtgcagcattgtgtgggttttagattgaatgactctctgctataattatcatgactttgaaatttttcatgagaataaatgaggaatggaggcaatttgtgggtttatccaaagcccccttgatgttgagtgttgccattgatcaaagatagcctcttttagattgtgatttctctctaaataagatactttgtatatttaatgacaagtctcttccctataattttgctcctcagaaaagaaaagcctagacagactgtatttccagtcacagaacataaaacttaatctaatgggtgttttgttttgttttgagacagaggctcactctgtcacctaggctggagtgcagtggctcgatctcagctcactgcagcctccacctcccggattcaagcaatttcctgcctcagcctcttgagtagctgggattacaggagccctccacgaggcccagttaatttttgtatctttagtggagacgaggtttccccctattggtcaggctggtctcaaacttctgacctcaagtgatccactcgcctcagcctctcaaaagtgctgggattacaggcatgaggcgccgcacttggcctagtgttttcttaactgtgaaattcccattcatttcttgaatgaggctacatcttatggacagagcaaagttattgtcctacagattcttaaaactataattatggctattgcatgaaatttaaatagattttattatgtctgcaaatctctgggcttttatttttctggaaaatataggagctttaatcaaaacataatagttctttttgtaattccatgttaataaaaacaaatactagcaattgcttgaattttaatgaatatttaaaagttcaagagccacggaaatcacttccagagataagagttccctttctaaatagaacacatttttaaaaaataagttatgtttgctactaaaacatttacactgttagactattatgtgcatgttgccaagactcttaagtaacttggatatcaactgtgaagggcctacctctaaaaagtaacaggtcatacaaatacaaatgtaactgtaaaaattccactggattcttgcatatttgcaagattagattattcaaaagaaatttcagtgctaaaattaaccagcaacataagttctatgggctttgaaaattgttctcatctttttaaagttgatgcattttcaatcctgcttacacaggctgttcatttggataagtaaataaaatgtctaaggtgaacttggcattatgtggagatgttggaccgttatagagcaatacaaattcctatgctgtcattctgttttctgcaaatgcaaacgtgcttatatggtcaacagtgcaaaaatagggtagttggctgcatatttagggtattacctaagcatttgttctctaacgttgctctactagaatgatttttttcttgcatcttttcacattaatgatgttctttatataactttcatgcgattatttagttttttaaattaataaagtgaatttaagaaatattgaaataaacatctaagtaattgccattttaaacccttgtttcttactgtgggagagggggaaatacagcactcatttcttgtttttaatttgcagaagtaagtgaaaatctatgtaaaatcaaaccaaaagagttggactgagtgtgtattgtcttgagattaagtgacaaatagtaaagtgttactgagtaattaagcccatgtatttttttttttgtgagttgaaaatctttgaaatatgtgataaccgaatgtcaaaagttcctaaactctaacagtgcaggttgttcactgtaacgaggtaactcatatttgctggttacataaactacaagtactgctctcacaatatgggactttgaactgtgatgtagttcaacagttgccggcatcctctcagctgatacgctgcgaatattttgggttagacttgcagccagatgcagttttgcaacccaagaaaaaagttgaacctatgatcaaaaactgctcccaagatgaacctgggaaaaaaatcagctaagctcccttggcgatctgcaggaacactagtaatgactggaattactccgtgatctttgatgactattacacataacagcactctagcaccttttcttactggcatggacttcctcatggactgctacttcatggatgatagcttcattgctttgggtagggatttaaggtagtcaaggggaaaatacgcagttttattacaggtcttaacatcaggcaactttcaactttaaaaccctttgtgaaaaatgtggttatagcactatagctctgattttaggatggttaaatgttatattcattgttggcttaccttatcaaactgtgccattaatcctttcacagacataggtaaggaagagaacaaccagtggattcaggggacaattatctatctccaaataataggcttttatttcttgcagctaactttttcagtgattctagcagatgccatctagtacatccttgatcttgtttctttcgtgagagatctcgccatggcagcatcttgttaagtaagtgtaattgcacatgcacaaaagacttaactagctttacatttagcagtcagttggttagattaggtttcatagtaaatgaataggaatagaaagaataggaagtgtttttattttccagtagtaattccgtggattccatttgacccagtttactatcagttcagttcaggtagatttggttcaacttttggtggtttttggctctaggatattcttgactttaatatcctagaacttactgagtcttcccttcaataaatacacttctcacatacctctaatcctatgcttccttgaaacaataatgctagctgagttgtttactaaggattattataagggcctgaaggtgtgggagtggagattaattaaaacctttatgttctccaatataagggaaaagcaggttggtactacttctgattaggcagaaaacaccaggattccttaagtgatccttgaaatggttattgttttctgccttgtcacatttgccactgtgccctttaaaacgatgtggaaacctcaggtttgtggacagcacaggtggaatgacatcttgtgcttcctgaggctcccctctaccaggcacattagcttagtgcttcagatgtcagcccaagtccttgttacctccttttcctgctgcccagggaagagtgtgtgtgctggagctggagcgcttgcactcttcaggtgactattctcacctccatttcctccacatgcattaggtgaaactgaggtctaagcctcctgcaaggtctacattttaaggactcacacatcaggctctcagaaatgtacacaggtattagttctgtttgttctaaaggaaatgtgggtatctctcaggccaggacttagtgactagttttcgctagacagcaggttaatacctagatctcatttaaaaaaaaaaaaaaaaaaacaggattaaagggaactgatcaggtttgttgagttttttagcctaattccaaagcatggaagagtgctctaggtaggaaagaaagctttttcttacgatttgtagctacctactgtgcctgacttggtgcctgtgtgaggattaagcccttagtctgctcttgcaattattcaaatgacaaattaaatttgcttttgtaataacaataaaagttgtcatcttcccttttgaaggatttgtcgtttgtaattacctgtgttgtaacaagcaaaaaccatgcccttttttgtacaatccttttatttttgtatcaggtactggaaccatctaccaaaaggtttgttggatggatctaataagctctgtcacataagggattcacaaacgtcatctgcttgcatatggcatgcaagtcttttgtataatgtaacaacaaccttaggaaac

SEQ ID NO: 435978 - DNA, 7514 bp, Homo sapiens
ggcggcgaggggtcaatccgcgccgggggtggggttggctgtgaggccgtcggaggtggttgggtgggaggagatccgctcacacacacgaggaggagggttgagctgctgccgccgccgcctctgtcgtcgtcgcgagtgtggagtcgggactggagctgctgccgcggcgacgccggggatctttgtcgctagctcccggcccttctgccccgccgccttccctcagtcagcgttgcccactcctctccggccgggcgcccctgcctccatttctcgctctctgtccaccacacacacggcccccccgatcatggatccgggcagtggcggcggcggcggcggcggcggcggcggcgggagcagcagcggcagcagcagcagcgactcggcgcctgactgctgggaccaggcggacatggaagcccccgggccgggcccttgcggcggcggcggctccctggcggcggcggccgaggcccagcgggagaacctcagcgcggccttcagccggcaactcaacgtcaacgccaagcccttcgtgcccaacgtccacgccgccgagttcgtgccgtccttcctgcggtgcccggcagcgccgccacccccagctggcggcgccgccaataaccacggagccggcagcggcgcgggaggccgtgcggcacctgtggaatcctctcaagaggaacagtcattgtgtgaaggttcaaattcagctgttagcatggaactttcagaacctattgtagaaaatggagagacagaaatgtctccagaagaatcatgggagcacaaagaagaaataagtgaagcagagccagggggtggttccttgggagatggaaggccgccagaggaaagtgcccatgaaatgatggaggaggaagaggaaatcccaaaacctaagtctgtggttgcaccgccaggtgctcctaagaaagagcatgtaaatgtagtattcattgggcacgtagatgctggcaagtcaaccattggaggacaaataatgtatttgactggaatggttgacaaaaggacgcttgaaaagtatgaaagagaagctaaagagaaaaacagagaaacttggtacttgtcttgggccttagacacaaatcaggaagaacgagacaagggtaaaacagtagaagtgggtcgtgcctattttgaaaccgaaaagaagcatttcacaattctagatgcccctggccacaagagttttgtcccaaatatgattggtggtgcctctcaagctgatttggctgtgctggtaatctcagccaggaaaggagagtttgaaactggatttgaaaaaggaggacagacaagagaacatgcaatgttggcaaagacagcaggtgtaaaacacctaattgtgctaattaataagatggatgatccaacagtaaattggagcaatgagagatatgaagaatgtaaggagaaactagtgccatttttgaaaaaagttggcttcaatcccaaaaaggacattcactttatgccctgctcaggacttactggagcaaatctcaaagagcagtcggatttctgtccttggtacattggattaccgtttattccatatctggataatttgccgaacttcaatagatcagttgatggaccaatcaggctgccaattgtggataagtacaaggatatgggcactgtggtcctgggaaagctggaatcaggatctatttgtaaaggccagcagcttgtgatgatgccaaacaagcacaacgtggaagttcttggaatactttccgatgatgtagagactgataccgtagccccaggtgaaaacctcaaaatcagactgaaaggaattgaagaagaggagattcttccagggtttatactttgtgatcctaataatctttgtcattctggacgcacatttgatgcccagatagtgattatagagcacaaatccatcatctgcccaggctataatgcggtgctgcatattcatacctgtattgaggaggtggaaataacagccttaatctgcttggtagacaaaaaatcaggagaaaaaagtaagacccgaccccgttttgtgaaacaagatcaagtatgcattgctcgcttaaggacagcaggaaccatctgccttgagacctttaaagacttccctcagatgggtcgtttcaccttaagagatgagggtaagaccattgcaattggaaaagttctgaaactggttccagagaaagactaagcattttcttgatgaccctgcacaatactgtgaggaaaattgactgcagaagcctacctggttccagagaaagactaagcattttcttgatgaccctgcacaatactgtgaggaaaattgactgcagaagcctacttcacaccgccttctcttattttctgcccattgataaacctctccccatattttgcaaagaggaaattcacagcaaaagtccacattatgtcagctttctcatattgagagctctgctatgccactgttgaatttttcccaagattcctgtccctagccctcacttcaaactctgcttccttggacagatttggcaatagctttgtaagtgatgtggacataattgcctacaataatgaaaacctacaggaatttttttatttttcattttccccttaggcatatttagtatttttcccccaggcagatcattctgagtgtgcgagtgtgtgtgcacatgttacaaaggcaactaccatgttaataaaatattcaatttgaaatccttttcggtatttgaattgcttttgaataatgttttttatctggatgtaacattgttgcattagctttttaactttcccaagtaattgaatacattttattacttggacttttataaactctttccctacccactataaatgagacattcacagcgttcaagtttgtattaaaggaaaggattagtttgaccccttcttttgatggttaatgcatacatgcagttaaatccctttatgcaaatgtgacactgctttactaggtcttttagttatttatttattttttttttttttgccaatttatattgtaacatgatttcttgaacacagtaagttgttttaaaataaaagaacagcatactgtagtttttataagtaaagcgtaatgaaattgtacccctagagaaaattccattaacttgttaaattagtggaattaacaacaaataaagcatgtttgagacctggaaaaaattcctctggtagtatttataaatagagctgcatgcctctagtatgaaaaccgtatcagttgcaagtgccacttctacaagttactcagtttactctttgtatcagtaactttaaaggttggatgatccttgctggttaaagctaaatctcaacctagcaactaaatgaaaatatttagaatcatcagaatctgaacagactaaaattatcagcgataagcagaatcaagcagggtataagttttatctcaattatttgaaattgactgagttttcttaagtgtaaagctgaaatttgctaaccatgtttttgatgaaccacagtgcagcattgtgtgggttttagattgaatgactctctgctataattatcatgactttgaaatttttcatgagaataaatgaggaatggaggcaatttgtgggtttatccaaagcccccttgatgttgagtgttgccattgatcaaagatagcctcttttagattgtgatttctctctaaataagatactttgtatatttaatgacaagtctcttccctataattttgctcctcagaaaagaaaagcctagacagactgtatttccagtcacagaacataaaacttaatctaatgggtgttttgttttgttttgagacagaggctcactctgtcacctaggctggagtgcagtggctcgatctcagctcactgcagcctccacctcccggattcaagcaatttcctgcctcagcctcttgagtagctgggattacaggagccctccacgaggcccagttaatttttgtatctttagtggagacgaggtttccccctattggtcaggctggtctcaaacttctgacctcaagtgatccactcgcctcagcctctcaaaagtgctgggattacaggcatgaggcgccgcacttggcctagtgttttcttaactgtgaaattcccattcatttcttgaatgaggctacatcttatggacagagcaaagttattgtcctacagattcttaaaactataattatggctattgcatgaaatttaaatagattttattatgtctgcaaatctctgggcttttatttttctggaaaatataggagctttaatcaaaacataatagttctttttgtaattccatgttaataaaaacaaatactagcaattgcttgaattttaatgaatatttaaaagttcaagagccacggaaatcacttccagagataagagttccctttctaaatagaacacatttttaaaaaataagttatgtttgctactaaaacatttacactgttagactattatgtgcatgttgccaagactcttaagtaacttggatatcaactgtgaagggcctacctctaaaaagtaacaggtcatacaaatacaaatgtaactgtaaaaattccactggattcttgcatatttgcaagattagattattcaaaagaaatttcagtgctaaaattaaccagcaacataagttctatgggctttgaaaattgttctcatctttttaaagttgatgcattttcaatcctgcttacacaggctgttcatttggataagtaaataaaatgtctaaggtgaacttggcattatgtggagatgttggaccgttatagagcaatacaaattcctatgctgtcattctgttttctgcaaatgcaaacgtgcttatatggtcaacagtgcaaaaatagggtagttggctgcatatttagggtattacctaagcatttgttctctaacgttgctctactagaatgatttttttcttgcatcttttcacattaatgatgttctttatataactttcatgcgattatttagttttttaaattaataaagtgaatttaagaaatattgaaataaacatctaagtaattgccattttaaacccttgtttcttactgtgggagagggggaaatacagcactcatttcttgtttttaatttgcagaagtaagtgaaaatctatgtaaaatcaaaccaaaagagttggactgagtgtgtattgtcttgagattaagtgacaaatagtaaagtgttactgagtaattaagcccatgtatttttttttttgtgagttgaaaatctttgaaatatgtgataaccgaatgtcaaaagttcctaaactctaacagtgcaggttgttcactgtaacgaggtaactcatatttgctggttacataaactacaagtactgctctcacaatatgggactttgaactgtgatgtagttcaacagttgccggcatcctctcagctgatacgctgcgaatattttgggttagacttgcagccagatgcagttttgcaacccaagaaaaaagttgaacctatgatcaaaaactgctcccaagatgaacctgggaaaaaaatcagctaagctcccttggcgatctgcaggaacactagtaatgactggaattactccgtgatctttgatgactattacacataacagcactctagcaccttttcttactggcatggacttcctcatggactgctacttcatggatgatagcttcattgctttgggtagggatttaaggtagtcaaggggaaaatacgcagttttattacaggtcttaacatcaggcaactttcaactttaaaaccctttgtgaaaaatgtggttatagcactatagctctgattttaggatggttaaatgttatattcattgttggcttaccttatcaaactgtgccattaatcctttcacagacataggtaaggaagagaacaaccagtggattcaggggacaattatctatctccaaataataggcttttatttcttgcagctaactttttcagtgattctagcagatgccatctagtacatccttgatcttgtttctttcgtgagagatctcgccatggcagcatcttgttaagtaagtgtaattgcacatgcacaaaagacttaactagctttacatttagcagtcagttggttagattaggtttcatagtaaatgaataggaatagaaagaataggaagtgtttttattttccagtagtaattccgtggattccatttgacccagtttactatcagttcagttcaggtagatttggttcaacttttggtggtttttggctctaggatattcttgactttaatatcctagaacttactgagtcttcccttcaataaatacacttctcacatacctctaatcctatgcttccttgaaacaataatgctagctgagttgtttactaaggattattataagggcctgaaggtgtgggagtggagattaattaaaacctttatgttctccaatataagggaaaagcaggttggtactacttctgattaggcagaaaacaccaggattccttaagtgatccttgaaatggttattgttttctgccttgtcacatttgccactgtgccctttaaaacgatgtggaaacctcaggtttgtggacagcacaggtggaatgacatcttgtgcttcctgaggctcccctctaccaggcacattagcttagtgcttcagatgtcagcccaagtccttgttacctccttttcctgctgcccagggaagagtgtgtgtgctggagctggagcgcttgcactcttcaggtgactattctcacctccatttcctccacatgcattaggtgaaactgaggtctaagcctcctgcaaggtctacattttaaggactcacacatcaggctctcagaaatgtacacaggtattagttctgtttgttctaaaggaaatgtgggtatctctcaggccaggacttagtgactagttttcgctagacagcaggttaatacctagatctcatttaaaaaaaaaaaaaaaaaaacaggattaaagggaactgatcaggtttgttgagttttttagcctaattccaaagcatggaagagtgctctaggtaggaaagaaagctttttcttacgatttgtagctacctactgtgcctgacttggtgcctgtgtgaggattaagcccttagtctgctcttgcaattattcaaatgacaaattaaatttgcttttgtaataacaataaaagttgtcatcttcccttttgaaggatttgtcgtttgtaattacctgtgttgtaacaagcaaaaaccatgcccttttttgtacaatccttttatttttgtatcaggtactggaaccatctaccaaaaggtttgttggatggatctaataagctctgtcacataagggattcacaaacgtcatctgcttgcatatggcatgcaagtcttttgtataatgtaacaacaaccttaggaaac

SEQ ID NO: 435979 - DNA, 6196 bp, Homo sapiens
ggagtaaactgtttcctttcttggaattaggtaatctcagccaggaaaggagagtttgaaactggatttgaaaaaggaggacagacaagagaacatgcaatgttggcaaagacagcaggtgtaaaacacctaattgtgctaattaataagatggatgatccaacagtaaattggagcaatgagagatatgaagaatgtaaggagaaactagtgccatttttgaaaaaagttggcttcaatcccaaaaaggacattcactttatgccctgctcaggacttactggagcaaatctcaaagagcagtcggatttctgtccttggtacattggattaccgtttattccatatctggataatttgccgaacttcaatagatcagttgatggaccaatcaggctgccaattgtggataagtacaaggatatgggcactgtggtcctgggaaagctggaatcaggatctatttgtaaaggccagcagcttgtgatgatgccaaacaagcacaacgtggaagttcttggaatactttccgatgatgtagagactgataccgtagccccaggtgaaaacctcaaaatcagactgaaaggaattgaagaagaggagattcttccagggtttatactttgtgatcctaataatctttgtcattctggacgcacatttgatgcccagatagtgattatagagcacaaatccatcatctgcccaggctataatgcggtgctgcatattcatacctgtattgaggaggtggaaataacagccttaatctgcttggtagacaaaaaatcaggagaaaaaagtaagacccgaccccgttttgtgaaacaagatcaagtatgcattgctcgcttaaggacagcaggaaccatctgccttgagacctttaaagacttccctcagatgggtcgtttcaccttaagagatgagggtaagaccattgcaattggaaaagttctgaaactggttccagagaaagactaagcattttcttgatgaccctgcacaatactgtgaggaaaattgactgcagaagcctacttcacaccgccttctcttattttctgcccattgataaacctctccccatattttgcaaagaggaaattcacagcaaaagtccacattatgtcagctttctcatattgagagctctgctatgccactgttgaatttttcccaagattcctgtccctagccctcacttcaaactctgcttccttggacagatttggcaatagctttgtaagtgatgtggacataattgcctacaataatgaaaacctacaggaatttttttatttttcattttccccttaggcatatttagtatttttcccccaggcagatcattctgagtgtgcgagtgtgtgtgcacatgttacaaaggcaactaccatgttaataaaatattcaatttgaaatccttttcggtatttgaattgcttttgaataatgttttttatctggatgtaacattgttgcattagctttttaactttcccaagtaattgaatacattttattacttggacttttataaactctttccctacccactataaatgagacattcacagcgttcaagtttgtattaaaggaaaggattagtttgaccccttcttttgatggttaatgcatacatgcagttaaatccctttatgcaaatgtgacactgctttactaggtcttttagttatttatttattttttttttttttgccaatttatattgtaacatgatttcttgaacacagtaagttgttttaaaataaaagaacagcatactgtagtttttataagtaaagcgtaatgaaattgtacccctagagaaaattccattaacttgttaaattagtggaattaacaacaaataaagcatgtttgagacctggaaaaaattcctctggtagtatttataaatagagctgcatgcctctagtatgaaaaccgtatcagttgcaagtgccacttctacaagttactcagtttactctttgtatcagtaactttaaaggttggatgatccttgctggttaaagctaaatctcaacctagcaactaaatgaaaatatttagaatcatcagaatctgaacagactaaaattatcagcgataagcagaatcaagcagggtataagttttatctcaattatttgaaattgactgagttttcttaagtgtaaagctgaaatttgctaaccatgtttttgatgaaccacagtgcagcattgtgtgggttttagattgaatgactctctgctataattatcatgactttgaaatttttcatgagaataaatgaggaatggaggcaatttgtgggtttatccaaagcccccttgatgttgagtgttgccattgatcaaagatagcctcttttagattgtgatttctctctaaataagatactttgtatatttaatgacaagtctcttccctataattttgctcctcagaaaagaaaagcctagacagactgtatttccagtcacagaacataaaacttaatctaatgggtgttttgttttgttttgagacagaggctcactctgtcacctaggctggagtgcagtggctcgatctcagctcactgcagcctccacctcccggattcaagcaatttcctgcctcagcctcttgagtagctgggattacaggagccctccacgaggcccagttaatttttgtatctttagtggagacgaggtttccccctattggtcaggctggtctcaaacttctgacctcaagtgatccactcgcctcagcctctcaaaagtgctgggattacaggcatgaggcgccgcacttggcctagtgttttcttaactgtgaaattcccattcatttcttgaatgaggctacatcttatggacagagcaaagttattgtcctacagattcttaaaactataattatggctattgcatgaaatttaaatagattttattatgtctgcaaatctctgggcttttatttttctggaaaatataggagctttaatcaaaacataatagttctttttgtaattccatgttaataaaaacaaatactagcaattgcttgaattttaatgaatatttaaaagttcaagagccacggaaatcacttccagagataagagttccctttctaaatagaacacatttttaaaaaataagttatgtttgctactaaaacatttacactgttagactattatgtgcatgttgccaagactcttaagtaacttggatatcaactgtgaagggcctacctctaaaaagtaacaggtcatacaaatacaaatgtaactgtaaaaattccactggattcttgcatatttgcaagattagattattcaaaagaaatttcagtgctaaaattaaccagcaacataagttctatgggctttgaaaattgttctcatctttttaaagttgatgcattttcaatcctgcttacacaggctgttcatttggataagtaaataaaatgtctaaggtgaacttggcattatgtggagatgttggaccgttatagagcaatacaaattcctatgctgtcattctgttttctgcaaatgcaaacgtgcttatatggtcaacagtgcaaaaatagggtagttggctgcatatttagggtattacctaagcatttgttctctaacgttgctctactagaatgatttttttcttgcatcttttcacattaatgatgttctttatataactttcatgcgattatttagttttttaaattaataaagtgaatttaagaaatattgaaataaacatctaagtaattgccattttaaacccttgtttcttactgtgggagagggggaaatacagcactcatttcttgtttttaatttgcagaagtaagtgaaaatctatgtaaaatcaaaccaaaagagttggactgagtgtgtattgtcttgagattaagtgacaaatagtaaagtgttactgagtaattaagcccatgtatttttttttttgtgagttgaaaatctttgaaatatgtgataaccgaatgtcaaaagttcctaaactctaacagtgcaggttgttcactgtaacgaggtaactcatatttgctggttacataaactacaagtactgctctcacaatatgggactttgaactgtgatgtagttcaacagttgccggcatcctctcagctgatacgctgcgaatattttgggttagacttgcagccagatgcagttttgcaacccaagaaaaaagttgaacctatgatcaaaaactgctcccaagatgaacctgggaaaaaaatcagctaagctcccttggcgatctgcaggaacactagtaatgactggaattactccgtgatctttgatgactattacacataacagcactctagcaccttttcttactggcatggacttcctcatggactgctacttcatggatgatagcttcattgctttgggtagggatttaaggtagtcaaggggaaaatacgcagttttattacaggtcttaacatcaggcaactttcaactttaaaaccctttgtgaaaaatgtggttatagcactatagctctgattttaggatggttaaatgttatattcattgttggcttaccttatcaaactgtgccattaatcctttcacagacataggtaaggaagagaacaaccagtggattcaggggacaattatctatctccaaataataggcttttatttcttgcagctaactttttcagtgattctagcagatgccatctagtacatccttgatcttgtttctttcgtgagagatctcgccatggcagcatcttgttaagtaagtgtaattgcacatgcacaaaagacttaactagctttacatttagcagtcagttggttagattaggtttcatagtaaatgaataggaatagaaagaataggaagtgtttttattttccagtagtaattccgtggattccatttgacccagtttactatcagttcagttcaggtagatttggttcaacttttggtggtttttggctctaggatattcttgactttaatatcctagaacttactgagtcttcccttcaataaatacacttctcacatacctctaatcctatgcttccttgaaacaataatgctagctgagttgtttactaaggattattataagggcctgaaggtgtgggagtggagattaattaaaacctttatgttctccaatataagggaaaagcaggttggtactacttctgattaggcagaaaacaccaggattccttaagtgatccttgaaatggttattgttttctgccttgtcacatttgccactgtgccctttaaaacgatgtggaaacctcaggtttgtggacagcacaggtggaatgacatcttgtgcttcctgaggctcccctctaccaggcacattagcttagtgcttcagatgtcagcccaagtccttgttacctccttttcctgctgcccagggaagagtgtgtgtgctggagctggagcgcttgcactcttcaggtgactattctcacctccatttcctccacatgcattaggtgaaactgaggtctaagcctcctgcaaggtctacattttaaggactcacacatcaggctctcagaaatgtacacaggtattagttctgtttgttctaaaggaaatgtgggtatctctcaggccaggacttagtgactagttttcgctagacagcaggttaatacctagatctcatttaaaaaaaaaaaaaaaaaaacaggattaaagggaactgatcaggtttgttgagttttttagcctaattccaaagcatggaagagtgctctaggtaggaaagaaagctttttcttacgatttgtagctacctactgtgcctgacttggtgcctgtgtgaggattaagcccttagtctgctcttgcaattattcaaatgacaaattaaatttgcttttgtaataacaataaaagttgtcatcttcccttttgaaggatttgtcgtttgtaattacctgtgttgtaacaagcaaaaaccatgcccttttttgtacaatccttttatttttgtatcaggtactggaaccatctaccaaaaggtttgttggatggatctaataagctctgtcacataagggattcacaaacgtcatctgcttgcatatggcatgcaagtcttttgtataatgtaacaacaaccttaggaaac

SEQ ID NO: 435980 - DNA, 5469 bp, Homo sapiens
ggcggcgaggggtcaatccgcgccgggggtggggttggctgtgaggccgtcggaggtggttgggtgggaggagatccgctcacacacacgaggaggagggttgagctgctgccgccgccgcctctgtcgtcgtcgcgagtgtggagtcgggactggagctgctgccgcggcgacgccggggatctttgtcgctagctcccggcccttctgccccgccgccttccctcagtcagcgttgcccactcctctccggccgggcgcccctgcctccatttctcgctctctgtccaccacacacacggcccccccgatcatggatccgggcagtggcggcggcggcggcggcggcggcggcggcgggagcagcagcggcagcagcagcagcgactcggcgcctgactgctgggaccaggcggacatggaagcccccgggccgggcccttgcggcggcggcggctccctggcggcggcggccgaggcccagcgggagaacctcagcgcggccttcagccggcaactcaacgtcaacgccaagcccttcgtgcccaacgtccacgccgccgagttcgtgccgtccttcctgcggtgcccggcagcgccgccacccccagctggcggcgccgccaataaccacggagccggcagcggcgcgggaggccgtgcggcacctgtggaatcctctcaagaggaacagtcattgtgtgaaggttcaaattcagctgttagcatggaactttcagaacctattgtagaaaatggagagacagaaatgtctccagaagaatcatgggagcacaaagaagaaataagtgaagcagagccagggggtggttccttgggagatggaaggccgccagaggaaagtgcccatgaaatgatggaggaggaagaggaaatcccaaaacctaagtctgtggttgcaccgccaggtgctcctaagaaagagcatgtaaatgtagtattcattgggcacgtagatgctggcaagtcaaccattggaggacaaataatgtatttgactggaatggttgacaaaaggacgcttgaaaagtatgaaagagaagctaaagagaaaaacagagaaacttggtacttgtcttgggccttagacacaaatcaggaagaacgagacaagggtaaaacagtagaagtgggtcgtgcctattttgaaaccgaaaagaagcatttcacaattctagatgcccctggccacaagagttttgtcccaaatatgattggtggtgcctctcaagctgatttggctgtgctggtaatctcagccaggaaaggagagtttgaaactggatttgaaaaaggaggacagacaagagaacatgcaatgttggcaaagacagcaggtgtaaaacacctaattgtgctaattaataagatggatgatccaacagtaaattggagcaatgagagatatgaagaatgtaaggagaaactagtgccatttttgaaaaaagttggcttcaatcccaaaaaggacattcactttatgccctgctcaggacttactggagcaaatctcaaagagcagtcggatttctgtccttggtacattggattaccgtttattccatatctggataatttgccgaacttcaatagatcagttgatggaccaatcaggctgccaattgtggataagtacaaggatatgggcactgtggtcctgggaaagctggaatcaggatctatttgtaaaggccagcagcttgtgatgatgccaaacaagcacaacgtggaagttcttggaatactttccgatgatgtagagactgataccgtagccccaggtgaaaacctcaaaatcagactgaaaggaattgaagaagaggagattcttccagggtttatactttgtgatcctaataatctttgtcattctggacgcacatttgatgcccagatagtgattatagagcacaaatccatcatctgcccaggctataatgcggtgctgcatattcatacctgtattgaggaggtggaaataacagccttaatctgcttggtagacaaaaaatcaggagaaaaaagtaagacccgaccccgttttgtgaaacaagatcaagtatgcattgctcgcttaaggacagcaggaaccatctgccttgagacctttaaagacttccctcagatgggtcgtttcaccttaagagatgagggtaagaccattgcaattggaaaagttctgaaactggttccagagaaagactaagcattttcttgatgaccctgcacaatactgtgaggaaaattgactgcagaagcctacttcacaccgccttctcttattttctgcccattgataaacctctccccatattttgcaaagaggaaattcacagcaaaagtccacattatgtcagctttctcatattgagagctctgctatgccactgttgaatttttcccaagattcctgtccctagccctcacttcaaactctgcttccttggacagatttggcaatagctttgtaagtgatgtggacataattgcctacaataatgaaaacctacaggaatttttttatttttcattttccccttaggcatatttagtatttttcccccaggcagatcattctgagtgtgcgagtgtgtgtgcacatgttacaaaggcaactaccatgttaataaaatattcaatttgaaatccttttcggtatttgaattgcttttgaataatgttttttatctggatgtaacattgttgcattagctttttaactttcccaagtaattgaatacattttattacttggacttttataaactctttccctacccactataaatgagacattcacagcgttcaagtttgtattaaaggaaaggattagtttgaccccttcttttgatggttaatgcatacatgcagttaaatccctttatgcaaatgtgacactgctttactaggtcttttagttatttatttattttttttttttttgccaatttatattgtaacatgatttcttgaacacagtaagttgttttaaaataaaagaacagcatactgtagtttttataagtaaagcgtaatgaaattgtacccctagagaaaattccattaacttgttaaattagtggaattaacaacaaataaagcatgtttgagacctggaaaaaattcctctggtagtatttataaatagagctgcatgcctctagtatgaaaaccgtatcagttgcaagtgccacttctacaagttactcagtttactctttgtatcagtaactttaaaggttggatgatccttgctggttaaagctaaatctcaacctagcaactaaatgaaaatatttagaatcatcagaatctgaacagactaaaattatcagcgataagcagaatcaagcagggtataagttttatctcaattatttgaaattgactgagttttcttaagtgtaaagctgaaatttgctaaccatgtttttgatgaaccacagtgcagcattgtgtgggttttagattgaatgactctctgctataattatcatgactttgaaatttttcatgagaataaatgaggaatggaggcaatttgtgggtttatccaaagcccccttgatgttgagtgttgccattgatcaaagatagcctcttttagattgtgatttctctctaaataagatactttgtatatttaatgacaagtctcttccctataattttgctcctcagaaaagaaaagcctagacagactgtatttccagtcacagaacataaaacttaatctaatgggtgttttgttttgttttgagacagaggctcactctgtcacctaggctggagtgcagtggctcgatctcagctcactgcagcctccacctcccggattcaagcaatttcctgcctcagcctcttgagtagctgggattacaggagccctccacgaggcccagttaatttttgtatctttagtggagacgaggtttccccctattggtcaggctggtctcaaacttctgacctcaagtgatccactcgcctcagcctctcaaaagtgctgggattacaggcatgaggcgccgcacttggcctagtgttttcttaactgtgaaattcccattcatttcttgaatgaggctacatcttatggacagagcaaagttattgtcctacagattcttaaaactataattatggctattgcatgaaatttaaatagattttattatgtctgcaaatctctgggcttttatttttctggaaaatataggagctttaatcaaaacataatagttctttttgtaattccatgttaataaaaacaaatactagcaattgcttgaattttaatgaatatttaaaagttcaagagccacggaaatcacttccagagataagagttccctttctaaatagaacacatttttaaaaaataagttatgtttgctactaaaacatttacactgttagactattatgtgcatgttgccaagactcttaagtaacttggatatcaactgtgaagggcctacctctaaaaagtaacaggtcatacaaatacaaatgtaactgtaaaaattccactggattcttgcatatttgcaagattagattattcaaaagaaatttcagtgctaaaattaaccagcaacataagttctatgggctttgaaaattgttctcatctttttaaagttgatgcattttcaatcctgcttacacaggctgttcatttggataagtaaataaaatgtctaaggtgaacttggcattatgtggagatgttggaccgttatagagcaatacaaattcctatgctgtcattctgttttctgcaaatgcaaacgtgcttatatggtcaacagtgcaaaaatagggtagttggctgcatatttagggtattacctaagcatttgttctctaacgttgctctactagaatgatttttttcttgcatcttttcacattaatgatgttctttatataactttcatgcgattatttagttttttaaattaataaagtgaatttaagaaatattgaaataaacatctaagtaattgccattttaaacccttgtttcttactgtgggagagggggaaatacagcactcatttcttgtttttaatttgcagaagtaagtgaaaatctatgtaaaatcaaaccaaaagagttggactgagtgtgtattgtcttgagattaagtgacaaatagtaaagtgttactgagtaaaaaaaaaaccaaacaaagaaagcaactgaactaaactgctaaagttattttcctggaccattcttggccaatttccgcctgatatgccccggtgttggcttgcacacgatttacattgtattcaagaaatgtggggcccctctggcgcctgttctttttatttggaaacgttaaataatggccccaaatttagacctcttgggcccctcccctcttgagtggaggcctccccaaccccggcgggcggttaccaccgcggggggaa

SEQ ID NO: 435981 - DNA, 3138 bp, Homo sapiens
ggcggcgaggggtcaatccgcgccgggggtggggttggctgtgaggccgtcggaggtggttgggtgggaggagatccgctcacacacacgaggaggagggttgagctgctgccgccgccgcctctgtcgtcgtcgcgagtgtggagtcgggactggagctgctgccgcggcgacgccggggatctttgtcgctagctcccggcccttctgccccgccgccttccctcagtcagcgttgcccactcctctccggccgggcgcccctgcctccatttctcgctctctgtccaccacacacacggcccccccgatcatggatccgggcagtggcggcggcggcggcggcggcggcggcggcgggagcagcagcggcagcagcagcagcgactcggcgcctgactgctgggaccaggcggacatggaagcccccgggccgggcccttgcggcggcggcggctccctggcggcggcggccgaggcccagcgggagaacctcagcgcggccttcagccggcaactcaacgtcaacgccaagcccttcgtgcccaacgtccacgccgccgagttcgtgccgtccttcctgcggtgcccggcagcgccgccacccccagctggcggcgccgccaataaccacggagccggcagcggcgcgggaggccgtgcggcacctgtggaatcctctcaagaggaacagtcattgtgtgaaggttcaaattcagctgttagcatggaactttcagaacctattgtagaaaatggagagacagaaatgtctccagaagaatcatgggagcacaaagaagaaataagtgaagcagagccagggggtggttccttgggagatggaaggccgccagaggaaagtgcccatgaaatgatggaggaggaagaggaaatcccaaaacctaagtctgtggttgcaccgccaggtgctcctaagaaagagcatgtaaatgtagtattcattgggcacgtagatgctggcaagtcaaccattggaggacaaataatgtatttgactggaatggttgacaaaaggacgcttgaaaagtatgaaagagaagctaaagagaaaaacagagaaacttggtacttgtcttgggccttagacacaaatcaggaagaacgagacaagggtaaaacagtagaagtgggtcgtgcctattttgaaaccgaaaagaagcatttcacaattctagatgcccctggccacaagagttttgtcccaaatatgattggtggtgcctctcaagctgatttggctgtgctggtaatctcagccaggaaaggagagtttgaaactggatttgaaaaaggaggacagacaagagaacatgcaatgttggcaaagacagcaggtgtaaaacacctaattgtgctaattaataagatggatgatccaacagtaaattggagcaatgagagatatgaagaatgtaaggagaaactagtgccatttttgaaaaaagttggcttcaatcccaaaaaggacattcactttatgccctgctcaggacttactggagcaaatctcaaagagcagtcggatttctgtccttggtacattggattaccgtttattccatatctggataatttgccgaacttcaatagatcagttgatggaccaatcaggctgccaattgtggataagtacaaggatatgggcactgtggtcctgggaaagctggaatcaggatctatttgtaaaggccagcagcttgtgatgatgccaaacaagcacaacgtggaagttcttggaatactttccgatgatgtagagactgataccgtagccccaggtgaaaacctcaaaatcagactgaaaggaattgaagaagaggagattcttccagggtttatactttgtgatcctaataatctttgtcattctggacgcacatttgatgcccagatagtgattatagagcacaaatccatcatctgcccaggctataatgcggtgctgcatattcatacctgtattgaggaggtggaaataacagccttaatctgcttggtagacaaaaaatcaggagaaaaaagtaagacccgaccccgttttgtgaaacaagatcaagtatgcattgctcgcttaaggacagcaggaaccatctgccttgagacctttaaagacttccctcagatgggtcgtttcaccttaagagatgagggtaagaccattgcaattggaaaagttctgaaactggttccagagaaagactaagcattttcttgatgaccctgcacaatactgtgaggaaaattgactgcagaagcctacttcacaccgccttctcttattttctgcccattgataaacctctccccatattttgcaaagaggaaattcacagcaaaagtccacattatgtcagctttctcatattgagagctctgctatgccactgttgaatttttcccaagattcctgtccctagccctcacttcaaactctgcttccttggacagatttggcaatagctttgtaagtgatgtggacataattgcctacaataatgaaaacctacaggaatttttttatttttcattttccccttaggcatatttagtatttttcccccaggcagatcattctgagtgtgcgagtgtgtgtgcacatgttacaaaggcaactaccatgttaataaaatattcaatttgaaatccttttcggtatttgaattgcttttgaataatgttttttatctggatgtaacattgttgcattagctttttaactttcccaagtaattgaatacattttattacttggacttttataaactctttccctacccactataaatgagacattcacagcgttcaagtttgtattaaaggaaaggattagtttgaccccttcttttgatggttaatgcatacatgcagttaaatccctttatgcaaatgtgacactgctttactaggtcttttagttatttatttattttttttttttttgccaatttatattgtaacatgatttcttgaacacagtaagttgttttaaaataaaagaacagcatactgtagtttttataagtaaagcgtaatgaaattgtacccctagagaaaattccattaacttgttaaattagtggaattaacaacaaataaagcatgtttgagacctgg

SEQ ID NO: 435982 - DNA, 5634 bp, Homo sapiens
aggtcaggagttcgagaccagcctggccaacatggtgaaatcccgtctcaactaaaaatacaaaaattagctgggcgtggtggcaggcatctgtatctcagctactggggaggatgaggcaggagaattgtttggggggtacggggggagataggtttttgatacagggaaccatctctttaccagcccccccaaataagaccctcttattaagactacctaaatagaagtatcatgggtttggcagtaaagctagttaattagtaacttacattgtaaaaaatatttttgtgatttaaaataataagttttaatatcttatatagacttgctgttaactactgaaagatttttttaaaatttcatttctaggtaagaccattgcaattggaaaagttctgaaactggttccagagaaagactaagcattttcttgatgaccctgcacaatactgtgaggaaaattgactgcagaagcctacttcacaccgccttctcttattttctgcccattgataaacctctccccatattttgcaaagaggaaattcacagcaaaagtccacattatgtcagctttctcatattgagagctctgctatgccactgttgaatttttcccaagattcctgtccctagccctcacttcaaactctgcttccttggacagatttggcaatagctttgtaagtgatgtggacataattgcctacaataatgaaaacctacaggaatttttttatttttcattttccccttaggcatatttagtatttttcccccaggcagatcattctgagtgtgcgagtgtgtgtgcacatgttacaaaggcaactaccatgttaataaaatattcaatttgaaatccttttcggtatttgaattgcttttgaataatgttttttatctggatgtaacattgttgcattagctttttaactttcccaagtaattgaatacattttattacttggacttttataaactctttccctacccactataaatgagacattcacagcgttcaagtttgtattaaaggaaaggattagtttgaccccttcttttgatggttaatgcatacatgcagttaaatccctttatgcaaatgtgacactgctttactaggtcttttagttatttatttattttttttttttttgccaatttatattgtaacatgatttcttgaacacagtaagttgttttaaaataaaagaacagcatactgtagtttttataagtaaagcgtaatgaaattgtacccctagagaaaattccattaacttgttaaattagtggaattaacaacaaataaagcatgtttgagacctggaaaaaattcctctggtagtatttataaatagagctgcatgcctctagtatgaaaaccgtatcagttgcaagtgccacttctacaagttactcagtttactctttgtatcagtaactttaaaggttggatgatccttgctggttaaagctaaatctcaacctagcaactaaatgaaaatatttagaatcatcagaatctgaacagactaaaattatcagcgataagcagaatcaagcagggtataagttttatctcaattatttgaaattgactgagttttcttaagtgtaaagctgaaatttgctaaccatgtttttgatgaaccacagtgcagcattgtgtgggttttagattgaatgactctctgctataattatcatgactttgaaatttttcatgagaataaatgaggaatggaggcaatttgtgggtttatccaaagcccccttgatgttgagtgttgccattgatcaaagatagcctcttttagattgtgatttctctctaaataagatactttgtatatttaatgacaagtctcttccctataattttgctcctcagaaaagaaaagcctagacagactgtatttccagtcacagaacataaaacttaatctaatgggtgttttgttttgttttgagacagaggctcactctgtcacctaggctggagtgcagtggctcgatctcagctcactgcagcctccacctcccggattcaagcaatttcctgcctcagcctcttgagtagctgggattacaggagccctccacgaggcccagttaatttttgtatctttagtggagacgaggtttccccctattggtcaggctggtctcaaacttctgacctcaagtgatccactcgcctcagcctctcaaaagtgctgggattacaggcatgaggcgccgcacttggcctagtgttttcttaactgtgaaattcccattcatttcttgaatgaggctacatcttatggacagagcaaagttattgtcctacagattcttaaaactataattatggctattgcatgaaatttaaatagattttattatgtctgcaaatctctgggcttttatttttctggaaaatataggagctttaatcaaaacataatagttctttttgtaattccatgttaataaaaacaaatactagcaattgcttgaattttaatgaatatttaaaagttcaagagccacggaaatcacttccagagataagagttccctttctaaatagaacacatttttaaaaaataagttatgtttgctactaaaacatttacactgttagactattatgtgcatgttgccaagactcttaagtaacttggatatcaactgtgaagggcctacctctaaaaagtaacaggtcatacaaatacaaatgtaactgtaaaaattccactggattcttgcatatttgcaagattagattattcaaaagaaatttcagtgctaaaattaaccagcaacataagttctatgggctttgaaaattgttctcatctttttaaagttgatgcattttcaatcctgcttacacaggctgttcatttggataagtaaataaaatgtctaaggtgaacttggcattatgtggagatgttggaccgttatagagcaatacaaattcctatgctgtcattctgttttctgcaaatgcaaacgtgcttatatggtcaacagtgcaaaaatagggtagttggctgcatatttagggtattacctaagcatttgttctctaacgttgctctactagaatgatttttttcttgcatcttttcacattaatgatgttctttatataactttcatgcgattatttagttttttaaattaataaagtgaatttaagaaatattgaaataaacatctaagtaattgccattttaaacccttgtttcttactgtgggagagggggaaatacagcactcatttcttgtttttaatttgcagaagtaagtgaaaatctatgtaaaatcaaaccaaaagagttggactgagtgtgtattgtcttgagattaagtgacaaatagtaaagtgttactgagtaattaagcccatgtatttttttttttgtgagttgaaaatctttgaaatatgtgataaccgaatgtcaaaagttcctaaactctaacagtgcaggttgttcactgtaacgaggtaactcatatttgctggttacataaactacaagtactgctctcacaatatgggactttgaactgtgatgtagttcaacagttgccggcatcctctcagctgatacgctgcgaatattttgggttagacttgcagccagatgcagttttgcaacccaagaaaaaagttgaacctatgatcaaaaactgctcccaagatgaacctgggaaaaaaatcagctaagctcccttggcgatctgcaggaacactagtaatgactggaattactccgtgatctttgatgactattacacataacagcactctagcaccttttcttactggcatggacttcctcatggactgctacttcatggatgatagcttcattgctttgggtagggatttaaggtagtcaaggggaaaatacgcagttttattacaggtcttaacatcaggcaactttcaactttaaaaccctttgtgaaaaatgtggttatagcactatagctctgattttaggatggttaaatgttatattcattgttggcttaccttatcaaactgtgccattaatcctttcacagacataggtaaggaagagaacaaccagtggattcaggggacaattatctatctccaaataataggcttttatttcttgcagctaactttttcagtgattctagcagatgccatctagtacatccttgatcttgtttctttcgtgagagatctcgccatggcagcatcttgttaagtaagtgtaattgcacatgcacaaaagacttaactagctttacatttagcagtcagttggttagattaggtttcatagtaaatgaataggaatagaaagaataggaagtgtttttattttccagtagtaattccgtggattccatttgacccagtttactatcagttcagttcaggtagatttggttcaacttttggtggtttttggctctaggatattcttgactttaatatcctagaacttactgagtcttcccttcaataaatacacttctcacatacctctaatcctatgcttccttgaaacaataatgctagctgagttgtttactaaggattattataagggcctgaaggtgtgggagtggagattaattaaaacctttatgttctccaatataagggaaaagcaggttggtactacttctgattaggcagaaaacaccaggattccttaagtgatccttgaaatggttattgttttctgccttgtcacatttgccactgtgccctttaaaacgatgtggaaacctcaggtttgtggacagcacaggtggaatgacatcttgtgcttcctgaggctcccctctaccaggcacattagcttagtgcttcagatgtcagcccaagtccttgttacctccttttcctgctgcccagggaagagtgtgtgtgctggagctggagcgcttgcactcttcaggtgactattctcacctccatttcctccacatgcattaggtgaaactgaggtctaagcctcctgcaaggtctacattttaaggactcacacatcaggctctcagaaatgtacacaggtattagttctgtttgttctaaaggaaatgtgggtatctctcaggccaggacttagtgactagttttcgctagacagcaggttaatacctagatctcatttaaaaaaaaaaaaaaaaaaacaggattaaagggaactgatcaggtttgttgagttttttagcctaattccaaagcatggaagagtgctctaggtaggaaagaaagctttttcttacgatttgtagctacctactgtgcctgacttggtgcctgtgtgaggattaagcccttagtctgctcttgcaattattcaaatgacaaattaaatttgcttttgtaataacaataaaagttgtcatcttcccttttgaaggatttgtcgtttgtaattacctgtgttgtaacaagcaaaaaccatgcccttttttgtacaatccttttatttttgtatcaggtactggaaccatctaccaaaaggtttgttggatggatctaataagctctgtcacataagggattcacaaacgtcatctgcttgcatatggcatgcaagtcttttgtataatgtaacaacaaccttaggaaac

SEQ ID NO: 435983 - DNA, 5317 bp, Homo sapiens
tgggcccaccttatatgggcaccgaatatgggtcgtttcaccttacgagatgagggtaagaccattgcaattggaaaagttctgaaactggttccagagaaagactaagcattttcttgatgaccctgcacaatactgtgaggaaaattgactgcagaagcctacttcacaccgccttctcttattttctgcccattgataaacctctccccatattttgcaaagaggaaattcacagcaaaagtccacattatgtcagctttctcatattgagagctctgctatgccactgttgaatttttcccaagattcctgtccctagccctcacttcaaactctgcttccttggacagatttggcaatagctttgtaagtgatgtggacataattgcctacaataatgaaaacctacaggaatttttttatttttcattttccccttaggcatatttagtatttttcccccaggcagatcattctgagtgtgcgagtgtgtgtgcacatgttacaaaggcaactaccatgttaataaaatattcaatttgaaatccttttcggtatttgaattgcttttgaataatgttttttatctggatgtaacattgttgcattagctttttaactttcccaagtaattgaatacattttattacttggacttttataaactctttccctacccactataaatgagacattcacagcgttcaagtttgtattaaaggaaaggattagtttgaccccttcttttgatggttaatgcatacatgcagttaaatccctttatgcaaatgtgacactgctttactaggtcttttagttatttatttattttttttttttttgccaatttatattgtaacatgatttcttgaacacagtaagttgttttaaaataaaagaacagcatactgtagtttttataagtaaagcgtaatgaaattgtacccctagagaaaattccattaacttgttaaattagtggaattaacaacaaataaagcatgtttgagacctggaaaaaattcctctggtagtatttataaatagagctgcatgcctctagtatgaaaaccgtatcagttgcaagtgccacttctacaagttactcagtttactctttgtatcagtaactttaaaggttggatgatccttgctggttaaagctaaatctcaacctagcaactaaatgaaaatatttagaatcatcagaatctgaacagactaaaattatcagcgataagcagaatcaagcagggtataagttttatctcaattatttgaaattgactgagttttcttaagtgtaaagctgaaatttgctaaccatgtttttgatgaaccacagtgcagcattgtgtgggttttagattgaatgactctctgctataattatcatgactttgaaatttttcatgagaataaatgaggaatggaggcaatttgtgggtttatccaaagcccccttgatgttgagtgttgccattgatcaaagatagcctcttttagattgtgatttctctctaaataagatactttgtatatttaatgacaagtctcttccctataattttgctcctcagaaaagaaaagcctagacagactgtatttccagtcacagaacataaaacttaatctaatgggtgttttgttttgttttgagacagaggctcactctgtcacctaggctggagtgcagtggctcgatctcagctcactgcagcctccacctcccggattcaagcaatttcctgcctcagcctcttgagtagctgggattacaggagccctccacgaggcccagttaatttttgtatctttagtggagacgaggtttccccctattggtcaggctggtctcaaacttctgacctcaagtgatccactcgcctcagcctctcaaaagtgctgggattacaggcatgaggcgccgcacttggcctagtgttttcttaactgtgaaattcccattcatttcttgaatgaggctacatcttatggacagagcaaagttattgtcctacagattcttaaaactataattatggctattgcatgaaatttaaatagattttattatgtctgcaaatctctgggcttttatttttctggaaaatataggagctttaatcaaaacataatagttctttttgtaattccatgttaataaaaacaaatactagcaattgcttgaattttaatgaatatttaaaagttcaagagccacggaaatcacttccagagataagagttccctttctaaatagaacacatttttaaaaaataagttatgtttgctactaaaacatttacactgttagactattatgtgcatgttgccaagactcttaagtaacttggatatcaactgtgaagggcctacctctaaaaagtaacaggtcatacaaatacaaatgtaactgtaaaaattccactggattcttgcatatttgcaagattagattattcaaaagaaatttcagtgctaaaattaaccagcaacataagttctatgggctttgaaaattgttctcatctttttaaagttgatgcattttcaatcctgcttacacaggctgttcatttggataagtaaataaaatgtctaaggtgaacttggcattatgtggagatgttggaccgttatagagcaatacaaattcctatgctgtcattctgttttctgcaaatgcaaacgtgcttatatggtcaacagtgcaaaaatagggtagttggctgcatatttagggtattacctaagcatttgttctctaacgttgctctactagaatgatttttttcttgcatcttttcacattaatgatgttctttatataactttcatgcgattatttagttttttaaattaataaagtgaatttaagaaatattgaaataaacatctaagtaattgccattttaaacccttgtttcttactgtgggagagggggaaatacagcactcatttcttgtttttaatttgcagaagtaagtgaaaatctatgtaaaatcaaaccaaaagagttggactgagtgtgtattgtcttgagattaagtgacaaatagtaaagtgttactgagtaattaagcccatgtatttttttttttgtgagttgaaaatctttgaaatatgtgataaccgaatgtcaaaagttcctaaactctaacagtgcaggttgttcactgtaacgaggtaactcatatttgctggttacataaactacaagtactgctctcacaatatgggactttgaactgtgatgtagttcaacagttgccggcatcctctcagctgatacgctgcgaatattttgggttagacttgcagccagatgcagttttgcaacccaagaaaaaagttgaacctatgatcaaaaactgctcccaagatgaacctgggaaaaaaatcagctaagctcccttggcgatctgcaggaacactagtaatgactggaattactccgtgatctttgatgactattacacataacagcactctagcaccttttcttactggcatggacttcctcatggactgctacttcatggatgatagcttcattgctttgggtagggatttaaggtagtcaaggggaaaatacgcagttttattacaggtcttaacatcaggcaactttcaactttaaaaccctttgtgaaaaatgtggttatagcactatagctctgattttaggatggttaaatgttatattcattgttggcttaccttatcaaactgtgccattaatcctttcacagacataggtaaggaagagaacaaccagtggattcaggggacaattatctatctccaaataataggcttttatttcttgcagctaactttttcagtgattctagcagatgccatctagtacatccttgatcttgtttctttcgtgagagatctcgccatggcagcatcttgttaagtaagtgtaattgcacatgcacaaaagacttaactagctttacatttagcagtcagttggttagattaggtttcatagtaaatgaataggaatagaaagaataggaagtgtttttattttccagtagtaattccgtggattccatttgacccagtttactatcagttcagttcaggtagatttggttcaacttttggtggtttttggctctaggatattcttgactttaatatcctagaacttactgagtcttcccttcaataaatacacttctcacatacctctaatcctatgcttccttgaaacaataatgctagctgagttgtttactaaggattattataagggcctgaaggtgtgggagtggagattaattaaaacctttatgttctccaatataagggaaaagcaggttggtactacttctgattaggcagaaaacaccaggattccttaagtgatccttgaaatggttattgttttctgccttgtcacatttgccactgtgccctttaaaacgatgtggaaacctcaggtttgtggacagcacaggtggaatgacatcttgtgcttcctgaggctcccctctaccaggcacattagcttagtgcttcagatgtcagcccaagtccttgttacctccttttcctgctgcccagggaagagtgtgtgtgctggagctggagcgcttgcactcttcaggtgactattctcacctccatttcctccacatgcattaggtgaaactgaggtctaagcctcctgcaaggtctacattttaaggactcacacatcaggctctcagaaatgtacacaggtattagttctgtttgttctaaaggaaatgtgggtatctctcaggccaggacttagtgactagttttcgctagacagcaggttaatacctagatctcatttaaaaaaaaaaaaaaaaaaacaggattaaagggaactgatcaggtttgttgagttttttagcctaattccaaagcatggaagagtgctctaggtaggaaagaaagctttttcttacgatttgtagctacctactgtgcctgacttggtgcctgtgtgaggattaagcccttagtctgctcttgcaattattcaaatgacaaattaaatttgcttttgtaataacaataaaagttgtcatcttcccttttgaaggatttgtcgtttgtaattacctgtgttgtaacaagcaaaaaccatgcccttttttgtacaatccttttatttttgtatcaggtactggaaccatctaccaaaaggtttgttggatggatctaataagctctgtcacataagggattcacaaacgtcatctgcttgcatatggcatgcaagtcttttgtataatgtaacaacaaccttaggaaac

SEQ ID NO: 435984 - DNA, 2858 bp, Homo sapiens
ggcggcgaggggtcaatccgcgccgggggtggggttggctgtgaggccgtcggaggtggttgggtgggaggagatccgctcacacacacgaggaggagggttgagctgctgccgccgccgcctctgtcgtcgtcgcgagtgtggagtcgggactggagctgctgccgcggcgacgccggggatctttgtcgctagctcccggcccttctgccccgccgccttccctcagtcagcgttgcccactcctctccggccgggcgcccctgcctccatttctcgctctctgtccaccacacacacggcccccccgatcatggatccgggcagtggcggcggcggcggcggcggcggcggcggcgggagcagcagcggcagcagcagcagcgactcggcgcctgactgctgggaccaggcggacatggaagcccccgggccgggcccttgcggcggcggcggctccctggcggcggcggccgaggcccagcgggagaacctcagcgcggccttcagccggcaactcaacgtcaacgccaagcccttcgtgcccaacgtccacgccgccgagttcgtgccgtccttcctgcggtgcccggcagcgccgccacccccagctggcggcgccgccaataaccacggagccggcagcggcgcgggaggccgtgcggcacctgtggaatcctctcaagaggaacagtcattgtgtgaaggttcaaattcagctgttagcatggaactttcagaacctattgtagaaaatggagagacagaaatgtctccagaagaatcatgggagcacaaagaagaaataagtgaagcagagccagggggtggttccttgggagatggaaggccgccagaggaaagtgcccatgaaatgatggaggaggaagaggaaatcccaaaacctaagtctgtggttgcaccgccaggtgctcctaagaaagagcatgtaaatgtagtattcattgggcacgtagatgctggcaagtcaaccattggaggacaaataatgtatttgactggaatggttgacaaaaggacgcttgaaaagtatgaaagagaagctaaagagaaaaacagagaaacttggtacttgtcttgggccttagacacaaatcaggaagaacgagacaagggtaaaacagtagaagtgggtcgtgcctattttgaaaccgaaaagaagcatttcacaattctagatgcccctggccacaagagttttgtcccaaatatgattggtggtgcctctcaagctgatttggctgtgctggtaatctcagccaggaaaggagagtttgaaactggatttgaaaaaggaggacagacaagagaacatgcaatgttggcaaagacagcaggtgtaaaacacctaattgtgctaattaataagatggatgatccaacagtaaattggagcaatgagagatatgaagaatgtaaggagaaactagtgccatttttgaaaaaagttggcttcaatcccaaaaaggacattcactttatgccctgctcaggacttactggagcaaatctcaaagagcagtcggatttctgtccttggtacattggattaccgtttattccatatctggataatttgccgaacttcaatagatcagttgatggaccaatcaggctgccaattgtggataagtacaaggatatgggcactgtggtcctgggaaagctggaatcaggatctatttgtaaaggccagcagcttgtgatgatgccaaacaagcacaacgtggaagttcttggaatactttccgatgatgtagagactgataccgtagccccaggtgaaaacctcaaaatcagactgaaaggaattgaagaagaggagattcttccagggtttatactttgtgatcctaataatctttgtcattctggacgcacatttgatgcccagatagtgattatagagcacaaatccatcatctgcccaggctataatgcggtgctgcatattcatacctgtattgaggaggtggaaataacagccttaatctgcttggtagacaaaaaatcaggagaaaaaagtaagacccgaccccgttttgtgaaacaagatcaagtatgcattgctcgcttaaggacagcaggaaccatctgccttgagacctttaaagacttccctcagatgggtcgtttcaccttaagagatgagggtaagaccattgcaattggaaaagttctgaaactggttccagagaaagactaagcattttcttgatgaccctgcacaatactgtgaggaaaattgactgcagaagcctacttcacaccgccttctcttattttctgcccattgataaacctctccccatattttgcaaagaggaaattcacagcaaaagtccacattatgtcagctttctcatattgagagctctgctatgccactgttgaatttttcccaagattcctgtccctagccctcacttcaaactctgcttccttggacagatttggcaatagctttgtaagtgatgtggacataattgcctacaataatgaaaacctacaggaatttttttatttttcattttccccttaggcatatttagtatttttcccccaggcagatcattctgagtgtgcgagtgtgtgtgcacatgttacaaaggcaactaccatgttaataaaatattcaatttgaaaaaacaaaacaacaacaaaaaacaaaaaaactgttttgggcgcgcttgggccccggaaaaaagtcttctttacacgacttgcgttgggggcggcgcggggcccagtggtttatgtgtgacactgggccaaaggggtccccgaggaaaccccgggtcaagagaactaggggcctggttttcccccctataaaa

SEQ ID NO: 435985 - DNA, 2414 bp, Homo sapiens
ggcggcgaggggtcaatccgcgccgggggtggggttggctgtgaggccgtcggaggtggttgggtgggaggagatccgctcacacacacgaggaggagggttgagctgctgccgccgccgcctctgtcgtcgtcgcgagtgtggagtcgggactggagctgctgccgcggcgacgccggggatctttgtcgctagctcccggcccttctgccccgccgccttccctcagtcagcgttgcccactcctctccggccgggcgcccctgcctccatttctcgctctctgtccaccacacacacggcccccccgatcatggatccgggcagtggcggcggcggcggcggcggcggcggcggcgggagcagcagcggcagcagcagcagcgactcggcgcctgactgctgggaccaggcggacatggaagcccccgggccgggcccttgcggcggcggcggctccctggcggcggcggccgaggcccagcgggagaacctcagcgcggccttcagccggcaactcaacgtcaacgccaagcccttcgtgcccaacgtccacgccgccgagttcgtgccgtccttcctgcggtgcccggcagcgccgccacccccagctggcggcgccgccaataaccacggagccggcagcggcgcgggaggccgtgcggcacctgtggaatcctctcaagaggaacagtcattgtgtgaaggttcaaattcagctgttagcatggaactttcagaacctattgtagaaaatggagagacagaaatgtctccagaagaatcatgggagcacaaagaagaaataagtgaagcagagccagggggtggttccttgggagatggaaggccgccagaggaaagtgcccatgaaatgatggaggaggaagaggaaatcccaaaacctaagtctgtggttgcaccgccaggtgctcctaagaaagagcatgtaaatgtagtattcattgggcacgtagatgctggcaagtcaaccattggaggacaaataatgtatttgactggaatggttgacaaaaggacgcttgaaaagtatgaaagagaagctaaagagaaaaacagagaaacttggtacttgtcttgggccttagacacaaatcaggaagaacgagacaagggtaaaacagtagaagtgggtcgtgcctattttgaaaccgaaaagaagcatttcacaattctagatgcccctggccacaagagttttgtcccaaatatgattggtggtgcctctcaagctgatttggctgtgctggtaatctcagccaggaaaggagagtttgaaactggatttgaaaaaggaggacagacaagagaacatgcaatgttggcaaagacagcaggtgtaaaacacctaattgtgctaattaataagatggatgatccaacagtaaattggagcaatgagagatatgaagaatgtaaggagaaactagtgccatttttgaaaaaagttggcttcaatcccaaaaaggacattcactttatgccctgctcaggacttactggagcaaatctcaaagagcagtcggatttctgtccttggtacattggattaccgtttattccatatctggataatttgccgaacttcaatagatcagttgatggaccaatcaggctgccaattgtggataagtacaaggatatgggcactgtggtcctgggaaagctggaatcaggatctatttgtaaaggccagcagcttgtgatgatgccaaacaagcacaacgtggaagttcttggaatactttccgatgatgtagagactgataccgtagccccaggtgaaaacctcaaaatcagactgaaaggaattgaagaagaggagattcttccagggtttatactttgtgatcctaataatctttgtcattctggacgcacatttgatgcccagatagtgattatagagcacaaatccatcatctgcccaggctataatgcggtgctgcatattcatacctgtattgaggaggtggaaataacagccttaatctgcttggtagacaaaaaatcaggagaaaaaagtaagacccgaccccgttttgtgaaacaagatcaagtatgcattgctcgcttaaggacagcaggaaccatctgccttgagacctttaaagacttccctcagatgggtcgtttcaccttaagagatgagggtaagagcttttaaactgacgtctagtagtatatccaggatacctagctttggtcatcttcatcatctcagtacagtacacattgcaacaggttcacagaaaacttcgattcacattcttattcgtatgagtgttttatgagttgaatgtattgaacagaattgaccacgtgctttagtagtaatgccaaatctagtaatgctctacgtgaagaatcttaattttgatgttttgtgagta

SEQ ID NO: 435986 - DNA, 1813 bp, Homo sapiens
ggcggcgaggggtcaatccgcgccgggggtggggttggctgtgaggccgtcggaggtggttgggtgggaggagatccgctcacacacacgaggaggagggttgagctgctgccgccgccgcctctgtcgtcgtcgcgagtgtggagtcgggactggagctgctgccgcggcgacgccggggatctttgtcgctagctcccggcccttctgccccgccgccttccctcagtcagcgttgcccactcctctccggccgggcgcccctgcctccatttctcgctctctgtccaccacacacacggcccccccgatcatggatccgggcagtggcggcggcggcggcggcggcggcggcggcgggagcagcagcggcagcagcagcagcgactcggcgcctgactgctgggaccaggcggacatggaagcccccgggccgggcccttgcggcggcggcggctccctggcggcggcggccgaggcccagcgggagaacctcagcgcggccttcagccggcaactcaacgtcaacgccaagcccttcgtgcccaacgtccacgccgccgagttcgtgccgtccttcctgcggtgcccggcagcgccgccacccccagctggcggcgccgccaataaccacggagccggcagcggcgcgggaggccgtgcggcacctgtggaatcctctcaagaggaacagtcattgtgtgaaggttcaaattcagctgttagcatggaactttcagaacctattgtagaaaatggagagacagaaatgtctccagaagaatcatgggagcacaaagaagaaataagtgaagcagagccagggggtggttccttgggagatggaaggccgccagaggaaagtgcccatgaaatgatggaggaggaagaggaaatcccaaaacctaagtctgtggttgcaccgccaggtgctcctaagaaagagcatgtaaatgtagtattcattgggcacgtagatgctggcaagtcaaccattggaggacaaataatgtatttgactggaatggttgacaaaaggacgcttgaaaagtatgaaagagaagctaaagagaaaaacagagaaacttggtacttgtcttgggccttagacacaaatcaggaagaacgagacaagggtaaaacagtagaagtgggtcgtgcctattttgaaaccgaaaagaagcatttcacaattctagatgcccctggccacaagagttttgtcccaaatatgattggtggtgcctctcaagctgatttggctgtgctggtaagaaagacatttccagtccatctgtatatttgttagtagccccgcttatatctttaaatttgaatttatcttctaaaagctcaaattcaggttgcagtgaaatataatgatgtacacggtcacagttttcatcatactaatctctcttcaagaaatcttcaaaatttgatttacttctgaaaatacgtttcaccttttctctcctgttgctattatctattaccatgtcagaacttagtctccattaaatgccaagcccaccgttaggcaccatgggtaaaaaatgaataggaaaccatctgtttcatacggtcttcagtcattttgcgcttttcacaatgtactggtagtagatcacaattttttttcctttgtagttacaatagctagaaagtaaatgttggaattttaaaatatgcaggtatactagattttgggaatgtgggggattggaagcatctagacattgtttgatttgtgacattcaaaagcaggtacgtcataactcgtttgcttctattttcttgcaaaaaaaaaaaa

SEQ ID NO: 435987 - DNA, 716 bp, Homo sapiens
ggcggcgaggggtcaatccgcgccgggggtggggttggctgtgaggccgtcggaggtggttgggtgggaggagatccgctcacacacacgaggaggagggttgagctgctgccgccgccgcctctgtcgtcgtcgcgagtgtggagtcgggactggagctgctgccgcggcgacgccggggatctttgtcgctagctcccggcccttctgccccgccgccttccctcagtcagccggcgcgggaggccgtgcggcacctgtggaatcctctcaagaggaacagtcattgtgtgaaggttcaaattcagctgttagcatggaactttcagaacctattgtagaaaatggagagacagaaatgtctccagaagaatcatgggagcacaaagaagaaataagtgaagcagagccagggggtggttccttgggagatggaaggccgccagaggaaagtgcccatgaaatgatggaggaggaagaggaaatcccaaaacctaagtctgtggttgcaccgccaggtgctcctaagaaagagcatgtaaatgtagtattcattgggcacgtagatgcttggcagtcaacccattggaggacaaataatgtattttgacttgaaatggttgacaaaaggacgcttggaaaagtttgaaaggaaaggcttaagaaaaaaaaccggggaaccttggggaacttgtcttggggccttaaaacacaaa

SEQ ID NO: 435988 - DNA, 214 bp, Homo sapiens
atggataataaagtggttgaatgggaagaatacatgagtagaatgaaaatattattagaagctgtttatagtcatgtaacttaacattttgatatttatgttgacttcctttaatggctttgttgttatgttctcagtggattaccgtttattccatatctggataatttgccgaacttcaatagatcagttgatggaccaatcaggctgccaa

SEQ ID NO: 435989 - DNA, 2702 bp, Homo sapiens
ggcggcgaggggtcaatccgcgccgggggtggggttggctgtgaggccgtcggaggtggttgggtgggaggagatccgctcacacacacgaggaggagggttgagctgctgccgccgccgcctctgtcgtcgtcgcgagtgtggagtcgggactggagctgctgccgcggcgacgccggggatctttgtcgctagctcccggcccttctgccccgccgccttccctcagtcagcgttgcccactcctctccggccgggcgcccctgcctccatttctcgctctctgtccaccacacacacggcccccccgatcatggatccgggcagtggcggcggcggcggcggcggcggcggcggcgggagcagcagcggcagcagcagcagcgactcggcgcctgactgctgggaccaggcggacatggaagcccccgggccgggcccttgcggcggcggcggctccctggcggcggcggccgaggcccagcgggagaacctcagcgcggccttcagccggcaactcaacgtcaacgccaagcccttcgtgcccaacgtccacgccgccgagttcgtgccgtccttcctgcggtgcccggcagcgccgccacccccagctggcggcgccgccaataaccacggagccggcagcggcgcgggaggccgtgcggcacctgtggaatcctctcaagaggaacagtcattgtgtgaaggttcaaattcagctgttagcatggaactttcagaacctattgtagaaaatggagagacagaaatgtctccagaagaatcatgggagcacaaagaagaaataagtgaagcagagccagggggtggttccttgggagatggaaggccgccagaggaaagtgcccatgaaatgatggaggaggaagaggaaatcccaaaacctaagtctgtggttgcaccgccaggtgctcctaagaaagagcatgtaaatgtagtattcattgggcacgtagatgctggcaagtcaaccattggaggacaaataatgtatttgactggaatggttgacaaaaggacgcttgaaaagtatgaaagagaagctaaagagaaaaacagagaaacttggtacttgtcttgggccttagacacaaatcaggaagaacgagacaagggtaaaacagtagaagtgggtcgtgcctattttgaaaccgaaaagaagcatttcacaattctagatgcccctggccacaagagttttgtcccaaatatgattggtggtgcctctcaagctgatttggctgtgctggtaatctcagccaggaaaggagagtttgaaactggatttgaaaaaggaggacagacaagagaacatgcaatgttggcaaagacagcaggtgtaaaacacctaattgtgctaattaataagatggatgatccaacagtaaattggagcaatgagagatatgaagaatgtaaggagaaactagtgccatttttgaaaaaagttggcttcaatcccaaaaaggacattcactttatgccctgctcaggacttactggagcaaatctcaaagagcagtcggatttctgtccttggtacattggattaccgtttattccatatctggataatttgccgaacttcaatagatcagttgatggaccaatcaggctgccaattgtggataagtacaaggatatgggcactgtggtcctgggaaagctggaatcaggatctatttgtaaaggccagcagcttgtgatgatgccaaacaagcacaacgtggaagttcttggaatactttccgatgatgtagagactgataccgtagccccaggtgaaaacctcaaaatcagactgaaaggaattgaagaagaggagattcttccagggtttatactttgtgatcctaataatctttgtcattctggacgcacatttgatgcccagatagtgattatagagcacaaatccatcatctgcccaggctataatgcggtgctgcatattcatacctgtattgaggaggtggaaataacagccttaatctgcttggtagacaaaaaatcaggagaaaaaagtaagacccgaccccgttttgtgaaacaagatcaagtatgcattgctcgcttaaggacagcaggaaccatctgccttgagacctttaaagacttccctcagatgggtcgtttcaccttaagagatgagggtaagaccattgcaattggaaaagttctgaaactggttccagagaaagactaagcattttcttgatgaccctgcacaatactgtgaggaaaattgactgcagaagcctacttcacaccgccttctcttattttctgcggggcccccccccccccccaaaatttttttgggcaccattgataaacctctccccatattttgcaaagaggaaattcacagcaaaagtccacattatgtcagctttctcatattgagagctctgctatgccactgttgaatttttcccaagattcctgtccctagccctcacttcaaactctgcttccttggacagatttggcaatagctttgtaagtgatgtggacataattgcctacaataatgaaaacctacaggaatttttttatttttcattttccccttaggcatatttagtatttttcccccaggcagatcattctgagtgtgcgagtgtgtgtgcacatgttacaaaggcaactaccatgttaataaaatattcaatttgaaa

SEQ ID NO: 435990 - DNA, 1914 bp, Homo sapiens
ggcggcgaggggtcaatccgcgccgggggtggggttggctgtgaggccgtcggaggtggttgggtgggaggagatccgctcacacacacgaggaggagggttgagctgctgccgccgccgcctctgtcgtcgtcgcgagtgtggagtcgggactggagctgctgccgcggcgacgccggggatctttgtcgctagctcccggcccttctgccccgccgccttccctcagtcagcgttgcccactcctctccggccgggcgcccctgcctccatttctcgctctctgtccaccacacacacggcccccccgatcatggatccgggcagtggcggcggcggcggcggcggcggcggcggcgggagcagcagcggcagcagcagcagcgactcggcgcctgactgctgggaccaggcggacatggaagcccccgggccgggcccttgcggcggcggcggctccctggcggcggcggccgaggcccagcgggagaacctcagcgcggccttcagccggcaactcaacgtcaacgccaagcccttcgtgcccaacgtccacgccgccgagttcgtgccgtccttcctgcggtgcccggcagcgccgccacccccagctggcggcgccgccaataaccacggagccggcagcggcgcgggaggccgtgcggcacctgtggaatcctctcaagaggaacagtcattgtgtgaaggttcaaattcagctgttagcatggaactttcagaacctattgtagaaaatggagagacagaaatgtctccagaagaatcatgggagcacaaagaagaaataagtgaagcagagccagggggtggttccttgggagatggaaggccgccagaggaaagtgcccatgaaatgatggaggaggaagaggaaatcccaaaacctaagtctgtggttgcaccgccaggtgctcctaagaaagagcatgtaaatgtagtattcattgggcacgtagatgctggcaagtcaaccattggaggacaaataatgtatttgactggaatggttgacaaaaggacgcttgaaaagtatgaaagagaagctaaagagaaaaacagagaaacttggtacttgtcttgggccttagacacaaatcaggaagaacgagacaagggtaaaacagtagaagtgggtcgtgcctattttgaaaccgaaaagaagcatttcacaattctagatgcccctggccacaagagttttgtcccaaatatgattggtggtgcctctcaagctgatttggctgtgctggtaatctcagccaggaaaggagagtttgaaactggatttgaaaaaggaggacagacaagagaacatgcaatgttggcaaagacagcaggtgtaaaacacctaattgtgctaattaataagatggatgatccaacagtaaattggagcaatgagagatatgaagaatgtaaggagaaactagtgccatttttgaaaaaagttggcttcaatcccaaaaaggacattcactttatgccctgctcaggacttactggagcaaatctcaaagagcagtcggatttctgtccttggtacattggattaccgtttattccatatctggataatttgccgaacttcaatagatcagttgatggaccaatcaggctgccaattgtggataagtacaaggatatgggcactgtggtcctgggaaagctggaatcaggatctatttgtaaaggccagcagcttgtgatgatgccaaacaagcacaacgtggaagttcttggaatactttccgatgatgtagagactgataccgtagccccaggtgaaaacctcaaaatcagactgaaaggaattgaagaagaggagattccagctgagctgctgaagatgtttggtatcgactagggatgccattgcacaactcttctcagggg

SEQ ID NO: 435991 - DNA, 693 bp, Homo sapiens
aatatatcaaaatttaaaaaaattttaatgagttataaatcttaatatagccatcttagccataaccacaaataaactcattttttctgttaaaatacttgacagagtccttgcaattgaatgtctttgttcaacaaaaactgtattaagtgttttaaatttaaaatctaatcttatgcaaatagctggtggtcaaaacctttttccatcaaaagaagatctttggtttgacttcataatctgggatgtttgtaggtacctggaatggaaacacaaaagtagccataaagactcttaaaccaggcacaatgtcccccgaatcattccttgaggaagcgcagatcatgaagaagctgaagcacgacaagctggtccagctctatgcagtggtgtctgaggagcccatctacatcgtcaccgagtatatgaacaaaggttgggcaacacctctcctgtctccagctcacagtgccttaaggggttgtttaggggagagaaatggaagtttcctacttgctacttttctagtttctgcctgggtcaagtattcccattaggaaccaccagttatgtgctcgttaatgaaaacattttttaaaacagactaaccttgcgtttaccccaccccaaatccttatgaaatgccaaatactttttacatgttatgtgtgtcagaaattcaagctcctctcc

SEQ ID NO: 435992 - DNA, 607 bp, Homo sapiens
  misc_feature (568)..(568): n is a, c, g, or t
gatgcgttgcctgtcgctgcactgtgtgcccccgcgcggctcccccctggttcctcggtctgctgtgaatcccctgaagtggaccgtcgacaagacctcatgcgtgactggcccccgttttaaaaggagcctcagccctgtcctggccgagcggaccggtccgctcggaccaccgatctgtctgtcaaaaccaaagatgtctgggaaatccctcgagaatccctgcagttgatcaagagactgggaaatgggcagtttggggaagtatggatgggtacctggaatggaaacacaaaagtagccataaagactcttaaaccaggcacaatgtcccccgaatcattccttgaggaagcgcagatcatgaagaagctgaagcacgacaagctggtccagctctatgcagtggtgtctgaggagcccatctacatcgtccgagcggaccggtccgctcggaccaactatgagatgctcaaggaggagcacgaggtggctgtgctgggggcgccccaaaaccctgctcccccgacgtccaccgtgatccacatccgcagcgagacctccgtgnccgaccatgtcgtctggtccctgttcaacaccctcttca

SEQ ID NO: 435993 - DNA, 2629 bp, Homo sapiens
cggagctggaggggcagagcatcagcaagagtagcagcgagcagccgcgctggtggcggcggcgcgtcgttgcagttgcgccatctgtcaggagcggagccggcgaggagggggctgccgcgggcgaggaggaggggtcgccgcgagccgaaggccttcgagacccgcccgccgcccggcggcgagagtagaggcgaggaccgcccgggcgcacacaaagccgccgcccgcgccgcaccgcccggcggccgccgcccgcgccagggagggattcggccgccgggccggggacaccccggcgccgccccctcggtgctctcggaaggcccaccggctcccgggcccgccggggaccccccggagccgcctcggccgcgccggaggagggcggggagaggaccatgtgagtgggctccggagcctcagcgccgcgcagtttttttgaagaagcaggatgctgatctaaacgtggaaaaagaccagtcctgcctctgttgtagaagacatgtggtgtatataaagtttgtgatcgttggcggaaattttggaatttagataatgggctgtgtgcaatgtaaggataaagaagcaacaaaactgacggaggagagggacggcagcctgaaccagagctctgggtaccgctatggcacagaccccacccctcagcactaccccagcttcggtgtgacctccatccccaactacaacaacttccacgcagccgggggccaaggactcaccgtctttggaggtgtgaactcttcgtctcatacggggaccttgcgtacgagaggaggaacaggagtgacactctttgtggccctttatgactatgaagcacggacagaagatgacctgagttttcacaaaggagaaaaatttcaaatattgaacagctcggaaggagattggtgggaagcccgctccttgacaactggagagacaggttacattcccagcaattatgtggctccagttgactctatccaggcagaagagtggtactttggaaaacttggccgaaaagatgctgagcgacagctattgtcctttggaaacccaagaggtacctttcttatccgcgagagtgaaaccaccaaaggtgcctattcactttctatccgtgattgggatgatatgaaaggagaccatgtcaaacattataaaattcgcaaacttgacaatggtggatactacattaccacccgggcccagtttgaaacacttcagcagcttgtacaacattactcagagagagctgcaggtctctgctgccgcctagtagttccctgtcacaaagggatgccaaggcttaccgatctgtctgtcaaaaccaaagatgtctgggaaatccctcgagaatccctgcagttgatcaagagactgggaaatgggcagtttggggaagtatggatgggtacctggaatggaaacacaaaagtagccataaagactcttaaaccaggcacaatgtcccccgaatcattccttgaggaagcgcagatcatgaagaagctgaagcacgacaagctggtccagctctatgcagtggtgtctgaggagcccatctacatcgtcaccgagtatatgaacaaaggaagtttactggatttcttaaaagatggagaaggaagagctctgaaattaccaaatcttgtggacatggcagcacaggtggctgcaggaatggcttacatcgagcgcatgaattatatccatagagatctgcgatcagcaaacattctagtggggaatggactcatatgcaagattgctgacttcggattggcccgattgatagaagacaatgagtacacagcaagacaaggtgcaaagttccccatcaagtggacggcccccgaggcagccctgtacgggaggttcacaatcaagtctgacgtgtggtcttttggaatcttactcacagagctggtcaccaaaggaagagtgccatacccaggcatgaacaaccgggaggtgctggagcaggtggagcgaggctacaggatgccctgcccgcaggactgccccatctctctgcatgagctcatgatccactgctggaaaaaggaccctgaagaacgccccacttttgagtacttgcagagcttcctggaagactactttaccgcgacagagccccagtaccaacctggtgaaaacctgtaaggcccgggtctgcggagagaggccttgtcccagaggctgccccacccctccccattagctttcaattccgtagccagctgctccccagcagcggaaccgcccaggatcagattgcatgtgactctgaagctgacgaacttccatggccctcattaatgacacttgtccccaaatccgaacctcctctgtgaagcattcgagacagaaccttgttatttctcagactttggaaaatgcattgtatcgatgttatgtaaaaggccaaacctctgttcagtgtaaatagttactccagtgccaacaatcctagtgctttccttttttaaaaatgcaaatcctatgtgattttaactctgtcttcacctgattcaactaaaaaaaaaaaagtattattttccaaaagtggcctctttgtctaaaacaataaaattttttttcatgttttaacaaaaaccaa

SEQ ID NO: 435994 - DNA, 2652 bp, Homo sapiens
cggagctggaggggcagagcatcagcaagagtagcagcgagcagccgcgctggtggcggcggcgcgtcgttgcagttgcgccatctgtcaggagcggagccggcgaggagggggctgccgcgggcgaggaggaggggtcgccgcgagccgaaggccttcgagacccgcccgccgcccggcggcgagagtagaggcgaggttgttgtgcgagcggcgcgtcctctcccgcccgggcgcgccgcgcttctcccagcgcaccgaggaccgcccgggcgcacacaaagccgccgcccgcgccgcaccgcccggcggccgccgcccgcgccagggagggattcggccgccgggccggggacaccccggcgccgccccctcggtgctctcggaaggcccaccggctcccgggcccgccggggaccccccggagccgcctcggccgcgccggaggagggcggggagaggaccatgtgagtgggctccggagcctcagcgccgcgcaggaccagtcctgcctctgttgtagaagacatgtggtgtatataaagtttgtgatcgttggcggaaattttggaatttagataatgggctgtgtgcaatgtaaggataaagaagcaacaaaactgacggaggagagggacggcagcctgaaccagagctctgggtaccgctatggcacagaccccacccctcagcactaccccagcttcggtgtgacctccatccccaactacaacaacttccacgcagccgggggccaaggactcaccgtctttggaggtgtgaactcttcgtctcatacggggaccttgcgtacgagaggaggaacaggagtgacactctttgtggccctttatgactatgaagcacggacagaagatgacctgagttttcacaaaggagaaaaatttcaaatattgaacagctcggaaggagattggtgggaagcccgctccttgacaactggagagacaggttacattcccagcaattatgtggctccagttgactctatccaggcagaagagtggtactttggaaaacttggccgaaaagatgctgagcgacagctattgtcctttggaaacccaagaggtacctttcttatccgcgagagtgaaaccaccaaaggtgcctattcactttctatccgtgattgggatgatatgaaaggagaccatgtcaaacattataaaattcgcaaacttgacaatggtggatactacattaccacccgggcccagtttgaaacacttcagcagcttgtacaacattactcagagagagctgcaggtctctgctgccgcctagtagttccctgtcacaaagggatgccaaggcttaccgatctgtctgtcaaaaccaaagatgtctgggaaatccctcgagaatccctgcagttgatcaagagactgggaaatgggcagtttggggaagtatggatgggtacctggaatggaaacacaaaagtagccataaagactcttaaaccaggcacaatgtcccccgaatcattccttgaggaagcgcagatcatgaagaagctgaagcacgacaagctggtccagctctatgcagtggtgtctgaggagcccatctacatcgtcaccgagtatatgaacaaaggaagtttactggatttcttaaaagatggagaaggaagagctctgaaattaccaaatcttgtggacatggcagcacaggtggctgcaggaatggcttacatcgagcgcatgaattatatccatagagatctgcgatcagcaaacattctagtggggaatggactcatatgcaagattgctgacttcggattggcccgattgatagaagacaatgagtacacagcaagacaaggtgcaaagttccccatcaagtggacggcccccgaggcagccctgtacgggaggttcacaatcaagtctgacgtgtggtcttttggaatcttactcacagagctggtcaccaaaggaagagtgccatacccaggcatgaacaaccgggaggtgctggagcaggtggagcgaggctacaggatgccctgcccgcaggactgccccatctctctgcatgagctcatgatccactgctggaaaaaggaccctgaagaacgccccacttttgagtacttgcagagcttcctggaagactactttaccgcgacagagccccagtaccaacctggtgaaaacctgtaaggcccgggtctgcggagagaggccttgtcccagaggctgccccacccctccccattagctttcaattccgtagccagctgctccccagcagcggaaccgcccaggatcagattgcatgtgactctgaagctgacgaacttccatggccctcattaatgacacttgtccccaaatccgaacctcctctgtgaagcattcgagacagaaccttgttatttctcagactttggaaaatgcattgtatcgatgttatgtaaaaggccaaacctctgttcagtgtaaatagttactccagtgccaacaatcctagtgctttccttttttaaaaatgcaaatcctatgtgattttaactctgtcttcacctgattcaactaaaaaaaaaaaagtattattttccaaaagtggcctctttgtctaaaacaataaaattttttttcatgttttaacaaaaaccaa

SEQ ID NO: 435995 - DNA, 2808 bp, Homo sapiens
cggagctggaggggcagagcatcagcaagagtagcagcgagcagccgcgctggtggcggcggcgcgtcgttgcagttgcgccatctgtcaggagcggagccggcgaggagggggctgccgcgggcgaggaggaggggtcgccgcgagccgaaggccttcgagacccgcccgccgcccggcggcgagagtagaggcgaggttgttgtgcgagcggcgcgtcctctcccgcccgggcgcgccgcgcttctcccagcgcaccgaggaccgcccgggcgcacacaaagccgccgcccgcgccgcaccgcccggcggccgccgcccgcgccagggagggattcggccgccgggccggggacaccccggcgccgccccctcggtgctctcggaaggcccaccggctcccgggcccgccggggaccccccggagccgcctcggccgcgccggaggagggcggggagaggaccatgtgagtgggctccggagcctcagcgccgcgcagtttttttgaagaagcaggatgctgatctaaacgtggaaaaagaccagtcctgcctctgttgtagaagacatgtggtgtatataaagtttgtgatcgttggcggaaattttgagggtctcactctgtcacccaggctgacacgatcatggctcactacaatctctgccttcctgcctcaagggttcttccttgagcacctcagcctcccaagtagctgggaccacaggaatttagataatgggctgtgtgcaatgtaaggataaagaagcaacaaaactgacggaggagagggacggcagcctgaaccagagctctgggtaccgctatggcacagaccccacccctcagcactaccccagcttcggtgtgacctccatccccaactacaacaacttccacgcagccgggggccaaggactcaccgtctttggaggtgtgaactcttcgtctcatacggggaccttgcgtacgagaggaggaacaggagtgacactctttgtggccctttatgactatgaagcacggacagaagatgacctgagttttcacaaaggagaaaaatttcaaatattgaacagctcggaaggagattggtgggaagcccgctccttgacaactggagagacaggttacattcccagcaattatgtggctccagttgactctatccaggcagaagagtggtactttggaaaacttggccgaaaagatgctgagcgacagctattgtcctttggaaacccaagaggtacctttcttatccgcgagagtgaaaccaccaaaggtgcctattcactttctatccgtgattgggatgatatgaaaggagaccatgtcaaacattataaaattcgcaaacttgacaatggtggatactacattaccacccgggcccagtttgaaacacttcagcagcttgtacaacattactcagagagagctgcaggtctctgctgccgcctagtagttccctgtcacaaagggatgccaaggcttaccgatctgtctgtcaaaaccaaagatgtctgggaaatccctcgagaatccctgcagttgatcaagagactgggaaatgggcagtttggggaagtatggatgggtacctggaatggaaacacaaaagtagccataaagactcttaaaccaggcacaatgtcccccgaatcattccttgaggaagcgcagatcatgaagaagctgaagcacgacaagctggtccagctctatgcagtggtgtctgaggagcccatctacatcgtcaccgagtatatgaacaaaggaagtttactggatttcttaaaagatggagaaggaagagctctgaaattaccaaatcttgtggacatggcagcacaggtggctgcaggaatggcttacatcgagcgcatgaattatatccatagagatctgcgatcagcaaacattctagtggggaatggactcatatgcaagattgctgacttcggattggcccgattgatagaagacaatgagtacacagcaagacaaggtgcaaagttccccatcaagtggacggcccccgaggcagccctgtacgggaggttcacaatcaagtctgacgtgtggtcttttggaatcttactcacagagctggtcaccaaaggaagagtgccatacccaggcatgaacaaccgggaggtgctggagcaggtggagcgaggctacaggatgccctgcccgcaggactgccccatctctctgcatgagctcatgatccactgctggaaaaaggaccctgaagaacgccccacttttgagtacttgcagagcttcctggaagactactttaccgcgacagagccccagtaccaacctggtgaaaacctgtaaggcccgggtctgcggagagaggccttgtcccagaggctgccccacccctccccattagctttcaattccgtagccagctgctccccagcagcggaaccgcccaggatcagattgcatgtgactctgaagctgacgaacttccatggccctcattaatgacacttgtccccaaatccgaacctcctctgtgaagcattcgagacagaaccttgttatttctcagactttggaaaatgcattgtatcgatgttatgtaaaaggccaaacctctgttcagtgtaaatagttactccagtgccaacaatcctagtgctttccttttttaaaaatgcaaatcctatgtgattttaactctgtcttcacctgattcaactaaaaaaaaaaaagtattattttccaaaagtggcctctttgtctaaaacaataaaattttttttcatgttttaacaaaaaccaa

SEQ ID NO: 435996 - DNA, 2684 bp, Homo sapiens
cggagctggaggggcagagcatcagcaagagtagcagcgagcagccgcgctggtggcggcggcgcgtcgttgcagttgcgccatctgtcaggagcggagccggcgaggagggggctgccgcgggcgaggaggaggggtcgccgcgagccgaaggccttcgagacccgcccgccgcccggcggcgagagtagaggcgaggttgttgtgcgagcggcgcgtcctctcccgcccgggcgcgccgcgcttctcccagcgcaccgaggaccgcccgggcgcacacaaagccgccgcccgcgccgcaccgcccggcggccgccgcccgcgccagggagggattcggccgccgggccggggacaccccggcgccgccccctcggtgctctcggaaggcccaccggctcccgggcccgccggggaccccccggagccgcctcggccgcgccggaggagggcggggagaggaccatgtgagtgggctccggagcctcagcgccgcgcagtttttttgaagaagcaggatgctgatctaaacgtggaaaaagaccagtcctgcctctgttgtagaagacatgtggtgtatataaagtttgtgatcgttggcggaaattttggaatttagataatgggctgtgtgcaatgtaaggataaagaagcaacaaaactgacggaggagagggacggcagcctgaaccagagctctgggtaccgctatggcacagaccccacccctcagcactaccccagcttcggtgtgacctccatccccaactacaacaacttccacgcagccgggggccaaggactcaccgtctttggaggtgtgaactcttcgtctcatacggggaccttgcgtacgagaggaggaacaggagtgacactctttgtggccctttatgactatgaagcacggacagaagatgacctgagttttcacaaaggagaaaaatttcaaatattgaacagctcggaaggagattggtgggaagcccgctccttgacaactggagagacaggttacattcccagcaattatgtggctccagttgactctatccaggcagaagagtggtactttggaaaacttggccgaaaagatgctgagcgacagctattgtcctttggaaacccaagaggtacctttcttatccgcgagagtgaaaccaccaaaggtgcctattcactttctatccgtgattgggatgatatgaaaggagaccatgtcaaacattataaaattcgcaaacttgacaatggtggatactacattaccacccgggcccagtttgaaacacttcagcagcttgtacaacattactcagagaaagctgatggtttgtgttttaacttaactgtgattgcatcgagttgtaccccacaaacttctggattggctaaagatgcttgggaagttgcacgtcgttcgttgtgtctggagaagaagctgggtcaggggtgtttcgctgaagtgtggcttggtacctggaatggaaacacaaaagtagccataaagactcttaaaccaggcacaatgtcccccgaatcattccttgaggaagcgcagatcatgaagaagctgaagcacgacaagctggtccagctctatgcagtggtgtctgaggagcccatctacatcgtcaccgagtatatgaacaaaggaagtttactggatttcttaaaagatggagaaggaagagctctgaaattaccaaatcttgtggacatggcagcacaggtggctgcaggaatggcttacatcgagcgcatgaattatatccatagagatctgcgatcagcaaacattctagtggggaatggactcatatgcaagattgctgacttcggattggcccgattgatagaagacaatgagtacacagcaagacaaggtgcaaagttccccatcaagtggacggcccccgaggcagccctgtacgggaggttcacaatcaagtctgacgtgtggtcttttggaatcttactcacagagctggtcaccaaaggaagagtgccatacccaggcatgaacaaccgggaggtgctggagcaggtggagcgaggctacaggatgccctgcccgcaggactgccccatctctctgcatgagctcatgatccactgctggaaaaaggaccctgaagaacgccccacttttgagtacttgcagagcttcctggaagactactttaccgcgacagagccccagtaccaacctggtgaaaacctgtaaggcccgggtctgcggagagaggccttgtcccagaggctgccccacccctccccattagctttcaattccgtagccagctgctccccagcagcggaaccgcccaggatcagattgcatgtgactctgaagctgacgaacttccatggccctcattaatgacacttgtccccaaatccgaacctcctctgtgaagcattcgagacagaaccttgttatttctcagactttggaaaatgcattgtatcgatgttatgtaaaaggccaaacctctgttcagtgtaaatagttactccagtgccaacaatcctagtgctttccttttttaaaaatgcaaatcctatgtgattttaactctgtcttcacctgattcaactaaaaaaaaaaaagtattattttccaaaagtggcctctttgtctaaaacaataaaattttttttcatgttttaacaaaaaccaa

SEQ ID NO: 435997 - DNA, 3282 bp, Homo sapiens
cggagctggaggggcagagcatcagcaagagtagcagcgagcagccgcgctggtggcggcggcgcgtcgttgcagttgcgccatctgtcaggagcggagccggcgaggagggggctgccgcgggcgaggaggaggggtcgccgcgagccgaaggccttcgagacccgcccgccgcccggcggcgagagtagaggcgaggttgttgtgcgagcggcgcgtcctctcccgcccgggcgcgccgcgcttctcccagcgcaccgaggaccgcccgggcgcacacaaagccgccgcccgcgccgcaccgcccggcggccgccgcccgcgccagggagggattcggccgccgggccggggacaccccggcgccgccccctcggtgctctcggaaggcccaccggctcccgggcccgccggggaccccccggagccgcctcggccgcgccggaggagggcggggagaggaccatgtgagtgggctccggagcctcagcgccgcgcagtttttttgaagaagcaggatgctgatctaaacgtggaaaaagaccagtcctgcctctgttgtagaagacatgtggtgtatataaagtttgtgatcgttggcggaaattttggaatttagataatgggctgtgtgcaatgtaaggataaagaagcaacaaaactgacggaggagagggacggcagcctgaaccagagctctgggtaccgctatggcacagaccccacccctcagcactaccccagcttcggtgtgacctccatccccaactacaacaacttccacgcagccgggggccaaggactcaccgtctttggaggtgtgaactcttcgtctcatacggggaccttgcgtacgagaggaggaacaggagtgacactctttgtggccctttatgactatgaagcacggacagaagatgacctgagttttcacaaaggagaaaaatttcaaatattgaacagctcggaaggagattggtgggaagcccgctccttgacaactggagagacaggttacattcccagcaattatgtggctccagttgactctatccaggcagaagagtggtactttggaaaacttggccgaaaagatgctgagcgacagctattgtcctttggaaacccaagaggtacctttcttatccgcgagagtgaaaccaccaaaggtgcctattcactttctatccgtgattgggatgatatgaaaggagaccatgtcaaacattataaaattcgcaaacttgacaatggtggatactacattaccacccgggcccagtttgaaacacttcagcagcttgtacaacattactcagagagagctgcaggtctctgctgccgcctagtagttccctgtcacaaagggatgccaaggcttaccgatctgtctgtcaaaaccaaagatgtctgggaaatccctcgagaatccctgcagttgatcaagagactgggaaatgggcagtttggggaagtatggatgggtatgctgagactcaattactctcttattagcttccccgtttggaagatcccaaacaccaaagatggaaggtgaaaataaagactgcgtgaccgggaagaaagtttgaattactaatagtggggaataataatttcagttttggttttaacattctggaattcctacaaaaaaaaaaaaaaaaaaaaaaagatagtaagtgggcaaaattggcaaatggctcaagttgtactattacatgactctcaattcataaaccagcaaatggtccaaggaatgttccagctgccataaaatatcttgctcttcatttccaaaagcaaatatttgttgagtgtcatcctaacgggcaagtcaccttccatctttcctagtgcatgcataattatggattataaggactgtgttttctttattaattccctttcctgtagagaaagctgatggtttgtgttttaacttaactgtgattgcatcgagttgtaccccacaaacttctggattggctaaagatgcttgggaagttgcacgtcgttcgttgtgtctggagaagaagctgggtcaggggtgtttcgctgaagtgtggcttggtacctggaatggaaacacaaaagtagccataaagactcttaaaccaggcacaatgtcccccgaatcattccttgaggaagcgcagatcatgaagaagctgaagcacgacaagctggtccagctctatgcagtggtgtctgaggagcccatctacatcgtcaccgagtatatgaacaaaggaagtttactggatttcttaaaagatggagaaggaagagctctgaaattaccaaatcttgtggacatggcagcacaggtggctgcaggaatggcttacatcgagcgcatgaattatatccatagagatctgcgatcagcaaacattctagtggggaatggactcatatgcaagattgctgacttcggattggcccgattgatagaagacaatgagtacacagcaagacaaggtgcaaagttccccatcaagtggacggcccccgaggcagccctgtacgggaggttcacaatcaagtctgacgtgtggtcttttggaatcttactcacagagctggtcaccaaaggaagagtgccatacccaggcatgaacaaccgggaggtgctggagcaggtggagcgaggctacaggatgccctgcccgcaggactgccccatctctctgcatgagctcatgatccactgctggaaaaaggaccctgaagaacgccccacttttgagtacttgcagagcttcctggaagactactttaccgcgacagagccccagtaccaacctggtgaaaacctgtaaggcccgggtctgcggagagaggccttgtcccagaggctgccccacccctccccattagctttcaattccgtagccagctgctccccagcagcggaaccgcccaggatcagattgcatgtgactctgaagctgacgaacttccatggccctcattaatgacacttgtccccaaatccgaacctcctctgtgaagcattcgagacagaaccttgttatttctcagactttggaaaatgcattgtatcgatgttatgtaaaaggccaaacctctgttcagtgtaaatagttactccagtgccaacaatcctagtgctttccttttttaaaaatgcaaatcctatgtgattttaactctgtcttcacctgattcaactaaaaaaaaaaaagtattattttccaaaagtggcctctttgtctaaaacaataaaattttttttcatgttttaacaaaaaccaa

SEQ ID NO: 435998 - DNA, 1873 bp, Homo sapiens
atttccccttgtgtaataatctcccttcttgtgaatttcgtttcggcaggagtgacactctttgtggccctttatgactatgaagcacggacagaagatgacctgagttttcacaaaggagaaaaatttcaaatattgaacagctcggaaggagattggtgggaagcccgctccttgacaactggagagacaggttacattcccagcaattatgtggctccagttgactctatccaggcagaagagtggtactttggaaaacttggccgaaaagatgctgagcgacagctattgtcctttggaaacccaagaggtacctttcttatccgcgagagtgaaaccaccaaaggtgcctattcactttctatccgtgattgggatgatatgaaaggagaccatgtcaaacattataaaattcgcaaacttgacaatggtggatactacattaccacccgggcccagtttgaaacacttcagcagcttgtacaacattactcagagagagctgcaggtctctgctgccgcctagtagttccctgtcacaaagggatgccaaggcttaccgatctgtctgtcaaaaccaaagatgtctgggaaatccctcgagaatccctgcagttgatcaagagactgggaaatgggcagtttggggaagtatggatgggtacctggaatggaaacacaaaagtagccataaagactcttaaaccaggcacaatgtcccccgaatcattccttgaggaagcgcagatcatgaagaagctgaagcacgacaagctggtccagctctatgcagtggtgtctgaggagcccatctacatcgtcaccgagtatatgaacaaaggaagtttactggatttcttaaaagatggagaaggaagagctctgaaattaccaaatcttgtggacatggcagcacaggtggctgcaggaatggcttacatcgagcgcatgaattatatccatagagatctgcgatcagcaaacattctagtggggaatggactcatatgcaagattgctgacttcggattggcccgattgatagaagacaatgagtacacagcaagacaaggtgcaaagttccccatcaagtggacggcccccgaggcagccctgtacgggaggttcacaatcaagtctgacgtgtggtcttttggaatcttactcacagagctggtcaccaaaggaagagtgccatacccaggcatgaacaaccgggaggtgctggagcaggtggagcgaggctacaggatgccctgcccgcaggactgccccatctctctgcatgagctcatgatccactgctggaaaaaggaccctgaagaacgccccacttttgagtacttgcagagcttcctggaagactactttaccgcgacagagccccagtaccaacctggtgaaaacctgtaaggcccgggtctgcggagagaggccttgtcccagaggctgccccacccctccccattagctttcaattccgtagccagctgctccccagcagcggaaccgcccaggatcagattgcatgtgactctgaagctgacgaacttccatggccctcattaatgacacttgtccccaaatccgaacctcctctgtgaagcattcgagacagaaccttgttatttctcagactttggaaaatgcattgtatcgatgttatgtaaaaggccaaacctctgttcagtgtaaatagttactccagtgccaacaatcctagtgctttccttttttaaaaatgcaaatcctatgtgattttaactctgtcttcacctgattcaactaaaaaaaaaaaagtattattttccaaaagtggcctctttgtctaaaacaataaaattttttttcatgttttaacaaaaaccaa

SEQ ID NO: 435999 - DNA, 1934 bp, Homo sapiens
aactgtgggttcatctcatggctgactcgaactggaaccttctgaccttcacagggggactatgttggagttcagagtaaaggaataggttggagaaatcgggtggcaggatgattaggtgacagttatacacttcagaccacagtgagtctctaactgcaagctgttgaaatggtcaacatatttacttttcttttttatttacagggaaggagattggtgggaagcccgctccttgacaactggagagacaggttacattcccagcaattatgtggctccagttgactctatccaggcagaagagtggtactttggaaaacttggccgaaaagatgctgagcgacagctattgtcctttggaaacccaagaggtacctttcttatccgcgagagtgaaaccaccaaaggtgcctattcactttctatccgtgattgggatgatatgaaaggagaccatgtcaaacattataaaattcgcaaacttgacaatggtggatactacattaccacccgggcccagtttgaaacacttcagcagcttgtacaacattactcagagagagctgcaggtctctgctgccgcctagtagttccctgtcacaaagggatgccaaggcttaccgatctgtctgtcaaaaccaaagatgtctgggaaatccctcgagaatccctgcagttgatcaagagactgggaaatgggcagtttggggaagtatggatgggtacctggaatggaaacacaaaagtagccataaagactcttaaaccaggcacaatgtcccccgaatcattccttgaggaagcgcagatcatgaagaagctgaagcacgacaagctggtccagctctatgcagtggtgtctgaggagcccatctacatcgtcaccgagtatatgaacaaaggaagtttactggatttcttaaaagatggagaaggaagagctctgaaattaccaaatcttgtggacatggcagcacaggtggctgcaggaatggcttacatcgagcgcatgaattatatccatagagatctgcgatcagcaaacattctagtggggaatggactcatatgcaagattgctgacttcggattggcccgattgatagaagacaatgagtacacagcaagacaaggtgcaaagttccccatcaagtggacggcccccgaggcagccctgtacgggaggttcacaatcaagtctgacgtgtggtcttttggaatcttactcacagagctggtcaccaaaggaagagtgccatacccaggcatgaacaaccgggaggtgctggagcaggtggagcgaggctacaggatgccctgcccgcaggactgccccatctctctgcatgagctcatgatccactgctggaaaaaggaccctgaagaacgccccacttttgagtacttgcagagcttcctggaagactactttaccgcgacagagccccagtaccaacctggtgaaaacctgtaaggcccgggtctgcggagagaggccttgtcccagaggctgccccacccctccccattagctttcaattccgtagccagctgctccccagcagcggaaccgcccaggatcagattgcatgtgactctgaagctgacgaacttccatggccctcattaatgacacttgtccccaaatccgaacctcctctgtgaagcattcgagacagaaccttgttatttctcagactttggaaaatgcattgtatcgatgttatgtaaaaggccaaacctctgttcagtgtaaatagttactccagtgccaacaatcctagtgctttccttttttaaaaatgcaaatcctatgtgattttaactctgtcttcacctgattcaactaaaaaaaaaaaagtattattttccaaaagtggcctctttgtctaaaacaataaaattttttttcatgttttaacaaaaaccaa

SEQ ID NO: 436000 - DNA, 1960 bp, Homo sapiens
cagcgcaggtctgaggagctgagaagggaggcttacgtgaagggaatttagataatgggctgtgtgcaatgtaaggataaagaagcaacaaaactgacggaggagagggacggcagcctgaaccagagctctgggtaccgctatggcacagaccccacccctcagcactaccccagcttcggtgtgacctccatccccaactacaacaacttccacgcagccgggggccaaggactcaccgtctttggaggtgtgaactcttcgtctcatacggggaccttgcgtacgagaggaggaacaggagtgacactctttgtggccctttatgactatgaagcacggacagaagatgacctgagttttcacaaaggagaaaaatttcaaatattgaacagctcggaaggagattggtgggaagcccgctccttgacaactggagagacaggttacattcccagcaattatgtggctccagttgactctatccaggcagaagagtggtactttggaaaacttggccgaaaagatgctgagcgacagctattgtcctttggaaacccaagaggtacctttcttatccgcgagagtgaaaccaccaaaggtgcctattcactttctatccgtgattgggatgatatgaaaggagaccatgtcaaacattataaaattcgcaaacttgacaatggtggatactacattaccacccgggcccagtttgaaacacttcagcagcttgtacaacattactcaggtacctggaatggaaacacaaaagtagccataaagactcttaaaccaggcacaatgtcccccgaatcattccttgaggaagcgcagatcatgaagaagctgaagcacgacaagctggtccagctctatgcagtggtgtctgaggagcccatctacatcgtcaccgagtatatgaacaaaggaagtttactggatttcttaaaagatggagaaggaagagctctgaaattaccaaatcttgtggacatggcagcacaggtggctgcaggaatggcttacatcgagcgcatgaattatatccatagagatctgcgatcagcaaacattctagtggggaatggactcatatgcaagattgctgacttcggattggcccgattgatagaagacaatgagtacacagcaagacaaggtgcaaagttccccatcaagtggacggcccccgaggcagccctgtacgggaggttcacaatcaagtctgacgtgtggtcttttggaatcttactcacagagctggtcaccaaaggaagagtgccatacccaggcatgaacaaccgggaggtgctggagcaggtggagcgaggctacaggatgccctgcccgcaggactgccccatctctctgcatgagctcatgatccactgctggaaaaaggaccctgaagaacgccccacttttgagtacttgcagagcttcctggaagactactttaccgcgacagagccccagtaccaacctggtgaaaacctgtaaggcccgggtctgcggagagaggccttgtcccagaggctgccccacccctccccattagctttcaattccgtagccagctgctccccagcagcggaaccgcccaggatcagattgcatgtgactctgaagctgacgaacttccatggccctcattaatgacacttgtccccaaatccgaacctcctctgtgaagcattcgagacagaaccttgttatttctcagactttggaaaatgcattgtatcgatgttatgtaaaaggccaaacctctgttcagtgtaaatagttactccagtgccaacaatcctagtgctttccttttttaaaaatgcaaatcctatgtgattttaactctgtcttcacctgattcaactaaaaaaaaaaaagtattattttccaaaagtggcctctttgtctaaaacaataaaattttttttcatgttttaacaaaaaccaa

SEQ ID NO: 436001 - DNA, 902 bp, Homo sapiens
gctaaaggataggaagtgtgagaagaatgctttgaaagaaaccttaaaaacaaaacaactgactattcagagaataccaggtcttatgtggaatcatctagcacgtgcaaagttccccatcaagtggacggcccccgaggcagccctgtacgggaggttcacaatcaagtctgacgtgtggtcttttggaatcttactcacagagctggtcaccaaaggaagagtgccatacccaggcatgaacaaccgggaggtgctggagcaggtggagcgaggctacaggatgccctgcccgcaggactgccccatctctctgcatgagctcatgatccactgctggaaaaaggaccctgaagaacgccccacttttgagtacttgcagagcttcctggaagactactttaccgcgacagagccccagtaccaacctggtgaaaacctgtaaggcccgggtctgcggagagaggccttgtcccagaggctgccccacccctccccattagctttcaattccgtagccagctgctccccagcagcggaaccgcccaggatcagattgcatgtgactctgaagctgacgaacttccatggccctcattaatgacacttgtccccaaatccgaacctcctctgtgaagcattcgagacagaaccttgttatttctcagactttggaaaatgcattgtatcgatgttatgtaaaaggccaaacctctgttcagtgtaaatagttactccagtgccaacaatcctagtgctttccttttttaaaaatgcaaatcctatgtgattttaactctgtcttcacctgattcaactaaaaaaaaaaaagtattattttccaaaagtggcctctttgtctaaaacaataaaattttttttcatgttttaacaaaaaccaa

SEQ ID NO: 436002 - DNA, 2885 bp, Homo sapiens
cggagctggaggggcagagcatcagcaagagtagcagcgagcagccgcgctggtggcggcggcgcgtcgttgcagttgcgccatctgtcaggagcggagccggcgaggagggggctgccgcgggcgaggaggaggggtcgccgcgagccgaaggccttcgagacccgcccgccgcccggcggcgagagtagaggcgaggttgttgtgcgagcggcgcgtcctctcccgcccgggcgcgccgcgcttctcccagcgcaccgaggaccgcccgggcgcacacaaagccgccgcccgcgccgcaccgcccggcggccgccgcccgcgccagggagggattcggccgccgggccggggacaccccggcgccgccccctcggtgctctcggaaggcccaccggctcccgggcccgccggggaccccccggagccgcctcggccgcgccggaggagggcggggagaggaccatgtgagtgggctccggagcctcagcgccgcgcagtttttttgaagaagcaggatgctgatctaaacgtggaaaaagaccagtcctgcctctgttgtagaagacatgtggtgtatataaagtttgtgatcgttggcggaaattttggaatttagataatgggctgtgtgcaatgtaaggataaagaagcaacaaaactgacggaggagagggacggcagcctgaaccagagctctgggtaccgctatggcacagaccccacccctcagcactaccccagcttcggtgtgacctccatccccaactacaacaacttccacgcagccgggggccaaggactcaccgtctttggaggtgtgaactcttcgtctcatacggggaccttgcgtacgagaggaggaacaggagtgacactctttgtggccctttatgactatgaagcacggacagaagatgacctgagttttcacaaaggagaaaaatttcaaatattgaacagctcggaaggagattggtgggaagcccgctccttgacaactggagagacaggttacattcccagcaattatgtggctccagttgactctatccaggcagaagagtggtactttggaaaacttggccgaaaagatgctgagcgacagctattgtcctttggaaacccaagaggtacctttcttatccgcgagagtgaaaccaccaaaggtgcctattcactttctatccgtgattgggatgatatgaaaggagaccatgtcaaacattataaaattcgcaaacttgacaatggtggatactacattaccacccgggcccagtttgaaacacttcagcagcttgtacaacattactcagagagagctgcaggtctctgctgccgcctagtagttccctgtcacaaagggatgccaaggcttaccgatctgtctgtcaaaaccaaagatgtctgggaaatccctcgagaatccctgcagttgatcaagagactgggaaatgggcagtttggggaagtatggatgggtacctggaatggaaacacaaaagtagccataaagactcttaaaccaggcacaatgtcccccgaatcattccttgaggaagcgcagatcatgaagaagctgaagcacgacaagctggtccagctctatgcagtggtgtctgaggagcccatctacatcgtcaccgagtatatgaacaaaggaagtttactggatttcttaaaagatggagaaggaagagctctgaaattaccaaatcttgtggacatggcagcacaggtggctgcaggaatggcttacatcgagcgcatgaattatatccatagagatctgcgatcagcaaacattctagtggggaatggactcatatgcaagattgctgacttcggattggcccgattgatagaagacaatgagtacacagcaagacaaggtgcaaagttccccatcaagtggacggcccccgaggcagccctgtacgggaggttcacaatcaagtctgacgtgtggtcttttggaatcttactcacagagctggtcaccaaaggaagagtgccatacccaggtaagagcagggcctcacagacatgggcctgagattggaggcttttttgacaccatttgggaaaacttcatccactttgctttctaagccccatcctcagctttctgctgagcttgagtttgaagaacatggccaggtattcagcgagagaaaagcagaactgggagccaccatgtatgtagacaagcagccaccatgaactgtgtgccaggattaatgtaagtagcagctggtctaaatgcttcagtccccctccagttcatagaatctctcctctctcagtaggagtatgtgtctgtggttcccagagcagaaatgtcactggcagtgcctctgcccaaatggagtttgcagacatgtctgggaaagagaaggagaaaagccccactgctttttgattacactgtagcactgacccatggagtgagcctggcaggaaggtgccaggacctgttctctccacaggacccagctccagatggccaaagagagcagaggcacatgtgaaatgcaatttagagcccactcactgcctgttgctgaacagtcaaaacatgctataccaaagcaagtataatgtaaagaaattggaaattcttagactctggaatgtttctgtattatcagatttatgctctccaaagaaaccacgagtttggcttatccatgcttaaattgattaacgtcgacagatggtgacataaaggacacccatgccatttcacctccacgctttagtggttatagcacagggacgatctgcttttttgaaatgttaaggacatatttttcagttactgctgagtgaagaaagaacatagctccccctcattccctgcgtaagaaaggagcttaaag

SEQ ID NO: 436003 - DNA, 2121 bp, Homo sapiens
cggagctggaggggcagagcatcagcaagagtagcagcgagcagccgcgctggtggcggcggcgcgtcgttgcagttgcgccatctgtcaggagcggagccggcgaggagggggctgccgcgggcgaggaggaggggtcgccgcgagccgaaggccttcgagacccgcccgccgcccggcggcgagagtagaggcgaggttgttgtgcgagcggcgcgtcctctcccgcccgggcgcgccgcgcttctcccagcgcaccgaggaccgcccgggcgcacacaaagccgccgcccgcgccgcaccgcccggcggccgccgcccgcgccagggagggattcggccgccgggccggggacaccccggcgccgccccctcggtgctctcggaaggcccaccggctcccgggcccgccggggaccccccggagccgcctcggccgcgccggaggagggcggggagaggaccatgtgagtgggctccggagcctcagcgccgcgcagtttttttgaagaagcaggatgctgatctaaacgtggaaaaagaccagtcctgcctctgttgtagaagacatgtggtgtatataaagtttgtgatcgttggcggaaattttggaatttagataatgggctgtgtgcaatgtaaggataaagaagcaacaaaactgacggaggagagggacggcagcctgaaccagagctctgggtaccgctatggcacagaccccacccctcagcactaccccagcttcggtgtgacctccatccccaactacaacaacttccacgcagccgggggccaaggactcaccgtctttggaggtgtgaactcttcgtctcatacggggaccttgcgtacgagaggaggaacaggagtgacactctttgtggccctttatgactatgaagcacggacagaagatgacctgagttttcacaaaggagaaaaatttcaaatattgaacagctcggaaggagattggtgggaagcccgctccttgacaactggagagacaggttacattcccagcaattatgtggctccagttgactctatccaggcagaagagtggtactttggaaaacttggccgaaaagatgctgagcgacagctattgtcctttggaaacccaagaggtacctttcttatccgcgagagtgaaaccaccaaaggtgcctattcactttctatccgtgattgggatgatatgaaaggagaccatgtcaaacattataaaattcgcaaacttgacaatggtggatactacattaccacccgggcccagtttgaaacacttcagcagcttgtacaacattactcagagagagctgcaggtctctgctgccgcctagtagttccctgtcacaaagggatgccaaggcttaccgatctgtctgtcaaaaccaaagatgtctgggaaatccctcgagaatccctgcagttgatcaagagactgggaaatgggcagtttggggaagtatggatgggtacctggaatggaaacacaaaagtagccataaagactcttaaaccaggcacaatgtcccccgaatcattccttgaggaagcgcagatcatgaagaagctgaagcacgacaagctggtccagctctatgcagtggtgtctgaggagcccatctacatcgtcaccgagtatatgaacaaaggaagtttactggatttcttaaaagatggagaaggaagagctctgaaattaccaaatcttgtggacatggcagcacaggtaggccctgcagggtaacttgatgtgccatagatttaatgacgtgtctaagtacattgggtcgtggtgtaacatgtcctgttccctgggtttccacaggtggctgcaggaatggcttacatcgagcgcatgaattatatccatagagatctgcgatcagcaaacattctagtggggaatggactcatatgcaagattgctgacttcggattggcccgattgatagaagacaatgagtacacagcaagacaaggtgggcacttgaatgacaatggctcgtgatcacagctgtgagaacagtcacttactgcacagcccttccttcctccttcccttcccttccttcagaaaatacttgaaatgtcattcttcagcttggt

SEQ ID NO: 436004 - DNA, 2398 bp, Homo sapiens
cggagctggaggggcagagcatcagcaagagtagcagcgagcagccgcgctggtggcggcggcgcgtcgttgcagttgcgccatctgtcaggagcggagccggcgaggagggggctgccgcgggcgaggaggaggggtcgccgcgagccgaaggccttcgagacccgcccgccgcccggcggcgagagtagaggcgaggttgttgtgcgagcggcgcgtcctctcccgcccgggcgcgccgcgcttctcccagcgcaccgaggaccgcccgggcgcacacaaagccgccgcccgcgccgcaccgcccggcggccgccgcccgcgccagggagggattcggccgccgggccggggacaccccggcgccgccccctcggtgctctcggaaggcccaccggctcccgggcccgccggggaccccccggagccgcctcggccgcgccggaggagggcggggagaggaccatgtgagtgggctccggagcctcagcgccgcgcagtttttttgaagaagcaggatgctgatctaaacgtggaaaaagaccagtcctgcctctgttgtagaagacatgtggtgtatataaagtttgtgatcgttggcggaaattttggaatttagataatgggctgtgtgcaatgtaaggataaagaagcaacaaaactgacggaggagagggacggcagcctgaaccagagctctgggtaccgctatggcacagaccccacccctcagcactaccccagcttcggtgtgacctccatccccaactacaacaacttccacgcagccgggggccaaggactcaccgtctttggaggtgtgaactcttcgtctcatacggggaccttgcgtacgagaggaggaacaggagtgacactctttgtggccctttatgactatgaagcacggacagaagatgacctgagttttcacaaaggagaaaaatttcaaatattgaacagctcggaaggagattggtgggaagcccgctccttgacaactggagagacaggttacattcccagcaattatgtggctccagttgactctatccaggcagaagagtggtactttggaaaacttggccgaaaagatgctgagcgacagctattgtcctttggaaacccaagaggtacctttcttatccgcgagagtgaaaccaccaaaggtgcctattcactttctatccgtgattgggatgatatgaaaggagaccatgtcaaacattataaaattcgcaaacttgacaatggtggatactacattaccacccgggcccagtttgaaacacttcagcagcttgtacaacattactcagagagagctgcaggtctctgctgccgcctagtagttccctgtcacaaagggatgccaaggcttaccgatctgtctgtcaaaaccaaagatgtctgggaaatccctcgagaatccctgcagttgatcaagagactgggaaatgggcagtttggggaagtatggatgggtatgctgagactcaattactctcttattagcttccccgtttggaagatcccaaacaccaaagatggaaggtgaaaataaagactgcgtgaccgggaagaaagtttgaattactaatagtggggaataataatttcagttttggttttaacattctggaattcctacaaaaaaaaaaaaaaaaaaaaaaagatagtaagtgggcaaaattggcaaatggctcaagttgtactattacatgactctcaattcataaaccagcaaatggtccaaggaatgttccagctgccataaaatatcttgctcttcatttccaaaagcaaatatttgttgagtgtcatcctaacgggcaagtcaccttccatctttcctagtgcatgcataattatggattataaggactgtgttttctttattaattccctttcctgtagagaaagctgatggtttgtgttttaacttaactgtgattgcatcgagttgtaccccacaaacttctggattggctaaagatgcttgggaagttgcacgtcgttcgttgtgtctggagaagaagctgggtcaggggtgtttcgctgaagtgtggcttggtaaggcagagggcacattttgttttggctgcatctcaaagccgattaaaaggatggttttgaacaaaaatgcacacacagccgttgggacaaagacacttaacctggataactagacgggcacaggccatccagattttcagaatatgctgataccttgctgtgctcatctgtcctacttcatgtggttaattaaggcacccgcagaacaggaaaccagtacactatgaatctggtgtttcctcttcctaagaaatgggaaggtaagatactgtatatgggcagccataagaaagaccatggacgttttgctcaatgggcctgg

SEQ ID NO: 436005 - DNA, 1608 bp, Homo sapiens
cggagctggaggggcagagcatcagcaagagtagcagcgagcagccgcgctggtggcggcggcgcgtcgttgcagttgcgccatctgtcaggagcggagccggcgaggagggggctgccgcgggcgaggaggaggggtcgccgcgagccgaaggccttcgagacccgcccgccgcccggcggcgagagtagaggcgaggttgttgtgcgagcggcgcgtcctctcccgcccgggcgcgccgcgcttctcccagcgcaccgaggaccgcccgggcgcacacaaagccgccgcccgcgccgcaccgcccggcggccgccgcccgcgccagggagggattcggccgccgggccggggacaccccggcgccgccccctcggtgctctcggaaggcccaccggctcccgggcccgccggggaccccccggagccgcctcggccgcgccggaggagggcggggagaggaccatgtgagtgggctccggagcctcagcgccgcgcagtttttttgaagaagcaggatgctgatctaaacgtggaaaaagaccagtcctgcctctgttgtagaagacatgtggtgtatataaagtttgtgatcgttggcggaaattttggaatttagataatgggctgtgtgcaatgtaaggataaagaagcaacaaaactgacggaggagagggacggcagcctgaaccagagctctgggtaccgctatggcacagaccccacccctcagcactaccccagcttcggtgtgacctccatccccaactacaacaacttccacgcagccgggggccaaggactcaccgtctttggaggtgtgaactcttcgtctcatacggggaccttgcgtacgagaggaggaacaggagtgacactctttgtggccctttatgactatgaagcacggacagaagatgacctgagttttcacaaaggagaaaaatttcaaatattgaacagctcggaaggagattggtgggaagcccgctccttgacaactggagagacaggttacattcccagcaattatgtggctccagttgactctatccaggcagaagagtggtactttggaaaacttggccgaaaagatgctgagcgacagctattgtcctttggaaacccaagaggtacctttcttatccgcgagagtgaaaccaccaaaggtgcctattcactttctatccgtgattgggatgatatgaaaggagaccatgtcaaacattataaaattcgcaaacttgacaatggtggatactacattaccacccgggcccagtttgaaacacttcagcagcttgtacaacattactcaggtaaccttaattctaactacctactaaccatttggatgctggagggagtggataggcccagagcaggaaagtggaaaggggtaaaactaatatgtacaaaatcacttatagagtatgttttctttgccagcccttaatggtagggcttggctgtataggttctattgctattgttctactgttgttattattagttccacatgtttgtccgaagattctataatatttttgtttcccaagtagaaagcaataggttaaattttaaaagttgtttgttttttcatcttca

SEQ ID NO: 436006 - DNA, 1732 bp, Homo sapiens
aacccggaccacctttgtcagacagtgagctcctcaggtggctaaaagagtggctttgaccgggacctcctctgtgaagcattcgagacagaaccttgttatttctcagactttggaaaatgcattgtatcgatgttatgtaaaaggccaaacctctgttcagtgtaaatagttactccagtgccaacaatcctagtgctttccttttttaaaaatgcaaatcctatgtgattttaactctgtcttcacctgattcaactaaaaaaaaaaaagtattattttccaaaagtggcctctttgtctaaaacaataaaattttttttcatgttttaacaaaaaccaatcaggacaggtgtttgtttttgttttcttttttataaatatgaatatatataatatatatgtccctgtacatatacaatgtgggtgctaatgtggagactgtggccggcctgagccaccaagctgcgggacccagagggagggattttactgcaagtcagcatcaaagcaccggtgttattctgaaaacaccagtggcctcatttttggcttttgcaaagcatgaattttttcatttggattgcactttcctggttcatgactgtacctgtaggtggttgttactttgactcttttcaggaaccaccccccaagctgaatttacaagttctgttagcactatttgcttcaacttactgcgatttgttctcaaaacttaaaaataagcaagcaaatggctgatactaccaagagaactggaagatggataccacacaaacttcttgtataaaaatatgaatgctgaaatgtttcagacatttttaatttaataaacctgtaaccacatttaagtgatctaaaacccatagcattgtagtcatggcaacccgctaaactttctcatgcaactaaaatttctgggggaaatgagggtgggggttgtacatttcccattgtaaaataagtgttttaaatgtcctgtactgctaacgaatgactttctatatgtccaggagttctccagtggaataactatgcactactttacatttcatggggatgcacaaaaacaaaaaagtattacatttttagttgctgtttgtaccaaccttaaattacatatgtttaacaacaacaaatcaaaaatcctatttctattgagtttttaatactgactagcaactctgaagtcttaattccttttttgttatgatttatttgtgagtttacatttttaaattgtttaactttcttaatttagtaattaaaaagagagcattttacatttgaaaaaaaaacaagcataatataaatatgattgaaaaaagatgattacaaaaatgatcttgaaaacaaataataacaaatagaataagaatacattgatataaagacattaagaaaaaaaaaaaaggggggggggcggaagaaaaattaacacggagagagggacctaaatatcggcacagacgccagctgtgttccaaaaaagaggccccataaaggagaatgataaaaaaaacagacgacgcacggccgataacaacacaaccgagagtggagacacaaaatcaacgccaggcagctaaagacaaagcaacccaatgtcgtgggggagaacacaaggaccaccacccacaagcaataacagccccgacaaacaacaaacgggagatgaatggtgcaaccacaaaaattgactgagaaaaacggacgataataaaaaaac

SEQ ID NO: 436007 - DNA, 1098 bp, Homo sapiens
cagcgcaggtctgaggagctgagaagggaggcttacgtgaagggtaagactcgcatgggcctggccggtggacaagatgtgggaactgcatggacagttatgtggaggtgcattccatcctggctggagagtgtgtgaggggcagtgggagattggtggaaaagatataggccactggtgtggaaggctgggaagccacgcttcagatcggagaaagttgctaatcagagaagcggcgttctggaggtggaatttagataatgggctgtgtgcaatgtaaggataaagaagcaacaaaactgacggaggagagggacggcagcctgaaccagagctctgggtaccgctatggcacagaccccacccctcagcactaccccagcttcggtgtgacctccatccccaactacaacaacttccacgcagccgggggccaaggactcaccgtctttggaggtgtgaactcttcgtctcatacggggaccttgcgtacgagaggaggaacaggagtgacactctttgtggccctttatgactatgaagcacggacagaagatgacctgagttttcacaaaggagaaaaatttcaaatattgaacagctcggaaggagattggtgggaagcccgctccttgacaactggagagacaggttacattcccagcaattatgtggctccagttgactctatccaggcagaagagtatgtttcattttgttttcacttaactacttgattttaaaagttgattgccgcaataaaatgccatcagcattgggcaggagggagaagaaattcacagcagtgattaaggctgagtttttcaggctttctgccccggtttttaccctgtgtaatacttgcactattattaacttaatgtttctcttgaagcctgctcacttattttgaaagaaaactttctatcaataccctaaatgaaaagccagtaaaacttgtcatagattaaaagtagccataaaaatatgaaatgctagctagagcatatattattgccaacccaagtttctaagcccgcagtccactccctctgttgggaagagaggggagagtagcaagtaattgccacagattaa

SEQ ID NO: 436008 - DNA, 2693 bp, Homo sapiens
cggagctggaggggcagagcatcagcaagagtagcagcgagcagccgcgctggtggcggcggcgcgtcgttgcagttgcgccatctgtcaggagcggagccggcgaggagggggctgccgcgggcgaggaggaggggtcgccgcgagccgaaggccttcgagacccgcccgccgcccggcggcgagagtagaggcgaggttgttgtgcgagcggcgcgtcctctcccgcccgggcgcgccgcgcttctcccagcgcaccgaggaccgcccgggcgcacacaaagccgccgcccgcgccgcaccgcccggcggccgccgcccgcgccagggagggattcggccgccgggccggggacaccccggcgccgccccctcggtgctctcggaaggcccaccggctcccgggcccgccggggaccccccggagccgcctcggccgcgccggaggagggcggggagaggaccatgtgagtgggctccggagcctcagcgccgcgcagtttttttgaagaagcaggatgctgatctaaacgtggaaaaagaccagtcctgcctctgttgtagaagacatgtggtgtatataaagtttgtgatcgttggcggaaattttggaatttagataatgggctgtgtgcaatgtaaggataaagaagcaacaaaactgacggaggagagggacggcagcctgaaccagagctctgggtaccgctatggcacagaccccacccctcagcactaccccagcttcggtgtgacctccatccccaactacaacaacttccacgcagccgggggccaaggactcaccgtctttggaggtgtgaactcttcgtctcatacggggaccttgcgtacgagaggaggaacaggagtgacactctttgtggccctttatgactatgaagcacggacagaagatgacctgagttttcacaaaggagaaaaatttcaaatattgaacagctcggaaggagattggtgggaagcccgctccttgacaactggagagacaggttacattcccagcaattatgtggctccagttgactctatccaggcagaagagtggtactttggaaaacttggccgaaaagatgctgagcgacagctattgtcctttggaaacccaagaggtacctttcttatccgcgagagtgaaaccaccaaaggtgcctattcactttctatccgtgattgggatgatatgaaaggagaccatgtcaaacattataaaattcgcaaacttgacaatggtggatactacattaccacccgggcccagtttgaaacacttcagcagcttgtacaacattactcagagagagctgcaggtctctgctgccgcctagtagttccctgtcacaaagggatgccaaggcttaccgatctgtctgtcaaaaccaaagatgtctgggaaatccctcgagaatccctgcagttgatcaagagactgggaaatgggcagtttggggaagtatggatgggtacctggaatggaaacacaaaagtagccataaagactcttaaaccaggcacaatgtcccccgaatcattccttgaggaagcgcagatcatgaagaagctgaagcacgacaagctggtccagctctatgcagtggtgtctgaggagcccatctacatcgtcaccgagtatatgaacaaaggaagtttactggatttcttaaaagatggagaaggaagagctctgaaattaccaaatcttgtggacatggcagcacaggtggctgcaggaatggcttacatcgagcgcatgaattatatccatagagatctgcgatcagcaaacattctagtggggaatggactcatatgcaagattgctgacttcggattggcccgattgatagaagacaatgagtacacagcaagacaaggtgcaaagttccccatcaagtggacggcccccgaggcagccctgtacgggaggttcacaatcaagtctgacgtgtggtcttttggaatcttactcacagagctggtcaccaaaggaagagtgccatacccaggcatgaacaaccgggaggtgctggagcaggtggagcgaggctacaggatgccctgcccgcaggactgccccatctctctgcatgagctcatgatccactgctggaaaaaggaccctgaagaacgccccacttttgagtacttgcagagcttcctggaagactactttaccgcgacagagccccagtaccaacctggtgaaaacctgtaaggcccgggtctgcggagagaggccttgtcccagaggctgccccacccctccccattagctttcaattccgtagccagctgctccccagcagcggaaccgcccaggatcagattgcatgtgactctgaagctgacgaacttccatggccctcattaatgacacttgtccccaaatccgaacctcctctgtgaagcattcgagacagaaccttgttatttctcagactttggaaaatgcattgtatcgatgttatgtaaaaggccaaacctctgttcagtgtaaatagttactccagtgccaacaatcctagtgctttccttttttaaaaatgcaaatcctatgtgattttaactctgtcttcacctgattcaactaaaaaaaaaaaagtattattttccaaaagtggcctctttgtctaaaacaataaaattttttttcatgttttaacaaaaaccaa

SEQ ID NO: 436009 - DNA, 2430 bp, Homo sapiens
cggagctggaggggcagagcatcagcaagagtagcagcgagcagccgcgctggtggcggcggcgcgtcgttgcagttgcgccgggccggggacaccccggcgccgccccctcggtgctctcggaaggcccaccggctcccgggcccgccggggaccccccggagccgcctcggccgcgccggaggagggcggggagaggaccatgtgagtgggctccggagcctcagcgccgcgcagtttttttgaagaagcaggatgctgatctaaacgtggaaaaagaccagtcctgcctctgttgtagaagacatgtggtgtatataaagtttgtgatcgttggcggaaattttggaatttagataatgggctgtgtgcaatgtaaggataaagaagcaacaaaactgacggaggagagggacggcagcctgaaccagagctctgggtaccgctatggcacagaccccacccctcagcactaccccagcttcggtgtgacctccatccccaactacaacaacttccacgcagccgggggccaaggactcaccgtctttggaggtgtgaactcttcgtctcatacggggaccttgcgtacgagaggaggaacaggagtgacactctttgtggccctttatgactatgaagcacggacagaagatgacctgagttttcacaaaggagaaaaatttcaaatattgaacagctcggaaggagattggtgggaagcccgctccttgacaactggagagacaggttacattcccagcaattatgtggctccagttgactctatccaggcagaagagtggtactttggaaaacttggccgaaaagatgctgagcgacagctattgtcctttggaaacccaagaggtacctttcttatccgcgagagtgaaaccaccaaaggtgcctattcactttctatccgtgattgggatgatatgaaaggagaccatgtcaaacattataaaattcgcaaacttgacaatggtggatactacattaccacccgggcccagtttgaaacacttcagcagcttgtacaacattactcagagagagctgcaggtctctgctgccgcctagtagttccctgtcacaaagggatgccaaggcttaccgatctgtctgtcaaaaccaaagatgtctgggaaatccctcgagaatccctgcagttgatcaagagactgggaaatgggcagtttggggaagtatggatgggtacctggaatggaaacacaaaagtagccataaagactcttaaaccaggcacaatgtcccccgaatcattccttgaggaagcgcagatcatgaagaagctgaagcacgacaagctggtccagctctatgcagtggtgtctgaggagcccatctacatcgtcaccgagtatatgaacaaaggaagtttactggatttcttaaaagatggagaaggaagagctctgaaattaccaaatcttgtggacatggcagcacaggtggctgcaggaatggcttacatcgagcgcatgaattatatccatagagatctgcgatcagcaaacattctagtggggaatggactcatatgcaagattgctgacttcggattggcccgattgatagaagacaatgagtacacagcaagacaaggtgcaaagttccccatcaagtggacggcccccgaggcagccctgtacgggaggttcacaatcaagtctgacgtgtggtcttttggaatcttactcacagagctggtcaccaaaggaagagtgccatacccaggcatgaacaaccgggaggtgctggagcaggtggagcgaggctacaggatgccctgcccgcaggactgccccatctctctgcatgagctcatgatccactgctggaaaaaggaccctgaagaacgccccacttttgagtacttgcagagcttcctggaagactactttaccgcgacagagccccagtaccaacctggtgaaaacctgtaaggcccgggtctgcggagagaggccttgtcccagaggctgccccacccctccccattagctttcaattccgtagccagctgctccccagcagcggaaccgcccaggatcagattgcatgtgactctgaagctgacgaacttccatggccctcattaatgacacttgtccccaaatccgaacctcctctgtgaagcattcgagacagaaccttgttatttctcagactttggaaaatgcattgtatcgatgttatgtaaaaggccaaacctctgttcagtgtaaatagttactccagtgccaacaatcctagtgctttccttttttaaaaatgcaaatcctatgtgattttaactctgtcttcacctgattcaactaaaaaaaaaaaagtattattttccaaaagtggcctctttgtctaaaacaataaaattttttttcatgttttaacaaaaaccaa

SEQ ID NO: 436010 - DNA, 4082 bp, Homo sapiens
cggagctggaggggcagagcatcagcaagagtagcagcgagcagccgcgctggtggcggcggcgcgtcgttgcagttgcgccatctgtcaggagcggagccggcgaggagggggctgccgcgggcgaggaggaggggtcgccgcgagccgaaggccttcgagacccgcccgccgcccggcggcgagagtagaggcgaggttgttgtgcgagcggcgcgtcctctcccgcccgggcgcgccgcgcttctcccagcgcaccgaggaccgcccgggcgcacacaaagccgccgcccgcgccgcaccgcccggcggccgccgcccgcgccagggagggattcggccgccgggccggggacaccccggcgccgccccctcggtgctctcggaaggcccaccggctcccgggcccgccggggaccccccggagccgcctcggccgcgccggaggagggcggggagaggaccatgtgagtgggctccggagcctcagcgccgcgcagtttttttgaagaagcaggatgctgatctaaacgtggaaaaagaccagtcctgcctctgttgtagaagacatgtggtgtatataaagtttgtgatcgttggcggaaattttggaatttagataatgggctgtgtgcaatgtaaggataaagaagcaacaaaactgacggaggagagggacggcagcctgaaccagagctctgggtaccgctatggcacagaccccacccctcagcactaccccagcttcggtgtgacctccatccccaactacaacaacttccacgcagccgggggccaaggactcaccgtctttggaggtgtgaactcttcgtctcatacggggaccttgcgtacgagaggaggaacaggagtgacactctttgtggccctttatgactatgaagcacggacagaagatgacctgagttttcacaaaggagaaaaatttcaaatattgaacagctcggaaggagattggtgggaagcccgctccttgacaactggagagacaggttacattcccagcaattatgtggctccagttgactctatccaggcagaagagtggtactttggaaaacttggccgaaaagatgctgagcgacagctattgtcctttggaaacccaagaggtacctttcttatccgcgagagtgaaaccaccaaaggtgcctattcactttctatccgtgattgggatgatatgaaaggagaccatgtcaaacattataaaattcgcaaacttgacaatggtggatactacattaccacccgggcccagtttgaaacacttcagcagcttgtacaacattactcagagagagctgcaggtctctgctgccgcctagtagttccctgtcacaaagggatgccaaggcttaccgatctgtctgtcaaaaccaaagatgtctgggaaatccctcgagaatccctgcagttgatcaagagactgggaaatgggcagtttggggaagtatggatgggtacctggaatggaaacacaaaagtagccataaagactcttaaaccaggcacaatgtcccccgaatcattccttgaggaagcgcagatcatgaagaagctgaagcacgacaagctggtccagctctatgcagtggtgtctgaggagcccatctacatcgtcaccgagtatatgaacaaaggaagtttactggatttcttaaaagatggagaaggaagagctctgaaattaccaaatcttgtggacatggcagcacaggtggctgcaggaatggcttacatcgagcgcatgaattatatccatagagatctgcgatcagcaaacattctagtggggaatggactcatatgcaagattgctgacttcggattggcccgattgatagaagacaatgagtacacagcaagacaaggtgcaaagttccccatcaagtggacggcccccgaggcagccctgtacgggaggttcacaatcaagtctgacgtgtggtcttttggaatcttactcacagagctggtcaccaaaggaagagtgccatacccaggcatgaacaaccgggaggtgctggagcaggtggagcgaggctacaggatgccctgcccgcaggactgccccatctctctgcatgagctcatgatccactgctggaaaaaggaccctgaagaacgccccacttttgagtacttgcagagcttcctggaagactactttaccgcgacagagccccagtaccaacctggtgaaaacctgtaaggcccgggtctgcggagagaggccttgtcccagaggctgccccacccctccccattagctttcaattccgtagccagctgctccccagcagcggaaccgcccaggatcagattgcatgtgactctgaagctgacgaacttccatggccctcattaatgacacttgtccccaaatccgaacctcctctgtgaagcattcgagacagaaccttgttatttctcagactttggaaaatgcattgtatcgatgttatgtaaaaggccaaacctctgttcagtgtaaatagttactccagtgccaacaatcctagtgctttccttttttaaaaatgcaaatcctatgtgattttaactctgtcttcacctgattcaactaaaaaaaaaaaagtattattttccaaaagtggcctctttgtctaaaacaataaaattttttttcatgttttaacaaaaaccaatcaggacaggtgtttgtttttgttttcttttttataaatatgaatatatataatatatatgtccctgtacatatacaatgtgggtgctaatgtggagactgtggccggcctgagccaccaagctgcgggacccagagggagggattttactgcaagtcagcatcaaagcaccggtgttattctgaaaacaccagtggcctcatttttggcttttgcaaagcatgaattttttcatttggattgcactttcctggttcatgactgtacctgtaggtggttgttactttgactcttttcaggaaccaccccccaagctgaatttacaagttctgttagcactatttgcttcaacttactgcgatttgttctcaaaacttaaaaataagcaagcaaatggctgatactaccaagagaactggaagatggataccacacaaacttcttgtataaaaatatgaatgctgaaatgtttcagacatttttaatttaataaacctgtaaccacatttaagtgatctaaaacccatagcattgtagtcatggcaacccgctaaactttctcatgcaactaaaatttctgggggaaatgagggtgggggttgtacatttcccattgtaaaataagtgttttaaatgtcctgtactgctaacgaatgactttctatatgtccaggagttctccagtggaataactatgcactactttacatttcatggggatgcacaaaaacaaaaaagtattacatttttagttgctgtttgtaccaaccttaaattacatatgtttaacaacaacaaatcaaaaatcctatttctattgagtttttaatactgactagcaactctgaagtcttaattccttttttgttatgatttatttgtgagtttacatttttaaattgtttaactttcttaatttagtaattaaaaagagagcattttacatttgaaaaaaaaacaagcataatataaatatgattgaaaaaagatgattacaaaaatgatcttgaaaacaaataataacaaatagaataagaatacattgatataaagacattaagaaaaaaaaaaaaggggggggggcggaagaaaaattaacacggagagagggacctaaatatcggcacagacgccagctgtgttccaaaaaagaggccccataaaggagaatgataaaaaaaacagacgacgcacggccgataacaacacaaccgagagtggagacacaaaatcaacgccaggcagctaaagacaaagcaacccaatgtcgtgggggagaacacaaggaccaccacccacaagcaataacagccccgacaaacaacaaacgggagatgaatggtgcaaccacaaaaattgactgagaaaaacggacgataataaaaaaac

SEQ ID NO: 436011 - DNA, 2390 bp, Homo sapiens
cagagtgtgaccacgcggtttctatgctccaagggatttatttcagtggtaggtggagcagctctgtggagcacatggctaatgataatggattgactgaccagaagcaggagaggacctagcagaagccggaggtcaagctgccccaagactgggggacagcctgggtgaagactctggacctcatgaccatgtatattccagagggggatctaaagagccccagaaattcacaaaggaccagtcctgcctctgttgtagaagacatgtggtgtatataaagtttgtgatcgttggcggaaattttggaatttagataatgggctgtgtgcaatgtaaggataaagaagcaacaaaactgacggaggagagggacggcagcctgaaccagagctctgggtaccgctatggcacagaccccacccctcagcactaccccagcttcggtgtgacctccatccccaactacaacaacttccacgcagccgggggccaaggactcaccgtctttggaggtgtgaactcttcgtctcatacggggaccttgcgtacgagaggaggaacaggagtgacactctttgtggccctttatgactatgaagcacggacagaagatgacctgagttttcacaaaggagaaaaatttcaaatattgaacagctcggaaggagattggtgggaagcccgctccttgacaactggagagacaggttacattcccagcaattatgtggctccagttgactctatccaggcagaagagtggtactttggaaaacttggccgaaaagatgctgagcgacagctattgtcctttggaaacccaagaggtacctttcttatccgcgagagtgaaaccaccaaaggtgcctattcactttctatccgtgattgggatgatatgaaaggagaccatgtcaaacattataaaattcgcaaacttgacaatggtggatactacattaccacccgggcccagtttgaaacacttcagcagcttgtacaacattactcagagagagctgcaggtctctgctgccgcctagtagttccctgtcacaaagggatgccaaggcttaccgatctgtctgtcaaaaccaaagatgtctgggaaatccctcgagaatccctgcagttgatcaagagactgggaaatgggcagtttggggaagtatggatgggtacctggaatggaaacacaaaagtagccataaagactcttaaaccaggcacaatgtcccccgaatcattccttgaggaagcgcagatcatgaagaagctgaagcacgacaagctggtccagctctatgcagtggtgtctgaggagcccatctacatcgtcaccgagtatatgaacaaaggaagtttactggatttcttaaaagatggagaaggaagagctctgaaattaccaaatcttgtggacatggcagcacaggtggctgcaggaatggcttacatcgagcgcatgaattatatccatagagatctgcgatcagcaaacattctagtggggaatggactcatatgcaagattgctgacttcggattggcccgattgatagaagacaatgagtacacagcaagacaaggtgcaaagttccccatcaagtggacggcccccgaggcagccctgtacgggaggttcacaatcaagtctgacgtgtggtcttttggaatcttactcacagagctggtcaccaaaggaagagtgccatacccaggcatgaacaaccgggaggtgctggagcaggtggagcgaggctacaggatgccctgcccgcaggactgccccatctctctgcatgagctcatgatccactgctggaaaaaggaccctgaagaacgccccacttttgagtacttgcagagcttcctggaagactactttaccgcgacagagccccagtaccaacctggtgaaaacctgtaaggcccgggtctgcggagagaggccttgtcccagaggctgccccacccctccccattagctttcaattccgtagccagctgctccccagcagcggaaccgcccaggatcagattgcatgtgactctgaagctgacgaacttccatggccctcattaatgacacttgtccccaaatccgaacctcctctgtgaagcattcgagacagaaccttgttatttctcagactttggaaaatgcattgtatcgatgttatgtaaaaggccaaacctctgttcagtgtaaatagttactccagtgccaacaatcctagtgctttccttttttaaaaatgcaaatcctatgtgattttaactctgtcttcacctgattcaactaaaaaaaaaaaagtattattttccaaaagtggcctctttgtctaaaacaataaaattttttttcatgttttaacaaaaaccaa

SEQ ID NO: 436012 - DNA, 2639 bp, Homo sapiens
cggagctggaggggcagagcatcagcaagagtagcagcgagcagccgcgctggtggcggcggcgcgtcgttgcagttgcgccatctgtcaggagcggagccggcgaggagggggctgccgcgggcgaggaggaggggtcgccgcgagccgaaggccttcgagacccgcccgccgcccggcggcgagagtagaggcgaggttgttgtgcgagcggcgcgtcctctcccgcccgggcgcgccgcgcttctcccagcgcaccgaggaccgcccgggcgcacacaaagccgccgcccgcgccgcaccgcccggcggccgccgcccgcgccagggagggattcggccgccgggccggggacaccccggcgccgccccctcggtgctctcggaaggcccaccggctcccgggcccgccggggaccccccggagccgcctcggccgcgccggaggagggcggggagaggaccatgtgagtgggctccggagcctcagcgccgcgcagtttttttgaagaagcaggatgctgatctaaacgtggaaaaagaccagtcctgcctctgttgtagaagacatgtggtgtatataaagtttgtgatcgttggcggaaattttggaatttagataatgggctgtgtgcaatgtaaggataaagaagcaactggcacagaccccacccctcagcactaccccagcttcggtgtgacctccatccccaactacaacaacttccacgcagccgggggccaaggactcaccgtctttggaggtgtgaactcttcgtctcatacggggaccttgcgtacgagaggaggaacaggagtgacactctttgtggccctttatgactatgaagcacggacagaagatgacctgagttttcacaaaggagaaaaatttcaaatattgaacagctcggaaggagattggtgggaagcccgctccttgacaactggagagacaggttacattcccagcaattatgtggctccagttgactctatccaggcagaagagtggtactttggaaaacttggccgaaaagatgctgagcgacagctattgtcctttggaaacccaagaggtacctttcttatccgcgagagtgaaaccaccaaaggtgcctattcactttctatccgtgattgggatgatatgaaaggagaccatgtcaaacattataaaattcgcaaacttgacaatggtggatactacattaccacccgggcccagtttgaaacacttcagcagcttgtacaacattactcagagagagctgcaggtctctgctgccgcctagtagttccctgtcacaaagggatgccaaggcttaccgatctgtctgtcaaaaccaaagatgtctgggaaatccctcgagaatccctgcagttgatcaagagactgggaaatgggcagtttggggaagtatggatgggtacctggaatggaaacacaaaagtagccataaagactcttaaaccaggcacaatgtcccccgaatcattccttgaggaagcgcagatcatgaagaagctgaagcacgacaagctggtccagctctatgcagtggtgtctgaggagcccatctacatcgtcaccgagtatatgaacaaaggaagtttactggatttcttaaaagatggagaaggaagagctctgaaattaccaaatcttgtggacatggcagcacaggtggctgcaggaatggcttacatcgagcgcatgaattatatccatagagatctgcgatcagcaaacattctagtggggaatggactcatatgcaagattgctgacttcggattggcccgattgatagaagacaatgagtacacagcaagacaaggtgcaaagttccccatcaagtggacggcccccgaggcagccctgtacgggaggttcacaatcaagtctgacgtgtggtcttttggaatcttactcacagagctggtcaccaaaggaagagtgccatacccaggcatgaacaaccgggaggtgctggagcaggtggagcgaggctacaggatgccctgcccgcaggactgccccatctctctgcatgagctcatgatccactgctggaaaaaggaccctgaagaacgccccacttttgagtacttgcagagcttcctggaagactactttaccgcgacagagccccagtaccaacctggtgaaaacctgtaaggcccgggtctgcggagagaggccttgtcccagaggctgccccacccctccccattagctttcaattccgtagccagctgctccccagcagcggaaccgcccaggatcagattgcatgtgactctgaagctgacgaacttccatggccctcattaatgacacttgtccccaaatccgaacctcctctgtgaagcattcgagacagaaccttgttatttctcagactttggaaaatgcattgtatcgatgttatgtaaaaggccaaacctctgttcagtgtaaatagttactccagtgccaacaatcctagtgctttccttttttaaaaatgcaaatcctatgtgattttaactctgtcttcacctgattcaactaaaaaaaaaaaagtattattttccaaaagtggcctctttgtctaaaacaataaaattttttttcatgttttaacaaaaaccaa

SEQ ID NO: 436013 - DNA, 2731 bp, Homo sapiens
ccagacacctaaattatacgtcgaagactgttaaaaagttgtttttttttttttaatggaaaatatccaagaagcagcccaggagtatctgacatggtggaatggaatcagttagaaagcgaagaaatcactaaaaaaagttacttctttttttccccaccagttataatcttcaaccttactagtttataacagtttaatgtcctatagaaggatcctccactaaagttataattttaagtatagtcatatagagagatccctaatcccctgggtaatctagatactaaaggtggggaagaacagtcatattgacattctttaatccaaaaccactgtttgaaattagtaaggatattttcagcattcccaaaaacatgttattagcacgttgagctgaaaacgtttttcttcctcagtgagtacagaaaccaaagcagtctgcgtgtatgtctatgtatagactgtatcgtacctgggctcatggagtagtctaaatttaaaacgtcctctcttctacctccaatgaaaatgtttccgtgtgtggcgtctgatcttccaccgtgtgtgtggtcgtctgctggtgtagcgctgtttaaggagcgctgtgtgctgctagtgttccacgatgtgtgtggtcgtctgctggtgtagtagcactgtttgaggagcactgtgcgccgctagtgtgggtttacacttatgagtgttgtcattacatgtgttctgctcttctctccctctcctgcccctgccctgctccatcagagagagctgcaggtctctgctgccgcctagtagttccctgtcacaaagggatgccaaggcttaccgatctgtctgtcaaaaccaaagatgtctgggaaatccctcgagaatccctgcagttgatcaagagactgggaaatgggcagtttggggaagtatggatgggtatgctgagactcaattactctcttattagcttccccgtttggaagatcccaaacaccaaagatggaaggtgaaaataaagactgcgtgaccgggaagaaagtttgaattactaatagtggggaataataatttcagttttggttttaacattctggaattcctacaaaaaaaaaaaaaaaaaaaaaaagatagtaagtgggcaaaattggcaaatggctcaagttgtactattacatgactctcaattcataaaccagcaaatggtccaaggaatgttccagctgccataaaatatcttgctcttcatttccaaaagcaaatatttgttgagtgtcatcctaacgggcaagtcaccttccatctttcctagtgcatgcataattatggattataaggactgtgttttctttattaattccctttcctgtagagaaagctgatggtttgtgttttaacttaactgtgattgcatcgagttgtaccccacaaacttctggattggctaaagatgcttgggaagttgcacgtcgttcgttgtgtctggagaagaagctgggtcaggggtgtttcgctgaagtgtggcttggtacctggaatggaaacacaaaagtagccataaagactcttaaaccaggcacaatgtcccccgaatcattccttgaggaagcgcagatcatgaagaagctgaagcacgacaagctggtccagctctatgcagtggtgtctgaggagcccatctacatcgtcaccgagtatatgaacaaaggaagtttactggatttcttaaaagatggagaaggaagagctctgaaattaccaaatcttgtggacatggcagcacaggtggctgcaggaatggcttacatcgagcgcatgaattatatccatagagatctgcgatcagcaaacattctagtggggaatggactcatatgcaagattgctgacttcggattggcccgattgatagaagacaatgagtacacagcaagacaaggtgcaaagttccccatcaagtggacggcccccgaggcagccctgtacgggaggttcacaatcaagtctgacgtgtggtcttttggaatcttactcacagagctggtcaccaaaggaagagtgccatacccaggcatgaacaaccgggaggtgctggagcaggtggagcgaggctacaggatgccctgcccgcaggactgccccatctctctgcatgagctcatgatccactgctggaaaaaggaccctgaagaacgccccacttttgagtacttgcagagcttcctggaagactactttaccgcgacagagccccagtaccaacctggtgaaaacctgtaaggcccgggtctgcggagagaggccttgtcccagaggctgccccacccctccccattagctttcaattccgtagccagctgctccccagcagcggaaccgcccaggatcagattgcatgtgactctgaagctgacgaacttccatggccctcattaatgacacttgtccccaaatccgaacctcctctgtgaagcattcgagacagaaccttgttatttctcagactttggaaaatgcattgtatcgatgttatgtaaaaggccaaacctctgttcagtgtaaatagttactccagtgccaacaatcctagtgctttccttttttaaaaatgcaaatcctatgtgattttaactctgtcttcacctgattcaactaaaaaaaaaaaagtattattttccaaaagtggcctctttgtctaaaacaataaaattttttttcatgttttaacaaaaaccaa

SEQ ID NO: 436014 - DNA, 1464 bp, Homo sapiens
aatatatcaaaatttaaaaaaattttaatgagttataaatcttaatatagccatcttagccataaccacaaataaactcattttttctgttaaaatacttgacagagtccttgcaattgaatgtctttgttcaacaaaaactgtattaagtgttttaaatttaaaatctaatcttatgcaaatagctggtggtcaaaacctttttccatcaaaagaagatctttggtttgacttcataatctgggatgtttgtaggtacctggaatggaaacacaaaagtagccataaagactcttaaaccaggcacaatgtcccccgaatcattccttgaggaagcgcagatcatgaagaagctgaagcacgacaagctggtccagctctatgcagtggtgtctgaggagcccatctacatcgtcaccgagtatatgaacaaaggaagtttactggatttcttaaaagatggagaaggaagagctctgaaattaccaaatcttgtggacatggcagcacaggtggctgcaggaatggcttacatcgagcgcatgaattatatccatagagatctgcgatcagcaaacattctagtggggaatggactcatatgcaagattgctgacttcggattggcccgattgatagaagacaatgagtacacagcaagacaaggtgcaaagttccccatcaagtggacggcccccgaggcagccctgtacgggaggttcacaatcaagtctgacgtgtggtcttttggaatcttactcacagagctggtcaccaaaggaagagtgccatacccaggcatgaacaaccgggaggtgctggagcaggtggagcgaggctacaggatgccctgcccgcaggactgccccatctctctgcatgagctcatgatccactgctggaaaaaggaccctgaagaacgccccacttttgagtacttgcagagcttcctggaagactactttaccgcgacagagccccagtaccaacctggtgaaaacctgtaaggcccgggtctgcggagagaggccttgtcccagaggctgccccacccctccccattagctttcaattccgtagccagctgctccccagcagcggaaccgcccaggatcagattgcatgtgactctgaagctgacgaacttccatggccctcattaatgacacttgtccccaaatccgaacctcctctgtgaagcattcgagacagaaccttgttatttctcagactttggaaaatgcattgtatcgatgttatgtaaaaggccaaacctctgttcagtgtaaatagttactccagtgccaacaatcctagtgctttccttttttaaaaatgcaaatcctatgtgattttaactctgtcttcacctgattcaactaaaaaaaaaaaagtattattttccaaaagtggcctctttgtctaaaacaataaaattttttttcatgttttaacaaaaaccaa

SEQ ID NO: 436015 - DNA, 717 bp, Homo sapiens
taaacattaaataagccatagcgtccctataacccaacacaacaacctcaggcatgaacaaccgggaggtgctggagcaggtggagcgaggctacaggatgccctgcccgcaggactgccccatctctctgcatgagctcatgatccactgctggaaaaaggaccctgaagaacgccccacttttgagtacttgcagagcttcctggaagactactttaccgcgacagagccccagtaccaacctggtgaaaacctgtaaggcccgggtctgcggagagaggccttgtcccagaggctgccccacccctccccattagctttcaattccgtagccagctgctccccagcagcggaaccgcccaggatcagattgcatgtgactctgaagctgacgaacttccatggccctcattaatgacacttgtccccaaatccgaacctcctctgtgaagcattcgagacagaaccttgttatttctcagactttggaaaatgcattgtatcgatgttatgtaaaaggccaaacctctgttcagtgtaaatagttactccagtgccaacaatcctagtgctttccttttttaaaaatgcaaatcctatgtgattttaactctgtcttcacctgattcaactaaaaaaaaaaaagtattattttccaaaagtggcctctttgtctaaaacaataaaattttttttcatgttttaacaaaaaccaa

SEQ ID NO: 436016 - DNA, 1922 bp, Homo sapiens
cggagctggaggggcagagcatcagcaagagtagcagcgagcagccgcgctggtggcggcggcgcgtcgttgcagttgcgccatctgtcaggagcggagccggcgaggagggggctgccgcgggcgaggaggaggggtcgccgcgagccgaaggccttcgagacccgcccgccgcccggcggcgagagtagaggcgaggttgttgtgcgagcggcgcgtcctctcccgcccgggcgcgccgcgcttctcccagcgcaccgaggaccgcccgggcgcacacaaagccgccgcccgcgccgcaccgcccggcggccgccgcccgcgccagggagggattcggccgccgggccggggacaccccggcgccgccccctcggtgctctcggaaggcccaccggctcccgggcccgccggggaccccccggagccgcctcggccgcgccggaggagggcggggagaggaccatgtgagtgggctccggagcctcagcgccgcgcagtttttttgaagaagcaggatgctgatctaaacgtggaaaaagaccagtcctgcctctgttgtagaagacatgtggtgtatataaagtttgtgatcgttggcggaaattttggaatttagataatgggctgtgtgcaatgtaaggataaagaagcaacaaaactgacggaggagagggacggcagcctgaaccagagctctgggtaccgctatggcacagaccccacccctcagcactaccccagcttcggtgtgacctccatccccaactacaacaacttccacgcagccgggggccaaggactcaccgtctttggaggtgtgaactcttcgtctcatacggggaccttgcgtacgagaggaggaacaggagtgacactctttgtggccctttatgactatgaagcacggacagaagatgacctgagttttcacaaaggagaaaaatttcaaatattgaacagctcggaaggagattggtgggaagcccgctccttgacaactggagagacaggttacattcccagcaattatgtggctccagttgactctatccaggcagaagagtggtactttggaaaacttggccgaaaagatgctgagcgacagctattgtcctttggaaacccaagaggtacctttcttatccgcgagagtgaaaccaccaaaggtgcctattcactttctatccgtgattgggatgatatgaaaggagaccatgtcaaacattataaaattcgcaaacttgacaatggtggatactacattaccacccgggcccagtttgaaacacttcagcagcttgtacaacattactcagagagagctgcaggtctctgctgccgcctagtagttccctgtcacaaagggatgccaaggcttaccgatctgtctgtcaaaaccaaagatgtctgggaaatccctcgagaatccctgcagttgatcaagagactgggaaatgggcagtttggggaagtatggatgggtacctggaatggaaacacaaaagtagccataaagactcttaaaccaggcacaatgtcccccgaatcattccttgaggaagcgcagatcatgaagaagctgaagcacgacaagctggtccagctctatgcagtggtgtctgaggagcccatctacatcgtcaccgagtatatgaacaaaggttgggcaacacctctcctgtctccagctcacagtgccttaaggggttgtttaggggagagaaatggaagtttcctacttgctacttttctagtttctgcctgggtcaagtattcccattaggaaccaccagttatgtgctcgttaatgaaaacattttttaaaacagactaaccttgcgtttaccccaccccaaatccttatgaaatgccaaatactttttacatgttatgtgtgtcagaaattcaagctcctctcc

SEQ ID NO: 436017 - DNA, 2688 bp, Homo sapiens
cggagctggaggggcagagcatcagcaagagtagcagcgagcagccgcgctggtggcggcggcgcgtcgttgcagttgcgccatctgtcaggagcggagccggcgaggagggggctgccgcgggcgaggaggaggggtcgccgcgagccgaaggccttcgagacccgcccgccgcccggcggcgagagtagaggcgaggttgttgtgcgagcggcgcgtcctctcccgcccgggcgcgccgcgcttctcccagcgcaccgaggaccgcccgggcgcacacaaagccgccgcccgcgccgcaccgcccggcggccgccgcccgcgccagggagggattcggccgccgggccggggacaccccggcgccgccccctcggtgctctcggaaggcccaccggctcccgggcccgccggggaccccccggagccgcctcggccgcgccggaggagggcggggagaggaccatgtgagtgggctccggagcctcagcgccgcgcagtttttttgaagaagcaggatgctgatctaaacgtggaaaaagaccagtcctgcctctgttgtagaagacatgtggtgtatataaagtttgtgatcgttggcggaaattttggaatttagataatgggctgtgtgcaatgtaaggataaagaagcaacaaaactgacggaggagagggacggcagcctgaaccagagctctgggtaccgctatggcacagaccccacccctcagcactaccccagcttcggtgtgacctccatccccaactacaacaacttccacgcagccgggggccaaggactcaccgtctttggaggtgtgaactcttcgtctcatacggggaccttgcgtacgagaggaggaacaggagtgacactctttgtggccctttatgactatgaagcacggacagaagatgacctgagttttcacaaaggagaaaaatttcaaatattgaacagctcggaaggagattggtgggaagcccgctccttgacaactggagagacaggttacattcccagcaattatgtggctccagttgactctatccaggcagaagaactttggaaaatgcattgtatcgatgttatgtaaaaggccaaacctctgttcagtgtaaatagttactccagtgccaacaatcctagtgctttccttttttaaaaatgcaaatcctatgtgattttaactctgtcttcacctgattcaactaaaaaaaaaaaagtattattttccaaaagtggcctctttgtctaaaacaataaaattttttttcatgttttaacaaaaaccaatcaggacaggtgtttgtttttgttttcttttttataaatatgaatatatataatatatatgtccctgtacatatacaatgtgggtgctaatgtggagactgtggccggcctgagccaccaagctgcgggacccagagggagggattttactgcaagtcagcatcaaagcaccggtgttattctgaaaacaccagtggcctcatttttggcttttgcaaagcatgaattttttcatttggattgcactttcctggttcatgactgtacctgtaggtggttgttactttgactcttttcaggaaccaccccccaagctgaatttacaagttctgttagcactatttgcttcaacttactgcgatttgttctcaaaacttaaaaataagcaagcaaatggctgatactaccaagagaactggaagatggataccacacaaacttcttgtataaaaatatgaatgctgaaatgtttcagacatttttaatttaataaacctgtaaccacatttaagtgatctaaaacccatagcattgtagtcatggcaacccgctaaactttctcatgcaactaaaatttctgggggaaatgagggtgggggttgtacatttcccattgtaaaataagtgttttaaatgtcctgtactgctaacgaatgactttctatatgtccaggagttctccagtggaataactatgcactactttacatttcatggggatgcacaaaaacaaaaaagtattacatttttagttgctgtttgtaccaaccttaaattacatatgtttaacaacaacaaatcaaaaatcctatttctattgagtttttaatactgactagcaactctgaagtcttaattccttttttgttatgatttatttgtgagtttacatttttaaattgtttaactttcttaatttagtaattaaaaagagagcattttacatttgaaaaaaaaacaagcataatataaatatgattgaaaaaagatgattacaaaaatgatcttgaaaacaaataataacaaatagaataagaatacattgatataaagacattaagaaaaaaaaaaaaggggggggggcggaagaaaaattaacacggagagagggacctaaatatcggcacagacgccagctgtgttccaaaaaagaggccccataaaggagaatgataaaaaaaacagacgacgcacggccgataacaacacaaccgagagtggagacacaaaatcaacgccaggcagctaaagacaaagcaacccaatgtcgtgggggagaacacaaggaccaccacccacaagcaataacagccccgacaaacaacaaacgggagatgaatggtgcaaccacaaaaattgactgagaaaaacggacgataataaaaaaac

SEQ ID NO: 436018 - DNA, 1460 bp, Homo sapiens
cggagctggaggggcagagcatcagcaagagtagcagcgagcagccgcgctggtggcggcggcgcgtcgttgcagttgcgccatctgtcaggagcggagccggcgaggagggggctgccgcgggcgaggaggaggggtcgccgcgagccgaaggccttcgagacccgcccgccgcccggcggcgagagtagaggcgaggttgttgtgcgagcggcgcgtcctctcccgcccgggcgcgccgcgcttctcccagcgcaccgaggaccgcccgggcgcacacaaagccgccgcccgcgccgcaccgcccggcggccgccgcccgcgccagggagggattcggccgccgggccggggacaccccggcgccgccccctcggtgctctcggaaggcccaccggctcccgggcccgccggggaccccccggagccgcctcggccgcgccggaggagggcggggagaggaccatgtgagtgggctccggagcctcagcgccgcgcagtttttttgaagaagcaggatgctgatctaaacgtggaaaaagaccagtcctgcctctgttgtagaagacatgtggtgtatataaagtttgtgatcgttggcggaaattttggaatttagataatgggctgtgtgcaatgtaaggataaagaagcaacaaaactgacggaggagagggacggcagcctgaaccagagctctgggtaccgctatggcacagaccccacccctcagcactaccccagcttcggtgtgacctccatccccaactacaacaacttccacgcagccgggggccaaggactcaccgtctttggaggtgtgaactcttcgtctcatacggggaccttgcgtacgagaggaggaacaggagtgacactctttgtggccctttatgactatgaagcacggacagaagatgacctgagttttcacaaaggagaaaaatttcaaatattgaacagctcggaaggagattggtgggaagcccgctccttgacaactggagagacaggttacattcccagcaattatgtggctccagttgactctatccaggcagaagagtatgtttcattttgttttcacttaactacttgattttaaaagttgattgccgcaataaaatgccatcagcattgggcaggagggagaagaaattcacagcagtgattaaggctgagtttttcaggctttctgccccggtttttaccctgtgtaatacttgcactattattaacttaatgtttctcttgaagcctgctcacttattttgaaagaaaactttctatcaataccctaaatgaaaagccagtaaaacttgtcatagattaaaagtagccataaaaatatgaaatgctagctagagcatatattattgccaacccaagtttctaagcccgcagtccactccctctgttgggaagagaggggagagtagcaagtaattgccacagattaa

SEQ ID NO: 436019 - DNA, 3293 bp, Homo sapiens
gctcctacccataggggacagtgaggtgacaggctgaggcctggaaggatgatgaaagtgagaccgtcttagggcccttccagatagggaaccttctctgccccaatgccccacccctgccaccaatacacacgcttctgctgcctggggctctcctattggtcctcggggggatgtggtaagaactgctcacccagaaagtgcccgggtgcctgtttccccagagctccctggtgacagtctgtggctgagcatggccctcccagccctgggcctggacccctggagcctcctgggccttttcctcttccaactgcttcagctgctgctgccgacgacgaccgcggggggaggcgggcaggggcccatgcccagggtcagatactatgcaggggatgaacgtagggcacttagcttcttccaccagaagggcctccaggattttgacactctgctcctgagtggtgatggaaatactctctacgtgggggctcgagaagccattctggccttggatatccaggatccaggggtccccaggctaaagaacatgataccgtggccagccagtgacagaaaaaagagtgaatgtgcctttaagaagaagagcaatgagacacagtgtttcaacttcatccgtgtcctggtttcttacaatgtcacccatctctacacctgcggcaccttcgccttcagccctgcttgtaccttcattgaacttcaagattcctacctgttgcccatctcggaggacaaggtcatggagggaaaaggccaaagcccctttgaccccgctcacaagcatacggctgtcttggtggatgggatgctctattctggtactatgaacaacttcctgggcagtgagcccatcctgatgcgcacactgggatcccagcctgtcctcaagaccgacaacttcctccgctggctgcatcatgacgcctcctttgtggcagccatcccttcgacccaggtcgtctacttcttcttcgaggagacagccagcgagtttgacttctttgagaggctccacacatcgcgggtggctagagtctgcaagaatgacgtgggcggcgaaaagctgctgcagaagaagtggaccaccttcctgaaggcccagctgctctgcacccagccggggcagctgcccttcaacgtcatccgccacgcggtcctgctccccgccgattctcccacagctccccacatctacgcagtcttcacctcccagtggcaggttggcgggaccaggagctctgcggtttgtgccttctctctcttggacattgaacgtgtctttaaggggaaatacaaagagttgaacaaagaaacttcacgctggactacttataggggccctgagaccaacccccggccaggcagttgctcagtgggcccctcctctgataaggccctgaccttcatgaaggaccatttcctgatggatgagcaagtggtggggacgcccctgctggtgaaatctggcgtggagtatacacggcttgcagtggagacagcccagggccttgatgggcacagccatcttgtcatgtacctgggaaccaccacagggtcgctccacaaggctgtggtaagtggggacagcagtgctcatctggtggaagagattcagctgttccctgaccctgaacctgttcgcaacctgcagctggcccccacccagggtgcagtgtttgtaggcttctcaggaggtgtctggagggtgccccgagccaactgtagtgtctatgagagctgtgtggactgtgtccttgcccgggacccccactgtgcctgggaccctgagtcccgaacctgttgcctcctgtctgcccccaacctgaactcctggaagcaggacatggagcgggggaacccagagtgggcatgtgccagtggccccatgagcaggagccttcggcctcagagccgcccgcaaatcattaaagaagtcctggctgtccctaactccatcctggagctcccctgcccccacctgtcagccttggcctcttattattggagtcatggcccagcagcagtcccagaagcctcttccactgtctacaatggctccctcttgctgatagtgcaggatggagttgggggtctctaccagtgctgggcaactgagaatggcttttcataccctgtgatctcctactgggtggacagccaggaccagaccctggccctggatcctgaactggcaggcatcccccgggagcatgtgaaggtcccgttgaccagggtcagtggtggggccgccctggctgcccagcagtcctactggccccactttgtcactgtcactgtcctctttgccttagtgctttcaggagccctcatcatcctcgtggcctccccattgagagcactccgggctcggggcaaggttcagggctgtgagaccctgcgccctggggagaaggccccgttaagcagagagcaacacctccagtctcccaaggaatgcaggacctctgccagtgatgtggacgctgacaacaactgcctaggcactgaggtagcttaaactctaggcacaggccggggctgcggtgcaggcacctggccatgctggctgggcggcccaagcacagccctgactaggatgacagcagcacaaaagaccacctttctcccctgagaggagcttctgctactctgcatcactgatgacactcagcagggtgatgcacagcagtctgcctcccctatgggactcccttctaccaagcacatgagctctctaacagggtgggggctacccccagacctgctcctacactgatattgaagaacctggagaggatccttcagttctggccattccagggaccctccagaaacacagtgtttcaagagaccctaaaaaacctgcctgtcccaggaccctatggtaatgaacaccaaacatctaaacaatcatatgctaacatgccactcctggaaactccactctgaagctgccgctttggacaccaacactcccttctcccagggtcatgcagggatctgctccctcctgcttcccttaccagtcgtgcaccgctgactcccaggaagtctttcctgaagtctgaccacctttcttcttgcttcagttggggcagactctgatcccttctgccctggcagaatggcaggggtaatctgagccttcttcactcctttaccctagctgaccccttcacctctccccctcccttttcctttgttttgggattcagaaaactgcttgtcagagactgtttattttttattaaaaatataaggcttatgtatga

SEQ ID NO: 436020 - DNA, 623 bp, Homo sapiens
gaagcttcgtcaacagatatgcggcggttgggcacgtcgggtgtgcgatgcacacgccaaacatctaaacaatcatatgctaacatgccactcctggaaactccactctgaagctgccgctttggacaccaacactcccttctcccagggtcatgcagggatctgctccctcctgcttcccttaccagtcgtgcaccgctgactcccaggaagtctttcctgaagtttgggcactcggcgtgtgcacacgccgaggaaccaggcaacaacttcgtccacacggatctgcaacaactcgtatggttattcggcgtgtggcaacaacttcgtccataagacttgcaacaacttcgtccacaaggatctaccttaagaagtttggactctcggcgtgtgcagcaaccacttcgtccattcagacctctgggcttccgggtgtatggacactcggcgtgtgcatgcacacgccgagtatccataaccgtcgcatatcgcggtggacgaagttgtagctgcacacgccgaatccccaaaccccttggtgacacatgtcagaatggacgaagtagtaaggcaacaaattcgtacatagtgacatgttgacctctcggttaggacctcgg

SEQ ID NO: 436021 - DNA, 3583 bp, Homo sapiens
taggtaggagtagagagaccccaccttgtgggtaagtgaaaagaagaatatgtcatgtcccctatctgggaaatcttaagcaagagaagaaaccactgctaggctggttatactggctgtgacatgatggagaggcaggggaatcgctgaaatgacctagaagggcctcttaaactttctggttggaccgagcagaggagggagagagaggtgtgtctcttgtgaggtgggtgaacgtctttttattccctcccaatccaccaacttccgcccaagccaggatctgtcacaactcgagaggtggaaattccggtttccctggcctagagctcccagtgctggctttggcatgatgggcacctggagggccgcactcccgttccagccaggctgagccttctgtcccctgcctctggggcctgggaaccccccttcttctttctcctgaatggcacccccgccctagaatccagacaccgagtttcccactgtggctggttcaagggtatgtgagagctccctggtgacagtctgtggctgagcatggccctcccagccctgggcctggacccctggagcctcctgggccttttcctcttccaactgcttcagctgctgctgccgacgacgaccgcggggggaggcgggcaggggcccatgcccagggtcagatactatgcaggggatgaacgtagggcacttagcttcttccaccagaagggcctccaggattttgacactctgctcctgagtggtgatggaaatactctctacgtgggggctcgagaagccattctggccttggatatccaggatccaggggtccccaggctaaagaacatgataccgtggccagccagtgacagaaaaaagagtgaatgtgcctttaagaagaagagcaatgagacacagtgtttcaacttcatccgtgtcctggtttcttacaatgtcacccatctctacacctgcggcaccttcgccttcagccctgcttgtaccttcattgaacttcaagattcctacctgttgcccatctcggaggacaaggtcatggagggaaaaggccaaagcccctttgaccccgctcacaagcatacggctgtcttggtggatgggatgctctattctggtactatgaacaacttcctgggcagtgagcccatcctgatgcgcacactgggatcccagcctgtcctcaagaccgacaacttcctccgctggctgcatcatgacgcctcctttgtggcagccatcccttcgacccaggtcgtctacttcttcttcgaggagacagccagcgagtttgacttctttgagaggctccacacatcgcgggtggctagagtctgcaagaatgacgtgggcggcgaaaagctgctgcagaagaagtggaccaccttcctgaaggcccagctgctctgcacccagccggggcagctgcccttcaacgtcatccgccacgcggtcctgctccccgccgattctcccacagctccccacatctacgcagtcttcacctcccagtggcaggttggcgggaccaggagctctgcggtttgtgccttctctctcttggacattgaacgtgtctttaaggggaaatacaaagagttgaacaaagaaacttcacgctggactacttataggggccctgagaccaacccccggccaggcagttgctcagtgggcccctcctctgataaggccctgaccttcatgaaggaccatttcctgatggatgagcaagtggtggggacgcccctgctggtgaaatctggcgtggagtatacacggcttgcagtggagacagcccagggccttgatgggcacagccatcttgtcatgtacctgggaaccaccacagggtcgctccacaaggctgtggtaagtggggacagcagtgctcatctggtggaagagattcagctgttccctgaccctgaacctgttcgcaacctgcagctggcccccacccagggtgcagtgtttgtaggcttctcaggaggtgtctggagggtgccccgagccaactgtagtgtctatgagagctgtgtggactgtgtccttgcccgggacccccactgtgcctgggaccctgagtcccgaacctgttgcctcctgtctgcccccaacctgaactcctggaagcaggacatggagcgggggaacccagagtgggcatgtgccagtggccccatgagcaggagccttcggcctcagagccgcccgcaaatcattaaagaagtcctggctgtccctaactccatcctggagctcccctgcccccacctgtcagccttggcctcttattattggagtcatggcccagcagcagtcccagaagcctcttccactgtctacaatggctccctcttgctgatagtgcaggatggagttgggggtctctaccagtgctgggcaactgagaatggcttttcataccctgtgatctcctactgggtggacagccaggaccagaccctggccctggatcctgaactggcaggcatcccccgggagcatgtgaaggtcccgttgaccagggtcagtggtggggccgccctggctgcccagcagtcctactggccccactttgtcactgtcactgtcctctttgccttagtgctttcaggagccctcatcatcctcgtggcctccccattgagagcactccgggctcggggcaaggttcagggctgtgagaccctgcgccctggggagaaggccccgttaagcagagagcaacacctccagtctcccaaggaatgcaggacctctgccagtgatgtggacgctgacaacaactgcctaggcactgaggtagcttaaactctaggcacaggccggggctgcggtgcaggcacctggccatgctggctgggcggcccaagcacagccctgactaggatgacagcagcacaaaagaccacctttctcccctgagaggagcttctgctactctgcatcactgatgacactcagcagggtgatgcacagcagtctgcctcccctatgggactcccttctaccaagcacatgagctctctaacagggtgggggctacccccagacctgctcctacactgatattgaagaacctggagaggatccttcagttctggccattccagggaccctccagaaacacagtgtttcaagagaccctaaaaaacctgcctgtcccaggaccctatggtaatgaacaccaaacatctaaacaatcatatgctaacatgccactcctggaaactccactctgaagctgccgctttggacaccaacactcccttctcccagggtcatgcagggatctgctccctcctgcttcccttaccagtcgtgcaccgctgactcccaggaagtctttcctgaagtctgaccacctttcttcttgcttcagttggggcagactctgatcccttctgccctggcagaatggcaggggtaatctgagccttcttcactcctttaccctagctgaccccttcacctctccccctcccttttcctttgttttgggattcagaaaactgcttgtcagagactgtttattttttattaaaaatataaggcttatgtatga

SEQ ID NO: 436022 - DNA, 2349 bp, Homo sapiens
ggacacgcggggctggcggggactggggggacacgccgagctgcggggggcggggaggacacgcggggctggggggtcggggcgcccggggcgccccctgactccccctgtgcccccagaatgacgtgggcggcgaaaagctgctgcagaagaagtggaccaccttcctgaaggcccagctgctctgcacccagccggggcagctgcccttcaacgtcatccgccacgcggtcctgctccccgccgattctcccacagctccccacatctacgcagtcttcacctcccagtggcaggttggcgggaccaggagctctgcggtttgtgccttctctctcttggacattgaacgtgtctttaaggggaaatacaaagagttgaacaaagaaacttcacgctggactacttataggggccctgagaccaacccccggccaggcagttgctcagtgggcccctcctctgataaggccctgaccttcatgaaggaccatttcctgatggatgagcaagtggtggggacgcccctgctggtgaaatctggcgtggagtatacacggcttgcagtggagacagcccagggccttgatgggcacagccatcttgtcatgtacctgggaaccaccacagggtcgctccacaaggctgtggtaagtggggacagcagtgctcatctggtggaagagattcagctgttccctgaccctgaacctgttcgcaacctgcagctggcccccacccagggtgcagtgtttgtaggcttctcaggaggtgtctggagggtgccccgagccaactgtagtgtctatgagagctgtgtggactgtgtccttgcccgggacccccactgtgcctgggaccctgagtcccgaacctgttgcctcctgtctgcccccaacctgaactcctggaagcaggacatggagcgggggaacccagagtgggcatgtgccagtggccccatgagcaggagccttcggcctcagagccgcccgcaaatcattaaagaagtcctggctgtccctaactccatcctggagctcccctgcccccacctgtcagccttggcctcttattattggagtcatggcccagcagcagtcccagaagcctcttccactgtctacaatggctccctcttgctgatagtgcaggatggagttgggggtctctaccagtgctgggcaactgagaatggcttttcataccctgtgatctcctactgggtggacagccaggaccagaccctggccctggatcctgaactggcaggcatcccccgggagcatgtgaaggtcccgttgaccagggtcagtggtggggccgccctggctgcccagcagtcctactggccccactttgtcactgtcactgtcctctttgccttagtgctttcaggagccctcatcatcctcgtggcctccccattgagagcactccgggctcggggcaaggttcagggctgtgagaccctgcgccctggggagaaggccccgttaagcagagagcaacacctccagtctcccaaggaatgcaggacctctgccagtgatgtggacgctgacaacaactgcctaggcactgaggtagcttaaactctaggcacaggccggggctgcggtgcaggcacctggccatgctggctgggcggcccaagcacagccctgactaggatgacagcagcacaaaagaccacctttctcccctgagaggagcttctgctactctgcatcactgatgacactcagcagggtgatgcacagcagtctgcctcccctatgggactcccttctaccaagcacatgagctctctaacagggtgggggctacccccagacctgctcctacactgatattgaagaacctggagaggatccttcagttctggccattccagggaccctccagaaacacagtgtttcaagagaccctaaaaaacctgcctgtcccaggaccctatggtaatgaacaccaaacatctaaacaatcatatgctaacatgccactcctggaaactccactctgaagctgccgctttggacaccaacactcccttctcccagggtcatgcagggatctgctccctcctgcttcccttaccagtcgtgcaccgctgactcccaggaagtctttcctgaagtctgaccacctttcttcttgcttcagttggggcagactctgatcccttctgccctggcagaatggcaggggtaatctgagccttcttcactcctttaccctagctgaccccttcacctctccccctcccttttcctttgttttgggattcagaaaactgcttgtcagagactgtttattttttattaaaaatataaggcttatgtatga

SEQ ID NO: 436023 - DNA, 1671 bp, Homo sapiens
tactgacatattcactccaagagtcctcccatcctgcagtgggttcctccagggatggagtttccaggcagttttgaagctgctctggccattccgcgttcctctctctgttcctagtctcccctggcctaccttcttccctactgcacttcctcccttcctccttcctcttcccactttcagctcttttgaaggataatttttactttctctgctctcttaggaactcctggaagcaggacatggagcgggggaacccagagtgggcatgtgccagtggccccatgagcaggagccttcggcctcagagccgcccgcaaatcattaaagaagtcctggctgtccctaactccatcctggagctcccctgcccccacctgtcagccttggcctcttattattggagtcatggcccagcagcagtcccagaagcctcttccactgtctacaatggctccctcttgctgatagtgcaggatggagttgggggtctctaccagtgctgggcaactgagaatggcttttcataccctgtgatctcctactgggtggacagccaggaccagaccctggccctggatcctgaactggcaggcatcccccgggagcatgtgaaggtcccgttgaccagggtcagtggtggggccgccctggctgcccagcagtcctactggccccactttgtcactgtcactgtcctctttgccttagtgctttcaggagccctcatcatcctcgtggcctccccattgagagcactccgggctcggggcaaggttcagggctgtgagaccctgcgccctggggagaaggccccgttaagcagagagcaacacctccagtctcccaaggaatgcaggacctctgccagtgatgtggacgctgacaacaactgcctaggcactgaggtagcttaaactctaggcacaggccggggctgcggtgcaggcacctggccatgctggctgggcggcccaagcacagccctgactaggatgacagcagcacaaaagaccacctttctcccctgagaggagcttctgctactctgcatcactgatgacactcagcagggtgatgcacagcagtctgcctcccctatgggactcccttctaccaagcacatgagctctctaacagggtgggggctacccccagacctgctcctacactgatattgaagaacctggagaggatccttcagttctggccattccagggaccctccagaaacacagtgtttcaagagaccctaaaaaacctgcctgtcccaggaccctatggtaatgaacaccaaacatctaaacaatcatatgctaacatgccactcctggaaactccactctgaagctgccgctttggacaccaacactcccttctcccagggtcatgcagggatctgctccctcctgcttcccttaccagtcgtgcaccgctgactcccaggaagtctttcctgaagtctgaccacctttcttcttgcttcagttggggcagactctgatcccttctgccctggcagaatggcaggggtaatctgagccttcttcactcctttaccctagctgaccccttcacctctccccctcccttttcctttgttttgggattcagaaaactgcttgtcagagactgtttattttttattaaaaatataaggcttatgtatga

SEQ ID NO: 436024 - DNA, 3246 bp, Homo sapiens
taggtaggagtagagagaccccaccttgtgggtaagtgaaaagaagaatatgtcatgtcccctatctgggaaatcttaagcaagagaagaaaccactgctaggctggttatactggctgtgacatgatggagaggcaggggaatcgctgaaatgacctagaagggcctcttaaactttctggttggaccgagcagaggagggagagagaggtgtgtctcttgtgaggtgggtgaacgtctttttattccctcccaatccaccaacttccgcccaagccaggatctgtcacaactcgagaggtggaaattccggtttccctggcctagagctcccagtgctggctttggcatgatgggcacctggagggccgcactcccgttccagccaggctgagccttctgtcccctgcctctggggcctgggaaccccccttcttctttctcctgaatggcacccccgccctagaatccagacaccgagtttcccactgtggctggttcaagggtatgtgagagctccctggtgacagtctgtggctgagcatggccctcccagccctgggcctggacccctggagcctcctgggccttttcctcttccaactgcttcagctgctgctgccgacgacgaccgcggggggaggcgggcaggggcccatgcccagggtcagatactatgcaggtaagtgtccgacagcaggaagtgtggggatagcaatagagagctggaggtgggtggaggaaggagagaggaacagaggaggggaggaaatggatatggagaaacagggacacagagagagatgccagggagaaacagaggatctcggagaaagagagacacagccagaaacagaagtccaaaaggaaagaaaagccactggagagcagattgaggaaaacaggtggccacggggccaggggcacgcttcttccagttctccatgttggtaatttttctttccttccttaaatatcactgtcaccaagctgggcacctcaaactcctaactgcttcacactcccaggtaccccaaagtcaaggcccatgctagaagaccatatgtggacccggtgacccggagctcgccaggcccatgccaaccacatagatcatgctggaccataccatgtccaggaccatgggatggctggttggagaatgggccctggaacccacacacaagcacagcttggctggtttcttactgagactgtggaggctgctggccccctcacctccagggagaagactcaggaaaggatgtagacactgtaggagttgtaggtgactgggcatggctgtgtctttagcatctttctggggcaattggtaaaagaaatgtatattgctcattgatgcagagacctcctctgtgttggatgctgggcgcacaaacacggataagcctcagcccctgccctcaaggtgttcacagtcacaagggggaagacatgagcaatcagaccatcaatacagggtgatctgttcagcaactgaggggtttatggcagctctgggggaggcctggcctccaggagatgctcctccctgaggctggcccttccatcccgcagccacaccagattccccaacttctcccctctgtactgtgtaagattccctgagcctgcaaaggtatcaattagctagtcagctttctaactaatgcaacagtgcaagtgctaatgagagaggatctgaggagctccttcctccttgccgatgtgccagtgggacaggaaaatacacccccacccaccccaccatgccaaggtcatggagaggacctaggtgagcctcccacacctggctcaccatccctgcccaggggacatccagccatgcccacatggatctttgaagaaaaatgcttcctctctgttcgtggtgactctactggtgggaatttcctttaacagaagaggaagaaagcaggggtggttggggggatggcgagagggactctgacatacgccctcctgtctgcatatagctttgctgcttgtggctgccaacactttcctgtttgtctgtctgcctgctgctcctcatcctagtgaggaccaaggcgtcctccccgacggtagccctccctgtcccaggcctggaagagcatccactgtgcctcactttatttcccgtccccattaccctgcctctggctgcctctcctctctactgcgggctcagcacacaacgctcttgtgttggggtggggtgaagggaagaactgctggtggaggagagtgcatctagctgccaaggcctggggagcacactcaggcaacccttccccttcccccacttttatctcaggagtcagctgcctgcccaccaagtcctcatcactctctctgtcttactcctccaacaggggatgaacgtagggcacttagcttcttccaccagaagggcctccaggattttgacactctgctcctgagtggtgatggaaatactctctacgtgggggctcgagaagccattctggccttggatatccaggatccaggggtccccaggctaaagaacatgataccgtggccagccagtgacagaaaaaagagtgaatgtgcctttaagaagaagagcaatgagacacagtgtttcaacttcatccgtgtcctggtttcttacaatgtcacccatctctacacctgcggcaccttcgccttcagccctgcttgtaccttcattgtgagttctctggtgcccagcgctcaggcccccaagcatcccttctcacatctacccacgactttcctctgtagctctggaaaactctggccttccagatgcaggaccctcatgaacttcctggccccagaccaatttccctctatgtccctttcccttccttcctcaagcccctcatttcccagatgtgagaccttggcgttctggccccccagcctctctccccatttaggaacttcaagattcctacctgttgcccatctcggaggacaaggtcatggagggaaaaggccaaagcccctttgaccccgctcacaagcatacggctgtcttggtgggtgagtatcaggtttcccacttcatcccaacatctactttctccagtcacgctgtgaaatatggaatattacagagttttccaaaaggcaggggaaactgggtgtggtgatgcgtgcatatggtcccagttatttggaagctgaagttgaaggatgcttgagtttaggggtttgagtctagcctgggcaacacagcgagatcgtctc

SEQ ID NO: 436025 - DNA, 1437 bp, Homo sapiens
cccctgtccggtgcagactctgctggaagtcttggacgcctgggttagggtctccacttctgggctggggagctccctggtgacagtctgtggctgagcatggccctcccagccctgggcctggacccctggagcctcctgggccttttcctcttccaactgcttcagctgctgctgccgacgacgaccgcggggggaggcgggcaggggcccatgcccagggtcagatactatgcaggggatgaacgtagggcacttagcttcttccaccagaagggcctccaggattttgacactctgctcctgagtggtgatggaaatactctctacgtgggggctcgagaagccattctggccttggatatccaggatccaggggtccccaggctaaagaacatgataccgtggccagccagtgacagaaaaaagagtgaatgtgcctttaagaagaagagcaatgagacacagtgtttcaacttcatccgtgtcctggtttcttacaatgtcacccatctctacacctgcggcaccttcgccttcagccctgcttgtaccttcattgaacttcaagattcctacctgttgcccatctcggaggacaaggtcatggagggaaaaggccaaagcccctttgaccccgctcacaagcatacggctgtcttggtggatgggatgctctattctggtactatgaacaacttcctgggcagtgagcccatcctgatgcgcacactgggatcccagcctgtcctcaagaccgacaacttcctccgctggctgcatcatgacgcctcctttgtggcagccatcccttcgacccaggtcgtctacttcttcttcgaggagacagccagcgagtttgacttctttgagaggctccacacatcgcgggtggctagagtctgcaagaatgacgtgggcggcgaaaagctgctgcagaagaagtggaccaccttcctgaaggcccagctgctctgcacccagccggggcagctgcccttcaacgtcatccgccacgcggtcctgctccccgccgattctcccacagctccccacatctacgcagtcttcacctcccagtggcaggttggcgggaccaggagctctgcggtttgtgccttctctctcttggacattgaacgtgtctttaaggggaaatacaaagagttgaacaaagaaacttcacgctggactacttataggggccctgagaccaacccccggccaggcagtgtgagtactaccccccacactgagcacagtctacacatacataatgtgcatgaaaaaacacctatcatggcatagtaaatgcccaataaatgttagtgctctccaccccaccaatctcgcctgctcagacgtacacctggtatagctgcctatattccacatgtgcctagcacccttttatacacggagcagttgctggagcca

SEQ ID NO: 436026 - DNA, 1238 bp, Homo sapiens
cccctgtccggtgcagactctgctggaagtcttggacgcctgggttagggtctccacttctgggctggggagctccctggtgacagtctgtggctgagcatggccctcccagccctgggcctggacccctggagcctcctgggccttttcctcttccaactgcttcagctgctgctgccgacgacgaccgcggggggaggcgggcaggggcccatgcccagggtcagatactatgcaggggatgaacgtagggcacttagcttcttccaccagaagggcctccaggattttgacactctgctcctgagtggtgatggaaatactctctacgtgggggctcgagaagccattctggccttggatatccaggatccaggggtccccaggctaaagaacatgataccgtggccagccagtgacagaaaaaagagtgaatgtgcctttaagaagaagagcaatgagacacagtgtttcaacttcatccgtgtcctggtttcttacaatgtcacccatctctacacctgcggcaccttcgccttcagccctgcttgtaccttcattgaacttcaagattcctacctgttgcccatctcggaggacaaggtcatggagggaaaaggccaaagcccctttgaccccgctcacaagcatacggctgtcttggtggatgggatgctctattctggtactatgaacaacttcctgggcagtgagcccatcctgatgcgcacactgggatcccagcctgtcctcaagaccgacaacttcctccgctggctgcatcatgacgcctcctttgtggcagccatcccttcgacccaggtcgtctacttcttcttcgaggagacagccagcgagtttgacttctttgagaggctccacacatcgcgggtggctagagtctgcaagaatgacgtgggcggcgaaaagctgctgcagaagaagtggaccaccttcctgaaggcccagctgctctgcacccagccggggcagctgcccttcaacgtcatccgccacgcggtcctgctccccgccgattctcccacagctccccacatctacgcagtcttcacctcccagtggtgagcagcagggctggaccatgggggctggacacgggacttgacgccagtgaggccccagctcgtgagcggaggcaggaattgacatgagccagcacctactcagcactttcacataggaaggcattaaatcgtcaccacctctcaggaatttga

SEQ ID NO: 436027 - DNA, 396 bp, Homo sapiens
ggtggccaggtagacctcactgaggtgcttgatggatgtgagggaggcaggtgatgtgattttctacagaagcacccagccgcccactgtttcatgcctatggagaaatagctgggtttctccagggacaaagttttgtcagggagttgcaaaggaaggacaggggtccaagggattttagtcatttacaagagactgccatctccatggcacagaggaaggtgaatgatctggctgacccgcgcccagtacatatcaccctcagaaggagctttcttacagctggggaggcccccggaagttgggaagggatctgtggatgagatgagatgacttccactctctctgtctccccatagccacagggtcgctccacaaggctgtggtaagtgggga

SEQ ID NO: 436028 - DNA, 258 bp, Homo sapiens
aagccattctggccttggatatccaggatccaggggtccccaggctaaagaacatggtgaggagtccagggataaagagtgtgggctgggagtgaagagggggccggcagctaccctgggcttggctgcctgtgcatgaataacttagttgctgttatctgtaatcagcagttctctttatatgtatatcgtgacaatataacagacaggaaatgtcgtggcctcacttttttttttttttttgagatggagtcttgc

SEQ ID NO: 436029 - DNA, 244 bp, Homo sapiens
gcacttgtttgcacggttatctcctggattatgttctacagaggcgtacagggactgccccagcattacctagcctttctcctcagtgagggggcagcctctgggggtccagcaatttgagtcaggtggcctggagacctaaattctctgtctccctcagacacagtgtttcaacttcatccgtgtcctggtttcttacaatgtcacccatctctacacctgcggcaccttcgccttcagccct

SEQ ID NO: 436030 - DNA, 3139 bp, Homo sapiens
cccctgtccggtgcagactctgctggaagtcttggacgcctgggttagggtctccacttctgggctggggagctccctggtgacagtctgtggctgagcatggccctcccagccctgggcctggacccctggagcctcctgggccttttcctcttccaactgcttcagctgctgctgccgacgacgaccgcggggggaggcgggcaggggcccatgcccagggtcagatactatgcaggggatgaacgtagggcacttagcttcttccaccagaagggcctccaggattttgacactctgctcctgagtggtgatggaaatactctctacgtgggggctcgagaagccattctggccttggatatccaggatccaggggtccccaggctaaagaacatgataccgtggccagccagtgacagaaaaaagagtgaatgtgcctttaagaagaagagcaatgagacacagtgtttcaacttcatccgtgtcctggtttcttacaatgtcacccatctctacacctgcggcaccttcgccttcagccctgcttgtaccttcattgaacttcaagattcctacctgttgcccatctcggaggacaaggtcatggagggaaaaggccaaagcccctttgaccccgctcacaagcatacggctgtcttggtggatgggatgctctattctggtactatgaacaacttcctgggcagtgagcccatcctgatgcgcacactgggatcccagcctgtcctcaagaccgacaacttcctccgctggctgcatcatgacgcctcctttgtggcagccatcccttcgacccaggtcgtctacttcttcttcgaggagacagccagcgagtttgacttctttgagaggctccacacatcgcgggtggctagagtctgcaagaatgacgtgggcggcgaaaagctgctgcagaagaagtggaccaccttcctgaaggcccagctgctctgcacccagccggggcagctgcccttcaacgtcatccgccacgcggtcctgctccccgccgattctcccacagctccccacatctacgcagtcttcacctcccagtggcaggttggcgggaccaggagctctgcggtttgtgccttctctctcttggacattgaacgtgtctttaaggggaaatacaaagagttgaacaaagaaacttcacgctggactacttataggggccctgagaccaacccccggccaggcagttgctcagtgggcccctcctctgataaggccctgaccttcatgaaggaccatttcctgatggatgagcaagtggtggggacgcccctgctggtgaaatctggcgtggagtatacacggcttgcagtggagacagcccagggccttgatgggcacagccatcttgtcatgtacctgggaaccaccacagggtcgctccacaaggctgtggtaagtggggacagcagtgctcatctggtggaagagattcagctgttccctgaccctgaacctgttcgcaacctgcagctggcccccacccagggtgcagtgtttgtaggcttctcaggaggtgtctggagggtgccccgagccaactgtagtgtctatgagagctgtgtggactgtgtccttgcccgggacccccactgtgcctgggaccctgagtcccgaacctgttgcctcctgtctgcccccaacctgaactcctggaagcaggacatggagcgggggaacccagagtgggcatgtgccagtggccccatgagcaggagccttcggcctcagagccgcccgcaaatcattaaagaagtcctggctgtccctaactccatcctggagctcccctgcccccacctgtcagccttggcctcttattattggagtcatggcccagcagcagtcccagaagcctcttccactgtctacaatggctccctcttgctgatagtgcaggatggagttgggggtctctaccagtgctgggcaactgagaatggcttttcataccctgtgatctcctactgggtggacagccaggaccagaccctggccctggatcctgaactggcaggcatcccccgggagcatgtgaaggtcccgttgaccagggtcagtggtggggccgccctggctgcccagcagtcctactggccccactttgtcactgtcactgtcctctttgccttagtgctttcaggagccctcatcatcctcgtggcctccccattgagagcactccgggctcggggcaaggttcagggctgtgagaccctgcgccctggggagaaggccccgttaagcagagagcaacacctccagtctcccaaggaatgcaggacctctgccagtgatgtggacgctgacaacaactgcctaggcactgaggtagcttaaactctaggcacaggccggggctgcggtgcaggcacctggccatgctggctgggcggcccaagcacagccctgactaggatgacagcagcacaaaagaccacctttctcccctgagaggagcttctgctactctgcatcactgatgacactcagcagggtgatgcacagcagtctgcctcccctatgggactcccttctaccaagcacatgagctctctaacagggtgggggctacccccagacctgctcctacactgatattgaagaacctggagaggatccttcagttctggccattccagggaccctccagaaacacagtgtttcaagagaccctaaaaaacctgcctgtcccaggaccctatggtaatgaacaccaaacatctaaacaatcatatgctaacatgccactcctggaaactccactctgaagctgccgctttggacaccaacactcccttctcccagggtcatgcagggatctgctccctcctgcttcccttaccagtcgtgcaccgctgactcccaggaagtctttcctgaagtctgaccacctttcttcttgcttcagttggggcagactctgatcccttctgccctggcagaatggcaggggtaatctgagccttcttcactcctttaccctagctgaccccttcacctctccccctcccttttcctttgttttgggattcagaaaactgcttgtcagagactgtttattttttattaaaaatataaggcttatgtatga

SEQ ID NO: 436031 - DNA, 5511 bp, Homo sapiens
taggtaggagtagagagaccccaccttgtgggtaagtgaaaagaagaatatgtcatgtcccctatctgggaaatcttaagcaagagaagaaaccactgctaggctggttatactggctgtgacatgatggagaggcaggggaatcgctgaaatgacctagaagggcctcttaaactttctggttggaccgagcagaggagggagagagaggtgtgtctcttgtgaggtgggtgaacgtctttttattccctcccaatccaccaacttccgcccaagccaggatctgtcacaactcgagaggtggaaattccggtttccctggcctagagctcccagtgctggctttggcatgatgggcacctggagggccgcactcccgttccagccaggctgagccttctgtcccctgcctctggggcctgggaaccccccttcttctttctcctgaatggcacccccgccctagaatccagacaccgagtttcccactgtggctggttcaagggtatgtgagagctccctggtgacagtctgtggctgagcatggccctcccagccctgggcctggacccctggagcctcctgggccttttcctcttccaactgcttcagctgctgctgccgacgacgaccgcggggggaggcgggcaggggcccatgcccagggtcagatactatgcaggtaagtgtccgacagcaggaagtgtggggatagcaatagagagctggaggtgggtggaggaaggagagaggaacagaggaggggaggaaatggatatggagaaacagggacacagagagagatgccagggagaaacagaggatctcggagaaagagagacacagccagaaacagaagtccaaaaggaaagaaaagccactggagagcagattgaggaaaacaggtggccacggggccaggggcacgcttcttccagttctccatgttggtaatttttctttccttccttaaatatcactgtcaccaagctgggcacctcaaactcctaactgcttcacactcccaggtaccccaaagtcaaggcccatgctagaagaccatatgtggacccggtgacccggagctcgccaggcccatgccaaccacatagatcatgctggaccataccatgtccaggaccatgggatggctggttggagaatgggccctggaacccacacacaagcacagcttggctggtttcttactgagactgtggaggctgctggccccctcacctccagggagaagactcaggaaaggatgtagacactgtaggagttgtaggtgactgggcatggctgtgtctttagcatctttctggggcaattggtaaaagaaatgtatattgctcattgatgcagagacctcctctgtgttggatgctgggcgcacaaacacggataagcctcagcccctgccctcaaggtgttcacagtcacaagggggaagacatgagcaatcagaccatcaatacagggtgatctgttcagcaactgaggggtttatggcagctctgggggaggcctggcctccaggagatgctcctccctgaggctggcccttccatcccgcagccacaccagattccccaacttctcccctctgtactgtgtaagattccctgagcctgcaaaggtatcaattagctagtcagctttctaactaatgcaacagtgcaagtgctaatgagagaggatctgaggagctccttcctccttgccgatgtgccagtgggacaggaaaatacacccccacccaccccaccatgccaaggtcatggagaggacctaggtgagcctcccacacctggctcaccatccctgcccaggggacatccagccatgcccacatggatctttgaagaaaaatgcttcctctctgttcgtggtgactctactggtgggaatttcctttaacagaagaggaagaaagcaggggtggttggggggatggcgagagggactctgacatacgccctcctgtctgcatatagctttgctgcttgtggctgccaacactttcctgtttgtctgtctgcctgctgctcctcatcctagtgaggaccaaggcgtcctccccgacggtagccctccctgtcccaggcctggaagagcatccactgtgcctcactttatttcccgtccccattaccctgcctctggctgcctctcctctctactgcgggctcagcacacaacgctcttgtgttggggtggggtgaagggaagaactgctggtggaggagagtgcatctagctgccaaggcctggggagcacactcaggcaacccttccccttcccccacttttatctcaggagtcagctgcctgcccaccaagtcctcatcactctctctgtcttactcctccaacaggggatgaacgtagggcacttagcttcttccaccagaagggcctccaggattttgacactctgctcctgagtggtgatggaaatactctctacgtgggggctcgagaagccattctggccttggatatccaggatccaggggtccccaggctaaagaacatgataccgtggccagccagtgacagaaaaaagagtgaatgtgcctttaagaagaagagcaatgagacacagtgtttcaacttcatccgtgtcctggtttcttacaatgtcacccatctctacacctgcggcaccttcgccttcagccctgcttgtaccttcattgtgagttctctggtgcccagcgctcaggcccccaagcatcccttctcacatctacccacgactttcctctgtagctctggaaaactctggccttccagatgcaggaccctcatgaacttcctggccccagaccaatttccctctatgtccctttcccttccttcctcaagcccctcatttcccagatgtgagaccttggcgttctggccccccagcctctctccccatttaggaacttcaagattcctacctgttgcccatctcggaggacaaggtcatggagggaaaaggccaaagcccctttgaccccgctcacaagcatacggctgtcttggtggatgggatgctctattctggtactatgaacaacttcctgggcagtgagcccatcctgatgcgcacactgggatcccagcctgtcctcaagaccgacaacttcctccgctggctgcatcatgacgcctcctttgtggcagccatcccttcgacccaggtcgtctacttcttcttcgaggagacagccagcgagtttgacttctttgagaggctccacacatcgcgggtggctagagtctgcaagaatgacgtgggcggcgaaaagctgctgcagaagaagtggaccaccttcctgaaggcccagctgctctgcacccagccggggcagctgcccttcaacgtcatccgccacgcggtcctgctccccgccgattctcccacagctccccacatctacgcagtcttcacctcccagtggcaggttggcgggaccaggagctctgcggtttgtgccttctctctcttggacattgaacgtgtctttaaggggaaatacaaagagttgaacaaagaaacttcacgctggactacttataggggccctgagaccaacccccggccaggcagttgctcagtgggcccctcctctgataaggccctgaccttcatgaaggaccatttcctgatggatgagcaagtggtggggacgcccctgctggtgaaatctggcgtggagtatacacggcttgcagtggagacagcccagggccttgatgggcacagccatcttgtcatgtacctgggaaccaccacagggtcgctccacaaggctgtggtaagtggggacagcagtgctcatctggtggaagagattcagctgttccctgaccctgaacctgttcgcaacctgcagctggcccccacccagggtgcagtgtttgtaggcttctcaggaggtgtctggagggtgccccgagccaactgtagtgtctatgagagctgtgtggactgtgtccttgcccgggacccccactgtgcctgggaccctgagtcccgaacctgttgcctcctgtctgcccccaacctgaactcctggaagcaggacatggagcgggggaacccagagtgggcatgtgccagtggccccatgagcaggagccttcggcctcagagccgcccgcaaatcattaaagaagtcctggctgtccctaactccatcctggagctcccctgcccccacctgtcagccttggcctcttattattggagtcatggcccagcagcagtcccagaagcctcttccactgtctacaatggctccctcttgctgatagtgcaggatggagttgggggtctctaccagtgctgggcaactgagaatggcttttcataccctgtgatctcctactgggtggacagccaggaccagaccctggccctggatcctgaactggcaggcatcccccgggagcatgtgaaggtcccgttgaccagggtcagtggtggggccgccctggctgcccagcagtcctactggccccactttgtcactgtcactgtcctctttgccttagtgctttcaggagccctcatcatcctcgtggcctccccattgagagcactccgggctcggggcaaggttcagggctgtgagaccctgcgccctggggagaaggccccgttaagcagagagcaacacctccagtctcccaaggaatgcaggacctctgccagtgatgtggacgctgacaacaactgcctaggcactgaggtagcttaaactctaggcacaggccggggctgcggtgcaggcacctggccatgctggctgggcggcccaagcacagccctgactaggatgacagcagcacaaaagaccacctttctcccctgagaggagcttctgctactctgcatcactgatgacactcagcagggtgatgcacagcagtctgcctcccctatgggactcccttctaccaagcacatgagctctctaacagggtgggggctacccccagacctgctcctacactgatattgaagaacctggagaggatccttcagttctggccattccagggaccctccagaaacacagtgtttcaagagaccctaaaaaacctgcctgtcccaggaccctatggtaatgaacaccaaacatctaaacaatcatatgctaacatgccactcctggaaactccactctgaagctgccgctttggacaccaacactcccttctcccagggtcatgcagggatctgctccctcctgcttcccttaccagtcgtgcaccgctgactcccaggaagtctttcctgaagtctgaccacctttcttcttgcttcagttggggcagactctgatcccttctgccctggcagaatggcaggggtaatctgagccttcttcactcctttaccctagctgaccccttcacctctccccctcccttttcctttgttttgggattcagaaaactgcttgtcagagactgtttattttttattaaaaatataaggcttatgtatga

SEQ ID NO: 436032 - DNA, 3630 bp, Homo sapiens
gatactcagcgcagccttccagagctagtcagactggaggaggggacctgggaagctctggagctccctggtgacagtctgtggctgagcatggccctcccagccctgggcctggacccctggagcctcctgggccttttcctcttccaactgcttcagctgctgctgccgacgacgaccgcggggggaggcgggcaggggcccatgcccagggtcagatactatgcaggtaagtgtccgacagcaggaagtgtggggatagcaatagagagctggaggtgggtggaggaaggagagaggaacagaggaggggaggaaatggatatggagaaacagggacacagagagagatgccagggagaaacagaggatctcggagaaagagagacacagccagaaacagaagtccaaaaggaaagaaaagccactggagagcagattgaggaaaacaggtggccacggggccaggggcacgcttcttccagttctccatgttggggatgaacgtagggcacttagcttcttccaccagaagggcctccaggattttgacactctgctcctgagtggtgatggaaatactctctacgtgggggctcgagaagccattctggccttggatatccaggatccaggggtccccaggctaaagaacatgataccgtggccagccagtgacagaaaaaagagtgaatgtgcctttaagaagaagagcaatgagacacagtgtttcaacttcatccgtgtcctggtttcttacaatgtcacccatctctacacctgcggcaccttcgccttcagccctgcttgtaccttcattgtgagttctctggtgcccagcgctcaggcccccaagcatcccttctcacatctacccacgactttcctctgtagctctggaaaactctggccttccagatgcaggaccctcatgaacttcctggccccagaccaatttccctctatgtccctttcccttccttcctcaagcccctcatttcccagatgtgagaccttggcgttctggccccccagcctctctccccatttaggaacttcaagattcctacctgttgcccatctcggaggacaaggtcatggagggaaaaggccaaagcccctttgaccccgctcacaagcatacggctgtcttggtggatgggatgctctattctggtactatgaacaacttcctgggcagtgagcccatcctgatgcgcacactgggatcccagcctgtcctcaagaccgacaacttcctccgctggctgcatcatgacgcctcctttgtggcagccatcccttcgacccaggtcgtctacttcttcttcgaggagacagccagcgagtttgacttctttgagaggctccacacatcgcgggtggctagagtctgcaagaatgacgtgggcggcgaaaagctgctgcagaagaagtggaccaccttcctgaaggcccagctgctctgcacccagccggggcagctgcccttcaacgtcatccgccacgcggtcctgctccccgccgattctcccacagctccccacatctacgcagtcttcacctcccagtggcaggttggcgggaccaggagctctgcggtttgtgccttctctctcttggacattgaacgtgtctttaaggggaaatacaaagagttgaacaaagaaacttcacgctggactacttataggggccctgagaccaacccccggccaggcagttgctcagtgggcccctcctctgataaggccctgaccttcatgaaggaccatttcctgatggatgagcaagtggtggggacgcccctgctggtgaaatctggcgtggagtatacacggcttgcagtggagacagcccagggccttgatgggcacagccatcttgtcatgtacctgggaaccaccacagggtcgctccacaaggctgtggtaagtggggacagcagtgctcatctggtggaagagattcagctgttccctgaccctgaacctgttcgcaacctgcagctggcccccacccagggtgcagtgtttgtaggcttctcaggaggtgtctggagggtgccccgagccaactgtagtgtctatgagagctgtgtggactgtgtccttgcccgggacccccactgtgcctgggaccctgagtcccgaacctgttgcctcctgtctgcccccaacctgaactcctggaagcaggacatggagcgggggaacccagagtgggcatgtgccagtggccccatgagcaggagccttcggcctcagagccgcccgcaaatcattaaagaagtcctggctgtccctaactccatcctggagctcccctgcccccacctgtcagccttggcctcttattattggagtcatggcccagcagcagtcccagaagcctcttccactgtctacaatggctccctcttgctgatagtgcaggatggagttgggggtctctaccagtgctgggcaactgagaatggcttttcataccctgtgatctcctactgggtggacagccaggaccagaccctggccctggatcctgaactggcaggcatcccccgggagcatgtgaaggtcccgttgaccagggtcagtggtggggccgccctggctgcccagcagtcctactggccccactttgtcactgtcactgtcctctttgccttagtgctttcaggagccctcatcatcctcgtggcctccccattgagagcactccgggctcggggcaaggttcagggctgtgagaccctgcgccctggggagaaggccccgttaagcagagagcaacacctccagtctcccaaggaatgcaggacctctgccagtgatgtggacgctgacaacaactgcctaggcactgaggtagcttaaactctaggcacaggccggggctgcggtgcaggcacctggccatgctggctgggcggcccaagcacagccctgactaggatgacagcagcacaaaagaccacctttctcccctgagaggagcttctgctactctgcatcactgatgacactcagcagggtgatgcacagcagtctgcctcccctatgggactcccttctaccaagcacatgagctctctaacagggtgggggctacccccagacctgctcctacactgatattgaagaacctggagaggatccttcagttctggccattccagggaccctccagaaacacagtgtttcaagagaccctaaaaaacctgcctgtcccaggaccctatggtaatgaacaccaaacatctaaacaatcatatgctaacatgccactcctggaaactccactctgaagctgccgctttggacaccaacactcccttctcccagggtcatgcagggatctgctccctcctgcttcccttaccagtcgtgcaccgctgactcccaggaagtctttcctgaagtctgaccacctttcttcttgcttcagttggggcagactctgatcccttctgccctggcagaatggcaggggtaatctgagccttcttcactcctttaccctagctgaccccttcacctctccccctcccttttcctttgttttgggattcagaaaactgcttgtcagagactgtttattttttattaaaaatataaggcttatgtatga

SEQ ID NO: 436033 - DNA, 2552 bp, Homo sapiens
cccctgtccggtgcagactctgctggaagtcttggacgcctgggttagggtctccacttctgggctggggagctccctggtgacagtctgtggctgagcatggccctcccagccctgggcctggacccctggagcctcctgggccttttcctcttccaactgcttcagctgctgctgccgacgacgaccgcggggggaggcgggcaggggcccatgcccagggtcagatactatgcaggggatgaacgtagggcacttagcttcttccaccagaagggcctccaggattttgacactctgctcctgagtggtgatggaaatactctctacgtgggggctcgagaagccattctggccttggatatccaggatccaggggtccccaggctaaagaacatgataccgtggccagccagtgacagaaaaaagagtgaatgtgcctttaagaagaagagcaatgagacacagtgtttcaacttcatccgtgtcctggtttcttacaatgtcacccatctctacacctgcggcaccttcgccttcagccctgcttgtaccttcattgaacttcaagattcctacctgttgcccatctcggaggacaaggtcatggagggaaaaggccaaagcccctttgaccccgctcacaagcatacggctgtcttggtggatgggatgctctattctggtactatgaacaacttcctgggcagtgagcccatcctgatgcgcacactgggatcccagcctgtcctcaagaccgacaacttcctccgctggctgcatcatgacgcctcctttgtggcagccatcccttcgacccaggtcgtctacttcttcttcgaggagacagccagcgagtttgacttctttgagaggctccacacatcgcgggtggctagagtctgcaagaatgacgtgggcggcgaaaagctgctgcagaagaagtggaccaccttcctgaaggcccagctgctctgcacccagccggggcagctgcccttcaacgtcatccgccacgcggtcctgctccccgccgattctcccacagctccccacatctacgcagtcttcacctcccagtggcaggttggcgggaccaggagctctgcggtttgtgccttctctctcttggacattgaacgtgtctttaaggggaaatacaaagagttgaacaaagaaacttcacgctggactacttataggggccctgagaccaacccccggccaggcagttgctcagtgggcccctcctctgataaggccctgaccttcatgaaggaccatttcctgatggatgagcaagtggtggggacgcccctgctggtgaaatctggcgtggagtatacacggcttgcagtggagacagcccagggccttgatgggcacagccatcttgtcatgtacctgggaaccaccacagggtcgctccacaaggctgtggtaagtggggacagcagtgctcatctggtggaagagattcagctgttccctgaccctgaacctgttcgcaacctgcagctggcccccacccagggtgcagtgtttgtaggcttctcaggaggtgtctggagggtgccccgagccaactgtagtgtctatgagagctgtgtggactgtgtccttgcccgggacccccactgtgcctgggaccctgagtcccgaacctgttgcctcctgtctgcccccaacctgaactcctggaagcaggacatggagcgggggaacccagagtgggcatgtgccagtggccccatgagcaggagccttcggcctcagagccgcccgcaaatcattaaagaagtcctggctgtccctaactccatcctggagctcccctgcccccacctgtcagccttggcctcttattattggagtcatggcccagcagcagtcccagaagcctcttccactgtctacaatggctccctcttgctgatagtgcaggatggagttgggggtctctaccagtgctgggcaactgagaatggcttttcataccctgtgatctcctactgggtggacagccaggaccagaccctggccctggatcctgaactggcaggcatcccccgggagcatgtgaaggtcccgttgaccagggtcagtggtggggccgccctggctgcccagcagtcctactggccccactttgtcactgtcactgtcctctttgccttagtgctttcaggagccctcatcatcctcgtggcctccccattgagagcactccgggctcggggcaaggttcagggctgtgagaccctgcgccctggggagaaggccccgttaagcagagagcaacacctccagtctcccaaggaatgcaggacctctgccagtgatgtggacgctgacaacaactgcctaggcactgaggtagcttaaactctaggcacaggccggggctgcggtgcaggcacctggccatgctggctgggcggcccaagcacagccctgactaggatgacagcagcacaaaagaccacctttctcccctgagaggagcttctgctactctgcatcactacaacggcctaagatcctcgagagta

SEQ ID NO: 436034 - DNA, 843 bp, Homo sapiens
cccctgtccggtgcagactctgctggaagtcttggacgcctgggttagggtctccacttctgggctggggagctccctggtgacagtctgtggctgagcatggccctcccagccctgggcctggacccctggagcctcctgggccttttcctcttccaactgcttcagctgctgctgccgacgacgaccgcggggggaggcgggcaggggcccatgcccagggtcagatactatgcaggggatgaacgtagggcacttagcttcttccaccagaagggcctccaggattttgacactctgctcctgagtggtgatggaaatactctctacgtgggggctcgagaagccattctggccttggatatccaggatccaggggtccccaggctaaagaacatgataccgtggccagccagtgacagaaaaaagagtgaatgtgcctttaagaagaagagcaatgagacacagtgtttcaacttcatccgtgtcctggtttcttacaatgtcacccatctctacacctgcggcaccttcgccttcagccctgcttgtaccttcattgaacttcaagattcctacctgttgcccatctcggaggacaaggtcatggagggaaaaggccaaagcccctttgaccccgctcacaagcatacggctgtcttggtggatgggatgctctattctggtactatgaacaacttcctgggcagtgagcccatcctgatgcgcacactgggatcccagcctgtcctcaagaccgacaacttcctccgctggctgcatcatgacgcctcctttgcgcatcacaatcctacaccgagatcagtctacgtccagattacg

SEQ ID NO: 436035 - DNA, 1202 bp, Homo sapiens
  misc_feature (170)..(170): n is a, c, g, or t
  misc_feature (984)..(984): n is a, c, g, or t
  misc_feature (1014)..(1014): n is a, c, g, or t
  misc_feature (1020)..(1020): n is a, c, g, or t
  misc_feature (1033)..(1033): n is a, c, g, or t
  misc_feature (1045)..(1045): n is a, c, g, or t
  misc_feature (1049)..(1049): n is a, c, g, or t
  misc_feature (1053)..(1053): n is a, c, g, or t
agcggagtttccacccctccctcaaggcggcggtcctcttctatccgcagtcccggacctggagcgggtcagaccccgacttccgcccctgactccccaggcggtcacatgaccgaagcggctgggagcagggaggggcatcatgtgaccactcgccggcgacggctgangacgcaagagcccgctctcacttttcagcggcaggcgaagggggctgaggaaaggagaatcaagcactcttttggaagagggtaatctctctccaaaaactgaggacacttaccttccccatatattgagtccagctgtgtttggtggcccaggtactaatttcaagatgccaggacgttccagttcaaattcaggttcaactggtttcatctccttcagtggtgtagagtctgctctctcctccttgaaaaacttccaagcctgtatcaactctggtatggacacagcttctagtgttgctttggatcttgtggaaagtcagactgaagtgagtagtgaatatagtatggacaaggcaatggttgaatttgctacattggatcggcaactaaaccattatgtaaaggctgttcaatctacaataaatcatgtgaaagaagaacgtccagaaaaaataccagatttaaaattattggtagagaagaaatttttggctttacagagcaagaattctgatgcagactttcaaaataatgaaaaatttgtacagtttaaacaacagctgaaagaactaaagaagcaatgtggtcttcaagctgacagagaagctgacggaacagaaggagtggatgaagatataattgtgacccaaagtcagaccaacttcacctgccccattacaaaggaggaaatgaagaagccagtgaaaaataaagtgtgtggccacacctatgaagaggacgccattgttcgcatgattgagtccaggcaaaagcggaagaaaaaggcctatgcctcaatgggtgtagcacncgtttagaagtcgatcttccgatgagcctnaagggntggacctacgaanaatcgctcggtngaangccngctggggacagcggcttccccaccccgtgtgggaaaagggccccatggcgcgcgactctggggaagctctgtgacatatccacagcctgttgtgcttaagccaaaagggcgcgcccctgctttagtgtagattattattatataaaact

SEQ ID NO: 436036 - DNA, 462 bp, Homo sapiens
gacacttttcctttttcagtaaaatgccttacttaaacacttgagtataaaagaagtttctgcttaaggcagtaaaggggactgacttgatgttctttctttctcacagttgccctcaaattggctgtagccacacggatataagaaagtcagatcttatccaggatgaagcacttagaagggcaattgagaaccataacaagaaaagacatcgtcattccgagtaggaaaagccacctgcctgcagggacaccagcagcctacctcctaccccagctgtctgttgagagcagtgctgaccccagcagttagggactggctgcatagcatacttgttgggggtaaaacttgttgcttttatgtgtgcttgaaaacatttttcaaagttacacaacagaaatgcaatcatattgtttatttttaagtgttctataatgttaaataaaactttgatcatctgca

SEQ ID NO: 436037 - DNA, 1266 bp, Homo sapiens
  misc_feature (170)..(170): n is a, c, g, or t
  misc_feature (891)..(891): n is a, c, g, or t
agcggagtttccacccctccctcaaggcggcggtcctcttctatccgcagtcccggacctggagcgggtcagaccccgacttccgcccctgactccccaggcggtcacatgaccgaagcggctgggagcagggaggggcatcatgtgaccactcgccggcgacggctgangacgcaagagcccgctctcacttttcagcggcaggcgaagggggctgaggaaagggcttttaagaactgtgctattgttgacttcttcacagaatcaagcactcttttggaagagggtaatctctctccaaaaactgaggacacttaccttccccatatattgagtccagctgtgtttggtggcccaggtactaatttcaagatgccaggacgttccagttcaaattcaggttcaactggtttcatctccttcagtggtgtagagtctgctctctcctccttgaaaaacttccaagcctgtatcaactctggtatggacacagcttctagtgttgctttggatcttgtggaaagtcagactgaagtgagtagtgaatatagtatggacaaggcaatggttgaatttgctacattggatcggcaactaaaccattatgtaaaggctgttcaatctacaataaatcatgtgaaagaagaacgtccagaaaaaataccagatttaaaattattggtagagaagaaatttttggctttacagagcaagaattctgatgcagactttcaaaataatgaaaaatttgtacagtttaaacaacagctgaaagaactaaagaagcaatgtaagtcaacatgctttgctttggttcggctttttgaaattagggaactgacttgatgaacagccccagttaactgattttataaagtttgcttatctgcntggcttgatcctcattctagtgcgttaatgttgtgcaatcggattgggtaatttggtcaatcagctggcattttggaagcaaggttcccaagtggccgaaattccgaagtgtgattgtattgtccattgcggcggaggggacgtgtgaaacaacattaagggaagcacatatttctagcacaaaaaaggggagcgacaaagaactcagtggcaccatgcgtacgacacttgtaagcggccacataggagtataataaagacggggatcaacatagaaaaaacatcatatgtataaccatcatgtatggtgaacgcactcagacagttgatgttgtagaaataggagtttcgaactagaggacgtaatcatagatg

SEQ ID NO: 436038 - DNA, 1398 bp, Homo sapiens
  misc_feature (170)..(170): n is a, c, g, or t
agcggagtttccacccctccctcaaggcggcggtcctcttctatccgcagtcccggacctggagcgggtcagaccccgacttccgcccctgactccccaggcggtcacatgaccgaagcggctgggagcagggaggggcatcatgtgaccactcgccggcgacggctgangacgcaagagcccgctctcacttttcagcggcaggcgaagggggctgaggaaaggaggtgggtctaggcaggggaaattggggtgccaccagacggagacagcttggactaccagaatcaagcactcttttggaagagggtaatctctctccaaaaactgaggacacttaccttccccatatattgagtccagctgtgtttggtggcccaggtactaatttcaagatgccaggacgttccagttcaaattcaggttcaactggtttcatctccttcagtggtgtagagtctgctctctcctccttgaaaaacttccaagcctgtatcaactctggtatggacacagcttctagtgttgctttggatcttgtggaaagtcagactgaagtgagtagtgaatatagtatggacaaggcaatggttgaatttgctacattggatcggcaactaaaccattatgtaaaggctgttcaatctacaataaatcatgtgaaagaagaacgtccagaaaaaataccagatttaaaattattggtagagaagaaatttttggctttacagagcaagaattctgatgcagactttcaaaataatgaaaaatttgtacagtttaaacaacagctgaaagaactaaagaagcaatgtggtcttcaagctgacagagaagctgacggaacagaaggagtggatgaagatataattgtgacccaaagtcagaccaacttcacctgccccattacaaaggaggaaatgaagaagccagtgaaaaataaagtgtgtggccacacctatgaagaggacgccattgttcgcatgattgagtccaggcaaaagcggaagaaaaaggcctattgccctcaaattggctgtagccacacggatataagaaagtcagatcttatccaggatgaagcacttagaagggcaattgagaaccataacaagaaaagacatcgtcattccgagtaggaaaagccacctgcctgcagggacaccagcagcctacctcctaccccagctgtctgttgagagcagtgctgaccccagcagttagggactggctgcatagcatacttgttgggggtaaaacttgttgcttttatgtgtgcttgaaaacatttttcaaagttacacaacagaaatgcaatcatattgtttatttttaagtgttctataatgttaaataaaactttgatcatctgcaaaaaaaaaacaaaagggcggccgc

SEQ ID NO: 436039 - DNA, 1409 bp, Homo sapiens
  misc_feature (170)..(170): n is a, c, g, or t
agcggagtttccacccctccctcaaggcggcggtcctcttctatccgcagtcccggacctggagcgggtcagaccccgacttccgcccctgactccccaggcggtcacatgaccgaagcggctgggagcagggaggggcatcatgtgaccactcgccggcgacggctgangacgcaagagcccgctctcacttttcagcggcaggcgaagggggctgaggaaaggaggtgggtctaggcaggggaaattggggtgccaccagacggagacagcttggactaccgcttttaagaactgtgctattgttgacttcttcacagaatcaagcactcttttggaagagggtaatctctctccaaaaactgaggacacttaccttccccatatattgagtccagctgtgtttggtggcccaggtactaatttcaagatgccaggacgttccagttcaaattcaggttcaactggtttcatctccttcagtggtgtagagtctgctctctcctccttgaaaaacttccaagcctgtatcaactctggtatggacacagcttctagtgttgctttggatcttgtggaaagtcagactgaagtgagtagtgaatatagtatggacaaggcaatggttgaatttgctacattggatcggcaactaaaccattatgtaaaggctgttcaatctacaataaatcatgtgaaagaagaacgtccagaaaaaataccagatttaaaattattggtagagaagaaatttttggctttacagagcaagaattctgatgcagactttcaaaataatgaaaaatttgtacagtttaaacaacagctgaaagaactaaagaagcaatgtggtcttcaagctgacagagaagctgacggaacagaaggagtggatgaagatataattgtgacccaaagtcagaccaacttcacctgccccattacaaaggaggaaatgaagaagccagtgaaaaataaagtgtgtggccacacctatgaagaggacgccattgttcgcatgattgagtccaggcaaaagcggaagaaaaaggcctattgccctcaaattggctgtagccacacggatataagaaagtcagatcttatccaggatgaagcacttagaagggcaattgagaaccataacaagaaaagacatcgtcattccgagtaggaaaagccacctgcctgcagggacaccagcagcctacctcctaccccagctgtctgttgagagcagtgctgaccccagcagttagggactggctgcatagcatacttgttgggggtaaaacttgttgcttttatgtgtgcttgaaaacatttttcaaagttacacaacagaaatgcaatcatattgtttatttttaagtgttctataatgttaaataaaactttgatcatctgca

SEQ ID NO: 436040 - DNA, 1316 bp, Homo sapiens
  misc_feature (170)..(170): n is a, c, g, or t
agcggagtttccacccctccctcaaggcggcggtcctcttctatccgcagtcccggacctggagcgggtcagaccccgacttccgcccctgactccccaggcggtcacatgaccgaagcggctgggagcagggaggggcatcatgtgaccactcgccggcgacggctgangacgcaagagcccgctctcacttttcagcggcaggcgaagggggctgaggaaaggagaatcaagcactcttttggaagagggtaatctctctccaaaaactgaggacacttaccttccccatatattgagtccagctgtgtttggtggcccaggtactaatttcaagatgccaggacgttccagttcaaattcaggttcaactggtttcatctccttcagtggtgtagagtctgctctctcctccttgaaaaacttccaagcctgtatcaactctggtatggacacagcttctagtgttgctttggatcttgtggaaagtcagactgaagtgagtagtgaatatagtatggacaaggcaatggttgaatttgctacattggatcggcaactaaaccattatgtaaaggctgttcaatctacaataaatcatgtgaaagaagaacgtccagaaaaaataccagatttaaaattattggtagagaagaaatttttggctttacagagcaagaattctgatgcagactttcaaaataatgaaaaatttgtacagtttaaacaacagctgaaagaactaaagaagcaatgtggtcttcaagctgacagagaagctgacggaacagaaggagtggatgaagatataattgtgacccaaagtcagaccaacttcacctgccccattacaaaggaggaaatgaagaagccagtgaaaaataaagtgtgtggccacacctatgaagaggacgccattgttcgcatgattgagtccaggcaaaagcggaagaaaaaggcctattgccctcaaattggctgtagccacacggatataagaaagtcagatcttatccaggatgaagcacttagaagggcaattgagaaccataacaagaaaagacatcgtcattccgagtaggaaaagccacctgcctgcagggacaccagcagcctacctcctaccccagctgtctgttgagagcagtgctgaccccagcagttagggactggctgcatagcatacttgttgggggtaaaacttgttgcttttatgtgtgcttgaaaacatttttcaaagttacacaacagaaatgcaatcatattgtttatttttaagtgttctataatgttaaataaaactttgatcatctgca

SEQ ID NO: 436041 - DNA, 1260 bp, Homo sapiens
  misc_feature (170)..(170): n is a, c, g, or t
  misc_feature (1042)..(1042): n is a, c, g, or t
  misc_feature (1072)..(1072): n is a, c, g, or t
  misc_feature (1078)..(1078): n is a, c, g, or t
  misc_feature (1091)..(1091): n is a, c, g, or t
  misc_feature (1103)..(1103): n is a, c, g, or t
  misc_feature (1107)..(1107): n is a, c, g, or t
  misc_feature (1111)..(1111): n is a, c, g, or t
agcggagtttccacccctccctcaaggcggcggtcctcttctatccgcagtcccggacctggagcgggtcagaccccgacttccgcccctgactccccaggcggtcacatgaccgaagcggctgggagcagggaggggcatcatgtgaccactcgccggcgacggctgangacgcaagagcccgctctcacttttcagcggcaggcgaagggggctgaggaaaggaggtgggtctaggcaggggaaattggggtgccaccagacggagacagcttggactaccagaatcaagcactcttttggaagagggtaatctctctccaaaaactgaggacacttaccttccccatatattgagtccagctgtgtttggtggcccaggtactaatttcaagatgccaggacgttccagttcaaattcaggttcaactggtttcatctccttcagtggtgtagagtctgctctctcctccttgaaaaacttccaagcctgtatcaactctggtatggacacagcttctagtgttgctttggatcttgtggaaagtcagactgaagtgagtagtgaatatagtatggacaaggcaatggttgaatttgctacattggatcggcaactaaaccattatgtaaaggctgttcaatctacaataaatcatgtgaaagaagaacgtccagaaaaaataccagatttaaaattattggtagagaagaaatttttggctttacagagcaagaattctgatgcagactttcaaaataatgaaaaatttgtacagtttaaacaacagctgaaagaactaaagaagcaatgtggtcttcaagctgacagagaagctgacggaacagaaggagtggatgaagatataattgtgacccaaagtcagaccaacttcacctgccccattacaaaggaggaaatgaagaagccagtgaaaaataaagtgtgtggccacacctatgaagaggacgccattgttcgcatgattgagtccaggcaaaagcggaagaaaaaggcctatgcctcaatgggtgtagcacncgtttagaagtcgatcttccgatgagcctnaagggntggacctacgaanaatcgctcggtngaangccngctggggacagcggcttccccaccccgtgtgggaaaagggccccatggcgcgcgactctggggaagctctgtgacatatccacagcctgttgtgcttaagccaaaagggcgcgcccctgctttagtgtagattattattatataaaact

SEQ ID NO: 436042 - DNA, 267 bp, Homo sapiens
tcattccgagtaggaaaagccacctgcctgcagggacaccagcagcctacctcctaccccagctgtctgttgagagcagtgctgaccccagcagttagggactggctgcatagcatacttgttgggggtaaaacttgttgcttttatgtgtgcttgaaaacatttttcaaagttacacaacagaaatgcaatcatattgtttatttttaagtgttctataatgttaaataaaactttgatcatctgcagtgtcctccctgcatgcct

SEQ ID NO: 436043 - DNA, 1289 bp, Homo sapiens
  misc_feature (170)..(170): n is a, c, g, or t
  misc_feature (914)..(914): n is a, c, g, or t
agcggagtttccacccctccctcaaggcggcggtcctcttctatccgcagtcccggacctggagcgggtcagaccccgacttccgcccctgactccccaggcggtcacatgaccgaagcggctgggagcagggaggggcatcatgtgaccactcgccggcgacggctgangacgcaagagcccgctctcacttttcagcggcaggcgaagggggctgaggaaaggaggtgggtctaggcaggggaaattggggtgccaccagacggagacagcttggactaccagaatcaagcactcttttggaagagggtaatctctctccaaaaactgaggacacttaccttccccatatattgagtccagctgtgtttggtggcccaggtactaatttcaagatgccaggacgttccagttcaaattcaggttcaactggtttcatctccttcagtggtgtagagtctgctctctcctccttgaaaaacttccaagcctgtatcaactctggtatggacacagcttctagtgttgctttggatcttgtggaaagtcagactgaagtgagtagtgaatatagtatggacaaggcaatggttgaatttgctacattggatcggcaactaaaccattatgtaaaggctgttcaatctacaataaatcatgtgaaagaagaacgtccagaaaaaataccagatttaaaattattggtagagaagaaatttttggctttacagagcaagaattctgatgcagactttcaaaataatgaaaaatttgtacagtttaaacaacagctgaaagaactaaagaagcaatgtaagtcaacatgctttgctttggttcggctttttgaaattagggaactgacttgatgaacagccccagttaactgattttataaagtttgcttatctgcntggcttgatcctcattctagtgcgttaatgttgtgcaatcggattgggtaatttggtcaatcagctggcattttggaagcaaggttcccaagtggccgaaattccgaagtgtgattgtattgtccattgcggcggaggggacgtgtgaaacaacattaagggaagcacatatttctagcacaaaaaaggggagcgacaaagaactcagtggcaccatgcgtacgacacttgtaagcggccacataggagtataataaagacggggatcaacatagaaaaaacatcatatgtataaccatcatgtatggtgaacgcactcagacagttgatgttgtagaaataggagtttcgaactagaggacgtaatcatagatg

SEQ ID NO: 436044 - DNA, 790 bp, Homo sapiens
  misc_feature (16)..(17): n is a, c, g, or t
  misc_feature (636)..(636): n is a, c, g, or t
  misc_feature (645)..(646): n is a, c, g, or t
  misc_feature (699)..(699): n is a, c, g, or t
  misc_feature (701)..(701): n is a, c, g, or t
tacggctaggtagagnngggtgggggaaaggaggtgggtctaggcaggggaaattggggtgccaccagacggagacagcttggactaccagaatcaagcactcttttggaagagggtaatctctctccaaaaactgaggacacttaccttccccatatattgagtccagctgtgtttggtggcccaggtactaatttcaagatgccaggacgttccagttcaaattcaggttcaactggtttcatctccttcagtggtgtagagtctgctctctcctccttgaaaaacttccaagcctgtatcaactctggtatggacacagcttctagtgttgctttggatcttgtggaaagtcagactgaagtgagtagtgaatatagtatggacaaggcaatggttgaatttgctacattggatcggcaactaaaccattatgtaaaggctgttcaatctacaataaatcatgtgaaagaagaacgtccagaaaaaataccagatttaaaattattggtagagaagaaatttttggctttacagagcaagaattctgatgcagactttcaaaataatgaaaaatttgtacagtttaaacaacagctgaaagaactaaagaagcaatgtagtcacatgcttgcnttggtcggnntttgaatagggactgcttgatgacaggccagtactgattataaagtgctatcngntggtgaacccatcaaggggtaaggggggcaccgtgtggcattgggcacagcggctttggaagcagtcccaggggaaaccccgcgtttgg

SEQ ID NO: 436045 - DNA, 1374 bp, Homo sapiens
  misc_feature (170)..(170): n is a, c, g, or t
agcggagtttccacccctccctcaaggcggcggtcctcttctatccgcagtcccggacctggagcgggtcagaccccgacttccgcccctgactccccaggcggtcacatgaccgaagcggctgggagcagggaggggcatcatgtgaccactcgccggcgacggctgangacgcaagagcccgctctcacttttcagcggcaggcgaagggggctgaggaaaggaggtgggtctaggcaggggaaattggggtgccaccagacggagacagcttggactaccagaatcaagcactcttttggaagagggtaatctctctccaaaaactgaggacacttaccttccccatatattgagtccagctgtgtttggtggcccaggtactaatttcaagatgccaggacgttccagttcaaattcaggttcaactggtttcatctccttcagtggtgtagagtctgctctctcctccttgaaaaacttccaagcctgtatcaactctggtatggacacagcttctagtgttgctttggatcttgtggaaagtcagactgaagtgagtagtgaatatagtatggacaaggcaatggttgaatttgctacattggatcggcaactaaaccattatgtaaaggctgttcaatctacaataaatcatgtgaaagaagaacgtccagaaaaaataccagatttaaaattattggtagagaagaaatttttggctttacagagcaagaattctgatgcagactttcaaaataatgaaaaatttgtacagtttaaacaacagctgaaagaactaaagaagcaatgtggtcttcaagctgacagagaagctgacggaacagaaggagtggatgaagatataattgtgacccaaagtcagaccaacttcacctgccccattacaaaggaggaaatgaagaagccagtgaaaaataaagtgtgtggccacacctatgaagaggacgccattgttcgcatgattgagtccaggcaaaagcggaagaaaaaggcctattgccctcaaattggctgtagccacacggatataagaaagtcagatcttatccaggatgaagcacttagaagggcaattgagaaccataacaagaaaagacatcgtcattccgagtaggaaaagccacctgcctgcagggacaccagcagcctacctcctaccccagctgtctgttgagagcagtgctgaccccagcagttagggactggctgcatagcatacttgttgggggtaaaacttgttgcttttatgtgtgcttgaaaacatttttcaaagttacacaacagaaatgcaatcatattgtttatttttaagtgttctataatgttaaataaaactttgatcatctgca

SEQ ID NO: 436046 - DNA, 1276 bp, Homo sapiens
  misc_feature (170)..(170): n is a, c, g, or t
agcggagtttccacccctccctcaaggcggcggtcctcttctatccgcagtcccggacctggagcgggtcagaccccgacttccgcccctgactccccaggcggtcacatgaccgaagcggctgggagcagggaggggcatcatgtgaccactcgccggcgacggctgangacgcaagagcccgctctcacttttcagcggcaggcgaagggggctgaggaaaggaggtgggtctaggcaggggaaattggggtgccaccagacggagacagcttggactaccgtactaatttcaagatgccaggacgttccagttcaaattcaggttcaactggtttcatctccttcagtggtgtagagtctgctctctcctccttgaaaaacttccaagcctgtatcaactctggtatggacacagcttctagtgttgctttggatcttgtggaaagtcagactgaagtgagtagtgaatatagtatggacaaggcaatggttgaatttgctacattggatcggcaactaaaccattatgtaaaggctgttcaatctacaataaatcatgtgaaagaagaacgtccagaaaaaataccagatttaaaattattggtagagaagaaatttttggctttacagagcaagaattctgatgcagactttcaaaataatgaaaaatttgtacagtttaaacaacagctgaaagaactaaagaagcaatgtggtcttcaagctgacagagaagctgacggaacagaaggagtggatgaagatataattgtgacccaaagtcagaccaacttcacctgccccattacaaaggaggaaatgaagaagccagtgaaaaataaagtgtgtggccacacctatgaagaggacgccattgttcgcatgattgagtccaggcaaaagcggaagaaaaaggcctattgccctcaaattggctgtagccacacggatataagaaagtcagatcttatccaggatgaagcacttagaagggcaattgagaaccataacaagaaaagacatcgtcattccgagtaggaaaagccacctgcctgcagggacaccagcagcctacctcctaccccagctgtctgttgagagcagtgctgaccccagcagttagggactggctgcatagcatacttgttgggggtaaaacttgttgcttttatgtgtgcttgaaaacatttttcaaagttacacaacagaaatgcaatcatattgtttatttttaagtgttctataatgttaaataaaactttgatcatctgca

SEQ ID NO: 436047 - DNA, 1261 bp, Homo sapiens
  misc_feature (170)..(170): n is a, c, g, or t
agcggagtttccacccctccctcaaggcggcggtcctcttctatccgcagtcccggacctggagcgggtcagaccccgacttccgcccctgactccccaggcggtcacatgaccgaagcggctgggagcagggaggggcatcatgtgaccactcgccggcgacggctgangacgcaagagcccgctctcacttttcagcggcaggcgaagggggctgaggaaaggaggtgggtctaggcaggggaaattggggtgccaccagacggagacagcttggactaccagaatcaagcactcttttggaagagggtaatctctctccaaaaactgaggacacttaccttccccatatattgagtccagctgtgtttggtggcccaggtactaatttcaagatgccaggacgttccagttcaaattcaggttcaactggtttcatctccttcagtggtgtagagtctgctctctcctccttgaaaaacttccaagcctgtatcaactctggtatggacacagcttctagtgttgctttggatcttgtggaaagtcagactgaagtgagtagtgaatatagtatggacaaggcaatggttgaatttgctacattggatcggcaactaaaccattatgtaaaggctgttcaatctacaataaatcatgtgaaagaagaacgtccagaaaaaataccagatttaaaattattggtagagaagaaatttttggctttacagagcaagaattctgatgcagactttcaaaataatgaaaaatttgtacagtttaaacaacagctgaaagaactaaagaagcaatgtggtcttcaagctgacagagaagctgacggaacagaaggagtggatgaagatataattgtgacccaaagtcagaccaacttcacctgccccattacaaaggaggaaatgaagaagccagtgaaaaataaagtgtgtggccacacctatgaagaggacgccattgttcgcatgattgagtccaggcaaaagcggaagaaaaaggcctattgccctcaaattggctgtagccacacggatataagaaagtcagatcttatccaggatgaagcacttagaagggcaattgagaaccataacaagaaaagacatcgtcattccgagtaggaaaagccacctgcctgcagggacaccagcagcctacctcctaccccagctgtctgttgtaactggaactgttgtaactggcgctgttgtaactggagctgttgtaactggggcgtgttgta

SEQ ID NO: 436048 - DNA, 854 bp, Homo sapiens
  misc_feature (170)..(170): n is a, c, g, or t
agcggagtttccacccctccctcaaggcggcggtcctcttctatccgcagtcccggacctggagcgggtcagaccccgacttccgcccctgactccccaggcggtcacatgaccgaagcggctgggagcagggaggggcatcatgtgaccactcgccggcgacggctgangacgcaagagcccgctctcacttttcagcggcaggcgaagggggctgaggaaaggaggtgggtctaggcaggggaaattggggtgccaccagacggagacagcttggactaccgcttttaagaactgtgctattgttgacttcttcacagaatcaagcactcttttggaagagggtaatctctctccaaaaactgaggacacttaccttccccatatattgagtccagctgtgtttggtggcccaggtactaatttcaagatgccaggacgttccagttcaaattcaggttcaactggtttcatctccttcagtggtgtagagtctgctctctcctccttgaaaaacttccaagcctgtatcaactctggtatggacacagcttctagtgttgctttggatcttgtggaaagtcagactgaagtgagtagtgaatatagtatggacaaggcaatggttgaatttgctacattggatcggcaactaaaccattatgtaaaggctgttcaatctacaataaatcatgtcccctggggctccaccgacccccggggcgccgagactttgtcgggccgcgaggggctggctttttttttgagccgccgccttgccctccccacccgcgccccggcctcactgctctttttctgcgctgtaaaccaaaaataaaattctaggcccccca

SEQ ID NO: 436049 - DNA, 1831 bp, Homo sapiens
ttacctatatgtggttccaccgcgtcgactagtacggttgggggttaccgggggccatggagctccgagcggcggatcgcgagcctcctgcgaaccccagcctgcacgcccggttagcattcggccgggagatgcggcagtggaatctggaagggcggtgaaaaacctacgtcctgccctcgcccggcctctccattcgtcccccgggtagagaggtgcccggctcccaccccttcccagccccagccctggagacagcagcccctagactactgagggacagcgacagcatgaaggctccgggtcggctcgtgctcatcatcctgtgctccgtggtcttctctgccgtctacatcctcctgtgctgctgggccggcctgcccctctgcctggccacctgcctggaccaccacttccccacaggctccaggcccactgtgccgggacccctgcacttcagtggatatagcagtgtgccagatgggaagccgctggtccgcgagccctgccgcagctgtgccgtggtgtccagctccggccaaatgctgggctcaggcctgggtgctgagatcgacagtgccgagtgcgtgttccgcatgaaccaggcgcccaccgtgggctttgaggcggatgtgggccagcgcagcaccctgcgtgtcgtctcacacacaagcgtgccgctgctgctgcgcaactattcacactacttccagaaggcccgagacacgctctacatggtgtggggccagggcaggcacatggaccgggtgctcggcggccgcacctaccgcacgctgctgcagctcaccaggatgtaccccggcctgcaggtgtacaccttcacggagcgcatgatggcctactgcgaccagatcttccaggacgagacgggcaagaaccggaggcagtcgggctccttcctcagcaccggctggttcaccatgatcctcgcgctggagctgtgtgaggagatcgtggtctatgggatggtcagcgacactactgcagggagaagagccacccctcagtgccttaccactactttgagaagggccggctagatgagtgtcagatgtacctggcacacgagcaggcgccccgaagcgcccaccgcttcatcactgagaaggcggtcttctcccgctgggccaagaagaggcccatcgtgttcgcccatccgtcctggaggactgagtagcttccgtcgtcctgccagccgccatgccgttgcgaggcctccgggatgtcccatcccaagccatcacactccacaaaaacatttaatttatggatcctgcctcctgccacgtgctgggtggacctaaggttccttctccactccctgagtaattcatggcatttgggggctcaccccacctccaggtctgtcaagtggcctttgtccctggggctgatggcccccaactcaccagcatcatgaccttgtgccagtcctggtcctccctccccagccgcccctaccaccttttggtgccacacttctcaggctggccgccctggttggggcagccgagagcctggggttcattggtgaaggggccttggagttgtgactgccggggccgtatcaggaacgtacgggtaaacgtgtgttttctggaaaaaaaaaagcacacaaaacacaacacagtgggcgccgcccagccccccggaaaagtctcaagaccactcgtttggggggcgccccacacgagtaagtaccctgccaagcggtcccacaggccccggcagcagcgtggtctcaccaaaacgcggggccgcgggtcgccaccgaggtcggcacggctcaaggcagcgcaaacccccggga

SEQ ID NO: 436050 - DNA, 1784 bp, Homo sapiens
ttacctatatgtggttccaccgcgtcgactagtacggttgggggttaccgggggccatggagctccgagcggcggatcgcgagcctcctgcgaaccccagcctgcacgcccggttagcattcggccgggagatgcggcagtggaatctggaagggcggtgaaaaacctacgtcctgccctcgcccggcctctccattcgtcccccgggtagagaggtgcccggctcccaccccttcccagccccagccctggagacagcagcccctagactactgagggacagcgacagcatgaaggctccgggtcggctcgtgctcatcatcctgtgctccgtggtcttctctgccgtctacatcctcctgtgctgctgggccggcctgcccctctgcctggccacctgcctggaccaccacttccccacaggctccaggcccactgtgccgggacccctgcacttcagtggatatagcagtgtgccagatgggaagccgctggtccgcgagccctgccgcagctgtgccgtggtgtccagctccggccaaatgctgggctcaggcctgggtgctgagatcgacagtgccgagtgcgtgttccgcatgaaccaggcgcccaccgtgggctttgaggcggatgtgggccagcgcagcaccctgcgtgtcgtctcacacacaagcgtgccgctgctgctgcgcaactattcacactacttccagaaggcccgagacacgctctacatggtgtggggccagggcaggcacatggaccgggtgctcggcggccgcacctaccgcacgctgctgcagctcaccaggatgtaccccggcctgcaggtgtacaccttcacggagcgcatgatggcctactgcgaccagatcttccaggacgagacgggcaagaaccggaggcagtcgggctccttcctcagcaccggctggttcaccatgatcctcgcgctggagctgtgtgaggagatcgtggtctatgggatggtcagcgacactactgcagggagaagagccacccctcagtgccttaccactactttgagaagggccggctagatgagtgtcagatgtacctggcacacgagcaggcgccccgaagcgcccaccgcttcatcactgagaaggcggtcttctcccgctgggccaagaagaggcccatcgtgttcgcccatccgtcctggaggactgagtagcttccgtcgtcctgccagccgccatgccgttgcgaggcctccgggatgtcccatcccaagccatcacactccacaaaaacatttaatttatggatcctgcctcctgccacgtgctgggtggacctaaggttccttctccactccctgagtaattcatggcatttgggggctcaccccacctccaggtctgtcaagtggcctttgtccctggggctgatggcccccaactcaccagcatcatgaccttgtgccagtcctggtcctccctccccagccgcccctaccaccttttggtgccacacttctcaggctggccgccctggttggggcagccgagagcctggggttcattggtgaaggggccttggagttgtgactgccggggccgtatcaggaacgtacgggtaaacgtgtgttttctggatgctgtctctagcgtggtcatgtgtctgatgtgtttaggggtggagatgagggtttctttccctgtcacagtcccagaagctttttttttccattttttcattttgcttgtttttctattgaggacggagtcatgctctgtcgccaaggctcgatcattgct

SEQ ID NO: 436051 - DNA, 1829 bp, Homo sapiens
ctgcctctggccgcgcggatcagcttccagcccagtcggcccggcccgggggccatggagctccgagcggcggatcgcgagcctcctgcgaaccccagcctgcacgcccggttagcattcggccgggagatgcggcagtggaatctggaagggcggtgaaaaacctacgtcctgccctcgcccggcctctccattcgtcccccgggtagagaggtgcccggctcccaccccttcccagccccagccctggagacagcagcccctagactactgagggacagcgacagcatgaaggctccgggtcggctcgtgctcatcatcctgtgctccgtggtcttctctgccgtctacatcctcctgtgctgctgggccggcctgcccctctgcctggccacctgcctggaccaccacttccccacaggctccaggcccactgtgccgggacccctgcacttcagtggatatagcagtgtgccagatgggaagccgctggtccgcgagccctgccgcagctgtgccgtggtgtccagctccggccaaatgctgggctcaggcctgggtgctgagatcgacagtgccgagtgcgtgttccgcatgaaccaggcgcccaccgtgggctttgaggcggatgtgggccagcgcagcaccctgcgtgtcgtctcacacacaagcgtgccgctgctgctgcgcaactattcacactacttccagaaggcccgagacacgctctacatggtgtggggccagggcaggcacatggaccgggtgctcggcggccgcacctaccgcacgctgctgcagctcaccaggatgtaccccggcctgcaggtgtacaccttcacggagcgcatgatggcctactgcgaccagatcttccaggacgagacgggcaagaaccggaggcagtcgggctccttcctcagcaccggctggttcaccatgatcctcgcgctggagctgtgtgaggagatcgtggtctatgggatggtcagcgacactactgcagggagaagagccacccctcagtgccttaccactactttgagaagggccggctagatgagtgtcagatgtacctggcacacgagcaggcgccccgaagcgcccaccgcttcatcactgagaaggcggtcttctcccgctgggccaagaagaggcccatcgtgttcgcccatccgtcctggaggactgagtagcttccgtcgtcctgccagccgccatgccgttgcgaggcctccgggatgtcccatcccaagccatcacactccacaaaaacatttaatttatggatcctgcctcctgccacgtgctgggtggacctaaggttccttctccactccctgagtaattcatggcatttgggggctcaccccacctccaggtctgtcaagtggcctttgtccctggggctgatggcccccaactcaccagcatcatgaccttgtgccagtcctggtcctccctccccagccgcccctaccaccttttggtgccacacttctcaggctggccgccctggttggggcagccgagagcctggggttcattggtgaaggggccttggagttgtgactgccggggccgtatcaggaacgtacgggtaaacgtgtgttttctggaaaaaaaaaagcacacaaaacacaacacagtgggcgccgcccagccccccggaaaagtctcaagaccactcgtttggggggcgccccacacgagtaagtaccctgccaagcggtcccacaggccccggcagcagcgtggtctcaccaaaacgcggggccgcgggtcgccaccgaggtcggcacggctcaaggcagcgcaaacccccggga

SEQ ID NO: 436052 - DNA, 1913 bp, Homo sapiens
ttacctatatgtggttccaccgcgtcgactagtacggttgggggttaccgggggccatggagctccgagcggcggatcgcgagcctcctgcgaaccccagcctgcacgcccggttagcattcggccgggagatgcggcagtggaatctggaagggcggtgaaaaacctacgtcctgccctcgcccggcctctccattcgtcccccgggtagagaggtgcccggctcccaccccttcccagccccagccctggagacagcagcccctagactactgagggacagcgacagcatgaaggctccgggtcggctcgtgctcatcatcctgtgctccgtggtcttctctgccgtctacatcctcctgtgctgctgggccggcctgcccctctgcctggccacctgcctggaccaccacttccccacaggctccaggcccactgtgccgggacccctgcacttcagtggatatagcagtgtgccagatgggaagccgctggtccgcgagccctgccgcagctgtgccgtggtgtccagctccggccaaatgctgggctcaggcctgggtgctgagatcgacagtgccgagtgcgtgttccgcatgaaccaggcgcccaccgtgggctttgaggcggatgtgggccagcgcagcaccctgcgtgtcgtctcacacacaagcgtgccgctgctgctgcgcaactattcacactacttccagaaggcccgagacacgctctacatggtgtggggccagggcaggcacatggaccgggtgctcggcggccgcacctaccgcacgctgctgcagctcaccaggatgtaccccggcctgcaggtgtacaccttcacggagcgcatgatggcctactgcgaccagatcttccaggacgagacgggcaagaaccggaggcagtcgggctccttcctcagcaccggctggttcaccatgatcctcgcgctggagctgtgtgaggagatcgtggtctatgggatggtcagcgacactactgcagggagaagagccacccctcagtgccttaccactactttgagaagggccggctagatgagtgtcagatgtacctggcacacgagcaggcgccccgaagcgcccaccgcttcatcactgagaaggcggtcttctcccgctgggccaagaagaggcccatcgtgttcgcccatccgtcctggaggactgagtagcttccgtcgtcctgccagccgccatgccgttgcgaggcctccgggatgtcccatcccaagccatcacactccacaaaaacatttaatttatggatcctgcctcctgccacgtgctgggtggacctaaggttccttcccaccccattctggcgacacttggagccatctcaggcctcatgacttgaaggggagtggagggggagccgtgtctccccccctccactccctgagtaattcatggcatttgggggctcaccccacctccaggtctgtcaagtggcctttgtccctggggctgatggcccccaactcaccagcatcatgaccttgtgccagtcctggtcctccctccccagccgcccctaccaccttttggtgccacacttctcaggctggccgccctggttggggcagccgagagcctggggttcattggtgaaggggccttggagttgtgactgccggggccgtatcaggaacgtacgggtaaacgtgtgttttctggaaaaaaaaaagcacacaaaacacaacacagtgggcgccgcccagccccccggaaaagtctcaagaccactcgtttggggggcgccccacacgagtaagtaccctgccaagcggtcccacaggccccggcagcagcgtggtctcaccaaaacgcggggccgcgggtcgccaccgaggtcggcacggctcaaggcagcgcaaacccccggga

SEQ ID NO: 436053 - DNA, 2232 bp, Homo sapiens
ctgcctctggccgcgcggatcagcttccagcccagtcggcccggcccgggggccatggagctccgagcggcggatcgcgagcctcctgcgaaccccagcctgcacgcccggttagcattcggccgggagatgcggcagtggaatctggaagggcggtgaaaaacctacgtcctgccctcgcccggcctctccattcgtcccccgggtagagaggtgcccggctcccaccccttcccagccccagccctggagacagcagcccctagactactgagggacagcgacagcatgaaggctccgggtcggctcgtgctcatcatcctgtgctccgtggtcttctctgccgtctacatcctcctgtgctgctgggccggcctgcccctctgcctggccacctgcctggaccaccacttccccacaggctccaggcccactgtgccgggacccctgcacttcagtggatatagcagtgtgccagatgggaagccgctggtccgcgagccctgccgcagctgtgccgtggtgtccagctccggccaaatgctgggctcaggcctgggtgctgagatcgacagtgccgagtgcgtgttccgcatgaaccaggcgcccaccgtgggctttgaggcggatgtgggccagcgcagcaccctgcgtgtcgtctcacacacaagcgtgccgctgctgctgcgcaactattcacactacttccagaaggcccgagacacgctctacatggtgtggggccagggcaggcacatggaccgggtgctcggcggccgcacctaccgcacgctgctgcagctcaccaggatgtaccccggcctgcaggtgtacaccttcacggagcgcatgatggcctactgcgaccagatcttccaggacgagacgggcaagaaccgactggtcatgaggctcagagaggttcacgagcaaatgtgatgcccatagcagagccagggttcaagtggaagatccttggactctagagaacccccacctgacttcaaaccacggtgccctgctgcctcatgctgtctccccaggcctggtcccttagatgaggagaggacgtggccagagcccccacacccatcatccaggggtttgctcaaaccctgcaaagcgtagctgggcccgagccccgctgggtgctgaggaggtgatcaggcctgggtttgtgtgccgctctgcctgtcacccactgctggccttgggctggctctgtcccctccccagcctcccccagagccccccgcaagaggttgaggtgcatagccccgggctggcaaagtaccaagtgctgctggggcctggagctaccacatggcctcttgttgacagcgtccccctgtccccccgccacccccaggaggcagtcgggctccttcctcagcaccggctggttcaccatgatcctcgcgctggagctgtgtgaggagatcgtggtctatgggatggtcagcgacactactgcagggagaagagccacccctcagtgccttaccactactttgagaagggccggctagatgagtgtcagatgtacctggcacacgagcaggcgccccgaagcgcccaccgcttcatcactgagaaggcggtcttctcccgctgggccaagaagaggcccatcgtgttcgcccatccgtcctggaggactgagtagcttccgtcgtcctgccagccgccatgccgttgcgaggcctccgggatgtcccatcccaagccatcacactccactccctgagtaattcatggcatttgggggctcaccccacctccaggtctgtcaagtggcctttgtccctggggctgatggcccccaactcaccagcatcatgaccttgtgccagtcctggtcctccctccccagccgcccctaccaccttttggtgccacacttctcaggctggccgccctggttggggcagccgagagcctggggttcattggtgaaggggccttggagttgtgactgccggggccgtatcaggaacgtacgggtaaacgtgtgttttctggaaaaaaaaaagcacacaaaacacaacacagtgggcgccgcccagccccccggaaaagtctcaagaccactcgtttggggggcgccccacacgagtaagtaccctgccaagcggtcccacaggccccggcagcagcgtggtctcaccaaaacgcggggccgcgggtcgccaccgaggtcggcacggctcaaggcagcgcaaacccccggga

SEQ ID NO: 436054 - DNA, 1782 bp, Homo sapiens
ttacctatatgtggttccaccgcgtcgactagtacggttgggggttaccgggggccatggagctccgagcggcggatcgcgagcctcctgcgaaccccagcctgcacgcccggttagcattcggccgggagatgcggcagtggaatctggaagggcggtgaaaaacctacgtcctgccctcgcccggcctctccattcgtcccccgggtagagagggtcggctcgtgctcatcatcctgtgctccgtggtcttctctgccgtctacatcctcctgtgctgctgggccggcctgcccctctgcctggccacctgcctggaccaccacttccccacaggctccaggcccactgtgccgggacccctgcacttcagtggatatagcagtgtgccagatgggaagccgctggtccgcgagccctgccgcagctgtgccgtggtgtccagctccggccaaatgctgggctcaggcctgggtgctgagatcgacagtgccgagtgcgtgttccgcatgaaccaggcgcccaccgtgggctttgaggcggatgtgggccagcgcagcaccctgcgtgtcgtctcacacacaagcgtgccgctgctgctgcgcaactattcacactacttccagaaggcccgagacacgctctacatggtgtggggccagggcaggcacatggaccgggtgctcggcggccgcacctaccgcacgctgctgcagctcaccaggatgtaccccggcctgcaggtgtacaccttcacggagcgcatgatggcctactgcgaccagatcttccaggacgagacgggcaagaaccggaggcagtcgggctccttcctcagcaccggctggttcaccatgatcctcgcgctggagctgtgtgaggagatcgtggtctatgggatggtcagcgacactactgcagggagaagagccacccctcagtgccttaccactactttgagaagggccggctagatgagtgtcagatgtacctggcacacgagcaggcgccccgaagcgcccaccgcttcatcactgagaaggcggtcttctcccgctgggccaagaagaggcccatcgtgttcgcccatccgtcctggaggactgagtagcttccgtcgtcctgccagccgccatgccgttgcgaggcctccgggatgtcccatcccaagccatcacactccacaaaaacatttaatttatggatcctgcctcctgccacgtgctgggtggacctaaggttccttcccaccccattctggcgacacttggagccatctcaggcctccactccctgagtaattcatggcatttgggggctcaccccacctccaggtctgtcaagtggcctttgtccctggggctgatggcccccaactcaccagcatcatgaccttgtgccagtcctggtcctccctccccagccgcccctaccaccttttggtgccacacttctcaggctggccgccctggttggggcagccgagagcctggggttcattggtgaaggggccttggagttgtgactgccggggccgtatcaggaacgtacgggtaaacgtgtgttttctggaaaaaaaaaagcacacaaaacacaacacagtgggcgccgcccagccccccggaaaagtctcaagaccactcgtttggggggcgccccacacgagtaagtaccctgccaagcggtcccacaggccccggcagcagcgtggtctcaccaaaacgcggggccgcgggtcgccaccgaggtcggcacggctcaaggcagcgcaaacccccggga

SEQ ID NO: 436055 - DNA, 1349 bp, Homo sapiens
ctgcctctggccgcgcggatcagcttccagcccagtcggcccggcccgggggccatggagctccgagcggcggatcgcgagcctcctgcgaaccccagcctgcacgcccggttagcattcggccgggagatgcggcagtggaatctggaagggcggtgaaaaacctacgtcctgccctcgcccggcctctccattcgtcccccgggtagagaggtgcccggctcccaccccttcccagccccagccctggagacagcagcccctagactactgagggacagcgacagcatgaaggctccgggtcggctcgtgctcatcatcctgtgctccgtggtcttctctgccgtctacatcctcctgtgctgctgggccggcctgcccctctgcctggccacctgcctggaccaccacttccccacaggctccaggcccactgtgccgggacccctgcacttcagtggatatagcagtgtgccagatgggaaggaggcagtcgggctccttcctcagcaccggctggttcaccatgatcctcgcgctggagctgtgtgaggagatcgtggtctatgggatggtcagcgacactactgcagggagaagagccacccctcagtgccttaccactactttgagaagggccggctagatgagtgtcagatgtacctggcacacgagcaggcgccccgaagcgcccaccgcttcatcactgagaaggcggtcttctcccgctgggccaagaagaggcccatcgtgttcgcccatccgtcctggaggactgagtagcttccgtcgtcctgccagccgccatgccgttgcgaggcctccgggatgtcccatcccaagccatcacactccactccctgagtaattcatggcatttgggggctcaccccacctccaggtctgtcaagtggcctttgtccctggggctgatggcccccaactcaccagcatcatgaccttgtgccagtcctggtcctccctccccagccgcccctaccaccttttggtgccacacttctcaggctggccgccctggttggggcagccgagagcctggggttcattggtgaaggggccttggagttgtgactgccggggccgtatcaggaacgtacgggtaaacgtgtgttttctggaaaaaaaaaagcacacaaaacacaacacagtgggcgccgcccagccccccggaaaagtctcaagaccactcgtttggggggcgccccacacgagtaagtaccctgccaagcggtcccacaggccccggcagcagcgtggtctcaccaaaacgcggggccgcgggtcgccaccgaggtcggcacggctcaaggcagcgcaaacccccggga

SEQ ID NO: 436056 - DNA, 980 bp, Homo sapiens
gcgtccatctctggcccagagtcatccagcttgcaagaggcagagcagtgactcgaaccctggctctcgggatctgctactcccctatgtgtcttggcctccccagggatcaggcgtgggtcttcacgagcccatggcctggcgaggggtggtcaaggtaggcggcagggtgtggccggagagtggggttctgtcccaccccagccctgttccccaccccgcagggagaagagccacccctcagtgccttaccactactttgagaagggccggctagatgagtgtcagatgtacctggcacacgagcaggcgccccgaagcgcccaccgcttcatcactgagaaggcggtcttctcccgctgggccaagaagaggcccatcgtgttcgcccatccgtcctggaggactgagtagcttccgtcgtcctgccagccgccatgccgttgcgaggcctccgggatgtcccatcccaagccatcacactccactccctgagtaattcatggcatttgggggctcaccccacctccaggtctgtcaagtggcctttgtccctggggctgatggcccccaactcaccagcatcatgaccttgtgccagtcctggtcctccctccccagccgcccctaccaccttttggtgccacacttctcaggctggccgccctggttggggcagccgagagcctggggttcattggtgaaggggccttggagttgtgactgccggggccgtatcaggaacgtacgggtaaacgtgtgttttctggaaaaaaaaaagcacacaaaacacaacacagtgggcgccgcccagccccccggaaaagtctcaagaccactcgtttggggggcgccccacacgagtaagtaccctgccaagcggtcccacaggccccggcagcagcgtggtctcaccaaaacgcggggccgcgggtcgccaccgaggtcggcacggctcaaggcagcgcaaacccccggga

SEQ ID NO: 436057 - DNA, 732 bp, Homo sapiens
ctgcctctggccgcgcggatcagcttccagcccagtcggcccggcccgggggccatggagctccgagcggcggatcgcgagcctcctgcgaaccccagcctgcacgcccggttagcattcggccgggagatgcggcagtggaatctggaagggcggtgaaaaacctacgtcctgccctcgcccggcctctccattcgtcccccgggtagagaggtgcccggctcccaccccttcccagccccagccctggagacagcagcccctagactactgagggacagcgacagcatgaaggctccggtaagtgggaagaaggaggacttccagggaacgcagaggccccgactggcggagcagctcagcagcctctccaccccaggacccactgccacttctgacctccctactgctgagcagagaagggcagaatggcctcaaagtccaaccctgttcttgcagaccgtgtggccccaggcaggtggcatccactctgcagtgtcagtaccttgctatccctgtaaaacggaggtaacgctacgagctcaccaggcaaagcctacgtggaactggggttgtgaagttcagttcagccgctcttgtctttactgcagaagccccgggctgtgagagagagagctggatgtggggggcagttcatctcgactgcctgagtcaaggtctctggttcctcatgggcaggggagcaggtgccaggcagaactccctcccctg

SEQ ID NO: 436058 - DNA, 1744 bp, Homo sapiens
ttacctatatgtggttccaccgcgtcgactagtacggttgggggttaccgggggccatggagctccgagcggcggatcgcgagcctcctgcgaaccccagcctgcacgcccggttagcattcggccgggagatgcggcagtggaatctggaagggcggtgaaaaacctacgtcctgccctcgcccggcctctccattcgtcccccgggtagagaggtgcccggctcccaccccttcccagccccagccctggagacagcagcccctagactactgagggacagcgacagcatgaaggctccgggtcggctcgtgctcatcatcctgtgctccgtggtcttctctgccgtctacatcctcctgtgctgctgggccggcctgcccctctgcctggccacctgcctggaccaccacttccccacaggctccaggcccactgtgccgggacccctgcacttcagtggatatagcagtgtgccagatgggaagccgctggtccgcgagccctgccgcagctgtgccgtggtgtccagctccggccaaatgctgggctcaggcctgggtgctgagatcgacagtgccgagtgcgtgttccgcatgaaccaggcgcccaccgtgggctttgaggcggatgtgggccagcgcagcaccctgcgtgtcgtctcacacacaagcgtgccgctgctgctgcgcaactattcacactacttccagaaggcccgagacacgctctacatggtgtggggccagggcaggcacatggaccgggtgctcggcggccgcacctaccgcacgctgctgcagctcaccaggatgtaccccggcctgcaggtgtacaccttcacggagcgcatgatggcctactgcgaccagatcttccaggacgagacgggcaagaaccggaggcagtcgggctccttcctcagcaccggctggttcaccatgatcctcgcgctggagctgtgtgaggagatcgtggtctatgggatggtcagcgacactactgcagggagaagagccacccctcagtgccttaccactactttgagaagggccggctagatgagtgtcagatgtacctggcacacgagcaggcgccccgaagcgcccaccgcttcatcactgagaaggcggtcttctcccgctgggccaagaagaggcccatcgtgttcgcccatccgtcctggaggactgagtagcttccgtcgtcctgccagccgccatgccgttgcgaggcctccgggatgtcccatcccaagccatcacactccacaaaaacatttaatttatggatcctgcctcctgccacgtgctgggtggacctaaggttccttctccactccctgagtaattcatggcatttgggggctcaccccacctccaggtctgtcaagtggcctttgtccctggggctgatggcccccaactcaccaccgcccctaccaccttttggtgccacacttctcaggctggccgccctggttggggcagccgagagcctggggttcattggtgaaggggccttggagttgtgactgccggggccgtatcaggaacgtacgggtaaacgtgtgttttctggatgctgtctctagcgtggtcatgtgtctgatgtgtttaggggtggagatgagggtttctttccctgtcacagtcccagaagctttttttttccattttttcattttgcttgtttttctattgaggacggagtcatgctctgtcgccaaggctcgatcattgct

SEQ ID NO: 436059 - DNA, 1867 bp, Homo sapiens
ctgcctctggccgcgcggatcagcttccagcccagtcggcccggcccgggggccatggagctccgagcggcggatcgcgagcctcctgcgaaccccagcctgcacgcccggttagcattcggccgggagatgcggcagtggaatctggaagggcggtgaaaaacctacgtcctgccctcgcccggcctctccattcgtcccccgggtagagaggtgcccggctcccaccccttcccagccccagccctggagacagcagcccctagactactgagggacagcgacagcatgaaggctccgggtcggctcgtgctcatcatcctgtgctccgtggtcttctctgccgtctacatcctcctgtgctgctgggccggcctgcccctctgcctggccacctgcctggaccaccacttccccacaggctccaggcccactgtgccgggacccctgcacttcagtggatatagcagtgtgccagatgggaagccgctggtccgcgagccctgccgcagctgtgccgtggtgtccagctccggccaaatgctgggctcaggcctgggtgctgagatcgacagtgccgagtgcgtgttccgcatgaaccaggcgcccaccgtgggctttgaggcggatgtgggccagcgcagcaccctgcgtgtcgtctcacacacaagcgtgccgctgctgctgcgcaactattcacactacttccagaaggcccgagacacgctctacatggtgtggggccagggcaggcacatggaccgggtgctcggcggccgcacctaccgcacgctgctgcagctcaccaggatgtaccccggcctgcaggtgtacaccttcacggagcgcatgatggcctactgcgaccagatcttccaggacgagacgggcaagaaccggaggcagtcgggctccttcctcagcaccggctggttcaccatgatcctcgcgctggagctgtgtgaggagatcgtggtctatgggatggtcagcgacactactgcagggagaagagccacccctcagtgccttaccactactttgagaagggccggctagatgagtgtcagatgtacctggcacacgagcaggcgccccgaagcgcccaccgcttcatcactgagaaggcggtcttctcccgctgggccaagaagaggcccatcgtgttcgcccatccgtcctggaggactgagtagcttccgtcgtcctgccagccgccatgccgttgcgaggcctccgggatgtcccatcccaagccatcacactccacaaaaacatttaatttatggatcctgcctcctgccacgtgctgggtggacctaaggttccttcccaccccattctggcgacacttggagccatctcaggcctccactccctgagtaattcatggcatttgggggctcaccccacctccaggtctgtcaagtggcctttgtccctggggctgatggcccccaactcaccagcatcatgaccttgtgccagtcctggtcctccctccccagccgcccctaccaccttttggtgccacacttctcaggctggccgccctggttggggcagccgagagcctggggttcattggtgaaggggccttggagttgtgactgccggggccgtatcaggaacgtacgggtaaacgtgtgttttctggaaaaaaaaaagcacacaaaacacaacacagtgggcgccgcccagccccccggaaaagtctcaagaccactcgtttggggggcgccccacacgagtaagtaccctgccaagcggtcccacaggccccggcagcagcgtggtctcaccaaaacgcggggccgcgggtcgccaccgaggtcggcacggctcaaggcagcgcaaacccccggga

SEQ ID NO: 436060 - DNA, 1762 bp, Homo sapiens
ctgcctctggccgcgcggatcagcttccagcccagtcggcccggcccgggggccatggagctccgagcggcggatcgcgagcctcctgcgaaccccagcctgcacgcccggttagcattcggccgggagatgcggcagtggaatctggaagggcggtgaaaaacctacgtcctgccctcgcccggcctctccattcgtcccccgggtagagaggtgcccggctcccaccccttcccagccccagccctggagacagcagcccctagactactgagggacagcgacagcatgaaggctccgggtcggctcgtgctcatcatcctgtgctccgtggtcttctctgccgtctacatcctcctgtgctgctgggccggcctgcccctctgcctggccacctgcctggaccaccacttccccacaggctccaggcccactgtgccgggacccctgcacttcagtggatatagcagtgtgccagatgggaagccgctggtccgcgagccctgccgcagctgtgccgtggtgtccagctccggccaaatgctgggctcaggcctgggtgctgagatcgacagtgccgagtgcgtgttccgcatgaaccaggcgcccaccgtgggctttgaggcggatgtgggccagcgcagcaccctgcgtgtcgtctcacacacaagcgtgccgctgctgctgcgcaactattcacactacttccagaaggcccgagacacgctctacatggtgtggggccagggcaggcacatggaccgggtgctcggcggccgcacctaccgcacgctgctgcagctcaccaggatgtaccccggcctgcaggtgtacaccttcacggagcgcatgatggcctactgcgaccagatcttccaggacgagacgggcaagaaccggaggcagtcgggctccttcctcagcaccggctggttcaccatgatcctcgcgctggagctgtgtgaggagatcgtggtctatgggatggtcagcgacactactgcagggagaagagccacccctcagtgccttaccactactttgagaagggccggctagatgagtgtcagatgtacctggcacacgagcaggcgccccgaagcgcccaccgcttcatcactgagaaggcggtcttctcccgctgggccaagaagaggcccatcgtgttcgcccatccgtcctggaggactgagtagcttccgtcgtcctgccagccgccatgccgttgcgaggcctccgggatgtcccatcccaagccatcacactccactccctgagtaattcatggcatttgggggctcaccccacctccaggtctgtcaagtggcctttgtccctggggctgatggcccccaactcaccagcatcatgaccttgtgccagtcctggtcctccctccccagccgcccctaccaccttttggtgccacacttctcaggctggccgccctggttggggcagccgagagcctggggttcattggtgaaggggccttggagttgtgactgccggggccgtatcaggaacgtacgggtaaacgtgtgttttctggaaaaaaaaaagcacacaaaacacaacacagtgggcgccgcccagccccccggaaaagtctcaagaccactcgtttggggggcgccccacacgagtaagtaccctgccaagcggtcccacaggccccggcagcagcgtggtctcaccaaaacgcggggccgcgggtcgccaccgaggtcggcacggctcaaggcagcgcaaacccccggga

SEQ ID NO: 436061 - DNA, 1568 bp, Homo sapiens
ctgcctctggccgcgcggatcagcttccagcccagtcggcccggcccgggggccatggagctccgagcggcggatcgcgagcctcctgcgaaccccagcctgcacgcccggttagcattcggccgggagatgcggcagtggaatctggaagggcggtgaaaaacctacgtcctgccctcgcccggcctctccattcgtcccccgggtagagaggtgcccggctcccaccccttcccagccccagccctggagacagcagcccctagactactgagggacagcgacagcatgaaggctccgggtcggctcgtgctcatcatcctgtgctccgtggtcttctctgccgtctacatcctcctgtgctgctgggccggcctgcccctctgcctggccacctgcctggaccaccacttccccacaggctccaggcccactgtgccgggacccctgcacttcagtggatatagcagtgtgccagatgggaagccgctggtccgcgagccctgccgcagctgtgccgtggtgtccagctccggccaaatgctgggctcaggcctgggtgctgagatcgacagtgccgagtgcgtgttccgcatgaaccaggcgcccaccgtgggctttgaggcggatgtgggccagcgcagcaccctgcgtgtcgtctcacacacaagcgtgccgctgctgctgcgcaactattcacactacttccagaaggcccgagacacgctctacatggtgtggggccagggcaggcacatggaccgggtgctcggcggccgcacctaccgcacgctgctgcagctcaccaggatgtaccccggcctgcaggtgtacaccttcacggagcgcatgatggcctactgcgaccagatcttccaggacgagacgggcaagaaccgggagaagagccacccctcagtgccttaccactactttgagaagggccggctagatgagtgtcagatgtacctggcacacgagcaggcgccccgaagcgcccaccgcttcatcactgagaaggcggtcttctcccgctgggccaagaagaggcccatcgtgttcgcccatccgtcctggaggactgagtagcttccgtcgtcctgccagccgccatgccgttgcgaggcctccgggatgtcccatcccaagccatcacactccactccctgagtaattcatggcatttgggggctcaccccacctccaggtctgtcaagtggcctttgtccctggggctgatggcccccaactcaccaccgcccctaccaccttttggtgccacacttctcaggctggccgccctggttggggcagccgagagcctggggttcattggtgaaggggccttggagttgtgactgccggggccgtatcaggaacgtacgggtaaacgtgtgttttctggatgctgtctctagcgtggtcatgtgtctgatgtgtttaggggtggagatgagggtttctttccctgtcacagtcccagaagctttttttttccattttttcattttgcttgtttttctattgaggacggagtcatgctctgtcgccaaggctcgatcattgct

SEQ ID NO: 436062 - DNA, 984 bp, Homo sapiens
  misc_feature (934)..(934): n is a, c, g, or t
ttacctatatgtggttccaccgcgtcgactagtacggttgggggttaccgggggccatggagctccgagcggcggatcgcgagcctcctgcgaaccccagcctgcacgcccggttagcattcggccgggagatgcggcagtggaatctggaagggcggtgaaaaacctacgtcctgccctcgcccggcctctccattcgtcccccgggtagagagggtcggctcgtgctcatcatcctgtgctccgtggtcttctctgccgtctacatcctcctgtgctgctgggccggcctgcccctctgcctggccacctgcctggaccaccacttccccacaggctccaggcccactgtgccgggacccctgcacttcagtggatatagcagtgtgccagatgggaagccgctggtccgcgagccctgccgcagctgtgccgtggtgtccagctccggccaaatgctgggctcaggcctgggtgctgagatcgacagtgccgagtgcgtgttccgcatgaaccaggcgcccaccgtgggctttgaggcggatgtgggccagcgcagcaccctgcgtgtcgtctcacacacaagcgtgccgctgctgctgcgcaactattcacactacttccagaaggcccgagacacgctctacatggtgtggggccagggcaggcacatggaccgggtgctcggcggccgcacctaccgcacgctgctgcagctcaccaggatgtaccccggcctgcaggtgtacaccttcacggagcgcatgatggcctactgcgaccagatcttccaggacgagacgggcaagaaccggaggcagtcgggctccttcctcagcaccggctggttcaccatgatcctcgcgctggagctgtgtgaggagatcgtggtctatgggatggtcagcgacactactgcagaaaagagcacccntcaatgcttacactaattgaaaaggccggtaataggtgcaatgttcctgc

SEQ ID NO: 436063 - DNA, 364 bp, Homo sapiens
gcctactgcgaccagatcttccaggacgagacgggcaagaaccggtgagcctggggcctgcctgctggggtctctctggcagctggggccttccttctctgggagtctcttgtccatcaggggctgctctgtcaggcccgggaggtcagcactcatggaggcagacatggtcctgccctctaatggggggcaggaggcagaggggatgtcactcaggaaactgtcacacagatctagaatcccagatggtgttgagggctgtcaggccttttgagcacctgatgggaagcactagccagtgtgtaggggcatgagggagcacttctctctggagggaatggtctgtctaacttggtctctgata

SEQ ID NO: 436064 - DNA, 5536 bp, Homo sapiens
  misc_feature (2302)..(2302): n is a, c, g, or t
ggccttcgggagggggacagaacttaggagtcagccctctgccttcgtacaaaggctcgcttctcctcagggcgtctctgggtggagcgaagcggccgaggggaccacgacaatgtccctttgcttttcggaccgatggccaggcctccagagccaggagcgcccgggaccccagggcagggagcaaagctcataccgcaaccccgccacccgcccgcgccctgccagcctgttggggccacagcgcgcaggccagcagccgcactcgccgctgcggggttccctttgcgctgagctcatctcctgcaacgccgctgccccaaaccttgcgggccatttggtcccgggggtggggctccttgggggccgcggggcagcccggatgagaggatgacccgggagctccctgggggcggagtggaaggggcagctccaggcagccctggccaggagcttttaccccgccagccccgctgctccagcggccgctgccttagaaaagttaacgagaaccagatgtggtggccactgccgaactttctcagagccggtgattggtccccagccgagggcctcagccaattagcttgctgggtgggcctggagtcccgccccgcccaggcgcccgcggagatccaggttcgaggctggcgcggcgcggagagtgggctggaggccggggcgggacgcgttgtgcagcgggtaagcgcacggccgagcgagcatggagggggaccgggtggccgggcggccggtgctgtcgtcgttaccagtgctactgctgctgcagttgctaatgttgcgggccgcggcgctgcacccagacgagctcttcccacacggggagtcgtggggggaccagctcctgcaggaaggcgacgacgaaagctcagccgtggtgaagctggcgaatcccctgcacttctacgaagcccgattcagcaacctctacgtgggcaccaacggcatcatctccactcaggacttccccagggaaacgcagtatgtggactatgatttccccaccgacttcccggccatcgccccttttctggcggacatcgacacgagccacggcagaggccgagtcctgtaccgagaggacacctcccccgcagtgctgggcctggccgcccgctatgtgcgcgctggcttcccgcgctctgcgcgctttacccccacccacgccttcctggccacctgggagcaggtaggcgcttacgaggaggtcaagcgcggggcgctgccctcgggagagctgaacactttccaggcagttttggcatctgatgggtctgatagctacgccctctttctttatcctgccaacggcctgcagttccttggaacccgccccaaagagtcttacaatgtccagcttcagcttccagctcgggtgggcttctgccgaggggaggctgatgatctgaagtcagaaggaccatatttcagcttgactagcactgaacagtctgtgaaaaatctctatcaactaagcaacctggggatccctggagtgtgggctttccatatcggcagcacttccccgttggacaatgtcaggccagctgcagttggagacctttccgctgcccactcttctgttcccctgggacgttccttcagccatgctacagccctggaaagtgactataatgaggacaatttggattactacgatgtgaatgaggaggaagctgaataccttccgggtgaaccagaggaggcattgaatggccacagcagcattgatgtttccttccaatccaaagtggatacaaagcctttagaggaatcttccaccttggatcctcacaccaaagaaggaacatctctgggagaggtagggggcccagatttaaaaggccaagttgagccctgggatgagagagagaccagaagcccagctccaccagaggtagacagagattcactggctccttcctgggaaaccccaccaccgtaccccgaaaacggaagcatccagccctacccagatggagggccagtgccttcggaaatggatgttcccccagctcatcctgaagaagaaattgttcttcgaagttaccctgcttcaggtcacactacacccttaagtcgagggacgtatgaggtgggactggaagacaacataggttccaacaccgaggtcttcacgtataatgctgccaacaaggaaacctgtgaacacaaccacagacaatgctcccggcatgccttctgcacggactatgccactggcttctgctgccactgccaatccaagttttatggaaatgggaagcactgtctgcctganggggcacctcaccgagtgaatgggaaagtgagtggccacctccacgtgggccatacacccgtgcacttcactgatgtggacctgcatgcgtatatcgtgggcaatgatggcagagcctacacggccatcagccacatcccacagccagcagcccaggccctcctccccctcacaccaattggaggcctgtttggctggctctttgctttagaaaaacctggctctgagaacggcttcagcctcgcaggtgctgcctttacccatgacatggaagttacattctacccgggagaggagacggttcgtatcactcaaactgctgagggacttgacccagagaactacctgagcattaagaccaacattcaaggccaggtgccttacgtcccagcaaatttcacagcccacatctctccctacaaggagctgtaccactactccgactccactgtgacctctacaagttccagagactactctctgacttttggtgcaatcaaccaaacatggtcctaccgcatccaccagaacatcacttaccaggtgtgcaggcacgcccccagacacccgtccttccccaccacccagcagctgaacgtggaccgggtctttgccttgtataatgacgaagaaagagtgcttagatttgctgtgaccaatcaaattggcccggtcaaagaagattcagaccccactccggtgaatccttgctatgatgggagccacatgtgtgacacaacagcacggtgccatccagggacaggtgtagattacacctgtgagtgcgcatctgggtaccagggagatggacggaactgtgtggatgaaaatgaatgtgcaactggctttcatcgctgtggccccaactctgtatgtatcaacttgcctggaagctacaggtgtgagtgccggagtggttatgagtttgcagatgaccggcatacttgcatcttgatcaccccacctgccaacccctgtgaggatggcagtcatacctgtgctcctgctgggcaggcccggtgtgttcaccatggaggcagcacgttcagctgtgcctgcctgcctggttatgccggcgatgggcaccagtgcactgatgtagatgaatgctcagaaaacagatgtcaccctgcagctacctgctacaatactcctggttccttctcctgccgttgtcaacccggatattatggggatggatttcagtgcatacctgactccacctcaagcctgacaccctgtgaacaacagcagcgccatgcccaggcccagtatgcctaccctggggcccggttccacatcccccaatgcgacgagcagggcaacttcctgcccctacagtgtcatggcagcactggtttctgctggtgcgtggaccctgatggtcatgaagttcctggtacccagactccacctggctccaccccgcctcactgtggaccatcaccagagcccacccagaggcccccgaccatctgtgagcgctggagggaaaacctgctggagcactacggtggcaccccccgagatgaccagtacgtgccccagtgcgatgacctgggccacttcatccccctgcagtgccacggaaagagcgacttctgctggtgtgtggacaaagatggcagagaggtgcagggcacccgctcccagccaggcaccacccctgcgtgtatacccaccgtcgctccacccatggtccggcccacgccccggccagatgtgacccctccatctgtgggcaccttcctgctctatactcagggccagcagattggctacttacccctcaatggcaccaggcttcagaaggatgcagctaagaccctgctgtctctgcatggctccataatcgtgggaattgattacgactgccgggagaggatggtgtactggacagatgttgctggacggacaatcagccgtgccggtctggaactgggagcagagcctgagacgatcgtgaattcaggtctgataagccctgaaggacttgccatagaccacatccgcagaacaatgtactggacggacagtgtcctggataagatagagagcgccctgctggatggctctgagcgcaaggtcctcttctacacagatctggtgaatccccgtgccatcgctgtggatccaatccgaggcaacttgtactggacagactggaatagagaagctcctaaaattgaaacgtcatctttagatggagaaaacagaagaattctgatcaatacagacattggattgcccaatggcttaacctttgaccctttctctaaactgctctgctgggcagatgcaggaaccaaaaaactggagtgtacactacctgatggaactggacggcgtgtcattcaaaacaacctcaagtaccccttcagcatcgtaagctatgcagatcacttctaccacacagactggaggagggatggtgttgtatcagtaaataaacatagtggccagtttactgatgagtatctcccagaacaacgatctcacctctacgggataactgcagtctacccctactgcccaacaggaagaaagtaagtacagtaatgtaaaggaagacttggagtttacaatcagaacctggaccctaaagaacagtgactgcaaaggcaaagaaagtaaaaaaggaattggccattagacgttcctgagcatccaagatgaacattttgtagtgcaaaaagacttttgtgaaaagctgatacctcaatctttactactgtatttttaaaaatgaaggttgttattgcaagtttaaaaaggtaacagaattttaactgttgcttattaaagcaacttcttgtaaacatttatcattaatatttaaaagatcaaattcattcaactaagaattagagtttaagactctaaacctgatttttgccatggattccttctggccaagaaattaaagcacatgtgatcaatataacaatataatcctaaaccttgacagttggagaagccaatgcagaactgatgggaaaggaccaattatttatagtttcccaacaaaagttctaagattttttacctctgcatcagtgcatttctatttatatcaaaaggtgctaaaatgattcaatttgcattttctgatcctgtagtgcctctatagaagtacccacagaaagtaaagtatcacatttataaataccaaagatgtaacaattttaaaattttctagattactccaataaagtgttttaagttttcctatga

SEQ ID NO: 436065 - DNA, 1261 bp, Homo sapiens
gcaaatataaatgctaaaggacttgaatttttaataaaaagaaaacccaccttgaaccaggttgcaatataacacatgtaattacatctccttcaactgcgtaacagaatggttgtcaagccttcctgcatatttctcatttgctttctatagatttcacctttacaactttcttcctctggcaatccccaaataatttacaccaaatatctgtgtgagcttgtttcagacttattgttgttgatgatattaaatcattttggggaggagactgatcagaagcgatgaagcaatgatatgcatgctgtaccctctggccacctccaccttagcgcaaagtggaaactgctttctagcttttgctctcagcttctctctgcttcatctgttgggcataagggatgaaattcgcaacaggggaaacctatggtttcttcctctcctctcactgaggttctctgtagcccaactgatttattcaaagcttctatagcttttataaaatagtattttataaaaagtgctttcaacattatttctgctctaacgataaacctgtttgtttccttataacctatttccacttaataggaccatatttcctcgttagtatctgttatgaatatatttcatttttaacgtggcatttaaaaggtaaagtgcttaacttaaaatgtttccatccctgggtgccaggtaccccttcaagtaccaaattgtatttttggcagaagaaagaacagtttccttctcaaatccctggtccacatctcttcaagttccatagtttgtatcgaagccattcctaacagctgtatttgtttctattctaaaacccaagatccaattcaagacttcaacaaacggagggttttggggcagttgagtcaaggggtatcttggaggcagggattctgatagtaacttagtaatgacttctcccacatagtgacaataatcagaaaaccttgtgatacaggtaaaagtggaatatggctgtgtattagttacctactgctgtgtaagaaattgcccaaaccctcagcagtgtaagataacatttagtctcacagtttctgtgagtcaggaatccaagtgtgtcttcaccgagctccctcaggcatggagtctctcacaaggctgcaatcaggtaatggccaaactgcagtgatcacaaggctcagctcggggaagacacagcccaagcatgctcacatgggctacaggcaagactaatgtctctggccaacagccctcaagg

SEQ ID NO: 436066 - DNA, 5471 bp, Homo sapiens
  misc_feature (2302)..(2302): n is a, c, g, or t
ggccttcgggagggggacagaacttaggagtcagccctctgccttcgtacaaaggctcgcttctcctcagggcgtctctgggtggagcgaagcggccgaggggaccacgacaatgtccctttgcttttcggaccgatggccaggcctccagagccaggagcgcccgggaccccagggcagggagcaaagctcataccgcaaccccgccacccgcccgcgccctgccagcctgttggggccacagcgcgcaggccagcagccgcactcgccgctgcggggttccctttgcgctgagctcatctcctgcaacgccgctgccccaaaccttgcgggccatttggtcccgggggtggggctccttgggggccgcggggcagcccggatgagaggatgacccgggagctccctgggggcggagtggaaggggcagctccaggcagccctggccaggagcttttaccccgccagccccgctgctccagcggccgctgccttagaaaagttaacgagaaccagatgtggtggccactgccgaactttctcagagccggtgattggtccccagccgagggcctcagccaattagcttgctgggtgggcctggagtcccgccccgcccaggcgcccgcggagatccaggttcgaggctggcgcggcgcggagagtgggctggaggccggggcgggacgcgttgtgcagcgggtaagcgcacggccgagcgagcatggagggggaccgggtggccgggcggccggtgctgtcgtcgttaccagtgctactgctgctgcagttgctaatgttgcgggccgcggcgctgcacccagacgagctcttcccacacggggagtcgtggggggaccagctcctgcaggaaggcgacgacgaaagctcagccgtggtgaagctggcgaatcccctgcacttctacgaagcccgattcagcaacctctacgtgggcaccaacggcatcatctccactcaggacttccccagggaaacgcagtatgtggactatgatttccccaccgacttcccggccatcgccccttttctggcggacatcgacacgagccacggcagaggccgagtcctgtaccgagaggacacctcccccgcagtgctgggcctggccgcccgctatgtgcgcgctggcttcccgcgctctgcgcgctttacccccacccacgccttcctggccacctgggagcaggtaggcgcttacgaggaggtcaagcgcggggcgctgccctcgggagagctgaacactttccaggcagttttggcatctgatgggtctgatagctacgccctctttctttatcctgccaacggcctgcagttccttggaacccgccccaaagagtcttacaatgtccagcttcagcttccagctcgggtgggcttctgccgaggggaggctgatgatctgaagtcagaaggaccatatttcagcttgactagcactgaacagtctgtgaaaaatctctatcaactaagcaacctggggatccctggagtgtgggctttccatatcggcagcacttccccgttggacaatgtcaggccagctgcagttggagacctttccgctgcccactcttctgttcccctgggacgttccttcagccatgctacagccctggaaagtgactataatgaggacaatttggattactacgatgtgaatgaggaggaagctgaataccttccgggtgaaccagaggaggcattgaatggccacagcagcattgatgtttccttccaatccaaagtggatacaaagcctttagaggaatcttccaccttggatcctcacaccaaagaaggaacatctctgggagaggtagggggcccagatttaaaaggccaagttgagccctgggatgagagagagaccagaagcccagctccaccagaggtagacagagattcactggctccttcctgggaaaccccaccaccgtaccccgaaaacggaagcatccagccctacccagatggagggccagtgccttcggaaatggatgttcccccagctcatcctgaagaagaaattgttcttcgaagttaccctgcttcaggtcacactacacccttaagtcgagggacgtatgaggtgggactggaagacaacataggttccaacaccgaggtcttcacgtataatgctgccaacaaggaaacctgtgaacacaaccacagacaatgctcccggcatgccttctgcacggactatgccactggcttctgctgccactgccaatccaagttttatggaaatgggaagcactgtctgcctganggggcacctcaccgagtgaatgggaaagtgagtggccacctccacgtgggccatacacccgtgcacttcactgatgtggacctgcatgcgtatatcgtgggcaatgatggcagagcctacacggccatcagccacatcccacagccagcagcccaggccctcctccccctcacaccaattggaggcctgtttggctggctctttgctttagaaaaacctggctctgagaacggcttcagcctcgcaggtgctgcctttacccatgacatggaagttacattctacccgggagaggagacggttcgtatcactcaaactgctgagggacttgacccagagaactacctgagcattaagaccaacattcaaggccaggtgccttacgtcccagcaaatttcacagcccacatctctccctacaaggagctgtaccactactccgactccactgtgacctctacaagttccagagactactctctgacttttggtgcaatcaaccaaacatggtcctaccgcatccaccagaacatcacttaccaggtgtgcaggcacgcccccagacacccgtccttccccaccacccagcagctgaacgtggaccgggtctttgccttgtataatgacgaagaaagagtgcttagatttgctgtgaccaatcaaattggcccggtcaaagaagattcagaccccactccggtgaatccttgctatgatgggagccacatgtgtgacacaacagcacggtgccatccagggacaggtgtagattacacctgtgagtgcgcatctgggtaccagggagatggacggaactgtgtggatgaaaatgaatgtgcaactggctttcatcgctgtggccccaactctgtatgtatcaacttgcctggaagctacaggtgtgagtgccggagtggttatgagtttgcagatgaccggcatacttgcatcttgatcaccccacctgccaacccctgtgaggatggcagtcatacctgtgctcctgctgggcaggcccggtgtgttcaccatggaggcagcacgttcagctgtgcctgcctgcctggttatgccggcgatgggcaccagtgcactgttctcctgccgttgtcaacccggatattatggggatggatttcagtgcatacctgactccacctcaagcctgacaccctgtgaacaacagcagcgccatgcccaggcccagtatgcctaccctggggcccggttccacatcccccaatgcgacgagcagggcaacttcctgcccctacagtgtcatggcagcactggtttctgctggtgcgtggaccctgatggtcatgaagttcctggtacccagactccacctggctccaccccgcctcactgtggaccatcaccagagcccacccagaggcccccgaccatctgtgagcgctggagggaaaacctgctggagcactacggtggcaccccccgagatgaccagtacgtgccccagtgcgatgacctgggccacttcatccccctgcagtgccacggaaagagcgacttctgctggtgtgtggacaaagatggcagagaggtgcagggcacccgctcccagccaggcaccacccctgcgtgtatacccaccgtcgctccacccatggtccggcccacgccccggccagatgtgacccctccatctgtgggcaccttcctgctctatactcagggccagcagattggctacttacccctcaatggcaccaggcttcagaaggatgcagctaagaccctgctgtctctgcatggctccataatcgtgggaattgattacgactgccgggagaggatggtgtactggacagatgttgctggacggacaatcagccgtgccggtctggaactgggagcagagcctgagacgatcgtgaattcaggtctgataagccctgaaggacttgccatagaccacatccgcagaacaatgtactggacggacagtgtcctggataagatagagagcgccctgctggatggctctgagcgcaaggtcctcttctacacagatctggtgaatccccgtgccatcgctgtggatccaatccgaggcaacttgtactggacagactggaatagagaagctcctaaaattgaaacgtcatctttagatggagaaaacagaagaattctgatcaatacagacattggattgcccaatggcttaacctttgaccctttctctaaactgctctgctgggcagatgcaggaaccaaaaaactggagtgtacactacctgatggaactggacggcgtgtcattcaaaacaacctcaagtaccccttcagcatcgtaagctatgcagatcacttctaccacacagactggaggagggatggtgttgtatcagtaaataaacatagtggccagtttactgatgagtatctcccagaacaacgatctcacctctacgggataactgcagtctacccctactgcccaacaggaagaaagtaagtacagtaatgtaaaggaagacttggagtttacaatcagaacctggaccctaaagaacagtgactgcaaaggcaaagaaagtaaaaaaggaattggccattagacgttcctgagcatccaagatgaacattttgtagtgcaaaaagacttttgtgaaaagctgatacctcaatctttactactgtatttttaaaaatgaaggttgttattgcaagtttaaaaaggtaacagaattttaactgttgcttattaaagcaacttcttgtaaacatttatcattaatatttaaaagatcaaattcattcaactaagaattagagtttaagactctaaacctgatttttgccatggattccttctggccaagaaattaaagcacatgtgatcaatataacaatataatcctaaaccttgacagttggagaagccaatgcagaactgatgggaaaggaccaattatttatagtttcccaacaaaagttctaagattttttacctctgcatcagtgcatttctatttatatcaaaaggtgctaaaatgattcaatttgcattttctgatcctgtagtgcctctatagaagtacccacagaaagtaaagtatcacatttataaataccaaagatgtaacaattttaaaattttctagattactccaataaagtgttttaagttttcctatga

SEQ ID NO: 436067 - DNA, 5617 bp, Homo sapiens
  misc_feature (2383)..(2383): n is a, c, g, or t
ggccttcgggagggggacagaacttaggagtcagccctctgccttcgtacaaaggctcgcttctcctcagggcgtctctgggtggagcgaagcggccgaggggaccacgacaatgtccctttgcttttcggaccgatggccaggcctccagagccaggagcgcccgggaccccagggcagggagcaaagctcataccgcaaccccgccacccgcccgcgccctgccagcctgttggggccacagcgcgcaggccagcagccgcactcgccgctgcggggttccctttgcgctgagctcatctcctgcaacgccgctgccccaaaccttgcgggccatttggtcccgggggtggggctccttgggggccgcggggcagcccggatgagaggatgacccgggagctccctgggggcggagtggaaggggcagctccaggcagccctggccaggagcttttaccccgccagccccgctgctccagcggccgctgccttagaaaagttaacgagaaccagatgtggtggccactgccgaactttctcagagccggtgattggtccccagccgagggcctcagccaattagcttgctgggtgggcctggagtcccgccccgcccaggcgcccgcggagatccaggttcgaggctggcgcggcgcggagagtgggctggaggccggggcgggacgcgttgtgcagcgggtaagcgcacggccgagcgagcatggagggggaccgggtggccgggcggccggtgctgtcgtcgttaccagtgctactgctgctgcagttgctaatgttgcgggccgcggcgctgcacccagacgagctcttcccacacggggagtcgtggggggaccagctcctgcaggaaggcgacgacgaaagctcagccgtggtgaagctggcgaatcccctgcacttctacgaagcccgattcagcaacctctacgtgggcaccaacggcatcatctccactcaggacttccccagggaaacgcagtatgtggactatgatttccccaccgacttcccggccatcgccccttttctggcggacatcgacacgagccacggcagaggccgagtcctgtaccgagaggacacctcccccgcagtgctgggcctggccgcccgctatgtgcgcgctggcttcccgcgctctgcgcgctttacccccacccacgccttcctggccacctgggagcaggtaggcgcttacgaggaggtcaagcgcggggcgctgccctcgggagagctgaacactttccaggcagttttggcatctgatgggtctgatagctacgccctctttctttatcctgccaacggcctgcagttccttggaacccgccccaaagagtcttacaatgtccagcttcagcttccagctcgggtgggcttctgccgaggggaggctgatgatctgaagtcagaaggaccatatttcagcttgactagcactgaacagtctgtgaaaaatctctatcaactaagcaacctggggatccctggagtgtgggctttccatatcggcagcacttccccgttggacaatgtcaggccagctgcagttggagacctttccgctgcccactcttctgttcccctgggacgttccttcagccatgctacagccctggaaagtgactataatgaggacaatttggattactacgatgtgaatgaggaggaagctgaataccttccgggtgaaccagaggaggcattgaatggccacagcagcattgatgtttccttccaatccaaagtggatacaaagcctttagagggtaggatctcccctccagattctgatctgtcctcccccttgcatccaacacctacttattggccattctatcctgaaacagaatcttccaccttggatcctcacaccaaagaaggaacatctctgggagaggtagggggcccagatttaaaaggccaagttgagccctgggatgagagagagaccagaagcccagctccaccagaggtagacagagattcactggctccttcctgggaaaccccaccaccgtaccccgaaaacggaagcatccagccctacccagatggagggccagtgccttcggaaatggatgttcccccagctcatcctgaagaagaaattgttcttcgaagttaccctgcttcaggtcacactacacccttaagtcgagggacgtatgaggtgggactggaagacaacataggttccaacaccgaggtcttcacgtataatgctgccaacaaggaaacctgtgaacacaaccacagacaatgctcccggcatgccttctgcacggactatgccactggcttctgctgccactgccaatccaagttttatggaaatgggaagcactgtctgcctganggggcacctcaccgagtgaatgggaaagtgagtggccacctccacgtgggccatacacccgtgcacttcactgatgtggacctgcatgcgtatatcgtgggcaatgatggcagagcctacacggccatcagccacatcccacagccagcagcccaggccctcctccccctcacaccaattggaggcctgtttggctggctctttgctttagaaaaacctggctctgagaacggcttcagcctcgcaggtgctgcctttacccatgacatggaagttacattctacccgggagaggagacggttcgtatcactcaaactgctgagggacttgacccagagaactacctgagcattaagaccaacattcaaggccaggtgccttacgtcccagcaaatttcacagcccacatctctccctacaaggagctgtaccactactccgactccactgtgacctctacaagttccagagactactctctgacttttggtgcaatcaaccaaacatggtcctaccgcatccaccagaacatcacttaccaggtgtgcaggcacgcccccagacacccgtccttccccaccacccagcagctgaacgtggaccgggtctttgccttgtataatgacgaagaaagagtgcttagatttgctgtgaccaatcaaattggcccggtcaaagaagattcagaccccactccggtgaatccttgctatgatgggagccacatgtgtgacacaacagcacggtgccatccagggacaggtgtagattacacctgtgagtgcgcatctgggtaccagggagatggacggaactgtgtggatgaaaatgaatgtgcaactggctttcatcgctgtggccccaactctgtatgtatcaacttgcctggaagctacaggtgtgagtgccggagtggttatgagtttgcagatgaccggcatacttgcatcttgatcaccccacctgccaacccctgtgaggatggcagtcatacctgtgctcctgctgggcaggcccggtgtgttcaccatggaggcagcacgttcagctgtgcctgcctgcctggttatgccggcgatgggcaccagtgcactgatgtagatgaatgctcagaaaacagatgtcaccctgcagctacctgctacaatactcctggttccttctcctgccgttgtcaacccggatattatggggatggatttcagtgcatacctgactccacctcaagcctgacaccctgtgaacaacagcagcgccatgcccaggcccagtatgcctaccctggggcccggttccacatcccccaatgcgacgagcagggcaacttcctgcccctacagtgtcatggcagcactggtttctgctggtgcgtggaccctgatggtcatgaagttcctggtacccagactccacctggctccaccccgcctcactgtggaccatcaccagagcccacccagaggcccccgaccatctgtgagcgctggagggaaaacctgctggagcactacggtggcaccccccgagatgaccagtacgtgccccagtgcgatgacctgggccacttcatccccctgcagtgccacggaaagagcgacttctgctggtgtgtggacaaagatggcagagaggtgcagggcacccgctcccagccaggcaccacccctgcgtgtatacccaccgtcgctccacccatggtccggcccacgccccggccagatgtgacccctccatctgtgggcaccttcctgctctatactcagggccagcagattggctacttacccctcaatggcaccaggcttcagaaggatgcagctaagaccctgctgtctctgcatggctccataatcgtgggaattgattacgactgccgggagaggatggtgtactggacagatgttgctggacggacaatcagccgtgccggtctggaactgggagcagagcctgagacgatcgtgaattcaggtctgataagccctgaaggacttgccatagaccacatccgcagaacaatgtactggacggacagtgtcctggataagatagagagcgccctgctggatggctctgagcgcaaggtcctcttctacacagatctggtgaatccccgtgccatcgctgtggatccaatccgaggcaacttgtactggacagactggaatagagaagctcctaaaattgaaacgtcatctttagatggagaaaacagaagaattctgatcaatacagacattggattgcccaatggcttaacctttgaccctttctctaaactgctctgctgggcagatgcaggaaccaaaaaactggagtgtacactacctgatggaactggacggcgtgtcattcaaaacaacctcaagtaccccttcagcatcgtaagctatgcagatcacttctaccacacagactggaggagggatggtgttgtatcagtaaataaacatagtggccagtttactgatgagtatctcccagaacaacgatctcacctctacgggataactgcagtctacccctactgcccaacaggaagaaagtaagtacagtaatgtaaaggaagacttggagtttacaatcagaacctggaccctaaagaacagtgactgcaaaggcaaagaaagtaaaaaaggaattggccattagacgttcctgagcatccaagatgaacattttgtagtgcaaaaagacttttgtgaaaagctgatacctcaatctttactactgtatttttaaaaatgaaggttgttattgcaagtttaaaaaggtaacagaattttaactgttgcttattaaagcaacttcttgtaaacatttatcattaatatttaaaagatcaaattcattcaactaagaattagagtttaagactctaaacctgatttttgccatggattccttctggccaagaaattaaagcacatgtgatcaatataacaatataatcctaaaccttgacagttggagaagccaatgcagaactgatgggaaaggaccaattatttatagtttcccaacaaaagttctaagattttttacctctgcatcagtgcatttctatttatatcaaaaggtgctaaaatgattcaatttgcattttctgatcctgtagtgcctctatagaagtacccacagaaagtaaagtatcacatttataaataccaaagatgtaacaattttaaaattttctagattactccaataaagtgttttaagttttcctatga

SEQ ID NO: 436068 - DNA, 5632 bp, Homo sapiens
  misc_feature (2302)..(2302): n is a, c, g, or t
ggccttcgggagggggacagaacttaggagtcagccctctgccttcgtacaaaggctcgcttctcctcagggcgtctctgggtggagcgaagcggccgaggggaccacgacaatgtccctttgcttttcggaccgatggccaggcctccagagccaggagcgcccgggaccccagggcagggagcaaagctcataccgcaaccccgccacccgcccgcgccctgccagcctgttggggccacagcgcgcaggccagcagccgcactcgccgctgcggggttccctttgcgctgagctcatctcctgcaacgccgctgccccaaaccttgcgggccatttggtcccgggggtggggctccttgggggccgcggggcagcccggatgagaggatgacccgggagctccctgggggcggagtggaaggggcagctccaggcagccctggccaggagcttttaccccgccagccccgctgctccagcggccgctgccttagaaaagttaacgagaaccagatgtggtggccactgccgaactttctcagagccggtgattggtccccagccgagggcctcagccaattagcttgctgggtgggcctggagtcccgccccgcccaggcgcccgcggagatccaggttcgaggctggcgcggcgcggagagtgggctggaggccggggcgggacgcgttgtgcagcgggtaagcgcacggccgagcgagcatggagggggaccgggtggccgggcggccggtgctgtcgtcgttaccagtgctactgctgctgcagttgctaatgttgcgggccgcggcgctgcacccagacgagctcttcccacacggggagtcgtggggggaccagctcctgcaggaaggcgacgacgaaagctcagccgtggtgaagctggcgaatcccctgcacttctacgaagcccgattcagcaacctctacgtgggcaccaacggcatcatctccactcaggacttccccagggaaacgcagtatgtggactatgatttccccaccgacttcccggccatcgccccttttctggcggacatcgacacgagccacggcagaggccgagtcctgtaccgagaggacacctcccccgcagtgctgggcctggccgcccgctatgtgcgcgctggcttcccgcgctctgcgcgctttacccccacccacgccttcctggccacctgggagcaggtaggcgcttacgaggaggtcaagcgcggggcgctgccctcgggagagctgaacactttccaggcagttttggcatctgatgggtctgatagctacgccctctttctttatcctgccaacggcctgcagttccttggaacccgccccaaagagtcttacaatgtccagcttcagcttccagctcgggtgggcttctgccgaggggaggctgatgatctgaagtcagaaggaccatatttcagcttgactagcactgaacagtctgtgaaaaatctctatcaactaagcaacctggggatccctggagtgtgggctttccatatcggcagcacttccccgttggacaatgtcaggccagctgcagttggagacctttccgctgcccactcttctgttcccctgggacgttccttcagccatgctacagccctggaaagtgactataatgaggacaatttggattactacgatgtgaatgaggaggaagctgaataccttccgggtgaaccagaggaggcattgaatggccacagcagcattgatgtttccttccaatccaaagtggatacaaagcctttagaggaatcttccaccttggatcctcacaccaaagaaggaacatctctgggagaggtagggggcccagatttaaaaggccaagttgagccctgggatgagagagagaccagaagcccagctccaccagaggtagacagagattcactggctccttcctgggaaaccccaccaccgtaccccgaaaacggaagcatccagccctacccagatggagggccagtgccttcggaaatggatgttcccccagctcatcctgaagaagaaattgttcttcgaagttaccctgcttcaggtcacactacacccttaagtcgagggacgtatgaggtgggactggaagacaacataggttccaacaccgaggtcttcacgtataatgctgccaacaaggaaacctgtgaacacaaccacagacaatgctcccggcatgccttctgcacggactatgccactggcttctgctgccactgccaatccaagttttatggaaatgggaagcactgtctgcctganggggcacctcaccgagtgaatgggaaagtgagtggccacctccacgtgggccatacacccgtgcacttcactgatgtggacctgcatgcgtatatcgtgggcaatgatggcagagcctacacggccatcagccacatcccacagccagcagcccaggccctcctccccctcacaccaattggaggcctgtttggctggctctttgctttagaaaaacctggctctgagaacggcttcagcctcgcaggtgctgcctttacccatgacatggaagttacattctacccgggagaggagacggttcgtatcactcaaactgctgagggacttgacccagagaactacctgagcattaagaccaacattcaaggccaggtgccttacgtcccagcaaatttcacagcccacatctctccctacaaggagctgtaccactactccgactccactgtgacctctacaagttccagagactactctctgacttttggtgcaatcaaccaaacatggtcctaccgcatccaccagaacatcacttaccaggtgtgcaggcacgcccccagacacccgtccttccccaccacccagcagctgaacgtggaccgggtctttgccttgtataatgacgaagaaagagtgcttagatttgctgtgaccaatcaaattggcccggtcaaagaagattcagaccccactccggtgaatccttgctatgatgggagccacatgtgtgacacaacagcacggtgccatccagggacaggtgtagattacacctgtgagtgcgcatctgggtaccagggagatggacggaactgtgtggatgaaaatgaatgtgcaactggctttcatcgctgtggccccaactctgtatgtatcaacttgcctggaagctacaggtgtgagtgccggagtggttatgagtttgcagatgaccggcatacttgcatcttgatcaccccacctgccaacccctgtgaggatggcagtcatacctgtgctcctgctgggcaggcccggtgtgttcaccatggaggcagcacgttcagctgtgcctgcctgcctggttatgccggcgatgggcaccagtgcactgatgtagatgaatgctcagaaaacagatgtcaccctgcagctacctgctacaatactcctggttccttctcctgccgttgtcaacccggatattatggggatggatttcagtgcatacctgactccacctcaagcctgacaccctgtgaacaacagcagcgccatgcccaggcccagtatgcctaccctggggcccggttccacatcccccaatgcgacgagcagggcaacttcctgcccctacagtgtcatggcagcactggtttctgctggtgcgtggaccctgatggtcatgaagttcctggtacccagactccacctggctccaccccgcctcactgtggaccatcaccagagcccacccagaggcccccgaccatctgtgagcgctggagggaaaacctgctggagcactacggtggcaccccccgagatgaccagtacgtgccccagtgcgatgacctgggccacttcatccccctgcagtgccacggaaagagcgacttctgctggtgtgtggacaaagatggcagagaggtgcagggcacccgctcccagccaggcaccacccctgcgtgtatacccaccgtcgctccacccatggtccggcccacgccccggccagatgtgacccctccatctgtgggcaccttcctgctctatactcagggccagcagattggctacttacccctcaatggcaccaggcttcagaaggatgcagctaagaccctgctgtctctgcatggctccataatcgtgggaattgattacgactgccgggagaggatggtgtactggacagatgttgctggacggacaatcagccgtgccggtctggaactgggagcagagcctgagacgatcgtgaattcaggtctgataagccctgaaggacttgccatagaccacatccgcagaacaatgtactggacggacagtgtcctggataagatagagagcgccctgctggatggctctgagcgcaaggtcctcttctacacagatctggtgaatccccgtgccatcgctgtggatccaatccgaggcaacttgtactggacagactggaatagagaagctcctaaaattgaaacgtcatctttagatggagaaaacagaagaattctgatcaatacagacattggattgcccaatggcttaacctttgaccctttctctaaactgctctgctgggcagatgcaggaaccaaaaaactggagtgtacactacctgatggaactggacggcgtgtcattcaaaacaacctcaagtaccccttcagcatcgtaagctatgcagatcacttctaccacacagactggaggagggatggtgttgtatcagtaaataaacatagtggccagtttactgatgagtatctcccagaacaacgatctcacctctacgggataactgcagtctacccctactgcccaacaggaagaaagtaagtacagtaatgtaaaggaagacttggagtttacaatcagaacctggaccctaaagaacagtgactgcaaaggcaaagaaagtaaaaaaggaattggccattagacgttcctgagcatccaagatgaacattttgtagtgcaaaaagacttttgtgaaaagctgatacctcaatctttactactgtatttttaaaaatgaaggttgttattgcaagtttaaaaaggtaacagaattttaactgttgcttattaaagcaacttcttgtaaacatttatcattaatatttaaaagatcaaattcattcaactaagaattagagtttaagactctaaacctgatttttgccatggattccttctggccaagaaattaaagcacatgtgatcaatataacaatataatcctaaaccttgacagttggagaagccaatgcagaactgatgggaaaggaccaattatttatagtttcccaacaaaagttctaagattttttacctctgcatcagtgcatttctatttatatcaaaaggtgctaaaatgattcaatttgcattttctgatcctgtagtgcctctatagaagtacccacagaaagtaaagtatcacatttataaataccaaagatgtaacaattttaaaattttctagattactccaataaagtgttttaagttttcctatgacttaaggatctatattgtctctaggacaaagctgggggttggcatatatgccttaaccacaaaggagaaaggtgatttatgcaaacatacagtaca

SEQ ID NO: 436069 - DNA, 4956 bp, Homo sapiens
  misc_feature (2302)..(2302): n is a, c, g, or t
ggccttcgggagggggacagaacttaggagtcagccctctgccttcgtacaaaggctcgcttctcctcagggcgtctctgggtggagcgaagcggccgaggggaccacgacaatgtccctttgcttttcggaccgatggccaggcctccagagccaggagcgcccgggaccccagggcagggagcaaagctcataccgcaaccccgccacccgcccgcgccctgccagcctgttggggccacagcgcgcaggccagcagccgcactcgccgctgcggggttccctttgcgctgagctcatctcctgcaacgccgctgccccaaaccttgcgggccatttggtcccgggggtggggctccttgggggccgcggggcagcccggatgagaggatgacccgggagctccctgggggcggagtggaaggggcagctccaggcagccctggccaggagcttttaccccgccagccccgctgctccagcggccgctgccttagaaaagttaacgagaaccagatgtggtggccactgccgaactttctcagagccggtgattggtccccagccgagggcctcagccaattagcttgctgggtgggcctggagtcccgccccgcccaggcgcccgcggagatccaggttcgaggctggcgcggcgcggagagtgggctggaggccggggcgggacgcgttgtgcagcgggtaagcgcacggccgagcgagcatggagggggaccgggtggccgggcggccggtgctgtcgtcgttaccagtgctactgctgctgcagttgctaatgttgcgggccgcggcgctgcacccagacgagctcttcccacacggggagtcgtggggggaccagctcctgcaggaaggcgacgacgaaagctcagccgtggtgaagctggcgaatcccctgcacttctacgaagcccgattcagcaacctctacgtgggcaccaacggcatcatctccactcaggacttccccagggaaacgcagtatgtggactatgatttccccaccgacttcccggccatcgccccttttctggcggacatcgacacgagccacggcagaggccgagtcctgtaccgagaggacacctcccccgcagtgctgggcctggccgcccgctatgtgcgcgctggcttcccgcgctctgcgcgctttacccccacccacgccttcctggccacctgggagcaggtaggcgcttacgaggaggtcaagcgcggggcgctgccctcgggagagctgaacactttccaggcagttttggcatctgatgggtctgatagctacgccctctttctttatcctgccaacggcctgcagttccttggaacccgccccaaagagtcttacaatgtccagcttcagcttccagctcgggtgggcttctgccgaggggaggctgatgatctgaagtcagaaggaccatatttcagcttgactagcactgaacagtctgtgaaaaatctctatcaactaagcaacctggggatccctggagtgtgggctttccatatcggcagcacttccccgttggacaatgtcaggccagctgcagttggagacctttccgctgcccactcttctgttcccctgggacgttccttcagccatgctacagccctggaaagtgactataatgaggacaatttggattactacgatgtgaatgaggaggaagctgaataccttccgggtgaaccagaggaggcattgaatggccacagcagcattgatgtttccttccaatccaaagtggatacaaagcctttagaggaatcttccaccttggatcctcacaccaaagaaggaacatctctgggagaggtagggggcccagatttaaaaggccaagttgagccctgggatgagagagagaccagaagcccagctccaccagaggtagacagagattcactggctccttcctgggaaaccccaccaccgtaccccgaaaacggaagcatccagccctacccagatggagggccagtgccttcggaaatggatgttcccccagctcatcctgaagaagaaattgttcttcgaagttaccctgcttcaggtcacactacacccttaagtcgagggacgtatgaggtgggactggaagacaacataggttccaacaccgaggtcttcacgtataatgctgccaacaaggaaacctgtgaacacaaccacagacaatgctcccggcatgccttctgcacggactatgccactggcttctgctgccactgccaatccaagttttatggaaatgggaagcactgtctgcctganggggcacctcaccgagtgaatgggaaagtgagtggccacctccacgtgggccatacacccgtgcacttcactgatgtggacctgcatgcgtatatcgtgggcaatgatggcagagcctacacggccatcagccacatcccacagccagcagcccaggccctcctccccctcacaccaattggaggcctgtttggctggctctttgctttagaaaaacctggctctgagaacggcttcagcctcgcaggtgctgcctttacccatgacatggaagttacattctacccgggagaggagacggttcgtatcactcaaactgctgagggacttgacccagagaactacctgagcattaagaccaacattcaaggccaggtgccttacgtcccagcaaatttcacagcccacatctctccctacaaggagctgtaccactactccgactccactgtgacctctacaagttccagagactactctctgacttttggtgcaatcaaccaaacatggtcctaccgcatccaccagaacatcacttaccaggtgtgcaggcacgcccccagacacccgtccttccccaccacccagcagctgaacgtggaccgggtctttgccttgtataatgacgaagaaagagtgcttagatttgctgtgaccaatcaaattggcccggtcaaagaagattcagaccccactccggtgaatccttgctatgatgggagccacatgtgtgacacaacagcacggtgccatccagggacaggtgtagattacacctgtgagtgcgcatctgggtaccagggagatggacggaactgtgtggatgaaaatgaatgtgcaactggctttcatcgctgtggccccaactctgtatgtatcaacttgcctggaagctacaggtgtgagtgccggagtggttatgagtttgcagatgaccggcatacttgcatcttgatcaccccacctgccaacccctgtgaggatggcagtcatacctgtgctcctgctgggcaggcccggtgtgttcaccatggaggcagcacgttcagctgtgcctgcctgcctggttatgccggcgatgggcaccagtgcactgatgtagatgaatgctcagaaaacagatgtcaccctgcagctacctgctacaatactcctggttccttctcctgccgttgtcaacccggatattatggggatggatttcagtgcatacctgactccacctcaagcctgacaccctgtgaacaacagcagcgccatgcccaggcccagtatgcctaccctggggcccggttccacatcccccaatgcgacgagcagggcaacttcctgcccctacagtgtcatggcagcactggtttctgctggtgcgtggaccctgatggtcatgaagttcctggtacccagactccacctggctccaccccgcctcactgtggaccatcaccagagcccacccagaggcccccgaccatctgtgagcgctggagggaaaacctgctggagcactacggtggcaccccccgagatgaccagtacgtgccccagtgcgatgacctgggccacttcatccccctgcagtgccacggaaagagcgacttctgctggtgtgtggacaaagatggcagagaggtgcagggcacccgctcccagccaggcaccacccctgcgtgtatacccaccgtcgctccacccatggtccggcccacgccccggccagatgtgacccctccatctgtgggcaccttcctgctctatactcagggccagcagattggctacttacccctcaatggcaccaggcttcagaaggatgcagctaagaccctgctgtctctgcatggctccataatcgtgggaattgattacgactgccgggagaggatggtgtactggacagatgttgctggacggacaatcagccgtgccggtctggaactgggagcagagcctgagacgatcgtgaattcaggtctgataagccctgaaggacttgccatagaccacatccgcagaacaatgtactggacggacagtgtcctggataagatagagagcgccctgctggatggctctgagcgcaaggtcctcttctacacagatctggtgaatccccgtgccatcgctgtggatccaatccgaggcaacttgtactggacagactggaatagagaagctcctaaaattgaaacgtcatctttagatggagaaaacagaagaattctgatcaatacagacattggattgcccaatggcttaacctttgaccctttctctaaactgctctgctgggcagatgcaggaaccaaaaaactggagtgtacactacctgatggaactggacggcgtgtcattcaaaacaacctcaagtaccccttcagcatcgtaagctatgcagatcacttctaccacacagactggaggagggatggtgttgtatcagtaaataaacatagtggccagtttactgatgagtatctcccagaacaacgatctcacctctacgggataactgcagtctacccctactgcccaacaggaggaagtagtacagtatttaaggaggcttgagttacaatcagacctggccctaagacagtacttcaaggaaagaagataagggtttgcatagcgtcctacatcaagtgacattt

SEQ ID NO: 436070 - DNA, 3353 bp, Homo sapiens
  misc_feature (2302)..(2302): n is a, c, g, or t
ggccttcgggagggggacagaacttaggagtcagccctctgccttcgtacaaaggctcgcttctcctcagggcgtctctgggtggagcgaagcggccgaggggaccacgacaatgtccctttgcttttcggaccgatggccaggcctccagagccaggagcgcccgggaccccagggcagggagcaaagctcataccgcaaccccgccacccgcccgcgccctgccagcctgttggggccacagcgcgcaggccagcagccgcactcgccgctgcggggttccctttgcgctgagctcatctcctgcaacgccgctgccccaaaccttgcgggccatttggtcccgggggtggggctccttgggggccgcggggcagcccggatgagaggatgacccgggagctccctgggggcggagtggaaggggcagctccaggcagccctggccaggagcttttaccccgccagccccgctgctccagcggccgctgccttagaaaagttaacgagaaccagatgtggtggccactgccgaactttctcagagccggtgattggtccccagccgagggcctcagccaattagcttgctgggtgggcctggagtcccgccccgcccaggcgcccgcggagatccaggttcgaggctggcgcggcgcggagagtgggctggaggccggggcgggacgcgttgtgcagcgggtaagcgcacggccgagcgagcatggagggggaccgggtggccgggcggccggtgctgtcgtcgttaccagtgctactgctgctgcagttgctaatgttgcgggccgcggcgctgcacccagacgagctcttcccacacggggagtcgtggggggaccagctcctgcaggaaggcgacgacgaaagctcagccgtggtgaagctggcgaatcccctgcacttctacgaagcccgattcagcaacctctacgtgggcaccaacggcatcatctccactcaggacttccccagggaaacgcagtatgtggactatgatttccccaccgacttcccggccatcgccccttttctggcggacatcgacacgagccacggcagaggccgagtcctgtaccgagaggacacctcccccgcagtgctgggcctggccgcccgctatgtgcgcgctggcttcccgcgctctgcgcgctttacccccacccacgccttcctggccacctgggagcaggtaggcgcttacgaggaggtcaagcgcggggcgctgccctcgggagagctgaacactttccaggcagttttggcatctgatgggtctgatagctacgccctctttctttatcctgccaacggcctgcagttccttggaacccgccccaaagagtcttacaatgtccagcttcagcttccagctcgggtgggcttctgccgaggggaggctgatgatctgaagtcagaaggaccatatttcagcttgactagcactgaacagtctgtgaaaaatctctatcaactaagcaacctggggatccctggagtgtgggctttccatatcggcagcacttccccgttggacaatgtcaggccagctgcagttggagacctttccgctgcccactcttctgttcccctgggacgttccttcagccatgctacagccctggaaagtgactataatgaggacaatttggattactacgatgtgaatgaggaggaagctgaataccttccgggtgaaccagaggaggcattgaatggccacagcagcattgatgtttccttccaatccaaagtggatacaaagcctttagaggaatcttccaccttggatcctcacaccaaagaaggaacatctctgggagaggtagggggcccagatttaaaaggccaagttgagccctgggatgagagagagaccagaagcccagctccaccagaggtagacagagattcactggctccttcctgggaaaccccaccaccgtaccccgaaaacggaagcatccagccctacccagatggagggccagtgccttcggaaatggatgttcccccagctcatcctgaagaagaaattgttcttcgaagttaccctgcttcaggtcacactacacccttaagtcgagggacgtatgaggtgggactggaagacaacataggttccaacaccgaggtcttcacgtataatgctgccaacaaggaaacctgtgaacacaaccacagacaatgctcccggcatgccttctgcacggactatgccactggcttctgctgccactgccaatccaagttttatggaaatgggaagcactgtctgcctganggggcacctcaccgagtgaatgggaaagtgagtggccacctccacgtgggccatacacccgtgcacttcactgatgtggacctgcatgcgtatatcgtgggcaatgatggcagagcctacacggccatcagccacatcccacagccagcagcccaggccctcctccccctcacaccaattggaggcctgtttggctggctctttgctttagaaaaacctggctctgagaacggcttcagcctcgcaggtgctgcctttacccatgacatggaagttacattctacccgggagaggagacggttcgtatcactcaaactgctgagggacttgacccagagaactacctgagcattaagaccaacattcaaggccaggtgccttacgtcccagcaaatttcacagcccacatctctccctacaaggagctgtaccactactccgactccactgtgacctctacaagttccagagactactctctgacttttggtgcaatcaaccaaacatggtcctaccgcatccaccagaacatcacttaccaggtgtgcaggcacgcccccagacacccgtccttccccaccacccagcagctgaacgtggaccgggtctttgccttgtataatgacgaagaaagagtgcttagatttgctgtgaccaatcaaattggcccggtcaaagaagattcagaccccactccggtgaatccttgctatgatgggagccacatgtgtgacacaacagcacggtgccatccagggacaggtgtagattacacctgtgagtgcgcatctgggtaccagggagatggacggaactgtgtggatgaaaatgaatgtgcaactggctttcatcgctgtggccccaactctgtatgtatcaacttgcctggaagctacaggtgtgagtgccggagtggttatgagtttgcagatgaccggcatacttgcatctgtgagttccaaaatcattttcctgtgtggccaaaatggtgctctttaatcttgctctttaatctgtcagtgttttgacttctgctattcagaggctctg

SEQ ID NO: 436071 - DNA, 836 bp, Homo sapiens
tctctcacaaggctgcaatcaggtaatggccaaactgcagtgatcacaaggctcagctcggggaagacacagcccaagcatgctcacatgggctacaggcaagactaatgtctctggccaacagccctcaaggacatcagttccttggcacatgttcccctttacagggtagcttgcaacatggcatccagcttccctcaaagggagcaagagagagcccctaaggcagaaaccagttttttgagaccgaatatcggcagtgatagcctatcacttctgctatactctatgcactagaagaagcaagacactactaatgcagcccaaactcaaggggattgcttaaggctataatacatgaggagatggagatcactgggggctgcttagatgctgcctaccacaggctacatggctattcttttacaatcttgatttttaacttacagcaacttgtactggacagactggaatagagaagctcctaaaattgaaacgtcatctttagatggagaaaacagaagaattctgatcaatacagacattggattgcccaatggcttaacctttgaccctttctctaaactgctctgctgggcagatgcaggtaatactactgatggaatgcaaatagataacctctcatcacagtgaatgtgagcactaacagattttactacaaaatgaaatcccatcacttagatctcctttctttggtctgtaaacttttaagtactagtaaatttaagtactagtaaatgagtcttaaaatgaactttctggggtttgggtggagggaaggatatatcaagcagtaagtttgtactgcttgcctg

SEQ ID NO: 436072 - DNA, 5392 bp, Homo sapiens
  misc_feature (2302)..(2302): n is a, c, g, or t
ggccttcgggagggggacagaacttaggagtcagccctctgccttcgtacaaaggctcgcttctcctcagggcgtctctgggtggagcgaagcggccgaggggaccacgacaatgtccctttgcttttcggaccgatggccaggcctccagagccaggagcgcccgggaccccagggcagggagcaaagctcataccgcaaccccgccacccgcccgcgccctgccagcctgttggggccacagcgcgcaggccagcagccgcactcgccgctgcggggttccctttgcgctgagctcatctcctgcaacgccgctgccccaaaccttgcgggccatttggtcccgggggtggggctccttgggggccgcggggcagcccggatgagaggatgacccgggagctccctgggggcggagtggaaggggcagctccaggcagccctggccaggagcttttaccccgccagccccgctgctccagcggccgctgccttagaaaagttaacgagaaccagatgtggtggccactgccgaactttctcagagccggtgattggtccccagccgagggcctcagccaattagcttgctgggtgggcctggagtcccgccccgcccaggcgcccgcggagatccaggttcgaggctggcgcggcgcggagagtgggctggaggccggggcgggacgcgttgtgcagcgggtaagcgcacggccgagcgagcatggagggggaccgggtggccgggcggccggtgctgtcgtcgttaccagtgctactgctgctgcagttgctaatgttgcgggccgcggcgctgcacccagacgagctcttcccacacggggagtcgtggggggaccagctcctgcaggaaggcgacgacgaaagctcagccgtggtgaagctggcgaatcccctgcacttctacgaagcccgattcagcaacctctacgtgggcaccaacggcatcatctccactcaggacttccccagggaaacgcagtatgtggactatgatttccccaccgacttcccggccatcgccccttttctggcggacatcgacacgagccacggcagaggccgagtcctgtaccgagaggacacctcccccgcagtgctgggcctggccgcccgctatgtgcgcgctggcttcccgcgctctgcgcgctttacccccacccacgccttcctggccacctgggagcaggtaggcgcttacgaggaggtcaagcgcggggcgctgccctcgggagagctgaacactttccaggcagttttggcatctgatgggtctgatagctacgccctctttctttatcctgccaacggcctgcagttccttggaacccgccccaaagagtcttacaatgtccagcttcagcttccagctcgggtgggcttctgccgaggggaggctgatgatctgaagtcagaaggaccatatttcagcttgactagcactgaacagtctgtgaaaaatctctatcaactaagcaacctggggatccctggagtgtgggctttccatatcggcagcacttccccgttggacaatgtcaggccagctgcagttggagacctttccgctgcccactcttctgttcccctgggacgttccttcagccatgctacagccctggaaagtgactataatgaggacaatttggattactacgatgtgaatgaggaggaagctgaataccttccgggtgaaccagaggaggcattgaatggccacagcagcattgatgtttccttccaatccaaagtggatacaaagcctttagaggaatcttccaccttggatcctcacaccaaagaaggaacatctctgggagaggtagggggcccagatttaaaaggccaagttgagccctgggatgagagagagaccagaagcccagctccaccagaggtagacagagattcactggctccttcctgggaaaccccaccaccgtaccccgaaaacggaagcatccagccctacccagatggagggccagtgccttcggaaatggatgttcccccagctcatcctgaagaagaaattgttcttcgaagttaccctgcttcaggtcacactacacccttaagtcgagggacgtatgaggtgggactggaagacaacataggttccaacaccgaggtcttcacgtataatgctgccaacaaggaaacctgtgaacacaaccacagacaatgctcccggcatgccttctgcacggactatgccactggcttctgctgccactgccaatccaagttttatggaaatgggaagcactgtctgcctganggggcacctcaccgagtgaatgggaaagtgagtggccacctccacgtgggccatacacccgtgcacttcactgatgtggacctgcatgcgtatatcgtgggcaatgatggcagagcctacacggccatcagccacatcccacagccagcagcccaggccctcctccccctcacaccaattggaggcctgtttggctggctctttgctttagaaaaacctggctctgagaacggcttcagcctcgcaggtgctgcctttacccatgacatggaagttacattctacccgggagaggagacggttcgtatcactcaaactgctgagggacttgacccagagaactacctgagcattaagaccaacattcaaggccaggtgccttacgtcccagcaaatttcacagcccacatctctccctacaaggagctgtaccactactccgactccactgtgacctctacaagttccagagactactctctgacttttggtgcaatcaaccaaacatggtcctaccgcatccaccagaacatcacttaccaggtgtgcaggcacgcccccagacacccgtccttccccaccacccagcagctgaacgtggaccgggtctttgccttgtataatgacgaagaaagagtgcttagatttgctgtgaccaatcaaattggcccggtcaaagaagattcagaccccactccggtgaatccttgctatgatgggagccacatgtgtgacacaacagcacggtgccatccagggacaggtgtagattacacctgtgagtgcgcatctgggtaccagggagatggacggaactgtgtggatgaaaatgaatgtgcaactggctttcatcgctgtggccccaactctgtatgtatcaacttgcctggaagctacaggtgtgagtgccggagtggttatgagtttgcagatgaccggcatacttgcatctatgtagatgaatgctcagaaaacagatgtcaccctgcagctacctgctacaatactcctggttccttctcctgccgttgtcaacccggatattatggggatggatttcagtgcatacctgactccacctcaagcctgacaccctgtgaacaacagcagcgccatgcccaggcccagtatgcctaccctggggcccggttccacatcccccaatgcgacgagcagggcaacttcctgcccctacagtgtcatggcagcactggtttctgctggtgcgtggaccctgatggtcatgaagttcctggtacccagactccacctggctccaccccgcctcactgtggaccatcaccagagcccacccagaggcccccgaccatctgtgagcgctggagggaaaacctgctggagcactacggtggcaccccccgagatgaccagtacgtgccccagtgcgatgacctgggccacttcatccccctgcagtgccacggaaagagcgacttctgctggtgtgtggacaaagatggcagagaggtgcagggcacccgctcccagccaggcaccacccctgcgtgtatacccaccgtcgctccacccatggtccggcccacgccccggccagatgtgacccctccatctgtgggcaccttcctgctctatactcagggccagcagattggctacttacccctcaatggcaccaggcttcagaaggatgcagctaagaccctgctgtctctgcatggctccataatcgtgggaattgattacgactgccgggagaggatggtgtactggacagatgttgctggacggacaatcagccgtgccggtctggaactgggagcagagcctgagacgatcgtgaattcaggtctgataagccctgaaggacttgccatagaccacatccgcagaacaatgtactggacggacagtgtcctggataagatagagagcgccctgctggatggctctgagcgcaaggtcctcttctacacagatctggtgaatccccgtgccatcgctgtggatccaatccgaggcaacttgtactggacagactggaatagagaagctcctaaaattgaaacgtcatctttagatggagaaaacagaagaattctgatcaatacagacattggattgcccaatggcttaacctttgaccctttctctaaactgctctgctgggcagatgcaggaaccaaaaaactggagtgtacactacctgatggaactggacggcgtgtcattcaaaacaacctcaagtaccccttcagcatcgtaagctatgcagatcacttctaccacacagactggaggagggatggtgttgtatcagtaaataaacatagtggccagtttactgatgagtatctcccagaacaacgatctcacctctacgggataactgcagtctacccctactgcccaacaggaagaaagtaagtacagtaatgtaaaggaagacttggagtttacaatcagaacctggaccctaaagaacagtgactgcaaaggcaaagaaagtaaaaaaggaattggccattagacgttcctgagcatccaagatgaacattttgtagtgcaaaaagacttttgtgaaaagctgatacctcaatctttactactgtatttttaaaaatgaaggttgttattgcaagtttaaaaaggtaacagaattttaactgttgcttattaaagcaacttcttgtaaacatttatcattaatatttaaaagatcaaattcattcaactaagaattagagtttaagactctaaacctgatttttgccatggattccttctggccaagaaattaaagcacatgtgatcaatataacaatataatcctaaaccttgacagttggagaagccaatgcagaactgatgggaaaggaccaattatttatagtttcccaacaaaagttctaagattttttacctctgcatcagtgcatttctatttatatcaaaaggtgctaaaatgattcaatttgcattttctgatcctgtagtgcctctatagaagtacccacagaaagtaaagtatcacatttataaataccaaagatgtaacaattttaaaattttctagattactccaataaagtgttttaagttttcctatga

SEQ ID NO: 436073 - DNA, 4333 bp, Homo sapiens
ggccttcgggagggggacagaacttaggagtcagccctctgccttcgtacaaaggctcgcttctcctcagggcgtctctgggtggagcgaagcggccgaggggaccacgacaatgtccctttgcttttcggaccgatggccaggcctccagagccaggagcgcccgggaccccagggcagggagcaaagctcataccgcaaccccgccacccgcccgcgccctgccagcctgttggggccacagcgcgcaggccagcagccgcactcgccgctgcggggttccctttgcgctgagctcatctcctgcaacgccgctgccccaaaccttgcgggccatttggtcccgggggtggggctccttgggggccgcggggcagcccggatgagaggatgacccgggagctccctgggggcggagtggaaggggcagctccaggcagccctggccaggagcttttaccccgccagccccgctgctccagcggccgctgccttagaaaagttaacgagaaccagatgtggtggccactgccgaactttctcagagccggtgattggtccccagccgagggcctcagccaattagcttgctgggtgggcctggagtcccgccccgcccaggcgcccgcggagatccaggttcgaggctggcgcggcgcggagagtgggctggaggccggggcgggacgcgttgtgcagcgggtaagcgcacggccgagcgagcatggagggggaccgggtggccgggcggccggtgctgtcgtcgttaccagtgctactgctgctgcagttgctaatgttgcgggccgcggcgctgcacccagacgagctcttcccacacggggagtcgtggggggaccagctcctgcaggaaggcgacgacgaaagctcagccgtggtgaagctggcgaatcccctgcacttctacgaagcccgattcagcaacctctacgtgggcaccaacggcatcatctccactcaggacttccccagggaaacgcagtatgtggactatgatttccccaccgacttcccggccatcgccccttttctggcggacatcgacacgagccacggcagaggccgagtcctgtaccgaggggcacctcaccgagtgaatgggaaagtgagtggccacctccacgtgggccatacacccgtgcacttcactgatgtggacctgcatgcgtatatcgtgggcaatgatggcagagcctacacggccatcagccacatcccacagccagcagcccaggccctcctccccctcacaccaattggaggcctgtttggctggctctttgctttagaaaaacctggctctgagaacggcttcagcctcgcaggtgctgcctttacccatgacatggaagttacattctacccgggagaggagacggttcgtatcactcaaactgctgagggacttgacccagagaactacctgagcattaagaccaacattcaaggccaggtgccttacgtcccagcaaatttcacagcccacatctctccctacaaggagctgtaccactactccgactccactgtgacctctacaagttccagagactactctctgacttttggtgcaatcaaccaaacatggtcctaccgcatccaccagaacatcacttaccaggtgtgcaggcacgcccccagacacccgtccttccccaccacccagcagctgaacgtggaccgggtctttgccttgtataatgacgaagaaagagtgcttagatttgctgtgaccaatcaaattggcccggtcaaagaagattcagaccccactccggtgaatccttgctatgatgggagccacatgtgtgacacaacagcacggtgccatccagggacaggtgtagattacacctgtgagtgcgcatctgggtaccagggagatggacggaactgtgtggatgaaaatgaatgtgcaactggctttcatcgctgtggccccaactctgtatgtatcaacttgcctggaagctacaggtgtgagtgccggagtggttatgagtttgcagatgaccggcatacttgcatcttgatcaccccacctgccaacccctgtgaggatggcagtcatacctgtgctcctgctgggcaggcccggtgtgttcaccatggaggcagcacgttcagctgtgcctgcctgcctggttatgccggcgatgggcaccagtgcactgatgtagatgaatgctcagaaaacagatgtcaccctgcagctacctgctacaatactcctggttccttctcctgccgttgtcaacccggatattatggggatggatttcagtgcatacctgactccacctcaagcctgacaccctgtgaacaacagcagcgccatgcccaggcccagtatgcctaccctggggcccggttccacatcccccaatgcgacgagcagggcaacttcctgcccctacagtgtcatggcagcactggtttctgctggtgcgtggaccctgatggtcatgaagttcctggtacccagactccacctggctccaccccgcctcactgtggaccatcaccagagcccacccagaggcccccgaccatctgtgagcgctggagggaaaacctgctggagcactacggtggcaccccccgagatgaccagtacgtgccccagtgcgatgacctgggccacttcatccccctgcagtgccacggaaagagcgacttctgctggtgtgtggacaaagatggcagagaggtgcagggcacccgctcccagccaggcaccacccctgcgtgtatacccaccgtcgctccacccatggtccggcccacgccccggccagatgtgacccctccatctgtgggcaccttcctgctctatactcagggccagcagattggctacttacccctcaatggcaccaggcttcagaaggatgcagctaagaccctgctgtctctgcatggctccataatcgtgggaattgattacgactgccgggagaggatggtgtactggacagatgttgctggacggacaatcagccgtgccggtctggaactgggagcagagcctgagacgatcgtgaattcaggtctgataagccctgaaggacttgccatagaccacatccgcagaacaatgtactggacggacagtgtcctggataagatagagagcgccctgctggatggctctgagcgcaaggtcctcttctacacagatctggtgaatccccgtgccatcgctgtggatccaatccgaggcaacttgtactggacagactggaatagagaagctcctaaaattgaaacgtcatctttagatggagaaaacagaagaattctgatcaatacagacattggattgcccaatggcttaacctttgaccctttctctaaactgctctgctgggcagatgcaggaaccaaaaaactggagtgtacactacctgatggaactggacggcgtgtcattcaaaacaacctcaagtaccccttcagcatcgtaagctatgcagatcacttctaccacacagactggaggagggatggtgttgtatcagtaaataaacatagtggccagtttactgatgagtatctcccagaacaacgatctcacctctacgggataactgcagtctacccctactgcccaacaggaagaaagtaagtacagtaatgtaaaggaagacttggagtttacaatcagaacctggaccctaaagaacagtgactgcaaaggcaaagaaagtaaaaaaggaattggccattagacgttcctgagcatccaagatgaacattttgtagtgcaaaaagacttttgtgaaaagctgatacctcaatctttactactgtatttttaaaaatgaaggttgttattgcaagtttaaaaaggtaacagaattttaactgttgcttattaaagcaacttcttgtaaacatttatcattaatatttaaaagatcaaattcattcaactaagaattagagtttaagactctaaacctgatttttgccatggattccttctggccaagaaattaaagcacatgtgatcaatataacaatataatcctaaaccttgacagttggagaagccaatgcagaactgatgggaaaggaccaattatttatagtttcccaacaaaagttctaagattttttacctctgcatcagtgcatttctatttatatcaaaaggtgctaaaatgattcaatttgcattttctgatcctgtagtgcctctatagaagtacccacagaaagtaaagtatcacatttataaataccaaagatgtaacaattttaaaattttctagattactccaataaagtgttttaagttttcctatga

SEQ ID NO: 436074 - DNA, 1168 bp, Homo sapiens
atcactgggggctgcttagatgctgcctaccacaggctacatggctattcttttacaatcttgatttttaacttacagcaacttgtactggacagactggaatagagaagctcctaaaattgaaacgtcatctttagatggagaaaacagaagaattctgatcaatacagacattggattgcccaatggcttaacctttgaccctttctctaaactgctctgctgggcagatgcaggaaccaaaaaactggagtgtacactacctgatggaactggacggcgtgtcattcaaaacaacctcaagtaccccttcagcatcgtaagctatgcagatcacttctaccacacagactggaggagggatggtgttgtatcagtaaataaacatagtggccagtttactgatgagtatctcccagaacaacgatctcacctctacgggataactgcagtctacccctactgcccaacaggaagaaagtaagtacagtaatgtaaaggaagacttggagtttacaatcagaacctggaccctaaagaacagtgactgcaaaggcaaagaaagtaaaaaaggaattggccattagacgttcctgagcatccaagatgaacattttgtagtgcaaaaagacttttgtgaaaagctgatacctcaatctttactactgtatttttaaaaatgaaggttgttattgcaagtttaaaaaggtaacagaattttaactgttgcttattaaagcaacttcttgtaaacatttatcattaatatttaaaagatcaaattcattcaactaagaattagagtttaagactctaaacctgatttttgccatggattccttctggccaagaaattaaagcacatgtgatcaatataacaatataatcctaaaccttgacagttggagaagccaatgcagaactgatgggaaaggaccaattatttatagtttcccaacaaaagttctaagattttttacctctgcatcagtgcatttctatttatatcaaaaggtgctaaaatgattcaatttgcattttctgatcctgtagtgcctctatagaagtacccacagaaagtaaagtatcacatttataaataccaaagatgtaacaattttaaaattttctagattactccaataaagtgttttaagttttcctatga

SEQ ID NO: 436075 - DNA, 584 bp, Homo sapiens
acgagccacggcagaggccgagtcctgtaccgagaggacacctcccccgcagtgctgggcctggccgcccgctatgtgcgcgctggcttcccgcgctctgcgcgctttacccccacccacgccttcctggccacctgggagcaggtaggcgcttacgaggaggtcaagcgcggggcgctgccctcgggagaggtaagtgaccagggatatttgactgctgaggaaattgaaggatgggcttaaattctggggcagcgacccagggactggctcggagttgtttctgagcctactcttgcgctgaacctgaccttggaggcagcagggctggagtggcttgggagtgaggaaagacgttgtctctaggcatcttctgaggccctggcaggtggtcactcccttgaggaaaaaaatgcttagcggatatgagagcgggagtgcagatgtgggagcccctttgaacataaggcaatttactgtttggttgcttatttttagaaccatctctaagtatacaagtatttctaattatatgttcattgaaggggaaaaaatcagaaaatacagataattttaaaaaagaa

SEQ ID NO: 436076 - DNA, 971 bp, Homo sapiens
tagtggcgcatgcctgtaatcccagctacttgtgaggctgaggcaggagaatcccttgaacccagaaggcagaggttgcagtgtgcagtgagctgagattgtgccattgcactccagcctgggcaacatgagcgaaactccatctcaaaaaaacaaaaacaaaaaacaaactcaaattagcatgatagatcaggctacttagattcagctttctgagatgttatttgttaacattaaggctaatttattataatgaaaatgtaaactttgaggtatgttaatatataaacatctttttcctttggcctaaaaggtctttagtattcagcacactgggtaaagttcagtttagacacaatcaaattggcatcttttaaacataagtgaaatatagagagcttgaacttgagttacttaaagaagatacagtataattaattatacagaacaaaacaaagatgtgtttagagtgactctggcctgactcttgtccatcagcccctagtagcctatcttcagcctttgggaagtcttaacttcccaggttaaactagaatattctggaactgagctgtccaaatttcatcttaaagtggatcatttgactctgaaacacgattctcatggcagaaaaagccctggtgtttccttggagctggggataaaggccagtgagccagcctgtgatgagagctgcccctggcactatctgagtggaaagctcattgggacagccatgcagctatcagagccgactgaagccctgtcccttacccctcaggcacctgatgcttaacttgcctcctgggaaataatgatctagcatttacttggaacaatgattaatcatgttctttaataattgctgacatttgtattttaagctgtataccaatgttcgtatttgacattgattttctaaccattagagatatttaattaaaacttggaaatgaaagaaaaaaaaaaaa

SEQ ID NO: 436077 - DNA, 2095 bp, Homo sapiens
cacgcgtcggagaaactccatctctactaaaagtacaaaattagcccgagtagctgggactatgcaccaccatgcctggctaatttttttaattttttgtagagacagggttttgccatgttgcccaggctggtctcaaactcctagactcaggcaatctgcccacctcggcctcccaaggtgctgggatgataggcatgagccaccgcacccagcctatctcctagatcttgaatcaaaaataaaatgtaaatcacttccattctgctagcatgagggtttgttgctaaaattgaggattctatctgacgtttactttttgttgttttttgagacaaggtcttgctttgtcgcccatgctggagtgcagtggcatcattataactcactgtcaaactcctggactccaatgttccctccccttttagcctcccaagtagctgggtctacaggcatgaaccatcaggcccagataattaaaaaaactttttttggtgaaaacatgatcttgctatgttgctcaggctggttgtctggcattttctttgtcctttattctttatactagctaaaccctggagtatccttgaagcctttactggcatacagagtacctgaatcttactttggagcctagcatgggtcataaatatatctgattcattaacctgtgagacagctgagagaacacagactccttacctgtatctccaggcatatctggtttttctctgcctaatagattttcctgctttctagttagtaatattgagaaagaagaaaggcttatttatcatttgctttttttccactgtgaatcatctgttctttccatgaacattctggggagcacctcctgattaaactcctgtctccctgaccactatcctgctgtcattggacttcttgaagcacatgggctactgccccaggacactgggatttgagaggagtttagtggtaattgtcaggtctttcaaagcatttattattccttttatacggagatttcagtattgagacttaaaatgaactgaaaaatgagattgaacatttaatattttggatgtaacttttgaagaaagtatgctttggtgcttaaaattgtatatgattttaggtaagaaactttgataatattggcataatttagatttattttctttcttttttttgagacagtctcgctcagtcgcccaggctgaagtgcagtgagctgagattgtgccattgcactccagcctgggcaacatgagcgaaactccatctcaaaaaaacaaaaacaaaaaacaaactcaaattagcatgatagatcaggctacttagattcagctttctgagatgttatttgttaacattaaggctaatttattataatgaaaatgtaaactttgaggtatgttaatatataaacatctttttcctttggcctaaaaggtctttagtattcagcacactgggtaaagttcagtttagacacaatcaaattggcatcttttaaacataagtgaaatatagagagcttgaacttgagttacttaaagaagatacagtataattaattatacagaacaaaacaaagatgtgtttagagtgactctggcctgactcttgtccatcagcccctagtagcctatcttcagcctttgggaagtcttaacttcccaggttaaactagaatattctggaactgagctgtccaaatttcatcttaaagtggatcatttgactctgaaacacgattctcatggcagaaaaagccctggtgtttccttggagctggggataaaggccagtgagccagcctgtgatgagagctgcccctggcactatctgagtggaaagctcattgggacagccatgcagctatcagagccgactgaagccctgtcccttacccctcaggcacctgatgcttaacttgcctcctgggaaataatgatctagcatttacttggaacaatgattaatcatgttctttaataattgctgacatttgtattttaagctgtataccaatgttcgtatttgacattgattttctaaccattagagatatttaattaaaacttggaaatgaaagaaaaaaaaaaaa

SEQ ID NO: 436078 - DNA, 1799 bp, Homo sapiens
gcatgcctgtgatcccagctacttgtgaggctgaggcaggagaatcccttgaacccagaaggcagagggtgcagtggcatcattataactcactgtcaaactcctggactccaatgttccctccccttttagcctcccaagtagctgggtctacaggcatgaaccatcaggcccagataattaaaaaaactttttttggtgaaaacatgatcttgctatgttgctcaggctggttgtctggcattttctttgtcctttattctttatactagctaaaccctggagtatccttgaagcctttactggcatacagagtacctgaatcttactttggagcctagcatgggtcataaatatatctgattcattaacctgtgagacagctgagagaacacagactccttacctgtatctccaggcatatctggtttttctctgcctaatagattttcctgctttctagttagtaatattgagaaagaagaaaggcttatttatcatttgctttttttccactgtgaatcatctgttctttccatgaacattctggggagcacctcctgattaaactcctgtctccctgaccactatcctgctgtcattggacttcttgaagcacatgggctactgccccaggacactgggatttgagaggagtttagtggtaattgtcaggtctttcaaagcatttattattccttttatacggagatttcagtattgagacttaaaatgaactgaaaaatgagattgaacatttaatattttggatgtaacttttgaagaaagtatgctttggtgcttaaaattgtatatgattttaggtaagaaactttgataatattggcataatttagatttattttctttcttttttttgagacagtctcgctcagtcgcccaggctgaagtgcagtgagctgagattgtgccattgcactccagcctgggcaacatgagcgaaactccatctcaaaaaaacaaaaacaaaaaacaaactcaaattagcatgatagatcaggctacttagattcagctttctgagatgttatttgttaacattaaggctaatttattataatgaaaatgtaaactttgaggtatgttaatatataaacatctttttcctttggcctaaaaggtctttagtattcagcacactgggtaaagttcagtttagacacaatcaaattggcatcttttaaacataagtgaaatatagagagcttgaacttgagttacttaaagaagatacagtataattaattatacagaacaaaacaaagatgtgtttagagtgactctggcctgactcttgtccatcagcccctagtagcctatcttcagcctttgggaagtcttaacttcccaggttaaactagaatattctggaactgagctgtccaaatttcatcttaaagtggatcatttgactctgaaacacgattctcatggcagaaaaagccctggtgtttccttggagctggggataaaggccagtgagccagcctgtgatgagagctgcccctggcactatctgagtggaaagctcattgggacagccatgcagctatcagagccgactgaagccctgtcccttacccctcaggcacctgatgcttaacttgcctcctgggaaataatgatctagcatttacttggaacaatgattaatcatgttctttaataattgctgacatttgtattttaagctgtataccaatgttcgtatttgacattgattttctaaccattagagatatttaattaaaacttggaaatgaaagaaaaaaaaaaaa

SEQ ID NO: 436079 - DNA, 2041 bp, Homo sapiens
cacgcgtcggagaaactccatctctactaaaagtacaaaattagcccgagtagctgggactatgcaccaccatgcctggctaatttttttaattttttgtagagacagggttttgccatgttgcccaggctggtctcaaactcctagactcaggcaatctgcccacctcggcctcccaaggtgctgggatgataggcatgagccaccgcacccagcctatctcctagatcttgaatcaaaaataaaatgtaaatcacttccattctgctagcatgagggtttgttgctaaaattgaggattctatctgacgtttactttttgttgttttttgagacaaggtcttgctttgtcgcccatgctggagtgcagtggcatcattataactcactgtcaaactcctggactccaatgttccctccccttttagcctcccaagtagctgggtctacaggcatgaaccatcaggcccagataattaaaaaaactttttttggtgtttattctttatactagctaaaccctggagtatccttgaagcctttactggcatacagagtacctgaatcttactttggagcctagcatgggtcataaatatatctgattcattaacctgtgagacagctgagagaacacagactccttacctgtatctccaggcatatctggtttttctctgcctaatagattttcctgctttctagttagtaatattgagaaagaagaaaggcttatttatcatttgctttttttccactgtgaatcatctgttctttccatgaacattctggggagcacctcctgattaaactcctgtctccctgaccactatcctgctgtcattggacttcttgaagcacatgggctactgccccaggacactgggatttgagaggagtttagtggtaattgtcaggtctttcaaagcatttattattccttttatacggagatttcagtattgagacttaaaatgaactgaaaaatgagattgaacatttaatattttggatgtaacttttgaagaaagtatgctttggtgcttaaaattgtatatgattttaggtaagaaactttgataatattggcataatttagatttattttctttcttttttttgagacagtctcgctcagtcgcccaggctgaagtgcagtgagctgagattgtgccattgcactccagcctgggcaacatgagcgaaactccatctcaaaaaaacaaaaacaaaaaacaaactcaaattagcatgatagatcaggctacttagattcagctttctgagatgttatttgttaacattaaggctaatttattataatgaaaatgtaaactttgaggtatgttaatatataaacatctttttcctttggcctaaaaggtctttagtattcagcacactgggtaaagttcagtttagacacaatcaaattggcatcttttaaacataagtgaaatatagagagcttgaacttgagttacttaaagaagatacagtataattaattatacagaacaaaacaaagatgtgtttagagtgactctggcctgactcttgtccatcagcccctagtagcctatcttcagcctttgggaagtcttaacttcccaggttaaactagaatattctggaactgagctgtccaaatttcatcttaaagtggatcatttgactctgaaacacgattctcatggcagaaaaagccctggtgtttccttggagctggggataaaggccagtgagccagcctgtgatgagagctgcccctggcactatctgagtggaaagctcattgggacagccatgcagctatcagagccgactgaagccctgtcccttacccctcaggcacctgatgcttaacttgcctcctgggaaataatgatctagcatttacttggaacaatgattaatcatgttctttaataattgctgacatttgtattttaagctgtataccaatgttcgtatttgacattgattttctaaccattagagatatttaattaaaacttggaaatgaaagaaaaaaaaaaaa

SEQ ID NO: 436080 - DNA, 2027 bp, Homo sapiens
cacgcgtcggagaaactccatctctactaaaagtacaaaattagcccgagtagctgggactatgcaccaccatgcctggctaatttttttaattttttgtagagacagggttttgccatgttgcccaggctggtctcaaactcctagactcaggcaatctgcccacctcggcctcccaaggtgctgggatgataggcatgagccaccgcacccagcctatctcctagatcttgaatcaaaaataaaatgtaaatcacttccattctgctagcatgagggtttgttgctaaaattgaggattctatctgacgtttactttttgttgttttttgagacaaggtcttgctttgtcgcccatgctggagtgcagtggcatcattataactcactgtcaaactcctggactccaatgttccctccccttttagcctcccaagtagctgggtctacaggcatgaaccatcaggcccagataattaaaaaaactttttttggtgaaaacatgatcttgctatgttgctcaggctggttgtctggcattttctttgtcctttattctttatactagctaaaccctggagtatccttgaagcctttactggcatacagagtacctgaatcttactttggagcctagcatgggtcataaatatatctgattcattaacctgtgagacagctgagagaacacagactccttacctgtatctccaggcatatctggtttttctctgcctaatagattttcctgctttctagttagtaatattgagaaagaagaaaggcttatttatcatttgctttttttccactgtgaatcatctgttctttccatgaacattctggggagcacctcctgattaaactcctgtctccctgaccactatcctgctgtcattggacttcttgaagcacatgggctactgccccaggacactgggatttgagaggagtttagtggtaattgtcaggtctttcaaagcatttattattccttttatacggagatttcagtattgagacttaaaatgaactgaaaaatgagattgaacatttaatattttggatgtaacttttgaagaaagtatgctttggtgcttaaaattgtatatgattttaggtaagaaactttgataatgtgcagtgagctgagattgtgccattgcactccagcctgggcaacatgagcgaaactccatctcaaaaaaacaaaaacaaaaaacaaactcaaattagcatgatagatcaggctacttagattcagctttctgagatgttatttgttaacattaaggctaatttattataatgaaaatgtaaactttgaggtatgttaatatataaacatctttttcctttggcctaaaaggtctttagtattcagcacactgggtaaagttcagtttagacacaatcaaattggcatcttttaaacataagtgaaatatagagagcttgaacttgagttacttaaagaagatacagtataattaattatacagaacaaaacaaagatgtgtttagagtgactctggcctgactcttgtccatcagcccctagtagcctatcttcagcctttgggaagtcttaacttcccaggttaaactagaatattctggaactgagctgtccaaatttcatcttaaagtggatcatttgactctgaaacacgattctcatggcagaaaaagccctggtgtttccttggagctggggataaaggccagtgagccagcctgtgatgagagctgcccctggcactatctgagtggaaagctcattgggacagccatgcagctatcagagccgactgaagccctgtcccttacccctcaggcacctgatgcttaacttgcctcctgggaaataatgatctagcatttacttggaacaatgattaatcatgttctttaataattgctgacatttgtattttaagctgtataccaatgttcgtatttgacattgattttctaaccattagagatatttaattaaaacttggaaatgaaagaaaaaaaaaaaa

SEQ ID NO: 436081 - DNA, 2014 bp, Homo sapiens
cacgcgtcggagaaactccatctctactaaaagtacaaaattagcccgagtagctgggactatgcaccaccatgcctggctaatttttttaattttttgtagagacagggttttgccatgttgcccaggctggtctcaaactcctagactcaggcaatctgcccacctcggcctcccaaggtgctgggatgataggcatgagccaccgcacccagcctatctcctagatcttgaatcaaaaataaaatgtaaatcacttccattctgctagcatgagggtttgttgctaaaattgaggattctatctgacgtttactttttgttgttttttgagacaaggtcttgctttgtcgcccatgctggagtgcagtggcatcattataactcactgtcaaactcctggactccaatgttccctccccttttagcctcccaagtagctgggtctacaggcatgaaccatcaggcccagataattaaaaaaactttttttggtgaaaacatgatcttgctatgttgctcaggctggttgtctggcattttctttgtcctttattctttatactagctaaaccctggagtatccttgaagcctttactggcatacagagtacctgaatcttactttggagcctagcatgggtcataaatatatctgattcattaacctgtgagacagctgagagaacacagactccttacctgtatctccaggcatatctggtttttctctgcctaatagattttcctgctttctagttagtaatattgagaaagaagaaaggcttatttatcatttgctttttttccactgtgaatcatctgttctttccatgaacattctggggagcacctcctgattaaactcctgtctccctgaccactatcctgctgtcattggacttcttgaagcacatgggctactgccccaggacactgggatttgagaggagtttagtggtaattgtcaggtctttcaaagcatttattattccttttatacggagatttcagtattgagacttaaaatgaactgaaaaatgagattgaacatttaatattttggatgtaacttttgaagaaagtatgctttggtgcttaaaattgtatatgattttaggtaagaaactttgataatattggcataatttagatttattttctttcttttttttgagacagtctcgctcagtcgcccaggctgaagtgcagtgagctgagattgtgccattgcactccagcctgggcaacatgagcgaaactccatctcaaaaaaacaaaaacaaaaaacaaactcaaattagcatgatagatcaggctacttagattcagctttctgagatgttatttgttaacattaaggctaatttattataatgaaaatgtaaactttgaggtatgttaatatataaacatctttttcctttggcctaaaaggtctttagtattcagcacactgggtaaagttcagtttagacacaatcaaattggcatcttttaaacataagtgaaatatagagagcttgaacttgagttacttaaagaagatacagtataattaattatacagaacaaaacaaagatgtgtttagagtgactctggcctgactcttgtccatcagcccctagtagcctatcttcagcctttgggaagtcttaacttcccaggttaaactagaatattctggaactgagctgtccaaatttcatcttaaagtggatcatttgactctgaaacacgattctcatggcagaaaaagccctggtgtttccttggagctggggataaaggccagtgagccagccctgtcccttacccctcaggcacctgatgcttaacttgcctcctgggaaataatgatctagcatttacttggaacaatgattaatcatgttctttaataattgctgacatttgtattttaagctgtataccaatgttcgtatttgacattgattttctaaccattagagatatttaattaaaacttggaaatgaaagaaaaaaaaaaaa

SEQ ID NO: 436082 - DNA, 1700 bp, Homo sapiens
cacgcgtcggagaaactccatctctactaaaagtacaaaattagcccgagtagctgggactatgcaccaccatgcctggctaatttttttaattttttgtagagacagggttttgccatgttgcccaggctggtctcaaactcctagactcaggcaatctgcccacctcggcctcccaaggtgctgggatgataggcatgagccaccgcacccagcctatctcctagatcttgaatcaaaaataaaatgtaaatcacttccattctgctagcatgagggtttgttgctaaaattgaggattctatctgacgtttactttttgttgttttttgagacaaggtcttgctttgtcgcccatgctggagtgcagtggcatcattataactcactgtcaaactcctggactccaatgttccctccccttttagcctcccaagtagctgggtctacaggcatgaaccatcaggcccagataattaaaaaaactttttttggtgaaaacatgatcttgctatgttgctcaggctggttgtctggcattttctttgtcctttattctttatactagctaaaccctggagtatccttgaagcctttactggcatacagagtacctgaatcttactttggagcctagcatgggtcataaatatatctgattcattaacctgtgagacagctgagagaacacagactccttacctgtatctccaggcatatctggtttttctctgcctaatagattttcctgctttctagttagtaatattgagaaagaagaaaggcttatttatcatttgctttttttccactgtgaatcatctgttctttccatgaacattctggggagcacctcctgattaaactcctgtctccctgaccactatcctgctgtcattggacttcttgaagcacatgggctactgccccaggacactgggatttgagaggagtttagtggtaattgtcaggtctttcaaagcatttattattccttttatacggagatttcagtattgagacttaaaatgaactgaaaaatgagattgaacatttaatattttggatgtaacttttgaagaaagtatgctttggtgcttaaaattgtatatgattttaggtaagaaactttgataatattggcataatttagatttattttctttcttttttttgagacagtctcgctcagtcgcccaggctgaagtgcagtgacacagtctcagctcactgcaacgtctgcctcccggattgaagtgactctcgtgcctctgccacagagtggctgggattacaggcatgcaccaccacacaccgctaattttttgtatttttggtggagacggagtttcaccatgttggccaggctgcgaactcctgagctcaggtgatcctcccacctcagcttcccaaagtgctggcattacaggcatgagccaccacacctcaccagatttttaaaaaatatataactgcatctctcttgattctggggcttggtaaaaatggatagataagatagtattctaaattcaaattcgtggctaggcacagtggcccacacctgtaatcccagcactttgggattccagacagaagactcacttgagtacagtatgagaccagcctgggcaacatagatcttgcctctacaaaaaaaaaaaaaaatagccaggtgtggcacatgcctgtagtctcag

SEQ ID NO: 436083 - DNA, 1089 bp, Homo sapiens
  misc_feature (41)..(41): n is a, c, g, or t
  misc_feature (61)..(62): n is a, c, g, or t
  misc_feature (73)..(73): n is a, c, g, or t
  misc_feature (75)..(75): n is a, c, g, or t
attaaaaaatttgtagaattcaactcttatggagttatgantatattacatatagattgannattgaggtagncncaaatccatctctttcttcataaagcagttgttttgtcactttgactatattaagacacatcagtgtagcacatgctcttaactggctgtggcattttaattttataaaagaatggtttttatctgaagaactagatagaaaccccagtttttgtgccgttcagtcacccagatccttaaacttaactatggtacataatatccacacttagaactaacaggtgtttagtcactttaggacttaaaatggaaagttttttttttttcctgctgtatctctgctttcaactgaagttaaagaattctagatagtttaaaatgtgttagggataagcacacttcaaaagatgttttctagccctaaattttatgacattgggtacttaaatttggagtacactagctattgagaacaatattttgggttgaggagagatggttgaggccattatttagtgggagcattggcattttgaacactgtaaacaaaagaacacttccgcctgctgtttgtaaaagctctttgggaagatcttttacgaagaccaactttttaaaatgtaaattacctacctaatataagtgtcctaagacatgtatgtaaacttccggaactgttttgtctgtgtatttagaaaatacacaagaatctttattcaaacctaaaaatataaacttgtgagcactaaactgcttctggctttgtgaattttattgactgacatttaattcagatttctttgcaagtgtactaatttagactaattggggtaaggggaacaccttaatgaactttgacttatgtataattcagatatctttgtacttaaggcttacaagtttgaattatggaatactataagggttttttgtttatttgtatgtttttatatgaaagtacataaatgacagactacctccaagtaatcctgctttaattaatagcagtgatttgtaatcagtgtatcttttaagattctctacaggttttagaaaatattaaaaattccctgt

SEQ ID NO: 436084 - DNA, 7993 bp, Homo sapiens
cggtccgttgttcatttgccattcgacctccgccagggcctggtcggacggaaacgctccgccggctttattgtcgcttcgttatgtggcggagccgagcagtttagcgtgcctctcaccctcagcgcctgcgaagccggcggcggcgtcgggactcctcggcgcgcggaggaaggatatctgtgtggaggatcggtgtgtgcgcgcgcggctttaaagagggggcagcggagggtctccccgcactccgctgctcaacttcgaaggcctcgctcgctgcaggctcgctcctcacctctccgccgcccgcccccttctccgcgcgggacgctgcccggagcgcggcggggcgggggtggaggacgagagagcggtcggaggcgtcggcccggcagcggcagcggcagcggacgcgtgcagcagacccgggagcgagcgcgagccgggctgccgggcgagagggcgaggccgagccccgcgagaccggaacgccgggggcgggggcgagacagagggggagccgcggggagcgcgcgggacgcggcccgaggccgtgcgcgagccggggcaccgggcggcggcggcggcggcgcgcgccatgtcgttcagtgaaatgaaccgcaggacgctggcgttccgaggaggcgggttggtcaccgctagcggcggcggctccacgaacaataacgctggcggggaggcctcagcttggcctccgcagccccagccgagacagcccccgccgacagcgccgcccgcgcttcagccgcctaatgggcggggggccgacgaggaagtggaattggagggcctggagccccaagacctggaggcctccgccgggccggccgccggcgccgccgaggaagccaaggagttgctgctcccccaagacgcgggcggccccacctcgcttggcggtggcgcggggggccccctgctagcggaaaggaaccgtcggactctggccttccgaggcggcggcggcgggggtctcggcaacaatggcagtagccgcggccgccccgagacctcggtgtggcccttgaggcatttcaatgggcgagggccggcgactgtggatctggagctggacgcgctggaggggaaggagttgatgcaggacggcgcgtccctgagcgacagcaccgaggacgaggaggagggggcgagcctgggcgacggcagcggggcggaaggcggcagctgcagcagcagcaggcggtcgggcggcgatggcggggacgaagtggagggcagcggtgtgggagctggcgaaggagagactgtccagcacttcccgctcgcgcggcccaagtctctaatgcagaagctccaatgctccttccagacctcctggctcaaggactttccctggctgcgctattccaaggatactggtcttatgtcttgcggctggtgccaaaagacccctgcagatgggggaagcgtggaccttcccccagtggggcatgatgagctttcgcgagggacccgcaactacaagaaaaccctcctcctgaggcaccacgtctctaccgagcacaaactccacgaagccaacgccccaggagtcagaaataccatcagaggaggggtactgggactttaataggaggccaaatgagaactcttattgctatcaacttctgcgacaactaaatgaacagagaaagaaaggtattctttgtgatgtcagcattgtggtaagcggaaaaatcttcaaagctcataagaacatcctggttgcaggcagccgtttctttaagactttatattgcttttcaaacaaagaaagccctaaccaaaacaatactacccacttagatattgctgcagttcaaggtttttcagtcatcttggacttcttgtattctggtaacctggtgctcacaagccaaaatgccattgaagttatgaccgtggccagctatcttcaaatgagtgaagttgttcaaacttgccgaaatttcattaaagatgccttaaatataagcattaaatcagaagctccagagtctgtagttgtggactataataatagaaaaccagttaatagagatggtctgtcttcatcacgggatcaaaaaattgccagtttttgggcaacacggaatcttaccaatttggcaagtaatgtaaagattgaaaatgatggttgtaatgtcgacgagggccaaatagaaaactaccaaatgaatgacagtagttgggtccaggatggatctcctgaaatggctgaaaatgaatctgaaggtcaaacaaaagtgtttatttggaataatatgggctcccagggaattcaagagactggcaaaacaaggaggaaaaaccaaactacaaaaagatttatttataatattccacctaataatgaaacgaatttagaagattgctcagtaatgcagccacctgttgcctatccagaagaaaatacactactcatcaaggaagaaccagatttagatggtgctctactctcggggccagatggtgataggaatgtgaatgcaaatttattggctgaagctggcactagtcaagatggaggtgatgctggtacttcacatgatttcaagtatggtttgatgcctggtccttcaaatgatttcaagtatggattattgccagaatcttggccaaaacaagaaacctgggaaaatggtgaatcatctctaatcatgaacaagttaaaatgccctcattgtagctatgtagccaaatacagacgaacactaaaaaggcacttgctcattcacacaggagtgagatcatttagctgtgatatttgtggaaaactgtttactcgaagagaacatgtaaaaagacattccctggtgcataaaaaggataaaaaatacaaatgtatggtgtgtaagaagatcttcatgttagcagccagtgttggaataagacatggatctcgacgttatggtgtttgtgtagactgtgcagataaatcacagccaggagggcaagaaggtgtagatcagggacaggatacagaattccctcgggatgaagaatacgaggagaatgaagtaggagaagctgatgaagagctagttgatgatggagaagatcagaatgatccctctcgatgggatgaatcaggagaagtttgtatgtctctagatgattaactgacctactatactcctcaaggatgctgcatttggacctaatatgaatcgacaatttggattgttgaacttgaaggcttgcaaaatatggtacatgctggatagtagttatgttgctgtgaaaactgtagggtcaaagccttatagcaaaaaaaatttttttttatatttgcacaggactatacagcaaacaaccatgtggttggattacatggagtccccacatactcagtcagttatcaaagtaaaatattttttatttataggatatacagtaactatttgggtcctatgaaaatagtccttaaagagcttacattcatgtgctactttaacatgaatggagaaaatccgtttatggaagtacagtgacaattgacccaatcactctgtccatcaaaccactcaggctagtttgtactagtagagttttgtttctatttttatttttattaattttattttttttaatacagattttcagtgaggggctttttcaatcccattggttctattttcttgtatttttccatttaatttgcttcataacttaaaccaagtctcttctagtcttaggtattatttctcgattttgtgctgatgggcatgtttataagaactggagaggtaatttattggaatgaactaactgacttcctccattcccctcttcctttttgacatgaattttactacttcacaaatgaagaatgatgttatgaagttaccgtggcgaagttgacaaataccactaaaatgattatgatttagaagtaactttcttctgctgctctaatctgataaatggttactatatgatattttctgacatggtatttggttttgggtatctgttactttggcactattcttgtttgcctctttatttttgccagtgtactatacctcagtcctatttgaaagacctaattgaaagaaaaatcatagaaataagtaaaatgatttgttttataatttatccaccatgtccagtttggttagcttgttatgcaatataagtgaaatatcaggtttttacccgtgtcccttttatcatgaaaattaacacaaaatgtgcattctcttttgtttcatacttagcgggatattgattgttttgaaattatgatcaatacttaatttatttttttctgtccttgaagtcactacaccttgatacagtctttctagtagtcaccatgattcaacagtctcaaaaatcttacaaataaaattctgagaagctttattattctataaattcttcagggtacaaagggtgacatattgaggtgaaattgtcagatttacttagcctggtgacatgaattagctgattgtggaactctcagcagcatttcacgtattgttaacatgtatggcatttattagcatattgtatattatataagattgagggatgtcatattttcagctttcttttaaataaaaattgagtatattttcctattttatatcaggtaactaaattatgctagttatgtggaaaaaattgcaaagatgctttgacagatataatccctttggtgctccatctgatcaaagttgaaaagttgatgttttttaagagacaagctttatcattgtctctgatttcagtagaataatggtttattgttagacaatgatgtttctgcttggataaatcaaagataaattacagttacatggttagatgcatcttttgtcatctatattgtagtttctacataactgtaaacctgacagataagaatagtttcggtttgatttttgtttaaaacagatgagtacttcttaatgttctagacaaatgagtaaaatgtatttctggtagaaattagttgggcaaagatactatgaatgaaaaagtattttaaacgtaaaatgttctttgtgaatatgtaagtatagtataaagatttctttcatcccatttatccccttcctttaaataaactagtttacaattggtagatctgtctatatataaatatatattaaagaacaaagatatatatctaaaaatcacctaaatctgctttattagactacagttcacttattgcatagaaactggacttggctttacattcttaatgtacttttacttttcctcaagatatgaacttactctcttgaagctgaattttcttttactacttaaatcatttatgtatatctggtaaattatgaccaaatttttgttagattgcatacagtaaattgaaatacacacttggtacactacgggattgttgtgcttttgtttggttttagttggaaataaggtttgatgtagatggcttgttactgttaatttaaaatattctataattgtccattactttatgttgtgttgtgacagatttggctatatttttagtcaattgaaatatgatactttaaaagtttgtttttaggtaatccaaaggaaaagtgtttatactcttgaatatattagcctcagcctatataaaaatttctttgaagtaaacattttaccggaaacagaattgacagatttttctacttgctgactgcctaacttattttgtttcatgatctcgagggactgccttttcccatctagatcttttaaaaaaatagttttagtactaaggtatactactggacatttctatttttttaagtgtattctttttctgacttacagtaaaatttcaggaagttgatagatactaagaacttatgattggtctcagaggtaacaatgaaatactcataattttgtctgtggaactctggcagaattatgttacacatttggcgaagttgtctcttgtaatttatattttaaatgaaaaagtattttagagcttttaatgaaggggaagagtataaactttctttcatattcactctgtagttacagaccgtctcataaatcaagattgtgcattattagagttctcagagacagatacttccatatggacccctgttcatttttcttatttactagatattttgctaaatttagcacactagcaattaagagtttaaaaaagaagaaacgttataggaaagggaaactgaacagtaatgagtagctttgaaattggggaaaacacactagctgggttaggtacagctatcctaatggagaagagtgagctaaatgcgttaattcatgtaaagtgcttagaacactggtacataataggtgcataacacatcttaaagttgtttaataatagataagaaccaagaggaaaaagaaataagaaaagatgggggaaaggaaggagaaaataggaaatgaaaggattaggacttgggcatttatattaatacaaaatggtgtaaacggcctgaatatcactgtagtagtatcatacgggggaaagtgtgatggaaaataggtttaaaaatcttaatttttaaaactttagtaagctttatttatattttttaggattttctgaacatagcatgaagggtttagattcatttttctgaaaaacgattaaaaaaactaccaattttttttttgagtgcccacacttgccgttgtgctgtatacatgattttaccttaatcctctataaggtaggtgctaatggtctccattttatagatgaggaaaggctcagagaaattcagaaacttggctaatttaacacagctgtgacagagctcgaatttgaccacgtctgattctgaagcccatactctttcagggaggctctattgctgcctcattaaacaactcttgtagaatttcagctcttaatggagtctatggatctatatttttcctataagacagctgtgtttagaattttgagtgtctttcctccccccaataaatttccttactactctttcttcataaagcagttgttttgtcactttgactatattaagacacatcagtgtagcacatgctcttaactggctgtggcattttaattttataaaagaatggtttttatctgaagaactagatagaaaccccagtttttgtgccgttcagtcacccagatccttaaacttaactatggtacataatatccacacttagaactaacaggtgtttagtcactttaggacttaaaatggaaagttttttttttttcctgctgtatctctgctttcaactgaagttaaagaattctagatagtttaaaatgtgttagggataagcacacttcaaaagatgttttctagccctaaattttatgacattgggtacttaaatttggagtacactagctattgagaacaatattttgggttgaggagagatggttgaggccattatttagtgggagcattggcattttgaacactgtaaacaaaagaacacttccgcctgctgtttgtaaaagctctttgggaagatcttttacgaagaccaactttttaaaatgtaaattacctacctaatataagtgtcctaagacatgtatgtaaacttccggaactgttttgtctgtgtatttagaaaatacacaagaatctttattcaaacctaaaaatataaacttgtgagcactaaactgcttctggctttgtgaattttattgactgacatttaattcagatttctttgcaagtgtactaatttagactaattggggtaaggggaacaccttaatgaactttgacttatgtataattcagatatctttgtacttaaggcttacaagtttgaattatggaatactataagggttttttgtttatttgtatgtttttatatgaaagtacataaatgacagactacctccaagtaatcctgctttaattaatagcagtgatttgtaatcagtgtatcttttaagattctctacaggttttagaaaatattaaaaattccctgt

SEQ ID NO: 436085 - DNA, 5119 bp, Homo sapiens
cggtccgttgttcatttgccattcgacctccgccagggcctggtcggacggaaacgctccgccggctttattgtcgcttcgttatgtggcggagccgagcagtttagcgtgcctctcaccctcagcgcctgcgaagccggcggcggcgtcgggactcctcggcgcgcggaggaaggatatctgtgtggaggatcggtgtgtgcgcgcgcggctttaaagagggggcagcggagggtctccccgcactccgctgctcaacttcgaaggcctcgctcgctgcaggctcgctcctcacctctccgccgcccgcccccttctccgcgcgggacgctgcccggagcgcggcggggcgggggtggaggacgagagagcggtcggaggcgtcggcccggcagcggcagcggcagcggacgcgtgcagcagacccgggagcgagcgcgagccgggctgccgggcgagagggcgaggccgagccccgcgagaccggaacgccgggggcgggggcgagacagagggggagccgcggggagcgcgcgggacgcggcccgaggccgtgcgcgagccggggcaccgggcggcggcggcggcggcgcgcgccatgtcgttcagtgaaatgaaccgcaggacgctggcgttccgaggaggcgggttggtcaccgctagcggcggcggctccacgaacaataacgctggcggggaggcctcagcttggcctccgcagccccagccgagacagcccccgccgacagcgccgcccgcgcttcagccgcctaatgggcggggggccgacgaggaagtggaattggagggcctggagccccaagacctggaggcctccgccgggccggccgccggcgccgccgaggaagccaaggagttgctgctcccccaagacgcgggcggccccacctcgcttggcggtggcgcggggggccccctgctagcggaaaggaaccgtcggactctggccttccgaggcggcggcggcgggggtctcggcaacaatggcagtagccgcggccgccccgagacctcggtgtggcccttgaggcatttcaatgggcgagggccggcgactgtggatctggagctggacgcgctggaggggaaggagttgatgcaggacggcgcgtccctgagcgacagcaccgaggacgaggaggagggggcgagcctgggcgacggcagcggggcggaaggcggcagctgcagcagcagcaggcggtcgggcggcgatggcggggacgaagtggagggcagcggtgtgggagctggcgaaggagagactgtccagcacttcccgctcgcgcggcccaagtctctaatgcagaagctccaatgctccttccagacctcctggctcaaggactttccctggctgcgctattccaaggatactggtcttatgtcttgcggctggtgccaaaagacccctgcagatgggggaagcgtggaccttcccccagtggggcatgatgagctttcgcgagggacccgcaactacaagaaaaccctcctcctgaggcaccacgtctctaccgagcacaaactccacgaagccaacgccccaggagtcagaaataccatcagaggaggggtactgggactttaataggaggccaaatgagaactcttattgctatcaacttctgcgacaactaaatgaacagagaaagaaaggtattctttgtgatgtcagcattgtggtaagcggaaaaatcttcaaagctcataagaacatcctggttgcaggcagccgtttctttaagactttatattgcttttcaaacaaagaaagccctaaccaaaacaatactacccacttagatattgctgcagttcaaggtttttcagtcatcttggacttcttgtattctggtaacctggtgctcacaagccaaaatgccattgaagttatgaccgtggccagctatcttcaaatgagtgaagttgttcaaacttgccgaaatttcattaaagatgccttaaatataagcattaaatcagaagctccagagtctgtagttgtggactataataatagaaaaccagttaatagagatggtctgtcttcatcacgggatcaaaaaattgccagtttttgggcaacacggaatcttaccaatttggcaagtaatgtaaagattgaaaatgatggttgtaatgtcgacgagggccaaatagaaaactaccaaatgaatgacagtagttgggtccaggatggatctcctgaaatggctgaaaatgaatctgaaggtcaaacaaaagtgtttatttggaataatatgggctcccagggaattcaagagactggcaaaacaaggaggaaaaaccaaactacaaaaagatttatttataatattccacctaataatgaaacgaatttagaagattgctcagtaatgcagccacctgttgcctatccagaagaaaatacactactcatcaaggaagaaccagatttagatggtgctctactctcggggccagatggtgataggaatgtgaatgcaaatttattggctgaagctggcactagtcaagatggaggtgatgctggtacttcacatgatttcaagtatggtttgatgcctggtccttcaaatgatttcaagtatggattattgccagaatcttggccaaaacaagaaacctgggaaaatggtgaatcatctctaatcatgaacaagttaaaatgccctcattgtagctatgtagccaaatacagacgaacactaaaaaggcacttgctcattcacacaggagtgagatcatttagctgtgatatttgtggaaaactgtttactcgaagagaacatgtaaaaagacattccctggtgcataaaaaggataaaaaatacaaatgtatggtgtgtaagaagatcttcatgttagcagccagtgttggaataagacatggatctcgacgttatggtgtttgtgtagactgtgcagataaatcacagccaggagggcaagaaggtgtagatcagggacaggatacagaattccctcgggatgaagaatacgaggagaatgaagtaggagaagctgatgaagagctagttgatgatggagaagatcagaatgatccctctcgatgggatgaatcaggagaagtttgtatgtctctagatgattaactgacctactatactcctcaaggatgctgcatttggacctaatatgaatcgacaatttggattgttgaacttgaaggcttgcaaaatatggtacatgctggatagtagttatgttgctgtgaaaactgtagggtcaaagccttatagcaaaaaaaatttttttttatatttgcacaggactatacagcaaacaaccatgtggttggattacatggagtccccacatactcagtcagttatcaaagtaaaatattttttatttataggatatacagtaactatttgggtcctatgaaaatagtccttaaagagcttacattcatgtgctactttaacatgaatggagaaaatccgtttatggaagtacagtgacaattgacccaatcactctgtccatcaaaccactcaggctagtttgtactagtagagttttgtttctatttttatttttattaattttattttttttaatacagattttcagtgaggggctttttcaatcccattggttctattttcttgtatttttccatttaatttgcttcataacttaaaccaagtctcttctagtcttaggtattatttctcgattttgtgctgatgggcatgtttataagaactggagaggtaatttattggaatgaactaactgacttcctccattcccctcttcctttttgacatgaattttactacttcacaaatgaagaatgatgttatgaagttaccgtggcgaagttgacaaataccactaaaatgattatgatttagaagtaactttcttctgctgctctaatctgataaatggttactatatgatattttctgacatggtatttggttttgggtatctgttactttggcactattcttgtttgcctctttatttttgccagtgtactatacctcagtcctatttgaaagacctaattgaaagaaaaatcatagaaataagtaaaatgatttgttttataatttatccaccatgtccagtttggttagcttgttatgcaatataagtgaaatatcaggtttttacccgtgtcccttttatcatgaaaattaacacaaaatgtgcattctcttttgtttcatacttagcgggatattgattgttttgaaattatgatcaatacttaatttatttttttctgtccttgaagtcactacaccttgatacagtctttctagtagtcaccatgattcaacagtctcaaaaatcttacaaataaaattctgagaagctttattattctataaattcttcagggtacaaagggtgacatattgaggtgaaattgtcagatttacttagcctggtgacatgaattagctgattgtggaactctcagcagcatttcacgtattgttaacatgtatggcatttattagcatattgtatattatataagattgagggatgtcatattttcagctttcttttaaataaaaattgagtatattttcctattttatatcaggtaactaaattatgctagttatgtggaaaaaattgcaaagatgctttgacagatataatccctttggtgctccatctgatcaaagttgaaaagttgatgttttttaagagacaagctttatcattgtctctgatttcagtagaataatggtttattgttagacaatgatgtttctgcttggataaatcaaagataaattacagttacatggttagatgcatcttttgtcatctatattgtagtttctacataactgtaaacctgacagataagaatagtttcggtttgatttttgtttaaaacagatgagtacttcttaatgttctagacaaatgagtaaaatgtatttctggtagaaattagttgggcaaagatactatgaatgaaaaagtattttaaacgtaaaatgttctttgtgaatatgtaagtatagtataaagatttctttcatcccatttatccccttcctttaaataaactagtttacaattggta

SEQ ID NO: 436086 - DNA, 7944 bp, Homo sapiens
cggtccgttgttcatttgccattcgacctccgccagggcctggtcggacggaaacgctccgccggctttattgtcgcttcgttatgtggcggagccgagcagtttagcgtgcctctcaccctcagcgcctgcgaagccggcggcggcgtcgggactcctcggcgcgcggaggaaggatatctgtgtggaggatcggtgtgtgcgcgcgcggctttaaagagggggcagcggagggtctccccgcactccgctgctcaacttcgaaggcctcgctcgctgcaggctcgctcctcacctctccgccgcccgcccccttctccgcgcgggacgctgcccggagcgcggcggggcgggggtggaggacgagagagcggtcggaggcgtcggcccggcagcggcagcggcagcggacgcgtgcagcagacccgggagcgagcgcgagccgggctgccgggcgagagggcgaggccgagccccgcgagaccggaacgccgggggcgggggcgagacagagggggagccgcggggagcgcgcgggacgcggcccgaggccgtgcgcgagccggggcaccgggcggcggcggcggcggcgcgcgccatgtcgttcagtgaaatgaaccgcaggacgctggcgttccgaggaggcgggttggtcaccgctagcggcggcggctccacgaacaataacgctggcggggaggcctcagcttggcctccgcagccccagccgagacagcccccgccgacagcgccgcccgcgcttcagccgcctaatgggcggggggccgacgaggaagtggaattggagggcctggagccccaagacctggaggcctccgccgggccggccgccggcgccgccgaggaagccaaggagttgctgctcccccaagacgcgggcggccccacctcgcttggcggtggcgcggggggccccctgctagcggaaaggaaccgtcggactctggccttccgaggcggcggcggcgggggtctcggcaacaatggcagtagccgcggccgccccgagacctcggtgtggcccttgaggcatttcaatgggcgagggccggcgactgtggatctggagctggacgcgctggaggggaaggagttgatgcaggacggcgcgtccctgagcgacagcaccgaggacgaggaggagggggcgagcctgggcgacggcagcggggcggaaggcggcagctgcagcagcagcaggcggtcgggcggcgatggcggggacgaagtggagggcagcggtgtgggagctggcgaaggagagactgtccagcacttcccgctcgcgcggcccaagtctctaatgcagaagctccaatgctccttccagacctcctggctcaaggactttccctggctgcgctattccaaggatactggtcttatgtcttgcggctggtgccaaaagacccctgcagatgggggaagcgtggaccttcccccagtggggcatgatgagctttcgcgagggacccgcaactacaagaaaaccctcctcctgaggcaccacgtctctaccgagcacaaactccacgaagccaacgccccaggagtcagaaataccatcagaggaggggtactgggactttaataggaggccaaatgagaactcttattgctatcaacttctgcgacaactaaatgaacagagaaagaaaggtattctttgtgatgtcagcattgtggtaagcggaaaaatcttcaaagctcataagaacatcctggttgcaggcagccgtttctttaagactttatattgcttttcaaacaaagaaagccctaaccaaaacaatactacccacttagatattgctgcagttcaaggtttttcagtcatcttggacttcttgtattctggtaacctggtgctcacaagccaaaatgccattgaagttatgaccgtggccagctatcttcaaatgagtgaagttgttcaaacttgccgaaatttcattaaagatgccttaaatataagcattaaatcagaagctccagagtctgtagttgtggactataataatagaaaaccagttaatagagatggtctgtcttcatcacgggatcaaaaaattgccagtttttgggcaacacggaatcttaccaatttggcaagtaatgtaaagattgaaaatgatggttgtaatgtcgacgagggccaaatagaaaactaccaaatgaatgacagtagttgggtccaggatggatctcctgaaatggctgaaaatgaatctgaaggtcaaacaaaagtgtttatttggaataatatgggctcccagggaattcaagagactggcaaaacaaggaggaaaaaccaaactacaaaaagatttatttataatattccacctaataatgaaacgaatttagaagattgctcagtaatgcagccacctgttgcctatccagaagaaaatacactactcatcaaggaagaaccagatttagatggtgctctactctcggggccagatggtgataggaatgtgaatgcaaatttattggctgaagctggcactagtcaagatggaggtgatgctggtacttcacatgatttcaagtatggtttgatgcctggtccttcaaatgatttcaagtatggattattgccagaatcttggccaaaacaagaaacctgggaaaatggtgaatcatctctaatcatgaacaagttaaaatgccctcattgtagctatgtagccaaatacagacgaacactaaaaaggcacttgctcattcacacaggagtgagatcatttagctgtgatatttgtggaaaactgtttactcgaagagaacatgtaaaaagacattccctggtgcataaaaaggataaaaaatacaaatgtatggtgtgtaagaagatcttcatgttagcagccagtgttggaataagacatggatctcgacgttatggtgtttgtgtagactgtgcagataaatcacagccaggagggcaagaaggtgtagatcagggacaggatacagaattccctcgggatgaagaatacgaggagaatgaagtaggagaagctgatgaagagctagttgatgatggagaagatcagaatgatccctctcgatgggatgaatcaggagaagtttgtatgtctctagatgattaactgacctactatactcctcaaggatgctgcatttggacctaatatgaatcgacaatttggattgttgaacttgaaggcttgcaaaatatggtacatgctggatagtagttatgttgctgtgaaaactgtagggtcaaagccttatagcaaaaaaaatttttttttatatttgcacaggactatacagcaaacaaccatgtggttggattacatggagtccccacatactcagtcagttatcaaagtaaaatattttttatttataggatatacagtaactatttgggtcctatgaaaatagtccttaaagagcttacattcatgtgctactttaacatgaatggagaaaatccgtttatggaagtacagtgacaattgacccaatcactctgtccatcaaaccactcaggctagtttgtactagtagagttttgtttctatttttatttttattaattttattttttttaatacagattttcagtgaggggctttttcaatcccattggttctattttcttgtatttttccatttaatttgcttcataacttaaaccaagtctcttctagtcttaggtattatttctcgattttgtgctgatgggcatgtttataagaactggactttttgacatgaattttactacttcacaaatgaagaatgatgttatgaagttaccgtggcgaagttgacaaataccactaaaatgattatgatttagaagtaactttcttctgctgctctaatctgataaatggttactatatgatattttctgacatggtatttggttttgggtatctgttactttggcactattcttgtttgcctctttatttttgccagtgtactatacctcagtcctatttgaaagacctaattgaaagaaaaatcatagaaataagtaaaatgatttgttttataatttatccaccatgtccagtttggttagcttgttatgcaatataagtgaaatatcaggtttttacccgtgtcccttttatcatgaaaattaacacaaaatgtgcattctcttttgtttcatacttagcgggatattgattgttttgaaattatgatcaatacttaatttatttttttctgtccttgaagtcactacaccttgatacagtctttctagtagtcaccatgattcaacagtctcaaaaatcttacaaataaaattctgagaagctttattattctataaattcttcagggtacaaagggtgacatattgaggtgaaattgtcagatttacttagcctggtgacatgaattagctgattgtggaactctcagcagcatttcacgtattgttaacatgtatggcatttattagcatattgtatattatataagattgagggatgtcatattttcagctttcttttaaataaaaattgagtatattttcctattttatatcaggtaactaaattatgctagttatgtggaaaaaattgcaaagatgctttgacagatataatccctttggtgctccatctgatcaaagttgaaaagttgatgttttttaagagacaagctttatcattgtctctgatttcagtagaataatggtttattgttagacaatgatgtttctgcttggataaatcaaagataaattacagttacatggttagatgcatcttttgtcatctatattgtagtttctacataactgtaaacctgacagataagaatagtttcggtttgatttttgtttaaaacagatgagtacttcttaatgttctagacaaatgagtaaaatgtatttctggtagaaattagttgggcaaagatactatgaatgaaaaagtattttaaacgtaaaatgttctttgtgaatatgtaagtatagtataaagatttctttcatcccatttatccccttcctttaaataaactagtttacaattggtagatctgtctatatataaatatatattaaagaacaaagatatatatctaaaaatcacctaaatctgctttattagactacagttcacttattgcatagaaactggacttggctttacattcttaatgtacttttacttttcctcaagatatgaacttactctcttgaagctgaattttcttttactacttaaatcatttatgtatatctggtaaattatgaccaaatttttgttagattgcatacagtaaattgaaatacacacttggtacactacgggattgttgtgcttttgtttggttttagttggaaataaggtttgatgtagatggcttgttactgttaatttaaaatattctataattgtccattactttatgttgtgttgtgacagatttggctatatttttagtcaattgaaatatgatactttaaaagtttgtttttaggtaatccaaaggaaaagtgtttatactcttgaatatattagcctcagcctatataaaaatttctttgaagtaaacattttaccggaaacagaattgacagatttttctacttgctgactgcctaacttattttgtttcatgatctcgagggactgccttttcccatctagatcttttaaaaaaatagttttagtactaaggtatactactggacatttctatttttttaagtgtattctttttctgacttacagtaaaatttcaggaagttgatagatactaagaacttatgattggtctcagaggtaacaatgaaatactcataattttgtctgtggaactctggcagaattatgttacacatttggcgaagttgtctcttgtaatttatattttaaatgaaaaagtattttagagcttttaatgaaggggaagagtataaactttctttcatattcactctgtagttacagaccgtctcataaatcaagattgtgcattattagagttctcagagacagatacttccatatggacccctgttcatttttcttatttactagatattttgctaaatttagcacactagcaattaagagtttaaaaaagaagaaacgttataggaaagggaaactgaacagtaatgagtagctttgaaattggggaaaacacactagctgggttaggtacagctatcctaatggagaagagtgagctaaatgcgttaattcatgtaaagtgcttagaacactggtacataataggtgcataacacatcttaaagttgtttaataatagataagaaccaagaggaaaaagaaataagaaaagatgggggaaaggaaggagaaaataggaaatgaaaggattaggacttgggcatttatattaatacaaaatggtgtaaacggcctgaatatcactgtagtagtatcatacgggggaaagtgtgatggaaaataggtttaaaaatcttaatttttaaaactttagtaagctttatttatattttttaggattttctgaacatagcatgaagggtttagattcatttttctgaaaaacgattaaaaaaactaccaattttttttttgagtgcccacacttgccgttgtgctgtatacatgattttaccttaatcctctataaggtaggtgctaatggtctccattttatagatgaggaaaggctcagagaaattcagaaacttggctaatttaacacagctgtgacagagctcgaatttgaccacgtctgattctgaagcccatactctttcagggaggctctattgctgcctcattaaacaactcttgtagaatttcagctcttaatggagtctatggatctatatttttcctataagacagctgtgtttagaattttgagtgtctttcctccccccaataaatttccttactactctttcttcataaagcagttgttttgtcactttgactatattaagacacatcagtgtagcacatgctcttaactggctgtggcattttaattttataaaagaatggtttttatctgaagaactagatagaaaccccagtttttgtgccgttcagtcacccagatccttaaacttaactatggtacataatatccacacttagaactaacaggtgtttagtcactttaggacttaaaatggaaagttttttttttttcctgctgtatctctgctttcaactgaagttaaagaattctagatagtttaaaatgtgttagggataagcacacttcaaaagatgttttctagccctaaattttatgacattgggtacttaaatttggagtacactagctattgagaacaatattttgggttgaggagagatggttgaggccattatttagtgggagcattggcattttgaacactgtaaacaaaagaacacttccgcctgctgtttgtaaaagctctttgggaagatcttttacgaagaccaactttttaaaatgtaaattacctacctaatataagtgtcctaagacatgtatgtaaacttccggaactgttttgtctgtgtatttagaaaatacacaagaatctttattcaaacctaaaaatataaacttgtgagcactaaactgcttctggctttgtgaattttattgactgacatttaattcagatttctttgcaagtgtactaatttagactaattggggtaaggggaacaccttaatgaactttgacttatgtataattcagatatctttgtacttaaggcttacaagtttgaattatggaatactataagggttttttgtttatttgtatgtttttatatgaaagtacataaatgacagactacctccaagtaatcctgctttaattaatagcagtgatttgtaatcagtgtatcttttaagattctctacaggttttagaaaatattaaaaattccctgt

SEQ ID NO: 436087 - DNA, 5249 bp, Homo sapiens
cggtccgttgttcatttgccattcgacctccgccagggcctggtcggacggaaacgctccgccggctttattgtcgcttcgttatgtggcggagccgagcagtttagcgtgcctctcaccctcagcgcctgcgaagccggcggcggcgtcgggactcctcggcgcgcggaggaaggatatctgtgtggaggatcggtgtgtgcgcgcgcggctttaaagagggggcagcggagggtctccccgcactccgctgctcaacttcgaaggcctcgctcgctgcaggctcgctcctcacctctccgccgcccgcccccttctccgcgcgggacgctgcccggagcgcggcggggcgggggtggaggacgagagagcggtcggaggcgtcggcccggcagcggcagcggcagcggacgcgtgcagcagacccgggagcgagcgcgagccgggctgccgggcgagagggcgaggccgagccccgcgagaccggaacgccgggggcgggggcgagacagagggggagccgcggggagcgcgcgggacgcggcccgaggccgtgcgcgagccggggcaccgggcggcggcggcggcggcgcgcgccatgtcgttcagtgaaatgaaccgcaggacgctggcgttccgaggaggcgggttggtcaccgctagcggcggcggctccacgaacaataacgctggcggggaggcctcagcttggcctccgcagccccagccgagacagcccccgccgacagcgccgcccgcgcttcagccgcctaatgggcggggggccgacgaggaagtggaattggagggcctggagccccaagacctggaggcctccgccgggccggccgccggcgccgccgaggaagccaaggagttgctgctcccccaagacgcgggcggccccacctcgcttggcggtggcgcggggggccccctgctagcggaaaggaaccgtcggactctggccttccgaggcggcggcggcgggggtctcggcaacaatggcagtagccgcggccgccccgagacctcggtgtggcccttgaggcatttcaatgggcgagggccggcgactgtggatctggagctggacgcgctggaggggaaggagttgatgcaggacggcgcgtccctgagcgacagcaccgaggacgaggaggagggggcgagcctgggcgacggcagcggggcggaaggcggcagctgcagcagcagcaggcggtcgggcggcgatggcggggacgaagtggagggcagcggtgtgggagctggcgaaggagagactgtccagcacttcccgctcgcgcggcccaagtctctaatgcagaagctccaatgctccttccagacctcctggctcaaggactttccctggctgcgctattccaaggatactggtcttatgtcttgcggctggtgccaaaagacccctgcagatgggggaagcgtggaccttcccccagtggggcatgatgagctttcgcgagggacccgcaactacaagaaaaccctcctcctgaggcaccacgtctctaccgagcacaaactccacgaagccaacgccccaggagtcagaaataccatcagaggaggggtactgggactttaataggaggccaaatgagaactcttattgctatcaacttctgcgacaactaaatgaacagagaaagaaaggtattctttgtgatgtcagcattgtggtaagcggaaaaatcttcaaagctcataagaacatcctggttgcaggcagccgtttctttaagactttatattgcttttcaaacaaagaaagccctaaccaaaacaatactacccacttagatattgctgcagttcaaggtttttcagtcatcttggacttcttgtattctggtaacctggtgctcacaagccaaaatgccattgaagttatgaccgtggccagctatcttcaaatgagtgaagttgttcaaacttgccgaaatttcattaaagatgccttaaatataagcattaaatcagaagctccagagtctgtagttgtggactataataatagaaaaccagttaatagagatggtctgtcttcatcacgggatcaaaaaattgccagtttttgggcaacacggaatcttaccaatttggcaagtaatgtaaagattgaaaatgatggttgtaatgtcgacgagggccaaatagaaaactaccaaatgaatgacagtagttgggtccaggatggatctcctgaaatggctgaaaatgaatctgaaggtcaaacaaaagtgtttatttggaataatatgggctcccagggaattcaagagactggcaaaacaaggaggaaaaaccaaactacaaaaagatttatttataatattccacctaataatgaaacgaatttagaagattgctcagtaatgcagccacctgttgcctatccagaagaaaatacactactcatcaaggaagaaccagatttagatggtgctctactctcggggccagatggtgataggaatgtgaatgcaaatttattggctgaagctggcactagtcaagatggaggtgatgctggtacttcacatgatttcaagtatggtttgatgcctggtccttcaaatgatttcaagtatggattattgccagaatcttggccaaaacaagaaacctgggaaaatggtgaatcatctctaatcatgaacaagttaaaatgccctcattgtagctatgtagccaaatacagacgaacactaaaaaggcacttgctcattcacacaggagtgagatcatttagctgtgatatttgtggaaaactgtttactcgaagagaacatgtaaaaagacattccctggtgcataaaaaggataaaaaatacaaatgtatggtgtgtaagaagatcttcatgttagcagccagtgttggaataagacatggatctcgacgttatggtgtttgtgtagactgtgcagataaatcacagccaggagggcaagaaggtgtagatcagggacaggatacagaattccctcgggatgaagaatacgaggagaatgaagtaggagaagctgatgaagagctagttgatgatggagaagatcagaatgatccctctcgatgggatgaatcaggagaagtttgtatgtctctagatgattaactgacctactatactcctcaaggatgctgcatttggacctaatatgaatcgacaatttggattgttgaacttgaaggcttgcaaaatatggtacatgctggatagtagttatgttgctgtgaaaactgtagggtcaaagccttatagcaaaaaaaatttttttttatatttgcacaggactatacagcaaacaaccatgtggttggattacatggagtccccacatactcagtcagttatcaaagtaaaatattttttatttataggatatacagtaactatttgggtcctatgaaaatagtccttaaagagcttacattcatgtgctactttaacatgaatggagaaaatccgtttatggaagtacagtgacaattgacccaatcactctgtccatcaaaccactcaggctagtttgtactagtagagttttgtttctatttttatttttattaattttattttttttaatacagattttcagtgaggggctttttcaatcccattggttctattttcttgtatttttccatttaatttgcttcataacttaaaccaagtctcttctagtcttaggtattatttctcgattttgtgctgatgggcatgtttataagaactggagaggtaatttattggaatgaactaactgacttcctccattcccctcttcctttttgacatgaattttactacttcacaaatgaagaatgatgttatgaagttaccgtggcgaagttgacaaataccactaaaatgattatgatttagaagtaactttcttctgctgctctaatctgataaatggttactatatgatattttctgacatggtatttggttttgggtatctgttactttggcactattcttgtttgcctctttatttttgccagtgtactatacctcagtcctatttgaaagacctaattgaaagaaaaatcatagaaataagtaaaatgatttgttttataatttatccaccatgtccagtttggttagcttgttatgcaatataagtgaaatatcaggtttttacccgtgtcccttttatcatgaaaattaacacaaaatgtgcattctcttttgtttcatacttagcgggatattgattgttttgaaattatgatcaatacttaatttatttttttctgtccttgaagtcactacaccttgatacagtctttctagtagtcaccatgattcaacagtctcaaaaatcttacaaataaaattctgagaagctttattattctataaattcttcagggtacaaagggtgacatattgaggtgaaattgtcagatttacttagcctggtgacatgaattagctgattgtggaactctcagcagcatttcacgtattgttaacatgtatggcatttattagcatattgtatattatataagattgagggatgtcatattttcagctttcttttaaataaaaattgagtatattttcctattttatatcaggtaactaaattatgctagttatgtggaaaaaattgcaaagatgctttgacagatataatccctttggtgctccatctgatcaaagttgaaaagttgatgttttttaagagacaagctttatcattgtctctgatttcagtagaataatggtttattgttagacaatgatgtttctgcttggataaatcaaagataaattacagttacatggttagatgcatcttttgtcatctatattgtagtttctacataactgtaaacctgacagataagaatagtttcggtttgatttttgtttaaaacagatgagtacttcttaatgttctagacaaatgagtaaaatgtatttctggtagaaattagttgggcaaagatactatgaatgaaaaagtattttaaacgtaaaatgttctttgtgaatatgtaagtatagtataaagatttttatccaattatccttcttaaataatagttacaatggaacaaacaaaaaaaaaaaagtgtgggggctcgggcggaaagtttaaacatgtgtgggcgggcggaaaggaaggtaaggttcaagggcggggaaggggttttcacaaagccgggggggtgaaacacagtgggctggtaagggtgg

SEQ ID NO: 436088 - DNA, 3507 bp, Homo sapiens
atatggataattatgacatttatccctcattaagctgcctatcagtttgatttggacaacttgacatttatttgagacattaagctactttctggtaatatattaggcatttctgcaatagctctttcaggtaactgaatattattaagcatagttttatcttgctttgattaaacctcttaggcaaaaaatggaacttcataagctaatacattagaaaggggttatgattataaatcagaaatgcttgtgacattaagaaatgaggcacttgtgaaatttctttgaaatagccagctcctctaatgtgtcttcaaaatataaagtgattcacaaaggcatgcatcacacctatttgtagcagcccattcattacataaaccagggcatacctgtgtgggctctgtgagtgaagggaggcttcactactttctgtgagcagtaaggactggtatctttctgtgagcaataaggactggataaagactgcatatccttgtgtcgtgtcagcaccaatacaataaggagggttttaatgtgaagcaggcaatcttccagccccttctggtcttggatgaaatagttgcacagagtattgcaccaaaaatacacaatggaggctgaaaagttcaacatattttaagtcaattaatcaaattgcattgattcttgatgctttcttagaggcctacatgatttcttagattgctctgataaactatcataaggggtccacctcccctcatttagctcccccagggatttcttttcccccatgtcatacacccagtcctaaatcaacccccaaggctatccttccatcccttctgcagagggaacttttgtcagactctgcaacaaactcctagctctatccagagtgtcctctgctgctaagattggtatctttctcctcaaaagcctggatggtgaatgggggtgcattagtcagaattctccagagaaacagaaaaaataagattcgcgtgtgtgtgcaaacatatatataaataaataaaaatatatttattttaaggaattgactcacatgattttgaaggcaggcaagcccaaagtctgcaaggggtgggccagcagagagctggtgctacagtgcgggtctgaaagttgccagagtcccttttatagagaagcttaaaaaatatttgttgaattaaatgtcttaggtagagacaaattgaattaaagtggttaagtaaatactcttaggtgaaatttgtgcaaattatgagtataaagagggtgagctacagaactctccatgaccactcaagaatgggacccaaaggcaaatgataacttattcattcatcaagggataaacttgagttatcaaatggttaatagataaagatcccactctgccttggatttagccatcgcagtccctgtgtaaaaccccaccggctttcaggcatggaaaaaaatttcacaaaggccttgaaagaaggcatatgaagaccaaaaggatattgagcagggttccatacttgaataaaggaagaaactcccttcaatgtttactaagaaatagttagaatatagcatatcctgtatagatgaaatgtcctagcgaaaatgtttaaatgtatttaaagaagagctagattttgtggggggagagaagggaataggataggctggtgggaggaagaatgaaaagaagaaaacttgttggaaattttggagtagattgtgaggaggggtgactcactttaaagatgtatcatttggaggtagacacgattttcagagcacaaaacagataaggaaagatgtatgctgattgtgtggagcccaagggaaggcggggttttggagtcttacgtggctttgtttctgaaagggagacatgtgaagcctactcctgaggcgggaggctggggacatgaccatcaagacctataattgataaacaactaggggctgggtgctgcacttacatgctggggaaatagaaaatgaagcagacatgtgtcccatcttcttccagctttcagtctagcttggaaataaatctcatacctagagaaaatggaggatctgtgggatgtagatgaggtgggagcatgaatgcctagggagggaagaagaaagattttcagttcttcagctcttcctcatgaccctatctcatgccatgagcaattgtctggcatctcctgtgggttggaccactgctgcatttcttacttgccaacatcactttgtcccaaatgccattcctttgttccagggcctccttgtcttccgtctggggaactggaggtgagaagcattataatagcctctctgcctttatctacaatctctccaacctgtgctttatgctgatgtcaggatgggcgttgatggatgcttctatcactgtcggggcagggagggccagaacactagcataagatgtcaatatgtctatccatatgtcaggtccatactcaactcaagcttctggttaactgctgatctattggcaactccagttcccaataagttcctcatctccttctgagaccacctcagtgtggacttaatcgtccacatcactgtcagcattttggttaaaaccattcaacaagtctccaggaagctccaaactttccttcatcttcctgtcttcttctgagccctccaaactcttccaacctctacccgttacccagttccaaaggtgcttccacactttcaagtatctttatagcaatgccccactcctggtaccaaattcctgtattagtctgttttcacactgctatgaagacatacttgagactcggtaatttatatagaaaagaggtttaattgacaaaaaagctaacaaagtgagccctgattcaaaaatgactgtctacacttggcacatgagggactttatgatattaagagattaattaaacaacagtggatggggaggaagaacagacttttgagctcttcccaatataggaatgtgttagttctaaaaattttcttaagttgtttgcttggaactcagagtatatttttccatacgaaaaattcagaactattttatttatgatatgggctaaaaagacttctgtaatctagcttggaaacttaataatcattaaacttattttcaatgagatacgactgtttaaattctgaaacctggaaccctctgttgccctgcaaatgctttaggaaaagaagagtgtgtctgatggaggataagatggaaagtgaatatggatccatattcagaagacacggttgcattacagcaaaggaacagctttttgctggccatgctaagcatttgacattgatgtgggagaacatggcattcagtatgactctgtctggatatatatagttttgtaaattgggtgttcttaagttgagactgcatgtttcattccaaaatcaatcttagttttcccacttgcattagcatattgtattagtccgtcttcacactgctataaagacatacccgagactgggtaatttataaagaaaaga

SEQ ID NO: 436089 - DNA, 2771 bp, Homo sapiens
agcactctccagcctctcaccgcaaaattacacaccccagtacaccagcagaggaaacttataacctcgggaggcaggtccttcccctcagtgcggtcacatacttccagaagagcggaccagggctgctgccagcacctgccactcagagcgcctctgtcgctgggacccttcagaactctctttgctcacaagttaccaaaaaaaaaagagccaacatgttggtattgctggctggtatctttgtggtccacatcgctactgttattatgctatttgttagcaccattgccaatgtctggttggtttccaatacggtagatgcatcagtaggtctttggaaaaactgtaccaacattagctgcagtgacagcctgtcatatgccagtgaagatgccctcaagacagtgcaggccttcatgattctctctatcatcttctgtgtcattgccctcctggtcttcgtgttccagctcttcaccatggagaagggaaaccggttcttcctctcaggggccaccacactggtgtgctggctgtgcattcttgtgggggtgtccatctacactagtcattatgcgaatcgtgatggaacgcagtatcaccacggctattcctacatcctgggctggatctgcttctgcttcagcttcatcatcggcgttctctatctggtcctgagaaagaaataaggccggacgagttcatggggatctggggggtggggaggaggaagccgttgaatctgggagggaagtggaggttgctgtacaggaaaaaccgagataggggaggggggagggggaagcaaaggggggaggtcaaatcccaaaccattactgaggggattctctactgccaagcccctgccctggggagaaagtagttggctagtactttgatgctcccttgatggggtccagagagcctccctgcagccaccagacttggcctccagctgttcttagtgacacacactgtctggggccccatcagctgccacaacaccagccccacttctgggtcatgcactgaggtccacagacctactgcactgagttaaaatagcggtacaagttctggcaagagcagatactgtctttgtgctgaatacgctaagcctggaagccatcctgcccttctgacccaaagcaaaacatcacattccagtctgaagtgcctactggggggctttggcctgtgagccattgtccctctttggaacagatatttagctctgtggaattcagtgacaaaatgggaggaggaaagagagtttgtaaggtcatgctggtgggttagctaaaccaagaaggagaccttttcacaatggaaaacctgggggatggtcagagcccagtcgagacctcacacacggctgtccctcatggagacctcatgccatggtctttgctaggcctcttgctgaaagccaaggcagctcttctggagtttctctaaagtcactagtgaacaattcggtggtaaaagtaccacacaaactatgggatccaaggggcagtcttgcaacagtgccatgttagggttatgtttttaggattcccctcaatgcagtcagtgtttcttttaagtatacaacaggagagagatggacatggctcattgtagcacaatcctattactcttcctctaacatttttgaggaagttttgtctaattatcaatattgaggatcagggctcctaggctcagtggtagctctggcttagacaccacctggagtgatcacctcttggggaccctgcctatcccacttcacaggtgaggcatggcaattctggaagctgattaaaacacacataaaccaaaaccaaacaacaggcccttgggtgaaaggtgctatataattgtgaagtattaagcctaccgtatttcagccatgataagaacagagtgcctgcattcccaggaaaatacgaaaatcccatgagataaataaaaatataggtgatgggcagatcttttctttaaaataaaaaagcaaaaactcttgtggtacctagtcagatggtagacgagctgtctgctgccgcaggagcacctctatacaggacttagaagtagtatgttattcctggttaagcaggcattgctttgccctggagcagctattttaagccatctcagattctgtctaaaggggttttttgggaagacgttttctttatcgccctgagaagatctaccccagggagaatctgagacatcttgcctacttttctttattagctttctcctcattcatttcttttatacctttcctttttggggagttgttatgccatgatttttggtatttatgtaaaaggattattactaattctatttctctatgtttattctagttaaggaaatgttgagggcaagccaccaaattacctaggctgaggttagagagattggccagcaaaaactgtgggaagatgaactttgtcattatgatttcattatcacatgattatagaaggctgtcttagtgcaaaaaacatacttacatttcagacatatccaaagggaatactcacattttgttaagaagttgaactatgactggagtaaaccatgtattcccttatcttttactttttttctgtgacatttatgtctcatgtaatttgcattactctggtggattgttctagtactgtattgggcttcttcgttaatagattatttcatatactataattgtaaatattttgatacaaatgtttataactctagggatataaaaacagattctgattccc

SEQ ID NO: 436090 - DNA, 1048 bp, Homo sapiens
  misc_feature (1037)..(1037): n is a, c, g, or t
ttcatttccaagtctcgcggttgtcgtccattttgaaatgttcgcccgaagcggtccttcgcgatacgagtgcgcctgcacaacaatctcgaaattcagagtgttcaaccaatggccgcccaggtcatgtctgtgctaacccccggaggtcactttggcaccgctacccattacagtgagcatgcattctgactgattaacacacatcaccaacccgacacagcccttgggtgaaaggtgctatataattgtgaagtattaagcctaccgtatttcagccatgataagaacagagtgcctgcattcccaggaaaatacgaaaatcccatgagataaataaaaatataggtgatgggcagatcttttctttaaaataaaaaagcaaaaactcttgtggtacctagtcagatggtagacgagctgtctgctgccgcaggagcacctctatacaggacttagaagtagtatgttattcctggttaagcaggcattgctttgccctggagcagctattttaagccatctcagattctgtctaaaggggttttttgggaagacgttttctttatcgccctgagaagatctaccccagggagaatctgagacatcttgcctacttttctttattagctttctcctcattcatttcttttatacctttcctttttggggagttgttatgccatgatttttggtatttatgtaaaaggattattactaattctatttctctatgtttattctagttaaggaaatgttgagggcaagccaccaaattacctaggctgaggttagagagattggccagcaaaaactgtgggaagatgaactttgtcattatgatttcattatcacatgattatagaaggctgtcttagtgcaaaaaacatacttacatttcagacatatccaaagggaatactcacattttgttaagaagttgaactatgactggagtaaaccatgtattcccttatcttttactttttttctgtgacatttatgtctcatgtaatgaaaatttcgcccaaggtgancctactttggg

SEQ ID NO: 436091 - DNA, 390 bp, Homo sapiens
cgtcgactgctggccaatctctctaacctcagcctaggtaatttggtggcttgctgtgggaagatgaactttgtcattatgatttcattatcacatgattatagaaggctgtcttagtgcaaaaaacatacttacatttcagacatatccaaagggaatactcacattttgttaagaagttgaactatgactggagtaaaccatgtattcccttatcttttactttttttctgtgacatttatgtctcatgtaatttgcattactctggtggattgttctagtactgtattgggcttcttcgttaatagattatttcatatactataattgtaaatattttgatacaaatgtttataactctagggatataaaaacagattctgattccc

SEQ ID NO: 436092 - DNA, 858 bp, Homo sapiens
taacattttctttccttctggtttcaggtctggttggtttccaatacggtagatgcatcagtaggtctttggaaaaactgtaccaacattagctgcagtgacagcctgtcatatgccagtgaagatgccctcaagacagtgcaggccttcatgattctctctatcatcttctgtgtcattgccctcctggtcttcgtgttccagctcttcaccatggagaagggaaaccggttcttcctctcaggggccaccacactggtgtgctgtgagtatctcatgggtagactccagtttacacttttaagtccatcttaccatgggtgtttctggcaacttgaacagattagcacatggttcagtgaaacttccttgtgcaattttctcctctggttatttgttctcttgtggagaaccttggattgctgcttaggttaagaaccctcatctgcttcattgttcaaaaccagtgctcctgggtagctaccaagtggcagtgcatatctgttagtagcacgtgtgtacaagacacttcaagaaggcagaaaggtaggagttctcagaaagatgaaaccactgccacaatgcacatcattattgtgattctcacttaattgttgttctttcccaatatactcggtttggtggaaggacatgctcttttgcatccctgagtagctttcctagacccacaagggccagacaggacagctgggtggtaggcatgaggttctgtgttttacatcacagcgtggccacacaaaccagtgcagacatgagagcccagacacctctaatttatcaacataccgtcgagcttggcccaggggacatccatcagaactcctgtttagggacaaa

SEQ ID NO: 436093 - DNA, 422 bp, Homo sapiens
caattaccggagtcagcgcgcacacggggggaagagtaagcatcagagacacagctcacagcggacagaagtacaagaaaaaccgagataggggaggggggagggggaagcaaaggggggaggtcaaatcccaaaccattactgaggggattctctactgccaagcccctgccctggggagaaagtagttggctagtactttgatgctcccttgatggggtccagagagcctccctgcagccaccagacttggcctccagctgttcttagtgacacacactgtctggggccccatcagcggttgtggaacgctgccctctgcccacacgctgcgttcactgccaatgctgtactcacctccatcaccctccaactttggggcccatgtcttccttgggccaaggtctcatgggggctgggcc

SEQ ID NO: 436094 - DNA, 2720 bp, Homo sapiens
agcactctccagcctctcaccgcaaaattacacaccccagtacaccagcagaggaaacttataacctcgggaggcaggtccttcccctcagtgcggtcacatacttccagaagagcggaccagggctgctgccagcacctgccactcagagcgcctctgtcgctgggacccttcagaactctctttgctcacaagttaccaaaaaaaaaagagccaacatgttggtattgctggctggtatctttgtggtccacatcgctactgttattatgctatttgttagcaccattgccaatgtctggttggtttccaatacggtagatgcatcagtaggtctttggaaaaactgtaccaacattagctgcagtgacagcctgtcatatgccagtgaagatgccctcaagacagtgcaggccttcatgattctctctatcatcttctgtgtcattgccctcctggtcttcgtgttccagctcttcaccatggagaagggaaaccggttcttcctctcaggggccaccacactggtgtgctggctgtgcattcttgtgggggtgtccatctacactagtcattatgcgaatcgtgatggaacgcagtatcaccacggctattcctacatcctgggctggatctgcttctgcttcagcttcatcatcggcgttctctatctggtcctgagaaagaaataaggccggacgagttcatggggatctggggggtggggaggaggaagccgttgaatctgggagggaagtggaggttgctgtacaggaaaaaccgagataggggaggggggagggggaagcaaaggggggaggtcaaatcccaaaccattactgaggggattctctactgccaagcccctgccctggggagaaagtagttggctagtactttgatgctcccttgatggggtccagagagcctccctgcagccaccagacttggcctccagctgttcttagtgacacacactgtctggggccccatcagctgccacaacaccagccccacttctgggtcatgcactgaggtccacagacctactgcactgagttaaaatagcggtacaagttctggcaagagcagatactgtctttgtgctgaatacgctaagcctggaagccatcctgcccttctgacccaaagcaaaacatcacattccagtctgaagtgcctactggggggctttggcctgtgagccattgtccctctttggaacagatatttagctctgtggaattcagtgacaaaatgggaggaggaaagagagtttgtaaggtcatgctggtgggttagctaaaccaagaaggagaccttttcacaatggaaaacctgggggatggtcagagcccagtcgagacctcacacacggctgtccctcatggagacctcatgccatggtctttgctaggcctcttgctgaaagccaaggcagctcttctggagtttctctaaagtcactagtgaacaattcggtggtaagttagggttatgtttttaggattcccctcaatgcagtcagtgtttcttttaagtatacaacaggagagagatggacatggctcattgtagcacaatcctattactcttcctctaacatttttgaggaagttttgtctaattatcaatattgaggatcagggctcctaggctcagtggtagctctggcttagacaccacctggagtgatcacctcttggggaccctgcctatcccacttcacaggtgaggcatggcaattctggaagctgattaaaacacacataaaccaaaaccaaacaacaggcccttgggtgaaaggtgctatataattgtgaagtattaagcctaccgtatttcagccatgataagaacagagtgcctgcattcccaggaaaatacgaaaatcccatgagataaataaaaatataggtgatgggcagatcttttctttaaaataaaaaagcaaaaactcttgtggtacctagtcagatggtagacgagctgtctgctgccgcaggagcacctctatacaggacttagaagtagtatgttattcctggttaagcaggcattgctttgccctggagcagctattttaagccatctcagattctgtctaaaggggttttttgggaagacgttttctttatcgccctgagaagatctaccccagggagaatctgagacatcttgcctacttttctttattagctttctcctcattcatttcttttatacctttcctttttggggagttgttatgccatgatttttggtatttatgtaaaaggattattactaattctatttctctatgtttattctagttaaggaaatgttgagggcaagccaccaaattacctaggctgaggttagagagattggccagcaaaaactgtgggaagatgaactttgtcattatgatttcattatcacatgattatagaaggctgtcttagtgcaaaaaacatacttacatttcagacatatccaaagggaatactcacattttgttaagaagttgaactatgactggagtaaaccatgtattcccttatcttttactttttttctgtgacatttatgtctcatgtaatttgcattactctggtggattgttctagtactgtattgggcttcttcgttaatagattatttcatatactataattgtaaatattttgatacaaatgtttataactctagggatataaaaacagattctgattccc

SEQ ID NO: 436095 - DNA, 5910 bp, Homo sapiens
agcactctccagcctctcaccgcaaaattacacaccccagtacaccagcagaggaaacttataacctcgggaggcaggtccttcccctcagtgcggtcacatacttccagaagagcggaccagggctgctgccagcacctgccactcagagcgcctctgtcgctgggacccttcagaactctctttgctcacaagttaccaaaaaaaaaagagccaacatgttggtattgctggctggtatctttgtggtccacatcgctactgttattatgctatttgttagcaccattgccaatgtctggttggtttccaatacggtagatgcatcagtaggtctttggaaaaactgtaccaacattagctgcagtgacagcctgtcatatgccagtgaagatgccctcaagacagtgcaggccttcatgattctctctatcatcttctgtgtcattgccctcctggtcttcgtgttccagctcttcaccatggagaagggaaaccggttcttcctctcaggggccaccacactggtgtgctggctgtgcattcttgtgggggtgtccatctacactagtcattatgcgaatcgtgatggaacgcagtatcaccacggctattcctacatcctgggctggatctgcttctgcttcagcttcatcatcggcgttctctatctggtcctgagaaagaaataaggccggacgagttcatggggatctggggggtggggaggaggaagccgttgaatctgggagggaagtggaggttgctgtacaggaaaaaccgagataggggaggggggagggggaagcaaaggggggaggtcaaatcccaaaccattactgaggggattctctactgccaagcccctgccctggggagaaagtagttggctagtactttgatgctcccttgatggggtccagagagcctccctgcagccaccagacttggcctccagctgttcttagtgacacacactgtctggggccccatcagctgccacaacaccagccccacttctgggtcatgcactgaggtccacagacctactgcactgagttaaaatagcggtacaagttctggcaagagcagatactgtctttgtgctgaatacgctaagcctggaagccatcctgcccttctgacccaaagcaaaacatcacattccagtctgaagtgcctactggggggctttggcctgtgagccattgtccctctttggaacagatatttagctctgtggaattcagtgacaaaatgggaggaggaaagagagtttgtaaggtcatgctggtgggttagctaaaccaagaaggagaccttttcacaatggaaaacctgggggatggtcagagcccagtcgagacctcacacacggctgtccctcatggagacctcatgccatggtctttgctaggcctcttgctgaaagccaaggcagctcttctggagtttctctaaagtcactagtgaacaattcggtggtaaaagtaccacacaaactatgggatccaaggggcagtcttgcaacagtgccatgttagggttatgtttttaggattcccctcaatgcagtcagtgtttcttttaagtatacaacaggagagagatggacatggctcattgtagcacaatcctattactcttcctctaacatttttgaggaagttttgtctaattatcaatattgaggatcagggctcctaggctcagtggtagctctggcttagacaccacctggagtgatcacctcttggggaccctgcctatcccacttcacaggtgaggcatggcaattctggaagctgattaaaacacacataaaccaaaaccaaacaacaggcccttgggtgaaaggtgctatataattgtgaagtattaagcctaccgtatttcagccatgataagaacagagtgcctgcattcccaggaaaatacgaaaatcccatgagataaataaaaatataggtgatgggcagatcttttctttaaaataaaaaagcaaaaactcttgtggtacctagtcagatggtagacgagctgtctgctgccgcaggagcacctctatacaggacttagaagtagtatgttattcctggttaagcaggcattgctttgccctggagcagctattttaagccatctcagattctgtctaaaggggttttttgggaagacgttttctttatcgccctgagaagatctaccccagggagaatctgagacatcttgcctacttttctttattagctttctcctcattcatttcttttatacctttcctttttggggagttgttatgccatgatttttggtatttatgtaaaaggattattactaattctatttctctatgtttattctagttaaggaaatgttgagggcaagccaccaaattacctaggctgaggttagagagattggccagcaaaaaaagctgcctatcagtttgatttggacaacttgacatttatttgagacattaagctactttctggtaatatattaggcatttctgcaatagctctttcaggtaactgaatattattaagcatagttttatcttgctttgattaaacctcttaggcaaaaaatggaacttcataagctaatacattagaaaggggttatgattataaatcagaaatgcttgtgacattaagaaatgaggcacttgtgaaatttctttgaaatagccagctcctctaatgtgtcttcaaaatataaagtgattcacaaaggcatgcatcacacctatttgtagcagcccattcattacataaaccagggcatacctgtgtgggctctgtgagtgaagggaggcttcactactttctgtgagcagtaaggactggtatctttctgtgagcaataaggactggataaagactgcatatccttgtgtcgtgtcagcaccaatacaataaggagggttttaatgtgaagcaggcaatcttccagccccttctggtcttggatgaaatagttgcacagagtattgcaccaaaaatacacaatggaggctgaaaagttcaacatattttaagtcaattaatcaaattgcattgattcttgatgctttcttagaggcctacatgatttcttagattgctctgataaactatcataaggggtccacctcccctcatttagctcccccagggatttcttttcccccatgtcatacacccagtcctaaatcaacccccaaggctatccttccatcccttctgcagagggaacttttgtcagactctgcaacaaactcctagctctatccagagtgtcctctgctgctaagattggtatctttctcctcaaaagcctggatggtgaatgggggtgcattagtcagaattctccagagaaacagaaaaaataagattcgcgtgtgtgtgcaaacatatatataaataaataaaaatatatttattttaaggaattgactcacatgattttgaaggcaggcaagcccaaagtctgcaaggggtgggccagcagagagctggtgctacagtgcgggtctgaaagttgccagagtcccttttatagagaagcttaaaaaatatttgttgaattaaatgtcttaggtagagacaaattgaattaaagtggttaagtaaatactcttaggtgaaatttgtgcaaattatgagtataaagagggtgagctacagaactctccatgaccactcaagaatgggacccaaaggcaaatgataacttattcattcatcaagggataaacttgagttatcaaatggttaatagataaagatcccactctgccttggatttagccatcgcagtccctgtgtaaaaccccaccggctttcaggcatggaaaaaaatttcacaaaggccttgaaagaaggcatatgaagaccaaaaggatattgagcagggttccatacttgaataaaggaagaaactcccttcaatgtttactaagaaatagttagaatatagcatatcctgtatagatgaaatgtcctagcgaaaatgtttaaatgtatttaaagaagagctagattttgtggggggagagaagggaataggataggctggtgggaggaagaatgaaaagaagaaaacttgttggaaattttggagtagattgtgaggaggggtgactcactttaaagatgtatcatttggaggtagacacgattttcagagcacaaaacagataaggaaagatgtatgctgattgtgtggagcccaagggaaggcggggttttggagtcttacgtggctttgtttctgaaagggagacatgtgaagcctactcctgaggcgggaggctggggacatgaccatcaagacctataattgataaacaactaggggctgggtgctgcacttacatgctggggaaatagaaaatgaagcagacatgtgtcccatcttcttccagctttcagtctagcttggaaataaatctcatacctagagaaaatggaggatctgtgggatgtagatgaggtgggagcatgaatgcctagggagggaagaagaaagattttcagttcttcagctcttcctcatgaccctatctcatgccatgagcaattgtctggcatctcctgtgggttggaccactgctgcatttcttacttgccaacatcactttgtcccaaatgccattcctttgttccagggcctccttgtcttccgtctggggaactggaggtgagaagcattataatagcctctctgcctttatctacaatctctccaacctgtgctttatgctgatgtcaggatgggcgttgatggatgcttctatcactgtcggggcagggagggccagaacactagcataagatgtcaatatgtctatccatatgtcaggtccatactcaactcaagcttctggttaactgctgatctattggcaactccagttcccaataagttcctcatctccttctgagaccacctcagtgtggacttaatcgtccacatcactgtcagcattttggttaaaaccattcaacaagtctccaggaagctccaaactttccttcatcttcctgtcttcttctgagccctccaaactcttccaacctctacccgttacccagttccaaaggtgcttccacactttcaagtatctttatagcaatgccccactcctggtaccaaattcctgtattagtctgttttcacactgctatgaagacatacttgagactcggtaatttatatagaaaagaggtttaattgacaaaaaagctaacaaagtgagccctgattcaaaaatgactgtctacacttggcacatgagggactttatgatattaagagattaattaaacaacagtggatggggaggaagaacagacttttgagctcttcccaatataggaatgtgttagttctaaaaattttcttaagttgtttgcttggaactcagagtatatttttccatacgaaaaattcagaactattttatttatgatatgggctaaaaagacttctgtaatctagcttggaaacttaataatcattaaacttattttcaatgagatacgactgtttaaattctgaaacctggaaccctctgttgccctgcaaatgctttaggaaaagaagagtgtgtctgatggaggataagatggaaagtgaatatggatccatattcagaagacacggttgcattacagcaaaggaacagctttttgctggccatgctaagcatttgacattgatgtgggagaacatggcattcagtatgactctgtctggatatatatagttttgtaaattgggtgttcttaagttgagactgcatgtttcattccaaaatcaatcttagttttcccacttgcattagcatattgtattagtccgtcttcacactgctataaagacatacccgagactgggtaatttataaagaaaaga

SEQ ID NO: 436096 - DNA, 1533 bp, Homo sapiens
acgtagcccacctgacgtacccacctggagtgatcacctcttggggaccctgcctatcccacttcacaggtgggaaggagaccttttcacaatggaaaacctgggggatggtcagagcccagtcgagacctcacacacggctgtccctcatggagacctcatgccatggtctttgctaggcctcttgctgaaagccaaggcagctcttctggagtttctctaaagtcactagtgaacaattcggtggtaaaagtaccacacaaactatgggatccaaggggcagtcttgcaacagtgccatgttagggttatgtttttaggattcccctcaatgcagtcagtgtttcttttaagtatacaacaggagagagatggacatggctcattgtagcacaatcctattactcttcctctaacatttttgaggaagttttgtctaattatcaatattgaggatcagggctcctaggctcagtggtagctctggcttagacaccacctggagtgatcacctcttggggaccctgcctatcccacttcacaggtgaggcatggcaattctggaagctgattaaaacacacataaaccaaaaccaaacaacaggcccttgggtgaaaggtgctatataattgtgaagtattaagcctaccgtatttcagccatgataagaacagagtgcctgcattcccaggaaaatacgaaaatcccatgagataaataaaaatataggtgatgggcagatcttttctttaaaataaaaaagcaaaaactcttgtggtacctagtcagatggtagacgagctgtctgctgccgcaggagcacctctatacaggacttagaagtagtatgttattcctggttaagcaggcattgctttgccctggagcagctattttaagccatctcagattctgtctaaaggggttttttgggaagacgttttctttatcgccctgagaagatctaccccagggagaatctgagacatcttgcctacttttctttattagctttctcctcattcatttcttttatacctttcctttttggggagttgttatgccatgatttttggtatttatgtaaaaggattattactaattctatttctctatgtttattctagttaaggaaatgttgagggcaagccaccaaattacctaggctgaggttagagagattggccagcaaaaactgtgggaagatgaactttgtcattatgatttcattatcacatgattatagaaggctgtcttagtgcaaaaaacatacttacatttcagacatatccaaagggaatactcacattttgttaagaagttgaactatgactggagtaaaccatgtattcccttatcttttactttttttctgtgacatttatgtctcatgtaatttgcattactctggtggattgttctagtactgtattgggcttcttcgttaatagattatttcatatactataattgtaaatattttgatacaaatgtttataactctagggatataaaaacagattctgattccc

SEQ ID NO: 436097 - DNA, 2515 bp, Homo sapiens
agcactctccagcctctcaccgcaaaattacacaccccagtacaccagcagaggaaacttataacctcgggaggcaggtccttcccctcagtgcggtcacatacttccagaagagcggaccagggctgctgccagcacctgccactcagagcgcctctgtcgctgggacccttcagaactctctttgctcacaagttaccaaaaaaaaaagagccaacatgttggtattgctggctggtatctttgtggtccacatcgctactgttattatgctatttgttagcaccattgccaatgtctggttggtttccaatacggtagatgcatcagtaggtctttggaaaaactgtaccaacattagctgcagtgacagcctgtcatatgccagtgaagatgccctcaagacagtgcaggccttcatgattctctctatcatcttctgtgtcattgccctcctggtcttcgtgttccagctcttcaccatggagaagggaaaccggttcttcctctcaggggccaccacactggtgtgctggctgtgcattcttgtgggggtgtccatctacactagtcattatgcgaatcgtgatggaacgcagtatcaccacggctattcctacatcctgggctggatctgcttctgcttcagcttcatcatcggcgttctctatctggtcctgagaaagaaataaggccggacgagttcatggggatctggggggtggggaggaggaagccgttgaatctgggagggaagtggaggttgctgtacaggaaaaaccgagataggggaggggggagggggaagcaaaggggggaggtcaaatcccaaaccattactgaggggattctctactgccaagcccctgccctggggagaaagtagttggctagtactttgatgctcccttgatggggtccagagagcctccctgcagccaccagacttggcctccagctgttcttagtgacacacactgtctggggccccatcagctgccacaacaccagccccacttctgggtcatgcactgaggtccacagacctactgcactgagttaaaatagcggtacaagttctggcaagagcagatactgtctttgtgctgaatacgctaagcctggaagccatcctgcccttctgacccaaagcaaaacatcacattccagtctgaagtgcctactggggggctttggcctgtgagccattgtccctctttggaacagatatttagctctgtggaattcagtgacaaaatgggaggaggaaagagagtttgtaaggtcatgctggtgggttagctaaaccaagaaggagaccttttcacaatggaaaacctgggggatggtcagagcccagtcgagacctcacacacggctgtccctcatggagacctcatgccatggtctttgctaggcctcttgctgaaagccaaggcagctcttctggagtttctctaaagtcactagtgaacaattcggtggtaaaagtaccacacaaactatgggatccaaggggcagtcttgcaacagtgccatgttagggttatgtttttaggattcccctcaatgcagtcagtgtttcttttaagtatacaacaggagagagatggacatggctcattgtagcacaatcctattactcttcctctaacatttttgaggaagttttgtctaattatcaatattgaggatcagggctcctaggctcagtggtagctctggcttagacaccacctggagtgatcacctcttggggaccctgcctatcccacttcacaggtgaggcatggcaattctggaagctgattaaaacacacataaaccaaaaccaaacaacaggcccttgggtgaaaggtgctatataattgtgaagtattaagcctaccgtatttcagccatgataagaacagagtgcctgcattcccaggaaaatacgaaaatcccatgagataaataaaaatataggtgatgggcagatcttttctttaaaataaaaaagcaaaaactcttgtggtacctagtcagatggtagacgagctgtctgctgccgcaggagcacctctatacaggacttagaagtagtatgttattcctggttaagcaggcattgctttgccctggagcagctattttaagccatctcagattctgtctaaaggggttttttgggaagacgttttctttatcgccctgagaagatctaccccagggagaatctgagacatcttgcctacttttctttattagctttctcctcattcatttcttttatacctttcctttttggggagttgttatgccatgatttttggtatttatgtaaaaggattattactaattctatttctctatgtttattctagttaaggaaatgttgagggcaagccaccaaattacctaggctgaggttagagagattggccagcaaaaacaaccggttggttttattgtctcaggggtgacagaggtggaagaaaatctgtgtataagccaaccgtggactagtgggtac

SEQ ID NO: 436098 - DNA, 794 bp, Homo sapiens
aggatctgttagatcctgcaatcccttcttgcatccatccctccctggtagctaggtcccgatatactcctgtcttgtgagattgtcgagatgagatgggggaccactctttctctgtccttcctctctcctttcctccatagcaaggacgaccttccctgctccatgtccagagtagtttccagagtaggcaaggaagacgttttctttatcgccctgagaagatctaccccagggagaatctgagacatcttgcctacttttctttattagctttctcctcattcatttcttttatacctttcctttttggggagttgttatgccatgatttttggtatttatgtaaaaggattattactaattctatttctctatgtttattctagttaaggaaatgttgagggcaagccaccaaattacctaggctgaggttagagagattggccagcaaaaactgtgggaagatgaactttgtcattatgatttcattatcacatgattatagaaggctgtcttagtgcaaaaaacatacttacatttcagacatatccaaagggaatactcacattttgttaagaagttgaactatgactggagtaaaccatgtattcccttatcttttactttttttctgtgacatttatgtctcatgtaatttgcattactctggtggattgttctagtactgtattgggcttcttcgttaatagattatttcatatactataattgtaaatattttgatacaaatgtttataactctagggatataaaaacagattctgattccc

SEQ ID NO: 436099 - DNA, 1127 bp, Homo sapiens
agcactctccagcctctcaccgcaaaattacacaccccagtacaccagcagaggaaacttataacctcgggaggcaggtccttcccctcagtgcggtcacatacttccagaagagcggaccagggctgctgccagcacctgccactcagagcgcctctgtcgctgggacccttcagaactctctttgctcacaagttaccaaaaaaaaaagagccaacatgttggtattgctggctggtatctttgtggtccacatcgctactgttattatgctatttgttagcaccattgccaatgtctggttggtttccaatacggtagatgcatcagtaggtctttggaaaaactgtaccaacattagctgcagtgacagcctgtcatatgccagtgaagatgccctcaagacagtgcaggccttcatgattctctctatcatcttctgtgtcattgccctcctggtcttcgtgttccagctcttcaccatggagaagggaaaccggttcttcctctcaggggccaccacactggtgtgctgtgagtatctcatgggtagactccagtttacacttttaagtccatcttaccatgggtgtttctggcaacttgaacagattagcacatggttcagtgaaacttccttgtgcaattttctcctctggttatttgttctcttgtggagaaccttggattgctgcttaggttaagaaccctcatctgcttcattgttcaaaaccagtgctcctgggtagctaccaagtggcagtgcatatctgttagtagcacgtgtgtacaagacacttcaagaaggcagaaaggtaggagttctcagaaagatgaaaccactgccacaatgcacatcattattgtgattctcacttaattgttgttctttcccaatatactcggtttggtggaaggacatgctcttttgcatccctgagtagctttcctagacccacaagggccagacaggacagctgggtggtaggcatgaggttctgtgttttacatcacagcgtggccacacaaaccagtgcagacatgagagcccagacacctctaatttatcaacataccgtcgagcttggcccaggggacatccatcagaactcctgtttagggacaaa

SEQ ID NO: 436100 - DNA, 2769 bp, Homo sapiens
aaacacggtgaaaagaaaccgcccattacacaccccagtacaccagcagaggaaacttataacctcgggaggcaggtccttcccctcagtgcggtcacatacttccagaagagcggaccagggctgctgccagcacctgccactcagagcgcctctgtcgctgggacccttcagaactctctttgctcacaagttaccaaaaaaaaaagagccaacatgttggtattgctggctggtatctttgtggtccacatcgctactgttattatgctatttgttagcaccattgccaatgtctggttggtttccaatacggtagatgcatcagtaggtctttggaaaaactgtaccaacattagctgcagtgacagcctgtcatatgccagtgaagatgccctcaagacagtgcaggccttcatgattctctctatcatcttctgtgtcattgccctcctggtcttcgtgttccagctcttcaccatggagaagggaaaccggttcttcctctcaggggccaccacactggtgtgctggctgtgcattcttgtgggggtgtccatctacactagtcattatgcgaatcgtgatggaacgcagtatcaccacggctattcctacatcctgggctggatctgcttctgcttcagcttcatcatcggcgttctctatctggtcctgagaaagaaataaggccggacgagttcatggggatctggggggtggggaggaggaagccgttgaatctgggagggaagtggaggttgctgtacaggaaaaaccgagataggggaggggggagggggaagcaaaggggggaggtcaaatcccaaaccattactgaggggattctctactgccaagcccctgccctggggagaaagtagttggctagtactttgatgctcccttgatggggtccagagagcctccctgcagccaccagacttggcctccagctgttcttagtgacacacactgtctggggccccatcagctgccacaacaccagccccacttctgggtcatgcactgaggtccacagacctactgcactgagttaaaatagcggtacaagttctggcaagagcagatactgtctttgtgctgaatacgctaagcctggaagccatcctgcccttctgacccaaagcaaaacatcacattccagtctgaagtgcctactggggggctttggcctgtgagccattgtccctctttggaacagatatttagctctgtggaattcagtgacaaaatgggaggaggaaagagagtttgtaaggtcatgctggtgggttagctaaaccaagaaggagaccttttcacaatggaaaacctgggggatggtcagagcccagtcgagacctcacacacggctgtccctcatggagacctcatgccatggtctttgctaggcctcttgctgaaagccaaggcagctcttctggagtttctctaaagtcactagtgaacaattcggtggtaaaagtaccacacaaactatgggatccaaggggcagtcttgcaacagtgccatgttagggttatgtttttaggattcccctcaatgcagtcagtgtttcttttaagtatacaacaggagagagatggacatggctcattgtagcacaatcctattactcttcctctaacatttttgaggaagttttgtctaattatcaatattgaggatcagggctcctaggctcagtggtagctctggcttagacaccacctggagtgatcacctcttggggaccctgcctatcccacttcacaggtgaggcatggcaattctggaagctgattaaaacacacataaaccaaaaccaaacaacaggcccttgggtgaaaggtgctatataattgtgaagtattaagcctaccgtatttcagccatgataagaacagagtgcctgcattcccaggaaaatacgaaaatcccatgagataaataaaaatataggtgatgggcagatcttttctttaaaataaaaaagcaaaaactcttgtggtacctagtcagatggtagacgagctgtctgctgccgcaggagcacctctatacaggacttagaagtagtatgttattcctggttaagcaggcattgctttgccctggagcagctattttaagccatctcagattctgtctaaaggggttttttgggaagacgttttctttatcgccctgagaagatctaccccagggagaatctgagacatcttgcctacttttctttattagctttctcctcattcatttcttttatacctttcctttttggggagttgttatgccatgatttttggtatttatgtaaaaggattattactaattctatttctctatgtttattctagttaaggaaatgttgagggcaagccaccaaattacctaggctgaggttagagagattggccagcaaaaactgtgggaagatgaactttgtcattatgatttcattatcacatgattatagaaggctgtcttagtgcaaaaaacatacttacatttcagacatatccaaagggaatactcacattttgttaagaagttgaactatgactggagtaaaccatgtattcccttatcttttactttttttctgtgacatttatgtctcatgtaatttgcattactctggtggattgttctagtactgtattgggcttcttcgttaatagattatttcatatactataattgtaaatattttgatacaaatgtttataactctagggatataaaaacagattctgattccc

SEQ ID NO: 436101 - DNA, 2797 bp, Homo sapiens
agcactctccagcctctcaccgcaaaattacacaccccagtacaccagcagaggaaacttataacctcgggaggcaggtccttcccctcagtgcggtcacatacttccagaagagcggaccagggctgctgccagcacctgccactcagagcgcctctgtcgctgggacccttcagaactctctttgctcacaagttaccaaaaaaaaaagagccaacatgttggtattgctggctggtatctttgtggtccacatcgctactgttattatgctatttgttagcaccattgccaatgtctggttggtttccaatacggtagatgcatcagtaggtctttggaaaaactgtaccaacattagctgcagtgacagcctgtcatatgccagtgaagatgccctcaagacagtgcaggccttcatgattctctctatcatcttctgtgtcattgccctcctggtcttcgtgttccagctcttcaccatggagaagggaaaccggttcttcctctcaggggccaccacactggtgtgctggctgtgcattcttgtgggggtgtccatctacactagtcattatgcgaatcgtgatggaacgcagtatcaccacggctattcctacatcctgggctggatctgcttctgcttcagcttcatcatcggcgttctctatctggtcctgagaaagaaataaggccggacgagttcatggggatctggggggtggggaggaggaagccgttgaatctgggagggaagtggaggttgctgtacaggaaaaaccgagataggggaggggggagggggaagcaaaggggggaggtcaaatcccaaaccattactgaggggattctctactgccaagcccctgccctggggagaaagtagttggctagtactttgatgctcccttgatggggtccagagagcctccctgcagccaccagacttggcctccagctgttcttagtgacacacactgtctggggccccatcagctgccacaacaccagccccacttctgggtcatgcactgaggtccacagacctactgcactgagttaaaatagcggtacaagttctggcaagagcagatactgtctttgtgctgaatacgctaagcctggaagccatcctgcccttctgacccaaagcaaaacatcacattccagtctgaagtgcctactggggggctttggcctgtgagccattgtccctctttggaacagatatttagctctgtggaattcagtgacaaaatgggaggaggaaagagagtttgtaaggtcatgctggtgggttagctaaaccaagaaggagaccttttcacaatggaaaacctgggggatggtcagagcccagtcgagacctcacacacggctgtccctcatggagacctcatgccatggtctttgctaggcctcttgctgaaagccaaggcagctcttctggagtttctctaaagtcactagtgaacaattcggtggtaaaagtaccacacaaactatgggatccaaggggcagtcttgcaacagtgccatgttagggttatgtttttaggattcccctcaatgcagtcagtgtttcttttaagtatacaacaggagagagatggacatggctcattgtagcacaatcctattactcttcctctaacatttttgaggaagttttgtctaattatcaatattgaggatcagggctcctaggctcagtggtagctctggcttagacaccacctggagtgatcacctcttggggaccctgcctatcccacttcacaggtgaggcatggcaattctggaagctgattaaaacacacataaaccaaaaccaaacaacaggcccttgggtgaaaggtgctatataattgtgaagtattaagcctaccgtatttcagccatgataagaacagagtgcctgcattcccaggaaaatacgaaaatcccatgagataaataaaaatataggtgatgggcagatcttttctttaaaataaaaaagcaaaaactcttgtggtacctagtcagatggtagacgagctgtctgctgccgcaggagcacctctatacaggacttagaagtagtatgttattcctggttaagcaggcattgctttgccctggagcagctattttaagccatctcagattctgtctaaaggggttttttgggaagacgttttctttatcgccctgagaagatctaccccagggagaatctgagacatcttgcctacttttctttattagctttctcctcattcatttcttttatacctttcctttttggggagttgttatgccatgatttttggtatttatgtaaaaggattattactaattctatttctctatgtttattctagttaaggaaatgttgagggcaagccaccaaattacctaggctgaggttagagagattggccagcaaaaactgtgggaagatgaactttgtcattatgatttcattatcacatgattatagaaggctgtcttagtgcaaaaaacatacttacatttcagacatatccaaagggaatactcacattttgttaagaagttgaactatgactggagtaaaccatgtattcccttatcttttactttttttctgtgacatttatgtctcatgtaatttgcattactctggtggattgttctagtactgtattgggcttcttcgttaatagattatttcatatactataattgtaaatattttgatacaaatgtttataactctagggatataaaaacagattctgattcccaaaaaaataaagacactaacaaaaag

SEQ ID NO: 436102 - DNA, 2805 bp, Homo sapiens
agcactctccagcctctcaccgcaaaattacacaccccagtacaccagcagaggaaacttataacctcgggaggcaggtccttcccctcagtgcggtcacatacttccagaagagcggaccagggctgctgccagcacctgccactcagagcgcctctgtcgctgggacccttcagaactctctttgctcacaagttaccaaaaaaaaaagagccaacatgttggtattgctggctggtatctttgtggtccacatcgctactgttattatgctatttgttagcaccattgccaatgtctggttggtttccaatacggtagatgcatcagtaggtctttggaaaaactgtaccaacattagctgcagtgacagcctgtcatatgccagtgaagatgccctcaagacagtgcaggccttcatgattctctctatcatcttctgtgtcattgccctcctggtcttcgtgttccagctcttcaccatggagaagggaaaccggttcttcctctcaggggccaccacactggtgtgctggctgtgcattcttgtgggggtgtccatctacactagtcattatgcgaatcgtgatggaacgcagtatcaccacggctattcctacatcctgggctggatctgcttctgcttcagcttcatcatcggcgttctctatctggtcctgagaaagaaataaggccggacgagttcatggggatctggggggtggggaggaggaagccgttgaatctgggagggaagtggaggttgctgtacaggaaaaaccgagataggggaggggggagggggaagcaaaggggggaggtcaaatcccaaaccattactgaggggattctctactgccaagcccctgccctggggagaaagtagttggctagtactttgatgctcccttgatggggtccagagagcctccctgcagccaccagacttggcctccagctgttcttagtgacacacactgtctggggccccatcagctgccacaacaccagccccacttctgggtcatgcactgaggtccacagacctactgcactgagttaaaatagcggtacaagttctggcaagagcagatactgtctttgtgctgaatacgctaagcctggaagccatcctgcccttctgacccaaagcaaaacatcacattccagtctgaagtgcctactggggggctttggcctgtgagccattgtccctctttggaacagatatttagctctgtggaattcagtgacaaaatgggaggaggaaagagagtttgtaaggtcatgctggtgggttagctaaaccaagaaggagaccttttcacaatggaaaacctgggggatggtcagagcccagtcgagacctcacacacggctgtccctcatggagacctcatgccatggtctttgctaggcctcttgctgaaagccaaggcagctcttctggagtttctctaaagtcactagtgaacaattcggtggtaaaagtaccacacaaactatgggatccaaggggcagtcttgcaacagtgccatgttagggttatgtttttaggattcccctcaatgcagtcagtgtttcttttaagtatacaacaggagagagatggacatggctcattgtagcacaatcctattactcttcctctaacatttttgaggaagttttgtctaattatcaatattgaggatcagggctcctaggctcagtggtagctctggcttagacaccacctggagtgatcacctcttggggaccctgcctatcccacttcacaggtgaggcatggcaattctggaagctgattaaaacacacataaaccaaaaccaaacaacaggcccttgggtgaaaggtgctatataattgtgaagtattaagcctaccgtatttcagccatgataagaacagagtgcctgcattcccaggaaaatacgaaaatcccatgagataaataaaaatataggtgatgggcagatcttttctttaaaataaaaaagcaaaaactcttgtggtacctagtcagatggtagacgagctgtctgctgccgcaggagcacctctatacaggacttagaagtagtatgttattcctggttaagcaggcattgctttgccctggagcagctattttaagccatctcagattctgtctaaaggggttttttgggaagacgttttctttatcgccctgagaagatctaccccagggagaatctgagacatcttgcctacttttctttattagctttctcctcattcatttcttttatacctttcctttttggggagttgttatgccatgatttttggtatttatgtaaaaggattattactaattctatttctctatgtttattctagttaaggaaatgttgagggcaagccaccaaattacctaggctgaggttagagagattggccagcaaaaactgtgggaagatgaactttgtcattatgatttcattatcacatgattatagaaggctgtcttagtgcaaaaaacatacttacatttcagacatatccaaagggaatactcacattttgttaagaagttgaactatgactggagtaaaccatgtattcccttatcttttactttttttctgtgacatttatgtctcatgtaatttgcattactctggtggattgttctagtactgtattgggcttcttcgttaatagattatttcatatactataattgtaaatattttgatacaaatgtttataactctagggatataaaaacagattctgattcccttcattgtgtgaatgtttttttctaaaaaaaatg

SEQ ID NO: 436103 - DNA, 764 bp, Homo sapiens
agcactctccagcctctcaccgcaaaattacacaccccagtacaccagcagaggaaacttataacctcgggaggcaggtccttcccctcagtgcggtcacatacttccagaagagcggaccagggctgctgccagcacctgccactcagagcgcctctgtcgctgggacccttcagaactctctttgctcacaagttaccaaaaaaaaaagagccaacatgttggtattgctggctggtatctttgtggtccacatcgctactgttattatgctatttgttagcaccattgccaatgtctggttggtttccaatacggtagatgcatcagtaggtctttggaaaaactgtaccaacattagctgcagtgacagcctgtcatatgccagtgaagctgtgggaagatgaactttgtcattatgatttcattatcacatgattatagaaggctgtcttagtgcaaaaaacatacttacatttcagacatatccaaagggaatactcacattttgttaagaagttgaactatgactggagtaaaccatgtattcccttatcttttactttttttctgtgacatttatgtctcatgtaatttgcattactctggtggattgttctagtactgtattgggcttcttcgttaatagattatttcatatactataattgtaaatattttgatacaaatgtttataactctagggatataaaaacagattctgattcccttcattgtgtgaatgtttttttctaaaaaaaatg

SEQ ID NO: 436104 - DNA, 314 bp, Homo sapiens
gtctggttggtttccaatacggtagatgcatcagtaggtctttggaaaaactgtaccaacattagctgcagtgacagcctgtcatatgccagtgaaggtatatataaagatattgacccagtgctgacaataggtgtggtcagggaatgttcagcccctggagtgacctcatgcccttgttctcctcgtcctgtgtctacagatgccctcaagacagtgcaggccttcatgattctctctatcatcttctgtgtcattgccctcctggtcttcgtgttccagctcttcaccatggagaagggaaaccggttctt

SEQ ID NO: 436105 - DNA, 4758 bp, Homo sapiens
aaataataaagaaattgaaaacaatacattaatataccataacactaaaaagagcaggagcgagagatgagaaagggaatccagcccgctctggagcagtacctggtgaccgccgggggtggggagggggcggctgtcgtcgccgccgccgctgcagcctccatggacaaaagggcactgctagccagccccggcttcgccgccgccgccgccgctgccgccgccccgggcgcgtacatccagatcctcaccacgaacacttccaccacctcctgttcctcctccctccaaagcggcgccgtagccgccggccccctcctccccagtgcccccggcgcggagcagaccgccggcagcctcctctacaccacgccgcacggaccctccagcagagccgggctgctgcagcagccaccagcgctgggacgcggcggcagcggcggcggcggcggccctccggcaaagcgaaggctggagctaggagaaagcggtcatcagtacctctcagatggtttaaaaacccccaagggcaaaggaagagctgcactacgaagtccagatagtccaaaaactccaaaatctccctcagaaaaaacgcggtatgatacgtctcttggtctgctcaccaagaagttcattcagctcctgagccagtcacccgatggggtattggatttgaacaaggcagcagaagtgctaaaagtgcaaaagagaaggatttatgatatcaccaacgttctggaaggcatccacctcattaagaagaagtctaaaaacaacgtccaatggatgggctgcagtctgtctgaggatgggggcatgctggcccagtgtcaaggcctgtcaaaagaagtgaccgagctcagtcaggaagagaagaaattagatgaactgatccaaagctgcaccctggacctcaaactgttaaccgaggattcagagaatcaaaggttagcttatgttacatatcaagatattcgaaaaattagtggccttaaagaccaaactgttatagttgtgaaagcccctccagaaacaagacttgaagtgcctgactcaatagagagcctacaaatacatttggcaagtacccaagggcccattgaggtttacttatgtccagaagagactgaaacacacagtccaatgaaaacaaacaaccaagaccacaatgggaatatccctaaacccgcttccaaagacttggcttcaaccaactcaggacatagcgattgctcagtttctatgggaaacctttctcctctggcctccccagccaacctcttacagcagactgaggaccaaattccttccaacctagaaggaccgtttgtgaacttactgcctcccctgctgcaagaggactatctcctgagcctcggggaggaggaaggcatcagcgatctcttcgatgcttacgatttggaaaagctcccactggtggaagacttcatgtgtagttgattatgcttcgtgtgaactctccttaaaaaccgatatttttttatcatggaaccagaacatctgtcatgcagtgttgtcccttcctaccttcttcctccaagagagtatcatgaagtaaactacaaacttcagaagaaagctgacattttaatgaattttttaaaaaattaataaacaaattgtctaaacgcacagttgcaggctcccttgggaaagccctgctttgctccaggctccaagatctcctggctaagtcagcaagtgagaaaatgtgcaatcaggtgtctctcaccccgaattgtccttcctccttcctccccggattggcttgctgtgcctgacggatgggctgtagaatggggtctggccacctggcctgctgggaaacagcaatcttccttaatagcatttcaagccgtgccttctccgcagaatgcatgtctttgaggtctgctaatatggaatggaactgcagcaaatgcaaacttgaagtcatgcaaaagtatgaaatggatttcttcagctcttcttaggaatatttaaattactgtcataattcagtttaagctatgaactgtgtgtcccagtaggaggtcaagaaaacctccacagccttctggatgaagaacctgttttcaaatatacttgttgcagatacagaagactagtagagttctgccactctaagctgttgtggattttcctgtctccatgaaccactcccattcccccgtccccaatgtgtttgtgagtttccagttgatttgtagcaaatgcctacttagttctttgtggattgttctagacttttaatttttttagctgccatttaagcattcctgtggcacccatcaccatttcaatttaattgtttactttgaagcggtttttgcaaattcatattacttaagcagagggagagaacctctactgatcagagcatctaaacctgtgtgatctaaggtttatcagcctctgcaaggagctttgtcccatcgtgcttccattcccaggagggggagcttggagcgagtcagtcctggggcttgctgacatgggtggcccattggaaaggagaaccaggtcagatgatgtaacagccccaaggagcagcaggcatgggtccctccatccttgggcttcccgggcccctgtgacaggggaaagggctctcttacaccgcactcagggagaccacttctcaggatggggtcagatggagagacctctagggagaaagacatccccattgtgtgagtggcatttccttaagctggcaggaacagggagcagccctgtgtcgggggctggaatagttctggccagaccccgttccccttcctctatgaaggaataagttggaccaagggaagtcggggacgtaaaaaatgaagcaaaacaatgccagggtgtctcccgctttactcttcaggaatggtgtcccaagttggaggctttgtgtcagctgcaaatcctaccagttatgtccaagaatggctttccctcgggcaggtggcagcggccatctcccactgggaatatggcgtagtatctccggtccattccttggatgctaaggactgcgggaatgagggagtcagataaagaacaaacctcgaaacgaacagttaaattgaaatgctatgtgcctgacccaatggtaggcacatagtaggcactcaactcatatgtttaattgaattgaaaatatcccttaggaaaaaaaaaaaacacacaaaaaaccacaagagccccagccagtttactccaggtagatttccacaatatgcaaagtggtggtggggtcaagacagatgacaccagcactttaaactctttgtgtgggtatgcgtgggtgtatgtttgggaagaaaaacaaaggtgcagactatcttcctttttttcttcttcagcctccatccctggcctcctcccctcacacacactggacttggtacaaaatgtcggtgtggtcctagatgaagcattggggtgggggagggagagggagctttgtgttaagtgcctactggaaatgcactgtggggttttttcctgtatgggaaaccatttatgccaagcttttccccatttcccatatttatctcatctggttagctgcctctgcttccagctttgtgtaattctctttgccagctgcacaaagctgattttttccaaagtctaaagactgagctcacctggctagattgttgtgtgttttgttgaattttttcataatgtaatgccgtatttattgtttttaaaatgaaaggaatactaataagtcttaaaagttccttcatgcataagatttttttccagttactgggcttaactggtgtacattaattagatgtccatactgtattttgtttgcattaagtaattttctttttgacttagtatccggcacacaaagtgggttagtactacagtatttgcgttactttaagtactaagtatgcaggtttcctggtaccattgagttgctgctattaaagctcacacacgaaatggctaaaagttacaagtgtgcaaattatgactgcgtgagccttagaaaataaaatgtataaagggcaacacatgagctgtcaaacagtgttaggagtgtgtttatatgtacagagttgtgcatagcaatcgttttatttaagttgatatgtagtctactcacattttcattatttagcaattttgtacaaaaatagcaattaatttgtaaacactgccagaatactttctagctgctttgtaattttttaagagtgttattttgtttttgtttttctgttctttgttgtggctcttgttttcatttttgttgtacgtgtagatctgtaaataaaattgcagtatttaaagcttaagctttcaggaaaaagaaaataagaattcagtgtgtgcatgacaactcgtgtgtatgagaaggagggatatgaaggaagatggcttgcagagtaagtcgggtggcaattgtcagggtgtgggaatttcttttcctacggggtacgtgattttgtaaaaaggaagtatttctcccaaaattgggagtaggcaaactactaatcagtttagctttgtgttgtatgctagtttaaaaaagaaaatatgtaatataatgtaaaaaaaaacaaaaaaaagcttttatgatggattttgtaaatagatttgttacagggtgacctgttctctagctgtgatcttaccacttcaaatgggtgtaatttgaataaattttgtatggtaaaggatcaataaaatgattttttttaagagttaaaaaaaatg

SEQ ID NO: 436106 - DNA, 4545 bp, Homo sapiens
aaataataaagaaattgaaaacaatacattaatataccataacactaaaaagagcaggagcgagagatgagaaagggaatccagcccgctctggagcagtacctggtgaccgccgggggtggggagggggcggctgtcgtcgccgccgccgctgcagcctccatggacaaaagggcactgctagccagccccggcttcgccgccgccgccgccgctgccgccgccccgggcgcgtacatccagatcctcaccacgaacacttccaccacctcctgttcctcctccctccaaagcggcgccgtagccgccggccccctcctccccagtgcccccggcgcggagcagaccgccggcagcctcctctacaccacgccgcacggaccctccagcagagccgggctgctgcagcagccaccagcgctgggacgcggcggcagcggcggcggcggcggccctccggcaaagcgaaggctggagctaggagaaagcggtcatcagtacctctcagatggtttaaaaacccccaagggcaaaggaagagctgcactacgaagtccagatagtccaaaaactccaaaatctccctcagaaaaaacgcggtatgatacgtctcttggtctgctcaccaagaagttcattcagctcctgagccagtcacccgatggggtattggatttgaacaaggcagcagaagtgctaaaagtgcaaaagagaaggatttatgatatcaccaacgttctggaaggcatccacctcattaagaagaagtctaaaaacaacgtccaatggatgggctgcagtctgtctgaggatgggggcatgctggcccagtgtcaaggcctgtcaaaagaagtgaccgagctcagtcaggaagagaagaaattagatgaactgatccaaagctgcaccctggacctcaaactgttaaccgaggattcagagaatcaaaggttagcttatgttacatatcaagatattcgaaaaattagtggccttaaagaccaaactgttatagttgtgaaagcccctccagaaacaagacttgaagtgcctgactcaatagagagcctacaaatacatttggcaagtacccaagggcccattgaggtttacttatgtccagaagagactgaaacacacagtccaatgaaaacaaacaaccaagaccacaatgggaatatccctaaacccgcttccaaagacttggcttcaaccaactcaggacatagcgattgctcagtttctatgggaaacctttctcctctggcctccccagccaacctcttacagcagactgaggaccaaattccttccaacctagaaggaccgtttgtgaacttactgcctcccctgctgcaagaggactatctcctgagcctcggggaggaggaaggcatcagcgatctcttcgatgcttacgatttggaaaagctcccactggtggaagacttcatgtgtagttgattatgcttcgtgtgaactctccttaaaaaccgatatttttttatcatggaaccagaacatctgtcatgcagtgttgtcccttcctaccttcttcctccaagagagtatcatgaagtaaactacaaacttcagaagaaagctgacattttaatgaattttttaaaaaattaataaacaaattgtctaaacgcacagttgcaggctcccttgggaaagccctgctttgctccaggctccaagatctcctggctaagtcagcaagtgagaaaatgtgcaatcaggtgtctctcaccccgaattgtccttcctccttcctccccggattggcttgctgtgcctgacggatgggctgtagaatggggtctggccacctggcctgctgggaaacagcaatcttccttaatagcatttcaagccgtgccttctccgcagaatgcatgtctttgaggtctgctaatatggaatggaactgcagcaaatgcaaacttgaagtcatgcaaaagtatgaaatggatttcttcagctcttcttaggaatatttaaattactgtcataattcagtttaagctatgaactgtgtgtcccagtaggaggtcaagaaaacctccacagccttctggatgaagaacctgttttcaaatatacttgttgcagatacagaagactagtagagttctgccactctaagctgttgtggattttcctgtctccatgaaccactcccattcccccgtccccaatgtgtttgtgagtttccagttgatttgtagcaaatgcctacttagttctttgtggattgttctagacttttaatttttttagctgccatttaagcattcctgtggcacccatcaccatttcaatttaattgtttactttgaagcggtttttgcaaattcatattacttaagcagagggagagaacctctactgatcagagcatctaaacctgtgtgatctaaggtttatcagcctctgcaaggagctttgtcccatcgtgcttccattcccaggagggggagcttggagcgagtcagtcctggggcttgctgacatgggtggcccattggaaaggagaaccaggtcagatgatgtaacagccccaaggagcagcaggcatgggtccctccatccttgggcttcccgggcccctgtgacaggggaaagggctctcttacaccgcactcagggagaccacttctcaggatggggtcagatggagagacctctagggagaaagacatccccattgtgtgagtggcatttccttaagctggcaggaacagggagcagccctgtgtcgggggctggaatagttctggccagaccccgttccccttcctctatgaaggaataagttggaccaagggaagtcggggacgtaaaaaatgaagcaaaacaatgccagggtgtctcccgctttactcttcaggaatggtgtcccaagttggaggctttgtgtcagctgcaaatcctaccagttatgtccaagaatggctttccctcgggcaggtggcagcggccatctcccactgggaatatggcgtagtatctccggtccattccttggatgctaaggactgcgggaatgagggagtcagataaagaacaaacctcgaaacgaacagttaaattgaaatgctatgtgcctgacccaatggtaggcacatagtaggcactcaactcatatgtttaattgaattgaaaatatcccttaggaaaaaaaaaaaacacacaaaaaaccacaagagccccagccagtttactccaggtagatttccacaatatgcaaagtggtggtggggtcaagacagatgacaccagcactttaaactctttgtgtgggtatgcgtgggtgtatgtttgggaagaaaaacaaaggtgcagactatcttcctttttttcttcttcagcctccatccctggcctcctcccctcacacacactggacttggtacaaaatgtcggtgtggtcctagatgaagcattggggtgggggagggagagggagctttgtgttaagtgcctactggaaatgcactgtggggttttttcctgtatgggaaaccatttatgccaagcttttccccatttcccatatttatctcatctggttagctgcctctgcttccagctttgtgtaattctctttgccagctgcacaaagctgattttttccaaagtctaaagactgagctcacctggctagattgttgtgtgttttgttgaattttttcataatgtaatgccgtatttattgtttttaaaatgaaaggaatactaataagtcttaaaagttccttcatgcataagatttttttccagttactgggcttaactggtgtacattaattagatgtccatactgtattttgtttgcattaagtaattttctttttgacttagtatccggcacacaaagtgggttagtactacagtatttgcgttactttaagtactaagtatgcaggtttcctggtaccattgagttgctgctattaaagctcacacacgaaatggctaaaagttacaagtgtgcaaattatgactgcgtgagccttagaaaataaaatgtataaagggcaacacatgagctgtcaaacagtgttaggagtgtgtttatatgtacagagttgtgcatagcaatcgttttatttaagttgatatgtagtctactcacattttcattatttagcaattttgtacaaaaatagcaattaatttgtaaacactgccagaatactttctagctgctttgtaattttttaagagtgttattttgtttttgtttttctgttctttgttgtggctcttgttttcatttttgttgtacgtgtagatctgtaaataaaattgcagtatttaaagcttaagctttcaggaaaaagaaaataagaattcagtgtgtgcatgacaactcgtgtgtatgagaaggagggatatgaaggaagatggcttgcagagtaagtcgggtggcaattgtcaggctgtgatcttaccacttcaaatgggtgtaatttgaataaattttgtatggtaaaggatcaataaaatgattttttttaagagttaaaaaaaatg

SEQ ID NO: 436107 - DNA, 287 bp, Homo sapiens
ccagtcacccgatggggtattggatttgaacaaggcagcagaagtgctaaaagtgcaaaagagaaggatttatgatatcaccaacgttctggaaggcatccacctcattaagaagaagtctaaaaacaacgtccaatggatgtgagtaggagtcctccccatgccccggctctgagggggtcgtttcaaactgcctggtttcttagttcctcactttcacatccacgcccacacgttcttttcttttctctcctactgttttcttctctctcattctctcttccctc

SEQ ID NO: 436108 - DNA, 869 bp, Homo sapiens
  misc_feature (850)..(850): n is a, c, g, or t
gatatcgtcctgtcttgccgactggcgctggctacatcgtgtcagcccctcgcgtatgattagtcgagtggcagtgcgccggggagagggatgttcgtgtgaagtggctctcggggctgccgtgaggctccgttgacagtctgggaaaccatttatgccaagcttttccccatttcccatatttatctcatctggttagctgcctctgcttccagctttgtgtaattctctttgccagctgcacaaagctgattttttccaaagtctaaagactgagctcacctggctagattgttgtgtgttttgttgaattttttcataatgtaatgccgtatttattgtttttaaaatgaaaggaatactaataagtcttaaaagttccttcatgcataagatttttttccagttactgggcttaactggtgtacattaattagatgtccatactgtattttgtttgcattaagtaattttctttttgacttagtatccggcacacaaagtgggttagtactacagtatttgcgttactttaagtactaagtatgcaggtttcctggtaccattgagttgctgctattaaagctcacacacgaaatggctaaaagttacaagtgtgcaaattatgactgcgtgagccttagaaataatgtttagggcaccatgactgtcaaccgggtggagtgggtcctttgtcggagtggctagcacatcgttatagtgaatgactcacccattatttacattggcaaattcttttggaccgccaaattagcctggataaaggtggggagacgggggcgaaaagggcgaaggaaaagtagtgaaaaagtgacaaaaaatataaagnataacaatccttataaatc

SEQ ID NO: 436109 - DNA, 922 bp, Homo sapiens
gtcccccccgcgcgtgggttataaaaccaggagctccttttgtgtgccccctcctgattgtctccgtggaggcccccctctccccccgctgttttgtgcgcgcccccctatagtgatacctccctgggggtctgttctactctcccccggagtttttcctcatgtgcccccgcggtgcgggtgtaacaccctttttctcccccgggtgcccttctttgttccccctgggcgcctcttttttggggcccccctttatagacaccctttttccccacaaaacgcgcgcgcgcgggtccgcgctctctgccggagatttccccgcgggagatatttgcgctcccccccgcgcgctctccgcgcgcgagcgcgcggcgggggcgcgagcgcgcgcgcggggcccccccctctcttttttttttttttttttttttttttttttcttgttttcatttttgttgtacgtgtagatctgtaaataaaattgcagtatttaaagcttaagctttcaggaaaaagaaaataagaattcagtgtgtgcatgacaactcgtgtgtatgagaaggagggatatgaaggaagatggcttgcagagtaagtcgggtggcaattgtcagggtgtgggaatttcttttcctacggggtacgtgattttgtaaaaaggaagtatttctcccaaaattgggagtaggcaaactactaatcagtttagctttgtgttgtatgctagtttaaaaaagaaaatatgtaatataatgtaaaaaaaaacaaaaaaaagcttttatgatggattttgtaaatagatttgttacagggtgacctgttctctagctgtgatcttaccacttcaaatgggtgtaatttgaataaattttgtatggtaaaggatcaataaaatgattttttttaagagttaaaaaaaatg

SEQ ID NO: 436110 - DNA, 1327 bp, Homo sapiens
agcgggttcgcgcgacgaccgcggggtcggcgggcggggcgaggccctggacggcggcggcagtggggctcctccttctgtttcccagactgagagccgcgccggcaccatgtcagcttaccctaaaagctacaatccgttcgacgacgacggggaggacgaaggcgcccggccggccccttggagggacgcccgagacctccccgacgggcccgacgcgcccgcggacaggcagcagtacttgcggcaggaggtcctccgcagggctgaggccacggccgccagcaccagcaggtccctggccctcatgtacgagtccgagaaggttggggtcgcctcttccgaggagctcgcccgtcagcgaggagtcctggagcgcacagagaagatggtggacaagatggaccaagatttgaagatcagccagaaacacatcaatagcattaagagcgtgtttggggggctggtcaattacttcaaatccaaaccagtagagaccccacctgaacagaatggcaccctcacctcccagcccaacaacaggtgagtgcatcttctaccatctgggtataaaggagcagaagtggggattagtgcaaatgaccaagactttcagtccacgtcagtgccatgaagggatccaacaaccctttaagttactcatcaggggatatttgtcctcaaacattgtgaaaccaggaactgttcttccctgatcccatgttcacttgattgacatctagtctgtcaatagcttctccaataattgtgaccccactactttgaaagagagggtgttcacctcagcgtaatctgtacaaatgtgactcacttcacataatttttgctttaaaaaatctttagggctgggtgcagtggctcacacctgtaatcccgacacttcaggatgccaaggtgggtagattgcttaagcccaggagctcgagaccagcctgggcaacatagtgggaacccagtctttacaaaaattacccaggcattgtggtgcacacctgtagtcccagctcctcaggaggctgaggtaagaggatctcatgaggcctggagatcaaggctgcagtgagctgtaatggtgcactccaacctgggctacagagggaggccctgtctcaagaaaaaaaaaaaaaaagtctttatgtctaaatttgtcatatctaatccaattcgcccattgatttttatttgaaaattataaggctgggctcagtggcttatctgtaaaatcccatgctttcagaggctaaggtaggaggattgtttgagaccagcctagacaacatagcaaagacccgtctctataaaaact

SEQ ID NO: 436111 - DNA, 354 bp, Homo sapiens
ctgaagttcattcaagccaagaaagataattttaaaaaagaagaaactaaaagttcaaggaagatttcttgtggcaaatgtgcattatttaacatttcttttttttttttttgcgtatttgtttcaagtgcaaagatagtgtagaaataaatttcagaaagaaacgaaattacccataattccatttatgtaacgtaacaatttgtatttttatactttgtccacagactgtgtagttttgcattattgcagttccacttctgtattgtcacttgtgtgactctgtctttcctgagcttgtgcaccaggagttaggtgacccttaatttgagggtgtttgatctcccaagtact

SEQ ID NO: 436112 - DNA, 4265 bp, Homo sapiens
agcgggttcgcgcgacgaccgcggggtcggcgggcggggcgaggccctggacggcggcggcagtggggctcctccttctgtttcccagactgagagccgcgccggcaccatgtcagcttaccctaaaagctacaatccgttcgacgacgacggggaggacgaaggcgcccggccggccccttggagggacgcccgagacctccccgacgggcccgacgcgcccgcggacaggcagcagtacttgcggcaggaggtcctccgcagggctgaggccacggccgccagcaccagcaggtccctggccctcatgtacgagtccgagaaggttggggtcgcctcttccgaggagctcgcccgtcagcgaggagtcctggagcgcacagagaagatggtggacaagatggaccaagatttgaagatcagccagaaacacatcaatagcattaagagcgtgtttggggggctggtcaattacttcaaatccaaaccagtagagaccccacctgaacagaatggcaccctcacctcccagcccaacaacagattgaaagaagctataagtacaagtaaagaacaggaagcaaagtaccaggccagccacccaaaccttagaaagctggatgatacagaccctgtccccagaggggctggttctgccatgagtactgatgcttacccaaagaacccacaccttcgagcctatcaccagaagatcgacagcaacctagatgagctgtccatgggactgggtcgtctgaaggacatagccctggggatgcagacagaaattgaggagcaagatgacattcttgaccggctgacaaccaaagtggacaagttagatgtcaacataaaaagcacagaaagaaaagttcgacaactctgaagacagacggatttccactctattgtgatgaaaagatttgaaagatctttttttgaacttccaagaaatttcatttactattttagtatgtaaattaatgtgtgtttgcaaatgttataatagagtaggtcttaagacatttttgctgttataaggaagtgtttgtcccacattttcctagggttaacacctcaccaagttcttccagcaaaatgcttattagagtttttgtctgagcacagtagcctggccctgcatatcttgggcgtttgattaccatgctggaataagaagagttgcatttctcattttaatgagcatatggaaagatgggaacagaatttcagtcttgcagccatgagcctctatttctcattcctaagccttaccatgagtcagagtgttaagggggcctgtgaaccagtcgtttggtggaggagggtccttcccacacctttgtttaggagtcatcattcacacacacacacacacacacacacacacacacacacacactctctgagcacattatctgtgattctttcatcctcccagaaaggatcagtgttagaatgggaaatagagtgtgccatcttgctcttttgttggcagatgtccccgcttccctccagccccccatccttggcatgtatattagtaggagggcttcacaccagcactgctcactgcgactcctggaaatgtgtggggaattgggtgagcccctcttccccacgtgctcccatctgtaactctccatctgtgatttgcaacaggtcttccactggctcgaggctgcgaggctgaccgacaggggcgcccaatagagtttgtgggaatggagtattgcacagatgcagctgcacaatggtcttcctccacccctctgggaatcaccattaggcaggcctcagtagggcaaaatgtttatttggtaccgggggtctcctgacctgtctagcattcccacccactcttctgcacttcttgcaaggtaacttgaatcatcacttatttctctgccacctggttttaggactggcactctataaatgacgctgactttgtatagaaggattttgctaagggggcaaaaagcccagataccattttaactggcccagttcattttctcctttcattttacaaaagaaatcatgcagaagcatcaattaaaactgatttatttatgttggtacatccaacaaaatagttggagccacaaggcccttgtctttttaaaaaaacaaaatattttgaagatggtgaaagtgactgattttaataatgagataggtcacttaaaataacagtgcctttgaccttaaaacatggcactggcccatgtgacctttgccatttcccagtacttccctttacagtctgcagcctataaacagtggtgtctcaaagcaaaggaaacctccacaagtgctgcaacagtgcattagtttttatgtagcaatttgtttataaaaattcccatcccataatgcatgaccttcctaaaaatatccacagcctccataggcaaggtgagctttctgtgctacccacttgttagattccagccacctcagggattctgatccatgtcattaacgaccatcccagggtgtgagggcctgattaaagcttatcgaactagacatttgtttattagatgagctcggcattattattttctcaataactggtagaagggaaattttaaacataacactcaacccaaacaaaactacttcgtgaggctttcagcaaaaaggctgcttaaaagcatgaacccgggatgcagagcagcttttgtgcacggttccacttactgtaattgtttctggttctttcctctaacaccttccatgtatgtcaactttttatcaccgtcaggcatagactcgtggagattagtcattatagctcagacctaagctaattatttaaaataaatacatgtaaaggccactgccacattctcagcagacttccacttgcctaatgagattagtgattcaactgacttgaagcacagtaacatcttattttatgcacattccctgtcttttgctggactgatgaagccagtcacccgcccttctctgttttttggttttttttttcttaaccccaggtatatggaaggggagttgccttcacttttctggaaatttgtcttcgtctgacatattagagggcctcgttttgtcctgttcttgttcagaccctctcgttctacgtcctgtgctgaggggactgtccttaagctacaggacagcgagctggtcctttctgccacttcttccccactcccatgcccaggaaggcctggttgctgatgctactttataaatgagttgcttgcattttcacagagaatgaaggaagacgtaacatggctccagaaacttttcacatgatgatgggatcgacaaaaaaatgctaccctctagactagacacatttcatggagacaagcaaaatggtgccagggctgggctgactgtgggatgggatttggtactgcagacagattttgatttccacagttgagctggaaacaaactgtgccttcaaaaaatgacttttctaacttaaggttggttatatgttaagtgtgctactaacttaaaaaatagtggctgggcgcggtggctcatgcctgtaatcccagtgctttgggaggccaaggcggggggatcacgaggtcaggagatcgagaccatcctggctaacacggtgaaaccccatctctactaaaaacacacaaaaaattagctgggcgtggtggtgggcgcctgtagtcccagctactcgggaggctgaggcaggagaatggcatgaacctgggaggcagagcttgcagtgagccgagacagcgccattgcactccagcctgggcaacagagcaagactccgtctcaaaaaaaaaaaaacaaaaaaaatagtgcactctctggccggtcacggtggctcacgcctgtaatctcagcactttggaaggccaaggcaggcggatcacgaggtcagaagatcgagaccatcctggctaacacagtgaaaccccgtctctactaaaaatataaaaaattagtcgggcatggtggcgggcgcctgtagtcccaactactcgggagactgaggcagaagaatggcgtgaactcaggaggcggagcttgcagtgagccaaggcgacagagcaagactctgtctcaaaaaaataaaaaatagtgcactgtccttcgagaaagttttctaacatctagtaatttgtaacttagaagtggagttgccttgtggatgtcttttttgcattctgtaggaaatgaaacgtgaatttaactcgggttgcaagaaataaaaatgtcagtgcatttaaatttct

SEQ ID NO: 436113 - DNA, 4071 bp, Homo sapiens
actcgatggtggtaacaatctgttaactatgtaaaggtatgtgcatctggagtacttgaagagggcagtttaccccagaaatcttccttagctattagtctgcttcgttgattttttttttcttacgcctagctcacggggaaacgccagattattttctgtccaggagctcgcccgtcagcgaggagtcctggagcgcacagagaagatggtggacaagatggaccaagatttgaagatcagccagaaacacatcaatagcattaagagcgtgtttggggggctggtcaattacttcaaatccaaaccagtagagaccccacctgaacagaatggcaccctcacctcccagcccaacaacagattgaaagaagctataagtacaagtaaagaacaggaagcaaagtaccaggccagccacccaaaccttagaaagctggatgatacagaccctgtccccagaggggctggttctgccatgagtactgatgcttacccaaagaacccacaccttcgagcctatcaccagaagatcgacagcaacctagatgagctgtccatgggactgggtcgtctgaaggacatagccctggggatgcagacagaaattgaggagcaagatgacattcttgaccggctgacaaccaaagtggacaagttagatgtcaacataaaaagcacagaaagaaaagttcgacaactctgaagacagacggatttccactctattgtgatgaaaagatttgaaagatctttttttgaacttccaagaaatttcatttactattttagtatgtaaattaatgtgtgtttgcaaatgttataatagagtaggtcttaagacatttttgctgttataaggaagtgtttgtcccacattttcctagggttaacacctcaccaagttcttccagcaaaatgcttattagagtttttgtctgagcacagtagcctggccctgcatatcttgggcgtttgattaccatgctggaataagaagagttgcatttctcattttaatgagcatatggaaagatgggaacagaatttcagtcttgcagccatgagcctctatttctcattcctaagccttaccatgagtcagagtgttaagggggcctgtgaaccagtcgtttggtggaggagggtccttcccacacctttgtttaggagtcatcattcacacacacacacacacacacacacactctctgagcacattatctgtgattctttcatcctcccagaaaggatcagtgttagaatgggaaatagagtgtgccatcttgctcttttgttggcagatgtccccgcttccctccagccccccatccttggcatgtatattagtaggagggcttcacaccagcactgctcactgcgactcctggaaatgtgtggggaattgggtgagcccctcttccccacgtgctcccatctgtaactctccatctgtgatttgcaacaggtcttccactggctcgaggctgcgaggctgaccgacaggggcgcccaatagagtttgtgggaatggagtattgcacagatgcagctgcacaatggtcttcctccacccctctgggaatcaccattaggcaggcctcagtagggcaaaatgtttatttggtaccgggggtctcctgacctgtctagcattcccacccactcttctgcacttcttgcaaggtaacttgaatcatcacttatttctctgccacctggttttaggactggcactctataaatgacgctgactttgtatagaaggattttgctaagggggcaaaaagcccagataccattttaactggcccagttcattttctcctttcattttacaaaagaaatcatgcagaagcatcaattaaaactgatttatttatgttggtacatccaacaaaatagttggagccacaaggcccttgtctttttaaaaaaacaaaatattttgaagatggtgaaagtgactgattttaataatgagataggtcacttaaaataacagtgcctttgaccttaaaacatggcactggcccatgtgacctttgccatttcccagtacttccctttacagtctgcagcctataaacagtggtgtctcaaagcaaaggaaacctccacaagtgctgcaacagtgcattagtttttatgtagcaatttgtttataaaaattcccatcccataatgcatgaccttcctaaaaatatccacagcctccataggcaaggtgagctttctgtgctacccacttgttagattccagccacctcagggattctgatccatgtcattaacgaccatcccagggtgtgagggcctgattaaagcttatcgaactagacatttgtttattagatgagctcggcattattattttctcaataactggtagaagggaaattttaaacataacactcaacccaaacaaaactacttcgtgaggctttcagcaaaaaggctgcttaaaagcatgaacccgggatgcagagcagcttttgtgcacggttccacttactgtaattgtttctggttctttcctctaacaccttccatgtatgtcaactttttatcaccgtcaggcatagactcgtggagattagtcattatagctcagacctaagctaattatttaaaataaatacatgtaaaggccactgccacattctcagcagacttccacttgcctaatgagattagtgattcaactgacttgaagcacagtaacatcttattttatgcacattccctgtcttttgctggactgatgaagccagtcacccgcccttctctgttttttggttttttttttcttaaccccaggtatatggaaggggagttgccttcacttttctggaaatttgtcttcgtctgacatattagagggcctcgttttgtcctgttcttgttcagaccctctcgttctacgtcctgtgctgaggggactgtccttaagctacaggacagcgagctggtcctttctgccacttcttccccactcccatgcccaggaaggcctggttgctgatgctactttataaatgagttgcttgcattttcacagagaatgaaggaagacgtaacatggctccagaaacttttcacatgatgatgggatcgacaaaaaaatgctaccctctagactagacacatttcatggagacaagcaaaatggtgccagggctgggctgactgtgggatgggatttggtactgcagacagattttgatttccacagttgagctggaaacaaactgtgccttcaaaaaatgacttttctaacttaaggttggttatatgttaagtgtgctactaacttaaaaaatagtggctgggcgcggtggctcatgcctgtaatcccagtgctttgggaggccaaggcggggggatcacgaggtcaggagatcgagaccatcctggctaacacggtgaaaccccatctctactaaaaacacacaaaaaattagctgggcgtggtggtgggcgcctgtagtcccagctactcgggaggctgaggcaggagaatggcatgaacctgggaggcagagcttgcagtgagccgagacagcgccattgcactccagcctgggcaacagagcaagactccgtctcaaaaaaaaaaaaacaaaaaaaatagtgcactctctggccggtcacggtggctcacgcctgtaatctcagcactttggaaggccaaggcaggcggatcacgaggtcagaagatcgagaccatcctggctaacacagtgaaaccccgtctctactaaaaatataaaaaattagtcgggcatggtggcgggcgcctgtagtcccaactactcgggagactgaggcagaagaatggcgtgaactcaggaggcggagcttgcagtgagccaaggcgacagagcaagactctgtctcaaaaaaataaaaaatagtgcactgtccttcgagaaagttttctaacatctagtaatttgtaacttagaagtggagttgccttgtggatgtcttttttgcattctgtaggaaatgaaacgtgaatttaactcgggttgcaagaaataaaaatgtcagtgcatttaaatttct

SEQ ID NO: 436114 - DNA, 1545 bp, Homo sapiens
agcgggttcgcgcgacgaccgcggggtcggcgggcggggcgaggccctggacggcggcggcagtggggctcctccttctgtttcccagactgagagccgcgccggcaccatgtcagcttaccctaaaagctacaatccgttcgacgacgacggggaggacgaaggcgcccggccggccccttggagggacgcccgagacctccccgacgggcccgacgcgcccgcggacaggcagcagtacttgcggcaggaggtcctccgcagggctgaggccacggccgccagcaccagcaggtccctggccctcatgtacgagtccgagaaggttggggtcgcctcttccgaggagctcgcccgtcagcgaggagtcctggagcgcacagagaagatggtggacaagatggaccaagatttgaagatcagccagaaacacatcaatagcattaagagcgtgtttggggggctggtcaattacttcaaatccaaaccagtagagaccccacctgaacagaatggcaccctcacctcccagcccaacaacagattgaaagaagctataagtacaagtaaagaacaggaagcaaagtaccaggccagccacccaaaccttagaaagctggatgatacagaccctgtccccagaggggctggttctgccatgagtactgatgcttacccaaagaacccacaccttcgagcctatcaccagaagatcgacagcaacctagatgagctgtccatgggactgggtcgtctgaaggacatagccctggggatgcagacagaaattgaggagcaagatgacattcttgaccggctgacaaccaaagtggacaagttagatgtcaacataaaaagcacagaaagaaaagttcgacaactctgaagacagacggatttccactctattgtgatgaaaagatttgaaagatctttttttgaacttccaagaaatttcatttactattttagtatgtaaattaatgtgtgtttgcaaatgttataatagagtaggtcttaagacatttttgctgttataaggaagtgtttgtcccacattttcctagggttaacacctcaccaagttcttccagcaaaatgcttattagagtttttgtctgagcacagtagcctggccctgcatatcttgggcgtttgattaccatgctggaataagaagagttgcatttctcattttaatgagcatatggaaagatgggaacagaatttcagtcttgcagccatgagcctctatttctcattcctaagccttaccatgagtcagagtgttaagggggcctgtgaaccagtcgtttggtggaggagggtccttcccacacctttgtttaggagtcatcattcacacacacacacacacacacacacacacacacacacacactctctgagcacattatctgtgattctttcatcctcccagaaaggatcagtgttagaatgggaaatagagtgtgccatcttgctcttttgttggcagatgtccccgcttccctccagcctggaggagactccatctcaaaaaaa

SEQ ID NO: 436115 - DNA, 3735 bp, Homo sapiens
cacgaggccagtacttccctttacagtctgcagcctataaacagtggtgtctaaagaacaggaagcaaagtaccaggccagccacccaaaccttagaaagctggatgatacagaccctgtccccagaggggctggttctgccatgagtactgatgcttacccaaagaacccacaccttcgagcctatcaccagaagatcgacagcaacctagatgagctgtccatgggactgggtcgtctgaaggacatagccctggggatgcagacagaaattgaggagcaagatgacattcttgaccggctgacaaccaaagtggacaagttagatgtcaacataaaaagcacagaaagaaaagttcgacaactctgaagacagacggatttccactctattgtgatgaaaagatttgaaagatctttttttgaacttccaagaaatttcatttactattttagtatgtaaattaatgtgtgtttgcaaatgttataatagagtaggtcttaagacatttttgctgttataaggaagtgtttgtcccacattttcctagggttaacacctcaccaagttcttccagcaaaatgcttattagagtttttgtctgagcacagtagcctggccctgcatatcttgggcgtttgattaccatgctggaataagaagagttgcatttctcattttaatgagcatatggaaagatgggaacagaatttcagtcttgcagccatgagcctctatttctcattcctaagccttaccatgagtcagagtgttaagggggcctgtgaaccagtcgtttggtggaggagggtccttcccacacctttgtttaggagtcatcattcacacacacacacacacacacacacactctctgagcacattatctgtgattctttcatcctcccagaaaggatcagtgttagaatgggaaatagagtgtgccatcttgctcttttgttggcagatgtccccgcttccctccagccccccatccttggcatgtatattagtaggagggcttcacaccagcactgctcactgcgactcctggaaatgtgtggggaattgggtgagcccctcttccccacgtgctcccatctgtaactctccatctgtgatttgcaacaggtcttccactggctcgaggctgcgaggctgaccgacaggggcgcccaatagagtttgtgggaatggagtattgcacagatgcagctgcacaatggtcttcctccacccctctgggaatcaccattaggcaggcctcagtagggcaaaatgtttatttggtaccgggggtctcctgacctgtctagcattcccacccactcttctgcacttcttgcaaggtaacttgaatcatcacttatttctctgccacctggttttaggactggcactctataaatgacgctgactttgtatagaaggattttgctaagggggcaaaaagcccagataccattttaactggcccagttcattttctcctttcattttacaaaagaaatcatgcagaagcatcaattaaaactgatttatttatgttggtacatccaacaaaatagttggagccacaaggcccttgtctttttaaaaaaacaaaatattttgaagatggtgaaagtgactgattttaataatgagataggtcacttaaaataacagtgcctttgaccttaaaacatggcactggcccatgtgacctttgccatttcccagtacttccctttacagtctgcagcctataaacagtggtgtctcaaagcaaaggaaacctccacaagtgctgcaacagtgcattagtttttatgtagcaatttgtttataaaaattcccatcccataatgcatgaccttcctaaaaatatccacagcctccataggcaaggtgagctttctgtgctacccacttgttagattccagccacctcagggattctgatccatgtcattaacgaccatcccagggtgtgagggcctgattaaagcttatcgaactagacatttgtttattagatgagctcggcattattattttctcaataactggtagaagggaaattttaaacataacactcaacccaaacaaaactacttcgtgaggctttcagcaaaaaggctgcttaaaagcatgaacccgggatgcagagcagcttttgtgcacggttccacttactgtaattgtttctggttctttcctctaacaccttccatgtatgtcaactttttatcaccgtcaggcatagactcgtggagattagtcattatagctcagacctaagctaattatttaaaataaatacatgtaaaggccactgccacattctcagcagacttccacttgcctaatgagattagtgattcaactgacttgaagcacagtaacatcttattttatgcacattccctgtcttttgctggactgatgaagccagtcacccgcccttctctgttttttggttttttttttcttaaccccaggtatatggaaggggagttgccttcacttttctggaaatttgtcttcgtctgacatattagagggcctcgttttgtcctgttcttgttcagaccctctcgttctacgtcctgtgctgaggggactgtccttaagctacaggacagcgagctggtcctttctgccacttcttccccactcccatgcccaggaaggcctggttgctgatgctactttataaatgagttgcttgcattttcacagagaatgaaggaagacgtaacatggctccagaaacttttcacatgatgatgggatcgacaaaaaaatgctaccctctagactagacacatttcatggagacaagcaaaatggtgccagggctgggctgactgtgggatgggatttggtactgcagacagattttgatttccacagttgagctggaaacaaactgtgccttcaaaaaatgacttttctaacttaaggttggttatatgttaagtgtgctactaacttaaaaaatagtggctgggcgcggtggctcatgcctgtaatcccagtgctttgggaggccaaggcggggggatcacgaggtcaggagatcgagaccatcctggctaacacggtgaaaccccatctctactaaaaacacacaaaaaattagctgggcgtggtggtgggcgcctgtagtcccagctactcgggaggctgaggcaggagaatggcatgaacctgggaggcagagcttgcagtgagccgagacagcgccattgcactccagcctgggcaacagagcaagactccgtctcaaaaaaaaaaaaacaaaaaaaatagtgcactctctggccggtcacggtggctcacgcctgtaatctcagcactttggaaggccaaggcaggcggatcacgaggtcagaagatcgagaccatcctggctaacacagtgaaaccccgtctctactaaaaatataaaaaattagtcgggcatggtggcgggcgcctgtagtcccaactactcgggagactgaggcagaagaatggcgtgaactcaggaggcggagcttgcagtgagccaaggcgacagagcaagactctgtctcaaaaaaataaaaaatagtgcactgtccttcgagaaagttttctaacatctagtaatttgtaacttagaagtggagttgccttgtggatgtcttttttgcattctgtaggaaatgaaacgtgaatttaactcgggttgcaagaaataaaaatgtcagtgcatttaaatttct

SEQ ID NO: 436116 - DNA, 133 bp, Homo sapiens
tgactgccctgggggagagtcacagaaagctataatgccactgcctctcggtttccccaggagctcgcccgtcagcgaggagtcctggagcgcacagagaagatggtggacaagatggaccaagatttgaaga

SEQ ID NO: 436117 - DNA, 4251 bp, Homo sapiens
agcgggttcgcgcgacgaccgcggggtcggcgggcggggcgaggccctggacggcggcggcagtggggctcctccttctgtttcccagactgagagccgcgccggcaccatgtcagcttaccctaaaagctacaatccgttcgacgacgacggggaggacgaaggcgcccggccggccccttggagggacgcccgagacctccccgacgggcccgacgcgcccgcggacaggcagcagtacttgcggcaggaggtcctccgcagggctgaggccacggccgccagcaccagcaggtccctggccctcatgtacgagtccgagaaggttggggtcgcctcttccgaggagctcgcccgtcagcgaggagtcctggagcgcacagagaagatggtggacaagatggaccaagatttgaagatcagccagaaacacatcaatagcattaagagcgtgtttggggggctggtcaattacttcaaatccaaaccagtagagaccccacctgaacagaatggcaccctcacctcccagcccaacaacagattgaaagaagctataagtacaagtaaagaacaggaagcaaagtaccaggccagccacccaaaccttagaaagctggatgatacagaccctgtccccagaggggctggttctgccatgagtactgatgcttacccaaagaacccacaccttcgagcctatcaccagaagatcgacagcaacctagatgagctgtccatgggactgggtcgtctgaaggacatagccctggggatgcagacagaaattgaggagcaagatgacattcttgaccggctgacaaccaaagtggacaagttagatgtcaacataaaaagcacagaaagaaaagttcgacaactctgaagacagacggatttccactctattgtgatgaaaagatttgaaagatctttttttgaacttccaagaaatttcatttactattttagtatgtaaattaatgtgtgtttgcaaatgttataatagagtaggtcttaagacatttttgctgttataaggaagtgtttgtcccacattttcctagggttaacacctcaccaagttcttccagcaaaatgcttattagagtttttgtctgagcacagtagcctggccctgcatatcttgggcgtttgattaccatgctggaataagaagagttgcatttctcattttaatgagcatatggaaagatgggaacagaatttcagtcttgcagccatgagcctctatttctcattcctaagccttaccatgagtcagagtgttaagggggcctgtgaaccagtcgtttggtggaggagggtccttcccacacctttgtttaggagtcatcattcacacacacacacacacacacacacactctctgagcacattatctgtgattctttcatcctcccagaaaggatcagtgttagaatgggaaatagagtgtgccatcttgctcttttgttggcagatgtccccgcttccctccagccccccatccttggcatgtatattagtaggagggcttcacaccagcactgctcactgcgactcctggaaatgtgtggggaattgggtgagcccctcttccccacgtgctcccatctgtaactctccatctgtgatttgcaacaggtcttccactggctcgaggctgcgaggctgaccgacaggggcgcccaatagagtttgtgggaatggagtattgcacagatgcagctgcacaatggtcttcctccacccctctgggaatcaccattaggcaggcctcagtagggcaaaatgtttatttggtaccgggggtctcctgacctgtctagcattcccacccactcttctgcacttcttgcaaggtaacttgaatcatcacttatttctctgccacctggttttaggactggcactctataaatgacgctgactttgtatagaaggattttgctaagggggcaaaaagcccagataccattttaactggcccagttcattttctcctttcattttacaaaagaaatcatgcagaagcatcaattaaaactgatttatttatgttggtacatccaacaaaatagttggagccacaaggcccttgtctttttaaaaaaacaaaatattttgaagatggtgaaagtgactgattttaataatgagataggtcacttaaaataacagtgcctttgaccttaaaacatggcactggcccatgtgacctttgccatttcccagtacttccctttacagtctgcagcctataaacagtggtgtctcaaagcaaaggaaacctccacaagtgctgcaacagtgcattagtttttatgtagcaatttgtttataaaaattcccatcccataatgcatgaccttcctaaaaatatccacagcctccataggcaaggtgagctttctgtgctacccacttgttagattccagccacctcagggattctgatccatgtcattaacgaccatcccagggtgtgagggcctgattaaagcttatcgaactagacatttgtttattagatgagctcggcattattattttctcaataactggtagaagggaaattttaaacataacactcaacccaaacaaaactacttcgtgaggctttcagcaaaaaggctgcttaaaagcatgaacccgggatgcagagcagcttttgtgcacggttccacttactgtaattgtttctggttctttcctctaacaccttccatgtatgtcaactttttatcaccgtcaggcatagactcgtggagattagtcattatagctcagacctaagctaattatttaaaataaatacatgtaaaggccactgccacattctcagcagacttccacttgcctaatgagattagtgattcaactgacttgaagcacagtaacatcttattttatgcacattccctgtcttttgctggactgatgaagccagtcacccgcccttctctgttttttggttttttttttcttaaccccaggtatatggaaggggagttgccttcacttttctggaaatttgtcttcgtctgacatattagagggcctcgttttgtcctgttcttgttcagaccctctcgttctacgtcctgtgctgaggggactgtccttaagctacaggacagcgagctggtcctttctgccacttcttccccactcccatgcccaggaaggcctggttgctgatgctactttataaatgagttgcttgcattttcacagagaatgaaggaagacgtaacatggctccagaaacttttcacatgatgatgggatcgacaaaaaaatgctaccctctagactagacacatttcatggagacaagcaaaatggtgccagggctgggctgactgtgggatgggatttggtactgcagacagattttgatttccacagttgagctggaaacaaactgtgccttcaaaaaatgacttttctaacttaaggttggttatatgttaagtgtgctactaacttaaaaaatagtggctgggcgcggtggctcatgcctgtaatcccagtgctttgggaggccaaggcggggggatcacgaggtcaggagatcgagaccatcctggctaacacggtgaaaccccatctctactaaaaacacacaaaaaattagctgggcgtggtggtgggcgcctgtagtcccagctactcgggaggctgaggcaggagaatggcatgaacctgggaggcagagcttgcagtgagccgagacagcgccattgcactccagcctgggcaacagagcaagactccgtctcaaaaaaaaaaaaacaaaaaaaatagtgcactctctggccggtcacggtggctcacgcctgtaatctcagcactttggaaggccaaggcaggcggatcacgaggtcagaagatcgagaccatcctggctaacacagtgaaaccccgtctctactaaaaatataaaaaattagtcgggcatggtggcgggcgcctgtagtcccaactactcgggagactgaggcagaagaatggcgtgaactcaggaggcggagcttgcagtgagccaaggcgacagagcaagactctgtctcaaaaaaataaaaaatagtgcactgtccttcgagaaagttttctaacatctagtaatttgtaacttagaagtggagttgccttgtggatgtcttttttgcattctgtaggaaatgaaacgtgaatttaactcgggttgcaagaaataaaaatgtcagtgcatttaaatttct

SEQ ID NO: 436118 - DNA, 3855 bp, Homo sapiens
tgcggttgtgtttcttttagaatcaccgtatattacagggcatgtgcgtctttcaactgcggttgggctggtcaattacttcaaatccaaaccagtagagaccccacctgaacagaatggcaccctcacctcccagcccaacaacagattgaaagaagctataagtacaagtaaagaacaggaagcaaagtaccaggccagccacccaaaccttagaaagctggatgatacagaccctgtccccagaggggctggttctgccatgagtactgatgcttacccaaagaacccacaccttcgagcctatcaccagaagatcgacagcaacctagatgagctgtccatgggactgggtcgtctgaaggacatagccctggggatgcagacagaaattgaggagcaagatgacattcttgaccggctgacaaccaaagtggacaagttagatgtcaacataaaaagcacagaaagaaaagttcgacaactctgaagacagacggatttccactctattgtgatgaaaagatttgaaagatctttttttgaacttccaagaaatttcatttactattttagtatgtaaattaatgtgtgtttgcaaatgttataatagagtaggtcttaagacatttttgctgttataaggaagtgtttgtcccacattttcctagggttaacacctcaccaagttcttccagcaaaatgcttattagagtttttgtctgagcacagtagcctggccctgcatatcttgggcgtttgattaccatgctggaataagaagagttgcatttctcattttaatgagcatatggaaagatgggaacagaatttcagtcttgcagccatgagcctctatttctcattcctaagccttaccatgagtcagagtgttaagggggcctgtgaaccagtcgtttggtggaggagggtccttcccacacctttgtttaggagtcatcattcacacacacacacacacacacacacactctctgagcacattatctgtgattctttcatcctcccagaaaggatcagtgttagaatgggaaatagagtgtgccatcttgctcttttgttggcagatgtccccgcttccctccagccccccatccttggcatgtatattagtaggagggcttcacaccagcactgctcactgcgactcctggaaatgtgtggggaattgggtgagcccctcttccccacgtgctcccatctgtaactctccatctgtgatttgcaacaggtcttccactggctcgaggctgcgaggctgaccgacaggggcgcccaatagagtttgtgggaatggagtattgcacagatgcagctgcacaatggtcttcctccacccctctgggaatcaccattaggcaggcctcagtagggcaaaatgtttatttggtaccgggggtctcctgacctgtctagcattcccacccactcttctgcacttcttgcaaggtaacttgaatcatcacttatttctctgccacctggttttaggactggcactctataaatgacgctgactttgtatagaaggattttgctaagggggcaaaaagcccagataccattttaactggcccagttcattttctcctttcattttacaaaagaaatcatgcagaagcatcaattaaaactgatttatttatgttggtacatccaacaaaatagttggagccacaaggcccttgtctttttaaaaaaacaaaatattttgaagatggtgaaagtgactgattttaataatgagataggtcacttaaaataacagtgcctttgaccttaaaacatggcactggcccatgtgacctttgccatttcccagtacttccctttacagtctgcagcctataaacagtggtgtctcaaagcaaaggaaacctccacaagtgctgcaacagtgcattagtttttatgtagcaatttgtttataaaaattcccatcccataatgcatgaccttcctaaaaatatccacagcctccataggcaaggtgagctttctgtgctacccacttgttagattccagccacctcagggattctgatccatgtcattaacgaccatcccagggtgtgagggcctgattaaagcttatcgaactagacatttgtttattagatgagctcggcattattattttctcaataactggtagaagggaaattttaaacataacactcaacccaaacaaaactacttcgtgaggctttcagcaaaaaggctgcttaaaagcatgaacccgggatgcagagcagcttttgtgcacggttccacttactgtaattgtttctggttctttcctctaacaccttccatgtatgtcaactttttatcaccgtcaggcatagactcgtggagattagtcattatagctcagacctaagctaattatttaaaataaatacatgtaaaggccactgccacattctcagcagacttccacttgcctaatgagattagtgattcaactgacttgaagcacagtaacatcttattttatgcacattccctgtcttttgctggactgatgaagccagtcacccgcccttctctgttttttggttttttttttcttaaccccaggtatatggaaggggagttgccttcacttttctggaaatttgtcttcgtctgacatattagagggcctcgttttgtcctgttcttgttcagaccctctcgttctacgtcctgtgctgaggggactgtccttaagctacaggacagcgagctggtcctttctgccacttcttccccactcccatgcccaggaaggcctggttgctgatgctactttataaatgagttgcttgcattttcacagagaatgaaggaagacgtaacatggctccagaaacttttcacatgatgatgggatcgacaaaaaaatgctaccctctagactagacacatttcatggagacaagcaaaatggtgccagggctgggctgactgtgggatgggatttggtactgcagacagattttgatttccacagttgagctggaaacaaactgtgccttcaaaaaatgacttttctaacttaaggttggttatatgttaagtgtgctactaacttaaaaaatagtggctgggcgcggtggctcatgcctgtaatcccagtgctttgggaggccaaggcggggggatcacgaggtcaggagatcgagaccatcctggctaacacggtgaaaccccatctctactaaaaacacacaaaaaattagctgggcgtggtggtgggcgcctgtagtcccagctactcgggaggctgaggcaggagaatggcatgaacctgggaggcagagcttgcagtgagccgagacagcgccattgcactccagcctgggcaacagagcaagactccgtctcaaaaaaaaaaaaacaaaaaaaatagtgcactctctggccggtcacggtggctcacgcctgtaatctcagcactttggaaggccaaggcaggcggatcacgaggtcagaagatcgagaccatcctggctaacacagtgaaaccccgtctctactaaaaatataaaaaattagtcgggcatggtggcgggcgcctgtagtcccaactactcgggagactgaggcagaagaatggcgtgaactcaggaggcggagcttgcagtgagccaaggcgacagagcaagactctgtctcaaaaaaataaaaaatagtgcactgtccttcgagaaagttttctaacatctagtaatttgtaacttagaagtggagttgccttgtggatgtcttttttgcattctgtaggaaatgaaacgtgaatttaactcgggttgcaagaaataaaaatgtcagtgcatttaaatttct

SEQ ID NO: 436119 - DNA, 1309 bp, Homo sapiens
agcgggttcgcgcgacgaccgcggggtcggcgggcggggcgaggccctggacggcggcggcagtggggctcctccttctgtttcccagactgagagccgcgccggcaccatgtcagcttaccctaaaagctacaatccgttcgacgacgacggggaggacgaaggcgcccggccggccccttggagggacgcccgagacctccccgacgggcccgacgcgcccgcggacaggcagcagtacttgcggcaggaggtcctccgcagggctgaggccacggccgccagcaccagcaggtccctggccctcatgtacgagtccgagaaggttggggtcgcctcttccgaggagctcgcccgtcagcgaggagtcctggagcgcacagagaagatggtggacaagatggaccaagatttgaagatcagccagaaacacatcaatagcattaagagcgtgtttggggggctggtcaattacttcaaatccaaaccagtagagaccccacctgaacagaatggcaccctcacctcccagcccaacaacagattgaaagaagctataagtacaagtaaagaacaggaagcaaagtaccaggccagccacccaaaccttagaaagctggatgatacagaccctgtccccagaggggctggttctgccatgagtactgatgcttacccaaagaacccacaccttcgagcctatcaccagaagatcgacagcaacctagatgagctgtccatgggactgggtcgtctgaaggacatagccctggggatgcagacagaaattgaggagcaagatgacattcttgaccggctgacaaccaaagtggacaagttagatgtcaacataaaaagcacagaaagaaaagttcgacaactctgaagacagacggatttccactctattgtgatgaaaagatttgaaagatctttttttgaacttccaagaaatttcatttactattttagtatgtaaattaatgtgtgtttgcaaatgttataatagagtaggtcttaagacatttttgctgttataaggaagtgtttgtcccacattttcctagggttaacacctcaccaagttcttccagcaaaatgcttattagagtttttgtctgagcacagtagcctggccctgcatatcttgggcgtttgattaccatgctggaataagaagagttgcatttctcattttaatgagcatatggaaagatgggaacagaatttcagtcttgcaaaaaaaaaaatattaataattttttatataaataaaacctcgggggggggcccgggtccccatttggcc

SEQ ID NO: 436120 - DNA, 781 bp, Homo sapiens
agcgggttcgcgcgacgaccgcggggtcggcgggcggggcgaggccctggacggcggcggcagtggggctcctccttctgtttcccagactgagagccgcgccggcaccatgtcagcttaccctaaaagctacaatccgttcgacgacgacggggaggacgaaggcgcccggccggccccttggagggacgcccgagacctccccgacgggcccgacgcgcccgcggacaggcagcagtacttgcggcaggaggtcctccgcagggctgaggccacggccgccagcaccagcaggtccctggccctcatgtacgagtccgagaaggttggggtcgcctcttccgaggagctcgcccgtcagcgaggagtcctggagcgcacagagaagatggtggacaagatggaccaagatttgaagatcagccagaaacacatcaatagcattaagagcgtgtttggggggctggtcaattacttcaaatccaaaccagtagagaccccacctgaacagaatggcaccctcacctcccagcccaacaacagattgaaagaagctataagtacaagtaaagaacaggaagcaaagtaccaggccagccacccaaaccttagaaagctggatgatacagaccctgtccccagaggggctggttctgccatgagtactgatgcttacccaaagaacccacaccttcgagcctatcaccagaagatcgacagcaacctagatttgaagatcagccagaaacacatcaatagcattaagggcgtgtttgggggg

SEQ ID NO: 436121 - DNA, 1849 bp, Homo sapiens
gaattcgcggccgcgtcgaccgcttctgtggccacggcagatgaaacagaaaggctaaagagggctggagtcaggggacttctcttccaccagcttcacggtgatgatatggcatctgccagctctagccgggcaggagtggccctgccttttgagaagtctcagctcactttgaaagtggtgtccgcaaagcccaaggtgcataatcgtcaacctcgaattaactcctacgtggaggtggcggtggatggactccccagtgagaccaagaagactgggaagcgcattgggagctctgagcttctctggaatgagatcatcattttgaatgtcacggcacagagtcatttagatttaaaggtctggagctgccataccttgagaaatgaactgctaggcaccgcatctgtcaacctctccaacgtcttgaagaacaatgggggcaaaatggagaacatgcagctgaccctgaacctgcagacggagaacaaaggcagcgttgtctcaggcggagagctgacaattttcctggacgggccaactgttgatctgggaaatgtgcctaatggcagtgccctgacagatggatcacagctgccttcgagagactccagtggaacagcagtagctccagagaaccggcaccagccccccagcacaaactgctttggtggaagatcccggacgcacagacattcgggtgcttcagccagaacaaccccagcaaccggcgagcaaagccccggtgctcggagccggcaccgccagcccgtcaagaactcaggccacagtggcttggccaatggcacagtgaatgatgaacccacaacagccactgatcccgaagaaccttccgttgttggtgtgacgtccccacctgctgcacccttgagtgtgaccccgaatcccaacacgacttctctccctgccccagccacaccggctgaaggagaggaacccagcacttcgggtacacagcagctcccagcggctgcccaggcccccgacgctctgcctgctggggagtaaccgaggccgcccctcccacgccccccagcgcacatgtagtcctgagtcctccctgcctgagaggccactggccccgcagcccttgggaggcccccgtggatgtggccctgtgtgggaccacactgtcatctcgctgctggcagaaaagcctgatcccaggaggccctgcagttcccccgacccgcggatggcagtctggaataaagccccctagttgcctttggccccacctttgcaaagttccagagggctgaccctctctgcaaaactctcccctgtcctctagaccccaccctgggtgtatgtgagtgtgcaagggaaggtgttgcatccccaggggctgccgcagaggccggagacctcctggactagttcggcgaggagactggccactgggggtggctgttcgggactgagagcgccaagggtctttgccagcaaaggaggttctgcctgtaattgagcctctctgatgatggagatgaagtgaaggtctgagggagcgggccctggggcgaggccatctctgcctgcctccctagcaggcgccagcggtggaggctgagtcgcaggacacatgccggccagttaattcattctcagcaaatgaaggtttgtctaagctgcctgggtatccacgggacaaaaacagcaaactccctcagactttgtccatgtataaacttgaagtggttgtgttgtagggttgcaggttttttgttacgctgctgtcactttctgtccagtttgggtccctgaacttaacagaattatttagttgctgcttagacagaaatgacttttttccttagattttccc

SEQ ID NO: 436122 - DNA, 420 bp, Homo sapiens
ttttttctagattttcttttttattcttcaaggatcttaatgacagtcacttcctcaccttacattactaatctttaaattaacatagcaccagctttccttagggctgacaaagacaaattgttcattttctgagaaatcgcttgaacccctgaacatctttgctcttcctaggacgaagcaaggttcccctggtgcttatgaccgcagttttcggtggaagtatcaccagttccgtttcctctgccatgtgagttctggtactggggctcccgtggcagttggggttattgagttatttcagtgtgagttcccggcacagcagcaggtatcggaatgtttgtgtcttaggcgggcgcaagacacttgtctaacccggagctggctgtctctaggaagcgagttttcattcctagggca

SEQ ID NO: 436123 - DNA, 351 bp, Homo sapiens
cacaactctcctagagttaaatgttttttttgtttgtttgtttgtttgttttttgagaccatcaacaagatttcaaggctttaaagaaaggagctgcttcaggaagagataaaatgactcgaacgctataaccttcaaatgcagactgggagaagaggtatcagctatgcatgagctggagaggggtgggatagatagagacacaggtgataaagaaaatacagcaaaatgtgaaccctacaatctgggtggtggatgtaaaccctgtagtagcctcacctggggaaagctgccttgcaacaatgaggctgcccattctccaaacccaccccagccaccgagcaggctcca

SEQ ID NO: 436124 - DNA, 4532 bp, Homo sapiens
gaattcgcggccgcgtcgaccgcttctgtggccacggcagatgaaacagaaaggctaaagagggctggagtcaggggacttctcttccaccagcttcacggtgatgatatggcatctgccagctctagccgggcaggagtggccctgccttttgagaagtctcagctcactttgaaagtggtgtccgcaaagcccaaggtgcataatcgtcaacctcgaattaactcctacgtggaggtggcggtggatggactccccagtgagaccaagaagactgggaagcgcattgggagctctgagcttctctggaatgagatcatcattttgaatgtcacggcacagagtcatttagatttaaaggtctggagctgccataccttgagaaatgaactgctaggcaccgcatctgtcaacctctccaacgtcttgaagaacaatgggggcaaaatggagaacatgcagctgaccctgaacctgcagacggagaacaaaggcagcgttgtctcaggcggagagctgacaattttcctggacgggccaactgttgatctgggaaatgtgcctaatggcagtgccctgacagatggatcacagctgccttcgagagactccagtggaacagcagtagctccagagaaccggcaccagccccccagcacaaactgctttggtggaagatcccggacgcacagacattcgggtgcttcagccagaacaaccccagcaaccggcgagcaaagccccggtgctcggagccggcaccgccagcccgtcaagaactcaggccacagtggcttggccaatggcacagtgaatgatgaacccacaacagccactgatcccgaagaaccttccgttgttggtgtgacgtccccacctgctgcacccttgagtgtgaccccgaatcccaacacgacttctctccctgccccagccacaccggctgaaggagaggaacccagcacttcgggtacacagcagctcccagcggctgcccaggcccccgacgctctgcctgctggatgggaacagcgagagctgcccaacggacgtgtctattatgttgaccacaataccaagaccaccacctgggagcggccccttcctccaggctgggaaaaacgcacagatccccgaggcaggttttactatgtggatcacaatactcggaccaccacctggcagcgtccgaccgcggagtacgtgcgcaactatgagcagtggcagtcgcagcggaatcagctccagggggccatgcagcacttcagccaaagattcctctaccagtcttcgagtgcttcgactgaccatgatcccctgggccccctccctcctggctgggagaagagacaggacaatggacgggtgtattacgtgaaccataacactcgcacgacccagtgggaggatccccggacccaggggatgatccaggaaccagctctgcccccaggatgggagatgaaatacaccagcgagggggtgcgatactttgtggaccacaatacccgcaccaccacctttaaggatcctcgcccggggtttgagtcggggacgaagcaaggttcccctggtgcttatgaccgcagttttcggtggaagtatcaccagttccgtttcctctgccattcaaatgccctacctagccacgtgaagatcagcgtttccaggcagacgcttttcgaagattccttccaacagatcatgaacatgaaaccctatgacctgcgccgccggctctacatcatcatgcgtggcgaggagggcctggactatgggggcatcgccagagagtggtttttcctcctgtctcatgaggtgctcaaccctatgtattgtttatttgaatatgccggaaagaacaattactgcctgcagatcaaccccgcctcctccatcaacccggaccacctcacctactttcgctttataggcagattcatcgccatggcgctgtaccatggaaagttcatcgacacgggcttcaccctccctttctacaagcggatgctcaataagagaccaaccctgaaagacctggagtccattgaccctgagttctacaactccattgtctggatcaaagagaacaacctggaagaatgtggcctggagctgtacttcatccaggacatggagatactgggcaaggtgacgacccacgagctgaaggagggcggcgagagcatccgggtcacggaggagaacaaggaagagtacatcatgctgctgactgactggcgtttcacccgaggcgtggaagagcagaccaaagccttcctggatggcttcaacgaggtggccccgctggagtggctgcgctactttgacgagaaagagctggagctgatgctgtgcggcatgcaggagatagacatgagcgactggcagaagagcaccatctaccggcactacaccaagaacagcaagcagatccagtggttctggcaggtggtgaaggagatggacaacgagaagaggatccggctgctgcagtttgtcaccggtacctgccgcctgcccgtcgggggatttgccgaactcatcggtagcaacggaccacagaagttttgcattgacaaagttggcaaggaaacctggctgcccagaagccacacctgcttcaaccgtctggatcttccaccctacaagagctacgaacagctgagagagaagctgctgtatgccattgaggagaccgagggctttggacaggagtaaccgaggccgcccctcccacgccccccagcgcacatgtagtcctgagtcctccctgcctgagaggccactggccccgcagcccttgggaggcccccgtggatgtggccctgtgtgggaccacactgtcatctcgctgctggcagaaaagcctgatcccaggaggccctgcagttcccccgacccgcggatggcagtctggaataaagccccctagttgcctttggccccacctttgcaaagttccagagggctgaccctctctgcaaaactctcccctgtcctctagaccccaccctgggtgtatgtgagtgtgcaagggaaggtgttgcatccccaggggctgccgcagaggccggagacctcctggactagttcggcgaggagactggccactgggggtggctgttcgggactgagagcgccaagggtctttgccagcaaaggaggttctgcctgtaattgagcctctctgatgatggagatgaagtgaaggtctgagggagcgggccctggggcgaggccatctctgcctgcctccctagcaggcgccagcggtggaggctgagtcgcaggacacatgccggccagttaattcattctcagcaaatgaaggtttgtctaagctgcctgggtatccacgggacaaaaacagcaaactccctcagactttgtccatgtataaacttgaagtggttgtgttgtagggttgcaggttttttgttacgctgctgtcactttctgtccaggagctggcaccccaggtgttctgagaccttgagggacccagacctttgggtccaagagtttcccaaacagccacgcctctcaggaacccacctggcggttccgtgagctcaggcaggcctgacccggcggcacagcctggcagggacctcgtccccaagcctggcagaatgagaggggttgaggtcccgagcgccactcctagccttgccgccttcaatagagaagaaatccctttgctagatagggtcccccaggcagtccccagtggcgggacacaggggtccggctgtggagctcccctgccagcccctggagctccaggagggcctgttggtcccctgttcagaatggagtgcagcccgccagcggaaagtgttcattctgcataggtgtgaggctttatctgcacacaggacatgaaaaccagcagaaaggccctgagctgctgcatagccccatctgatttctgcagttcccgccagcctccaacacggggactctgccgtaactggaatcttcataggtcatattgaaatcttcaaggtgaccatgccccaccggggtgctggggcagtagtcatggcagactcccggcctgggcccccaggattctaggacccccaggcagccccttggactggtcccgggtgccttccaagcacagtctccatgctcccagattctcgaccttcccccggcccgggaggtgcagcctgcgtctgcctctgtcgtgtgtgctgatttgagtggcttagcttgccacagcgcaacctcttctgtccctttcagtcatttgctgtacttccctgtggcacgttaccatggaagccgctccagggtgggtcagggtgcaagctgctggtgaggtttggaagcatcaggctcacgggtgttcatgtgtgttcgtgcgtgtgtgtgcgtacgtgtatataactgaagtgtctgtacggaatgccctttgctagccatgggctggtcaccagattgttttgtaatgcccgccccttgcctcgatattgccagtttcttgtgcaataaacaatcagcagctgtgaaaaaaatag

SEQ ID NO: 436125 - DNA, 4700 bp, Homo sapiens
cgcgcggtcacgtgacccggcccgagtgcgggcggtggaaggcggaagtaggagaggagttcggcgccgcttctgtggccacggcagatgaaacagaaaggctaaagagggctggagtcaggggacttctcttccaccagatggagtctcactctctcccccaggctggggtgcagcggcgtgatctcagctcactccaacctctgcttcccaggttcaagcgattcttctgcctcagcctccggatacctgggattacagcttcacggtgatgatatggcatctgccagctctagccgggcaggagtggccctgccttttgagaagtctcagctcactttgaaagtggtgtccgcaaagcccaaggtgcataatcgtcaacctcgaattaactcctacgtggaggtggcggtggatggactccccagtgagaccaagaagactgggaagcgcattgggagctctgagcttctctggaatgagatcatcattttgaatgtcacggcacagagtcatttagatttaaaggtctggagctgccataccttgagaaatgaactgctaggcaccgcatctgtcaacctctccaacgtcttgaagaacaatgggggcaaaatggagaacatgcagctgaccctgaacctgcagacggagaacaaaggcagcgttgtctcaggcggagagctgacaattttcctggacgggccaactgttgatctgggaaatgtgcctaatggcagtgccctgacagatggatcacagctgccttcgagagactccagtggaacagcagtagctccagagaaccggcaccagccccccagcacaaactgctttggtggaagatcccggacgcacagacattcgggtgcttcagccagaacaaccccagcaaccggcgagcaaagccccggtgctcggagccggcaccgccagcccgtcaagaactcaggccacagtggcttggccaatggcacagtgaatgatgaacccacaacagccactgatcccgaagaaccttccgttgttggtgtgacgtccccacctgctgcacccttgagtgtgaccccgaatcccaacacgacttctctccctgccccagccacaccggctgaaggagaggaacccagcacttcgggtacacagcagctcccagcggctgcccaggcccccgacgctctgcctgctggatgggaacagcgagagctgcccaacggacgtgtctattatgttgaccacaataccaagaccaccacctgggagcggccccttcctccaggctgggaaaaacgcacagatccccgaggcaggttttactatgtggatcacaatactcggaccaccacctggcagcgtccgaccgcggagtacgtgcgcaactatgagcagtggcagtcgcagcggaatcagctccagggggccatgcagcacttcagccaaagattcctctaccagtcttcgagtgcttcgactgaccatgatcccctgggccccctccctcctggctgggagaagagacaggacaatggacgggtgtattacgtgaaccataacactcgcacgacccagtgggaggatccccggacccaggggatgatccaggaaccagctctgcccccaggatgggagatgaaatacaccagcgagggggtgcgatactttgtggaccacaatacccgcaccaccacctttaaggatcctcgcccggggtttgagtcggggacgaagcaaggttcccctggtgcttatgaccgcagttttcggtggaagtatcaccagttccgtttcctctgccattcaaatgccctacctagccacgtgaagatcagcgtttccaggcagacgcttttcgaagattccttccaacagatcatgaacatgaaaccctatgacctgcgccgccggctctacatcatcatgcgtggcgaggagggcctggactatgggggcatcgccagagagtggtttttcctcctgtctcatgaggtgctcaaccctatgtattgtttatttgaatatgccggaaagaacaattactgcctgcagatcaaccccgcctcctccatcaacccggaccacctcacctactttcgctttataggcagattcatcgccatggcgctgtaccatggaaagttcatcgacacgggcttcaccctccctttctacaagcggatgctcaataagagaccaaccctgaaagacctggagtccattgaccctgagttctacaactccattgtctggatcaaagagaacaacctggaagaatgtggcctggagctgtacttcatccaggacatggagatactgggcaaggtgacgacccacgagctgaaggagggcggcgagagcatccgggtcacggaggagaacaaggaagagtacatcatgctgctgactgactggcgtttcacccgaggcgtggaagagcagaccaaagccttcctggatggcttcaacgaggtggccccgctggagtggctgcgctactttgacgagaaagagctggagctgatgctgtgcggcatgcaggagatagacatgagcgactggcagaagagcaccatctaccggcactacaccaagaacagcaagcagatccagtggttctggcaggtggtgaaggagatggacaacgagaagaggatccggctgctgcagtttgtcaccggtacctgccgcctgcccgtcgggggatttgccgaactcatcggtagcaacggaccacagaagttttgcattgacaaagttggcaaggaaacctggctgcccagaagccacacctgcttcaaccgtctggatcttccaccctacaagagctacgaacagctgagagagaagctgctgtatgccattgaggagaccgagggctttggacaggagtaaccgaggccgcccctcccacgccccccagcgcacatgtagtcctgagtcctccctgcctgagaggccactggccccgcagcccttgggaggcccccgtggatgtggccctgtgtgggaccacactgtcatctcgctgctggcagaaaagcctgatcccaggaggccctgcagttcccccgacccgcggatggcagtctggaataaagccccctagttgcctttggccccacctttgcaaagttccagagggctgaccctctctgcaaaactctcccctgtcctctagaccccaccctgggtgtatgtgagtgtgcaagggaaggtgttgcatccccaggggctgccgcagaggccggagacctcctggactagttcggcgaggagactggccactgggggtggctgttcgggactgagagcgccaagggtctttgccagcaaaggaggttctgcctgtaattgagcctctctgatgatggagatgaagtgaaggtctgagggagcgggccctggggcgaggccatctctgcctgcctccctagcaggcgccagcggtggaggctgagtcgcaggacacatgccggccagttaattcattctcagcaaatgaaggtttgtctaagctgcctgggtatccacgggacaaaaacagcaaactccctcagactttgtccatgtataaacttgaagtggttgtgttgtagggttgcaggttttttgttacgctgctgtcactttctgtccaggagctggcaccccaggtgttctgagaccttgagggacccagacctttgggtccaagagtttcccaaacagccacgcctctcaggaacccacctggcggttccgtgagctcaggcaggcctgacccggcggcacagcctggcagggacctcgtccccaagcctggcagaatgagaggggttgaggtcccgagcgccactcctagccttgccgccttcaatagagaagaaatccctttgctagatagggtcccccaggcagtccccagtggcgggacacaggggtccggctgtggagctcccctgccagcccctggagctccaggagggcctgttggtcccctgttcagaatggagtgcagcccgccagcggaaagtgttcattctgcataggtgtgaggctttatctgcacacaggacatgaaaaccagcagaaaggccctgagctgctgcatagccccatctgatttctgcagttcccgccagcctccaacacggggactctgccgtaactggaatcttcataggtcatattgaaatcttcaaggtgaccatgccccaccggggtgctggggcagtagtcatggcagactcccggcctgggcccccaggattctaggacccccaggcagccccttggactggtcccgggtgccttccaagcacagtctccatgctcccagattctcgaccttcccccggcccgggaggtgcagcctgcgtctgcctctgtcgtgtgtgctgatttgagtggcttagcttgccacagcgcaacctcttctgtccctttcagtcatttgctgtacttccctgtggcacgttaccatggaagccgctccagggtgggtcagggtgcaagctgctggtgaggtttggaagcatcaggctcacgggtgttcatgtgtgttcgtgcgtgtgtgtgcgtacgtgtatataactgaagtgtctgtacggaatgccctttgctagccatgggctggtcaccagattgttttgtaatgcccgccccttgcctcgatattgccagtttcttgtgcaataaacaatcagcagctgtgaaaaaaatag

SEQ ID NO: 436126 - DNA, 4050 bp, Homo sapiens
ttagaggatcgttggagaggggttaggcggagagctgacaattttcctggacgggccaactgttgatctgggaaatgtgcctaatggcagtgccctgacagatggatcacagctgccttcgagagactccagtggaacagcagtagctccagagaaccggcaccagccccccagcacaaactgctttggtggaagatcccggacgcacagacattcgggtgcttcagccagaacaaccccagcaaccggcgagcaaagccccggtgctcggagccggcaccgccagcccgtcaagaactcaggccacagtggcttggccaatggcacagtgaatgatgaacccacaacagccactgatcccgaagaaccttccgttgttggtgtgacgtccccacctgctgcacccttgagtgtgaccccgaatcccaacacgacttctctccctgccccagccacaccggctgaaggagaggaacccagcacttcgggtacacagcagctcccagcggctgcccaggcccccgacgctctgcctgctggatgggaacagcgagagctgcccaacggacgtgtctattatgttgaccacaataccaagaccaccacctgggagcggccccttcctccaggctgggaaaaacgcacagatccccgaggcaggttttactatgtggatcacaatactcggaccaccacctggcagcgtccgaccgcggagtacgtgcgcaactatgagcagtggcagtcgcagcggaatcagctccagggggccatgcagcacttcagccaaagattcctctaccagtcttcgagtgcttcgactgaccatgatcccctgggccccctccctcctggctgggagaagagacaggacaatggacgggtgtattacgtgaaccataacactcgcacgacccagtgggaggatccccggacccaggggatgatccaggaaccagctctgcccccaggatgggagatgaaatacaccagcgagggggtgcgatactttgtggaccacaatacccgcaccaccacctttaaggatcctcgcccggggtttgagtcggggacgaagcaaggttcccctggtgcttatgaccgcagttttcggtggaagtatcaccagttccgtttcctctgccattcaaatgccctacctagccacgtgaagatcagcgtttccaggcagacgcttttcgaagattccttccaacagatcatgaacatgaaaccctatgacctgcgccgccggctctacatcatcatgcgtggcgaggagggcctggactatgggggcatcgccagagagtggtttttcctcctgtctcatgaggtgctcaaccctatgtattgtttatttgaatatgccggaaagaacaattactgcctgcagatcaaccccgcctcctccatcaacccggaccacctcacctactttcgctttataggcagattcatcgccatggcgctgtaccatggaaagttcatcgacacgggcttcaccctccctttctacaagcggatgctcaataagagaccaaccctgaaagacctggagtccattgaccctgagttctacaactccattgtctggatcaaagagaacaacctggaagaatgtggcctggagctgtacttcatccaggacatggagatactgggcaaggtgacgacccacgagctgaaggagggcggcgagagcatccgggtcacggaggagaacaaggaagagtacatcatgctgctgactgactggcgtttcacccgaggcgtggaagagcagaccaaagccttcctggatggcttcaacgaggtggccccgctggagtggctgcgctactttgacgagaaagagctggagctgatgctgtgcggcatgcaggagatagacatgagcgactggcagaagagcaccatctaccggcactacaccaagaacagcaagcagatccagtggttctggcaggtggtgaaggagatggacaacgagaagaggatccggctgctgcagtttgtcaccggtacctgccgcctgcccgtcgggggatttgccgaactcatcggtagcaacggaccacagaagttttgcattgacaaagttggcaaggaaacctggctgcccagaagccacacctgcttcaaccgtctggatcttccaccctacaagagctacgaacagctgagagagaagctgctgtatgccattgaggagaccgagggctttggacaggagtaaccgaggccgcccctcccacgccccccagcgcacatgtagtcctgagtcctccctgcctgagaggccactggccccgcagcccttgggaggcccccgtggatgtggccctgtgtgggaccacactgtcatctcgctgctggcagaaaagcctgatcccaggaggccctgcagttcccccgacccgcggatggcagtctggaataaagccccctagttgcctttggccccacctttgcaaagttccagagggctgaccctctctgcaaaactctcccctgtcctctagaccccaccctgggtgtatgtgagtgtgcaagggaaggtgttgcatccccaggggctgccgcagaggccggagacctcctggactagttcggcgaggagactggccactgggggtggctgttcgggactgagagcgccaagggtctttgccagcaaaggaggttctgcctgtaattgagcctctctgatgatggagatgaagtgaaggtctgagggagcgggccctggggcgaggccatctctgcctgcctccctagcaggcgccagcggtggaggctgagtcgcaggacacatgccggccagttaattcattctcagcaaatgaaggtttgtctaagctgcctgggtatccacgggacaaaaacagcaaactccctcagactttgtccatgtataaacttgaagtggttgtgttgtagggttgcaggttttttgttacgctgctgtcactttctgtccaggagctggcaccccaggtgttctgagaccttgagggacccagacctttgggtccaagagtttcccaaacagccacgcctctcaggaacccacctggcggttccgtgagctcaggcaggcctgacccggcggcacagcctggcagggacctcgtccccaagcctggcagaatgagaggggttgaggtcccgagcgccactcctagccttgccgccttcaatagagaagaaatccctttgctagatagggtcccccaggcagtccccagtggcgggacacaggggtccggctgtggagctcccctgccagcccctggagctccaggagggcctgttggtcccctgttcagaatggagtgcagcccgccagcggaaagtgttcattctgcataggtgtgaggctttatctgcacacaggacatgaaaaccagcagaaaggccctgagctgctgcatagccccatctgatttctgcagttcccgccagcctccaacacggggactctgccgtaactggaatcttcataggtcatattgaaatcttcaaggtgaccatgccccaccggggtgctggggcagtagtcatggcagactcccggcctgggcccccaggattctaggacccccaggcagccccttggactggtcccgggtgccttccaagcacagtctccatgctcccagattctcgaccttcccccggcccgggaggtgcagcctgcgtctgcctctgtcgtgtgtgctgatttgagtggcttagcttgccacagcgcaacctcttctgtccctttcagtcatttgctgtacttccctgtggcacgttaccatggaagccgctccagggtgggtcagggtgcaagctgctggtgaggtttggaagcatcaggctcacgggtgttcatgtgtgttcgtgcgtgtgtgtgcgtacgtgtatataactgaagtgtctgtacggaatgccctttgctagccatgggctggtcaccagattgttttgtaatgcccgccccttgcctcgatattgccagtttcttgtgcaataaacaatcagcagctgtgaaaaaaatag

SEQ ID NO: 436127 - DNA, 4477 bp, Homo sapiens
gaattcgcggccgcgtcgaccgcttctgtggccacggcagatgaaacagaaaggctaaagagggctggagtcaggggacttctcttccaccagcttcacggtgatgatatggcatctgccagctctagccgggcaggagtggccctgccttttgagaagtctcagctcactttgaaagtggtgtccgcaaagcccaaggtgcataatcgtcaacctcgaattaactcctacgtggaggtggcggtggatggactccccagtgagaccaagaagactgggaagcgcattgggagctctgagcttctctggaatgagatcatcattttgaatgtcacggcacagagtcatttagatttaaaggtctggagctgccataccttgagaaatgaactgctaggcaccgcatctgtcaacctctccaacgtcttgaagaacaatgggggcaaaatggagaacatgcagctgaccctgaacctgcagacggagaacaaaggcagcgttgtctcaggcggagagctgacaattttcctggacgggccaactgttgatctgggaaatgtgcctaatggcagtgccctgacagatggatcacagctgccttcgagagactccagtggaacagcagtagctccagagaaccggcaccagccccccagcacaaactgctttggtggaagatcccggacgcacagacattcgggtgcttcagccagaacaaccccagcaaccggcgagcaaagccccggtgctcggagccggcaccgccagcccgtcaagaactcaggccacagtggcttggccaatggcacagtgaatgatgaacccacaacagccactgatcccgaagaaccttccgttgttggtgtgacgtccccacctgctgcacccttgagtgtgaccccgaatcccaacacgacttctctccctgccccagccacaccggctgaaggagaggaacccagcacttcgggtacacagcagctcccagcggctgcccaggcccccgacgctctgcctgctggatgggaacagcgagagctgcccaacggacgtgtctattatgttgaccacaataccaagaccaccacctgggagcggccccttcctccaggctgggaaaaacgcacagatccccgaggcaggttttactatgtggatcacaatactcggaccaccacctggcagcgtccgaccgcggagtacgtgcgcaactatgagcagtggcagtcgcagcggaatcagctccagggggccatgcagcacttcagccaaagattcctctaccagtcttcgagtgcttcgactgaccatgatcccctgggccccctccctcctggctgggagaagagacaggacaatggacgggtgtattacgtgaaccataacactcgcacgacccagtgggaggatccccggacccaggggatgatccaggaaccagctctgcccccaggatgggagatgaaatacaccagcgagggggtgcgatactttgtggaccacaatacccgcaccaccacctttaaggatcctcgcccggggtttgagtcggggacgaagcaaggttcccctggtgcttatgaccgcagttttcggtggaagtatcaccagttccgtttcctctgccattcaaatgccctacctagccacgtgaagatcagcgtttccaggcagacgcttttcgaagattccttccaacagatcatgaacatgaaaccctatgacctgcgccgccggctctacatcatcatgcgtggcgaggagggcctggactatgggggcatcgccagagagtggtttttcctcctgtctcatgaggtgctcaaccctatgtattgtttatttgaatatgccggaaagaacaattactgcctgcagatcaaccccgcctcctccatcaacccggaccacctcacctactttcgctttataggcagattcatcgccatggcgctgtaccatggaaagttcatcgacacgggcttcaccctccctttctacaagcggatgctcaataagagaccaaccctgaaagacctggagtccattgaccctgagttctacaactccattgtctggatcaaagagaacaacctggaagaatgtggcctggagctgtacttcatccaggacatggagatactgggcaaggtgacgacccacgagctgaaggagggcggcgagagcatccgggtcacggaggagaacaaggaagagtacatcatgctgctgactgactggcgtttcacccgaggcgtggaagagcagaccaaagccttcctggatggcttcaacgaggtggccccgctggagtggctgcgctactttgacgagaaagagctggagctgatgctgtgcggcatgcaggagatagacatgagcgactggcagaagagcaccatctaccggcactacaccaagaacagcaagcagatccagtggttctggcaggtggtgaaggagatggacaacgagaagaggatccggctgctgcagtttgtcaccggtacctgccgcctgcccgtcgggggatttgccgaactcatcggtagcaacggaccacagaagttttgcattgacaaagttggcaaggaaacctggctgcccagaagccacacctgcttcaaccgtctggatcttccaccctacaagagctacgaacagctgagagagaagctgctgtatgccattgaggagaccgagggctttggacaggagtaaccgaggccgcccctcccacgccccccagcgcacatgtagtcctgagtcctccctgcctgagaggccactggccccgcagcccttgggaggcccccgtggatgtggccctgtgtgggaccacactgtcatctcgctgctggcagaaaagcctgatcccaggaggccctgcagttcccccgacccgcggatggcagtctggaataaagccccctagttgcctttggccccacctttgcaaagttccagagggctgaccctctctgcaaaactctcccctgtcctctagaccccaccctgggtgtatgtgagtgtgcaagggaaggtgttgcatccccaggggctgccgcagaggccggagacctcctggactagttcggcgaggagactggccactgggggtggctgttcgggactgagagcgccaagggtctttgccagcaaaggaggttctgcctgtaattgagcctctctgatgatggagatgaagtgaaggtctgagggagcgggccctggggcgaggccatctctgcctgcctccctagcaggcgccagcggtggaggctgagtcgcaggacacatgccggccagttaattcattctcagcaaatgaagtttgtccatgtataaacttgaagtggttgtgttgtagggttgcaggttttttgttacgctgctgtcactttctgtccaggagctggcaccccaggtgttctgagaccttgagggacccagacctttgggtccaagagtttcccaaacagccacgcctctcaggaacccacctggcggttccgtgagctcaggcaggcctgacccggcggcacagcctggcagggacctcgtccccaagcctggcagaatgagaggggttgaggtcccgagcgccactcctagccttgccgccttcaatagagaagaaatccctttgctagatagggtcccccaggcagtccccagtggcgggacacaggggtccggctgtggagctcccctgccagcccctggagctccaggagggcctgttggtcccctgttcagaatggagtgcagcccgccagcggaaagtgttcattctgcataggtgtgaggctttatctgcacacaggacatgaaaaccagcagaaaggccctgagctgctgcatagccccatctgatttctgcagttcccgccagcctccaacacggggactctgccgtaactggaatcttcataggtcatattgaaatcttcaaggtgaccatgccccaccggggtgctggggcagtagtcatggcagactcccggcctgggcccccaggattctaggacccccaggcagccccttggactggtcccgggtgccttccaagcacagtctccatgctcccagattctcgaccttcccccggcccgggaggtgcagcctgcgtctgcctctgtcgtgtgtgctgatttgagtggcttagcttgccacagcgcaacctcttctgtccctttcagtcatttgctgtacttccctgtggcacgttaccatggaagccgctccagggtgggtcagggtgcaagctgctggtgaggtttggaagcatcaggctcacgggtgttcatgtgtgttcgtgcgtgtgtgtgcgtacgtgtatataactgaagtgtctgtacggaatgccctttgctagccatgggctggtcaccagattgttttgtaatgcccgccccttgcctcgatattgccagtttcttgtgcaataaacaatcagcagctgtgaaaaaaatag

SEQ ID NO: 436128 - DNA, 2127 bp, Homo sapiens
cgcgcggtcacgtgacccggcccgagtgcgggcggtggaaggcggaagtaggagaggagttcggcgccgcttctgtggccacggcagatgaaacagaaaggctaaagagggctggagtcaggggacttctcttccaccagatggagtctcactctctcccccaggctggggtgcagcggcgtgatctcagctcactccaacctctgcttcccaggttcaagcgattcttctgcctcagcctccggatacctgggattacagcttcacggtgatgatatggcatctgccagctctagccgggcaggagtggccctgccttttgagaagtctcagctcactttgaaagtggtgtccgcaaagcccaaggtgcataatcgtcaacctcgaattaactcctacgtggaggtggcggtggatggactccccagtgagaccaagaagactgggaagcgcattgggagctctgagcttctctggaatgagatcatcattttgaatgtcacggcacagagtcatttagatttaaaggtctggagctgccataccttgagaaatgaactgctaggcaccgcatctgtcaacctctccaacgtcttgaagaacaatgggggcaaaatggagaacatgcagctgaccctgaacctgcagacggagaacaaaggcagcgttgtctcaggcggagagctgacaattttcctggacgggccaactgttgatctgggaaatgtgcctaatggcagtgccctgacagatggatcacagctgccttcgagagactccagtggaacagcagtagctccagagaaccggcaccagccccccagcacaaactgctttggtggaagatcccggacgcacagacattcgggtgcttcagccagaacaaccccagcaaccggcgagcaaagccccggtgctcggagccggcaccgccagcccgtcaagaactcaggccacagtggcttggccaatggcacagtgaatgatgaacccacaacagccactgatcccgaagaaccttccgttgttggtgtgacgtccccacctgctgcacccttgagtgtgaccccgaatcccaacacgacttctctccctgccccagccacaccggctgaaggagaggaacccagcacttcgggtacacagcagctcccagcggctgcccaggcccccgacgctctgcctgctggatgggaacagcgagagctgcccaacggacgtgtctattatgttgaccacaataccaagaccaccacctgggagcggccccttcctccagggtaggtcatcaactgagaagacctgagactctggaactgacaccatgagtcacccaatggcttcttgaaacggtccctttctgcggaggtagcatagcacagtgacgtttattccgggtcacttgattgcttttcctatccacttaccttaatattgctcccatgtcttaggacatattagaattattagaagatctctgggaaacaaaaggcgcatgggaggccaagatttagagtgttgatgcattccgccgtaccctatgcccagcctgtccctaaaggcagagtgcttcttattcggcagggcttcgtgagaatgccgccaagttatccaaaaccaaaggatgagagaggcttccaagagagggaagactgtccaagttcaaggagaaggggtttggttccctgtctgccagggacagaaagttctttccacatgtgtctcctggtcccgagagctttcaaaaggggatgtattctgctccaagaaagaatcacctcccagtaaagtagccatgaagggctcctgtataaaatatgcacacttcccctgccctgagtttgtggagggaaaggctgtcggaagtagggactcttaggagagcccgtgtgccctgtttggttcagctgtcaggcgtgtgccacacacatcccacctcatcttctggtcccataattctccatggatgggctgcttttagctccagttttccagtagaatgcttgagttttccttttttccgtacctcctggaggatgaaactcataacctgtcatcatcagtactcactgtgttttccactttgacttgaagtcaaatgaagttaccaaagttaaacatggactt

SEQ ID NO: 436129 - DNA, 2861 bp, Homo sapiens
gaattcgcggccgcgtcgaccgcttctgtggccacggcagatgaaacagaaaggctaaagagggctggagtcaggggacttctcttccaccagcttcacggtgatgatatggcatctgccagctctagccgggcaggagtggccctgccttttgagaagtctcagctcactttgaaagtggtgtccgcaaagcccaaggtgcataatcgtcaacctcgaattaactcctacgtggaggtggcggtggatggactccccagtgagaccaagaagactgggaagcgcattgggagctctgagcttctctggaatgagatcatcattttgaatgtcacggcacagagtcatttagatttaaaggtctggagctgccataccttgagaaatgaactgctaggcaccgcatctgtcaacctctccaacgtcttgaagaacaatgggggcaaaatggagaacatgcagctgaccctgaacctgcagacggagaacaaaggcagcgttgtctcaggcggagagctgacaattttcctggacgggccaactgttgatctgggaaatgtgcctaatggcagtgccctgacagatggatcacagctgccttcgagagactccagtggaacagcagtagctccagagaaccggcaccagccccccagcacaaactgctttggtggaagatcccggacgcacagacattcgggtgcttcagccagaacaaccccagcaaccggcgagcaaagccccggtgctcggagccggcaccgccagcccgtcaagaactcaggccacagtggcttggccaatggcacagtgaatgatgaacccacaacagccactgatcccgaagaaccttccgttgttggtgtgacgtccccacctgctgcacccttgagtgtgaccccgaatcccaacacgacttctctccctgccccagccacaccggctgaaggagaggaacccagcacttcgggtacacagcagctcccagcggctgcccaggcccccgacgctctgcctgctggatgggaacagcgagagctgcccaacggacgtgtctattatgttgaccacaataccaagaccaccacctgggagcggccccttcctccagggtaggtcatcaactgagaagacctgagactctggaactgacaccatgagtcacccaatggcttcttgaaacggtccctttctgcggaggtagcatagcacagtgacgtttattccgggtcacttgattgcttttcctatccacttaccttaatattgctcccatgtcttaggacatattagaattattagaagatctctgggaaacaaaaggcgcatgggaggccaagatttagagtgttgatgcattccgccgtaccctatgcccagcctgtccctaaaggcagagtgcttcttattcggcagggcttcgtgagaatgccgccaagttatccaaaaccaaaggatgagagaggcttccaagagagggaagactgtccaagttcaaggagaaggggtttggttccctgtctgccagggacagaaagttctttccacatgtgtctcctggtcccgagagctttcaaaaggggatgtattctgctccaagaaagaatcacctcccagtaaagtagccatgaagggctcctgtataaaatatgcacacttcccctgccctgagtttgtggagggaaaggctgtcggaagtagggactcttaggagagcccgtgtgccctgtttggttcagctgtcaggcgtgtgccacacacatcccacctcatcttctggtcccataattctccatggatgggctgcttttagctccagttttccagtagaatgcttgagttttccttttttccgtacctcctggaggatgaaactcataacctgtcatcatcagtactcactgtgttttccactttgacttgaagtcaaatgaagttaccaaagttaaacatggacttctcaaattagaaaaaaacaaacaacaaaaaaacaggttaagtgttttgttatgaaaattatgaaaatgttcttattattatggaaaatttcaaatagatatagagagaataatgttacaaacccccacatactcaacatttagcttcaaaaattatcaactcatggcgggttttgtttcatctgtacaaactagtcggcacactatgatggcctgtggacaaaatccggccctctgactgtttttgtaaataaggttttattggaacacagccacacatatttgttgacttattgtttttggctgtttttgtacttcattggcagagttgagtaattgcagcagactctatggcttgcaaaacctaaaataattactttgtgtagcgctttatagaaaaaatttgctaactcccgatctgtaacccccaacctatccgccgcaccctgatctaggtaattttgaagcaaatcccaaatgtcacatcatctatccatatttcactatgtatttctaaaacatattcttttattcaaaataaaactctaatatcattaacagtattttgtttatattatcaaatacccagtcaatatttgactttctataattgtgtcacaaattaaacattgactttaacagtatgtattacacacttgtactttgtgtactttataacatgtgcactttaaaacagcaggagctctgtgtactgtggcttttttttttttagacggagtctcgctctgttgcccaggctggagtgcagtggtgcaatctccagctcactgcaacctccacctcctgggttcaagcgattctcctgtctcagcctcctaagtagctgggattacaggcgcccgccactatgcccaactaattttttgtatttttagtagagac

SEQ ID NO: 436130 - DNA, 2472 bp, Homo sapiens
gaattcgcggccgcgtcgaccgcttctgtggccacggcagatgaaacagaaaggctaaagagggctggagtcaggggacttctcttccaccagcttcacggtgatgatatggcatctgccagctctagccgggcaggagtggccctgccttttgagaagtctcagctcactttgaaagtggtgtccgcaaagcccaaggtgcataatcgtcaacctcgaattaactcctacgtggaggtggcggtggatggactccccagtgagaccaagaagactgggaagcgcattgggagctctgagcttctctggaatgagatcatcattttgaatgtcacggcacagagtcatttagatttaaaggtctggagctgccataccttgagaaatgaactgctaggcaccgcatctgtcaacctctccaacgtcttgaagaacaatgggggcaaaatggagaacatgcagctgaccctgaacctgcagacggagaacaaaggcagcgttgtctcaggcggagagctgacaattttcctggacgggccaactgttgatctgggaaatgtgcctaatggcagtgccctgacagatggatcacagctgccttcgagagactccagtggaacagcagtagctccagagaaccggcaccagccccccagcacaaactgctttggtggaagatcccggacgcacagacattcgggtgcttcagccagaacaaccccagcaaccggcgagcaaagccccggtgctcggagccggcaccgccagcccgtcaagaactcaggccacagtggcttggccaatggcacagtgaatgatgaacccacaacagccactgatcccgaagaaccttccgttgttggtgtgacgtccccacctgctgcacccttgagtgtgaccccgaatcccaacacgacttctctccctgccccagccacaccggctgaaggagaggaacccagcacttcgggtacacagcagctcccagcggctgcccaggcccccgacgctctgcctgctggatgggaacagcgagagctgcccaacggacgtgtctattatgttgaccacaataccaagaccaccacctgggagcggccccttcctccaggctgggaaaaacgcacagatccccgaggcaggttttactatgtggatcacaatactcggaccaccacctggcagcgtccgaccgcggagtacgtgcgcaactatgagcagtggcagtcgcagcggaatcagctccagggggccatgcagcacttcagccaaagattcctctaccagtcttcgagtgcttcgactgaccatgatcccctgggccccctccctcctggctgggagaagagacaggacaatggacgggtgtattacgtgaaccataacactcgcacgacccagtgggaggatccccggacccaggggatgatccaggaaccagctctgcccccaggatgggagatgaaatacaccagcgagggggtgcgatactttgtggaccacaatacccgcaccaccacctttaaggatcctcgcccggggtttgagtcggggacgaagcaaggttcccctggtgcttatgaccgcagttttcggtggaagtatcaccagttccgtttcctctgccattcaaatgccctacctagccacgtgaagatcagcgtttccaggcagacgcttttcgaagattccttccaacagatcatgaacatgaaaccctatgacctgcgccgccggctctacatcatcatgcgtggcgaggagggcctggactatgggggcatcgccagagagtggtttttcctcctgtctcatgaggtgctcaaccctatgtattgtttatttgaatatgccggaaagaacaattactgcctgcagatcaaccccgcctcctccatcaacccggaccacctcacctactttcgctttataggcagattcatcgccatggcgctgtaccatggaaagttcatcgacacgggcttcaccctccctttctacaagcggatgctcaataagagaccaaccctgaaagacctggagtccattgaccctgagttctacaactccattgtctggatcaaagagaacaacctggaagaatgtggcctggagctgtacttcatccaggacatggagatactgggcaaggtgacgacccacgagctgaaggagggcggcgagagcatccgggtcacggaggagaacaaggaagagtacatcataccatcaacaagatttcaaggctttaaagaaaggagctgcttcaggaagagataaaatgactcgaacgctataaccttcaaatgcagactgggagaagaggtatcagctatgcatgagctggagaggggtgggatagatagagacacagcccagcctgactcctcatacttgttcttgaagtcctccaccagcccctgcatgttgccaagctccgcctccagcttcagcttctcctggcccagagtc

SEQ ID NO: 436131 - DNA, 470 bp, Homo sapiens
gctggctgctgataattggattgcaaaaaggttgagggcatcctggtctcccaacacccccaagtgaagctgtgctggggcacagggtgcctcaggattgctggtggctgctcagtccaatgccatccatgcagggctgggtttttggccatgagataataagtgacctctccgtgctgcagaactgttctcacgacttgggtcatgcttcttgggtgcatgtcctcaaagtccctcatgggctctgcagagacaaagccacactttgaggacccagcctccaaccaccaaggtccagaaggtggggccagcccttcacccttttcttcccgtgtttccaggatgatccaggaaccagctctgcccccaggatgggagatgaaatacaccagcgagggggtgcgatactttgtggaccacaatacccgcaccaccacctttaaggatcctcgcccggggtttgagtcggg

SEQ ID NO: 436132 - DNA, 4526 bp, Homo sapiens
cgcgcggtcacgtgacccggcccgagtgcgggcggtggaaggcggaagtaggagaggagttcggcgccgcttctgtggccacggcagcttcacggtgatgatatggcatctgccagctctagccgggcaggagtggccctgccttttgagaagtctcagctcactttgaaagtggtgtccgcaaagcccaaggtgcataatcgtcaacctcgaattaactcctacgtggaggtggcggtggatggactccccagtgagaccaagaagactgggaagcgcattgggagctctgagcttctctggaatgagatcatcattttgaatgtcacggcacagagtcatttagatttaaaggtctggagctgccataccttgagaaatgaactgctaggcaccgcatctgtcaacctctccaacgtcttgaagaacaatgggggcaaaatggagaacatgcagctgaccctgaacctgcagacggagaacaaaggcagcgttgtctcaggcggagagctgacaattttcctggacgggccaactgttgatctgggaaatgtgcctaatggcagtgccctgacagatggatcacagctgccttcgagagactccagtggaacagcagtagctccagagaaccggcaccagccccccagcacaaactgctttggtggaagatcccggacgcacagacattcgggtgcttcagccagaacaaccccagcaaccggcgagcaaagccccggtgctcggagccggcaccgccagcccgtcaagaactcaggccacagtggcttggccaatggcacagtgaatgatgaacccacaacagccactgatcccgaagaaccttccgttgttggtgtgacgtccccacctgctgcacccttgagtgtgaccccgaatcccaacacgacttctctccctgccccagccacaccggctgaaggagaggaacccagcacttcgggtacacagcagctcccagcggctgcccaggcccccgacgctctgcctgctggatgggaacagcgagagctgcccaacggacgtgtctattatgttgaccacaataccaagaccaccacctgggagcggccccttcctccaggctgggaaaaacgcacagatccccgaggcaggttttactatgtggatcacaatactcggaccaccacctggcagcgtccgaccgcggagtacgtgcgcaactatgagcagtggcagtcgcagcggaatcagctccagggggccatgcagcacttcagccaaagattcctctaccagtcttcgagtgcttcgactgaccatgatcccctgggccccctccctcctggctgggagaagagacaggacaatggacgggtgtattacgtgaaccataacactcgcacgacccagtgggaggatccccggacccaggggatgatccaggaaccagctctgcccccaggatgggagatgaaatacaccagcgagggggtgcgatactttgtggaccacaatacccgcaccaccacctttaaggatcctcgcccggggtttgagtcggggacgaagcaaggttcccctggtgcttatgaccgcagttttcggtggaagtatcaccagttccgtttcctctgccattcaaatgccctacctagccacgtgaagatcagcgtttccaggcagacgcttttcgaagattccttccaacagatcatgaacatgaaaccctatgacctgcgccgccggctctacatcatcatgcgtggcgaggagggcctggactatgggggcatcgccagagagtggtttttcctcctgtctcatgaggtgctcaaccctatgtattgtttatttgaatatgccggaaagaacaattactgcctgcagatcaaccccgcctcctccatcaacccggaccacctcacctactttcgctttataggcagattcatcgccatggcgctgtaccatggaaagttcatcgacacgggcttcaccctccctttctacaagcggatgctcaataagagaccaaccctgaaagacctggagtccattgaccctgagttctacaactccattgtctggatcaaagagaacaacctggaagaatgtggcctggagctgtacttcatccaggacatggagatactgggcaaggtgacgacccacgagctgaaggagggcggcgagagcatccgggtcacggaggagaacaaggaagagtacatcatgctgctgactgactggcgtttcacccgaggcgtggaagagcagaccaaagccttcctggatggcttcaacgaggtggccccgctggagtggctgcgctactttgacgagaaagagctggagctgatgctgtgcggcatgcaggagatagacatgagcgactggcagaagagcaccatctaccggcactacaccaagaacagcaagcagatccagtggttctggcaggtggtgaaggagatggacaacgagaagaggatccggctgctgcagtttgtcaccggtacctgccgcctgcccgtcgggggatttgccgaactcatcggtagcaacggaccacagaagttttgcattgacaaagttggcaaggaaacctggctgcccagaagccacacctgcttcaaccgtctggatcttccaccctacaagagctacgaacagctgagagagaagctgctgtatgccattgaggagaccgagggctttggacaggagtaaccgaggccgcccctcccacgccccccagcgcacatgtagtcctgagtcctccctgcctgagaggccactggccccgcagcccttgggaggcccccgtggatgtggccctgtgtgggaccacactgtcatctcgctgctggcagaaaagcctgatcccaggaggccctgcagttcccccgacccgcggatggcagtctggaataaagccccctagttgcctttggccccacctttgcaaagttccagagggctgaccctctctgcaaaactctcccctgtcctctagaccccaccctgggtgtatgtgagtgtgcaagggaaggtgttgcatccccaggggctgccgcagaggccggagacctcctggactagttcggcgaggagactggccactgggggtggctgttcgggactgagagcgccaagggtctttgccagcaaaggaggttctgcctgtaattgagcctctctgatgatggagatgaagtgaaggtctgagggagcgggccctggggcgaggccatctctgcctgcctccctagcaggcgccagcggtggaggctgagtcgcaggacacatgccggccagttaattcattctcagcaaatgaaggtttgtctaagctgcctgggtatccacgggacaaaaacagcaaactccctcagactttgtccatgtataaacttgaagtggttgtgttgtagggttgcaggttttttgttacgctgctgtcactttctgtccaggagctggcaccccaggtgttctgagaccttgagggacccagacctttgggtccaagagtttcccaaacagccacgcctctcaggaacccacctggcggttccgtgagctcaggcaggcctgacccggcggcacagcctggcagggacctcgtccccaagcctggcagaatgagaggggttgaggtcccgagcgccactcctagccttgccgccttcaatagagaagaaatccctttgctagatagggtcccccaggcagtccccagtggcgggacacaggggtccggctgtggagctcccctgccagcccctggagctccaggagggcctgttggtcccctgttcagaatggagtgcagcccgccagcggaaagtgttcattctgcataggtgtgaggctttatctgcacacaggacatgaaaaccagcagaaaggccctgagctgctgcatagccccatctgatttctgcagttcccgccagcctccaacacggggactctgccgtaactggaatcttcataggtcatattgaaatcttcaaggtgaccatgccccaccggggtgctggggcagtagtcatggcagactcccggcctgggcccccaggattctaggacccccaggcagccccttggactggtcccgggtgccttccaagcacagtctccatgctcccagattctcgaccttcccccggcccgggaggtgcagcctgcgtctgcctctgtcgtgtgtgctgatttgagtggcttagcttgccacagcgcaacctcttctgtccctttcagtcatttgctgtacttccctgtggcacgttaccatggaagccgctccagggtgggtcagggtgcaagctgctggtgaggtttggaagcatcaggctcacgggtgttcatgtgtgttcgtgcgtgtgtgtgcgtacgtgtatataactgaagtgtctgtacggaatgccctttgctagccatgggctggtcaccagattgttttgtaatgcccgccccttgcctcgatattgccagtttcttgtgcaataaacaatcagcagctgtgaaaaaaatag

SEQ ID NO: 436133 - DNA, 4057 bp, Homo sapiens
  misc_feature (1)..(1): n is a, c, g, or t
nctataggactcctgtgtgagacggggctctaggcggagagctgacaattttcctggacgggccaactgttgatctgggaaatgtgcctaatggcagtgccctgacagatggatcacagctgccttcgagagactccagtggaacagcagtagctccagagaaccggcaccagccccccagcacaaactgctttggtggaagatcccggacgcacagacattcgggtgcttcagccagaacaaccccagcaaccggcgagcaaagccccggtgctcggagccggcaccgccagcccgtcaagaactcaggccacagtggcttggccaatggcacagtgaatgatgaacccacaacagccactgatcccgaagaaccttccgttgttggtgtgacgtccccacctgctgcacccttgagtgtgaccccgaatcccaacacgacttctctccctgccccagccacaccggctgaaggagaggaacccagcacttcgggtacacagcagctcccagcggctgcccaggcccccgacgctctgcctgctggatgggaacagcgagagctgcccaacggacgtgtctattatgttgaccacaataccaagaccaccacctgggagcggccccttcctccaggctgggaaaaacgcacagatccccgaggcaggttttactatgtggatcacaatactcggaccaccacctggcagcgtccgaccgcggagtacgtgcgcaactatgagcagtggcagtcgcagcggaatcagctccagggggccatgcagcacttcagccaaagattcctctaccagtcttcgagtgcttcgactgaccatgatcccctgggccccctccctcctggctgggagaagagacaggacaatggacgggtgtattacgtgaaccataacactcgcacgacccagtgggaggatccccggacccaggggatgatccaggaaccagctctgcccccaggatgggagatgaaatacaccagcgagggggtgcgatactttgtggaccacaatacccgcaccaccacctttaaggatcctcgcccggggtttgagtcggggacgaagcaaggttcccctggtgcttatgaccgcagttttcggtggaagtatcaccagttccgtttcctctgccattcaaatgccctacctagccacgtgaagatcagcgtttccaggcagacgcttttcgaagattccttccaacagatcatgaacatgaaaccctatgacctgcgccgccggctctacatcatcatgcgtggcgaggagggcctggactatgggggcatcgccagagagtggtttttcctcctgtctcatgaggtgctcaaccctatgtattgtttatttgaatatgccggaaagaacaattactgcctgcagatcaaccccgcctcctccatcaacccggaccacctcacctactttcgctttataggcagattcatcgccatggcgctgtaccatggaaagttcatcgacacgggcttcaccctccctttctacaagcggatgctcaataagagaccaaccctgaaagacctggagtccattgaccctgagttctacaactccattgtctggatcaaagagaacaacctggaagaatgtggcctggagctgtacttcatccaggacatggagatactgggcaaggtgacgacccacgagctgaaggagggcggcgagagcatccgggtcacggaggagaacaaggaagagtacatcatgctgctgactgactggcgtttcacccgaggcgtggaagagcagaccaaagccttcctggatggcttcaacgaggtggccccgctggagtggctgcgctactttgacgagaaagagctggagctgatgctgtgcggcatgcaggagatagacatgagcgactggcagaagagcaccatctaccggcactacaccaagaacagcaagcagatccagtggttctggcaggtggtgaaggagatggacaacgagaagaggatccggctgctgcagtttgtcaccggtacctgccgcctgcccgtcgggggatttgccgaactcatcggtagcaacggaccacagaagttttgcattgacaaagttggcaaggaaacctggctgcccagaagccacacctgcttcaaccgtctggatcttccaccctacaagagctacgaacagctgagagagaagctgctgtatgccattgaggagaccgagggctttggacaggagtaaccgaggccgcccctcccacgccccccagcgcacatgtagtcctgagtcctccctgcctgagaggccactggccccgcagcccttgggaggcccccgtggatgtggccctgtgtgggaccacactgtcatctcgctgctggcagaaaagcctgatcccaggaggccctgcagttcccccgacccgcggatggcagtctggaataaagccccctagttgcctttggccccacctttgcaaagttccagagggctgaccctctctgcaaaactctcccctgtcctctagaccccaccctgggtgtatgtgagtgtgcaagggaaggtgttgcatccccaggggctgccgcagaggccggagacctcctggactagttcggcgaggagactggccactgggggtggctgttcgggactgagagcgccaagggtctttgccagcaaaggaggttctgcctgtaattgagcctctctgatgatggagatgaagtgaaggtctgagggagcgggccctggggcgaggccatctctgcctgcctccctagcaggcgccagcggtggaggctgagtcgcaggacacatgccggccagttaattcattctcagcaaatgaaggtttgtctaagctgcctgggtatccacgggacaaaaacagcaaactccctcagactttgtccatgtataaacttgaagtggttgtgttgtagggttgcaggttttttgttacgctgctgtcactttctgtccaggagctggcaccccaggtgttctgagaccttgagggacccagacctttgggtccaagagtttcccaaacagccacgcctctcaggaacccacctggcggttccgtgagctcaggcaggcctgacccggcggcacagcctggcagggacctcgtccccaagcctggcagaatgagaggggttgaggtcccgagcgccactcctagccttgccgccttcaatagagaagaaatccctttgctagatagggtcccccaggcagtccccagtggcgggacacaggggtccggctgtggagctcccctgccagcccctggagctccaggagggcctgttggtcccctgttcagaatggagtgcagcccgccagcggaaagtgttcattctgcataggtgtgaggctttatctgcacacaggacatgaaaaccagcagaaaggccctgagctgctgcatagccccatctgatttctgcagttcccgccagcctccaacacggggactctgccgtaactggaatcttcataggtcatattgaaatcttcaaggtgaccatgccccaccggggtgctggggcagtagtcatggcagactcccggcctgggcccccaggattctaggacccccaggcagccccttggactggtcccgggtgccttccaagcacagtctccatgctcccagattctcgaccttcccccggcccgggaggtgcagcctgcgtctgcctctgtcgtgtgtgctgatttgagtggcttagcttgccacagcgcaacctcttctgtccctttcagtcatttgctgtacttccctgtggcacgttaccatggaagccgctccagggtgggtcagggtgcaagctgctggtgaggtttggaagcatcaggctcacgggtgttcatgtgtgttcgtgcgtgtgtgtgcgtacgtgtatataactgaagtgtctgtacggaatgccctttgctagccatgggctggtcaccagattgttttgtaatgcccgccccttgcctcgatattgccagtttcttgtgcaataaacaatcagcagctgtgaaaaaaatag

SEQ ID NO: 436134 - DNA, 3632 bp, Homo sapiens
gccttggccgccttgagccggagctgagcggaggcactgggccgagcctgcttcccgggccttcctaccatgccagggctgctccctgcctccgccaccctggcacaccttcacccgcgtaccgcctcctccccgtcgctctgccttttccaaaactcacttgggccctccgtgcgcagggttcttttttggtttttctgtaaaaatcaaaacaaaaaacagagacttttgagaggagcagatgccacctaaagtcccactgcattccctgcaaagcgctcaaatgtggaagccagtcattggcatttttattttttattgattgattgattttttcaccagtggctttttgtaacctctgtgttctgctgtgtttcttgtgtttagtcttcgagtgcttcgactgaccatgatcccctgggccccctccctcctggctgggagaagagacaggacaatggacgggtgtattacgtgaaccataacactcgcacgacccagtgggaggatccccggacccaggggatgatccaggaaccagctctgcccccaggatgggagatgaaatacaccagcgagggggtgcgatactttgtggaccacaatacccgcaccaccacctttaaggatcctcgcccggggtttgagtcggggacgaagcaaggttcccctggtgcttatgaccgcagttttcggtggaagtatcaccagttccgtttcctctgccattcaaatgccctacctagccacgtgaagatcagcgtttccaggcagacgcttttcgaagattccttccaacagatcatgaacatgaaaccctatgacctgcgccgccggctctacatcatcatgcgtggcgaggagggcctggactatgggggcatcgccagagagtggtttttcctcctgtctcatgaggtgctcaaccctatgtattgtttatttgaatatgccggaaagaacaattactgcctgcagatcaaccccgcctcctccatcaacccggaccacctcacctactttcgctttataggcagattcatcgccatggcgctgtaccatggaaagttcatcgacacgggcttcaccctccctttctacaagcggatgctcaataagagaccaaccctgaaagacctggagtccattgaccctgagttctacaactccattgtctggatcaaagagaacaacctggaagaatgtggcctggagctgtacttcatccaggacatggagatactgggcaaggtgacgacccacgagctgaaggagggcggcgagagcatccgggtcacggaggagaacaaggaagagtacatcatgctgctgactgactggcgtttcacccgaggcgtggaagagcagaccaaagccttcctggatggcttcaacgaggtggccccgctggagtggctgcgctactttgacgagaaagagctggagctgatgctgtgcggcatgcaggagatagacatgagcgactggcagaagagcaccatctaccggcactacaccaagaacagcaagcagatccagtggttctggcaggtggtgaaggagatggacaacgagaagaggatccggctgctgcagtttgtcaccggtacctgccgcctgcccgtcgggggatttgccgaactcatcggtagcaacggaccacagaagttttgcattgacaaagttggcaaggaaacctggctgcccagaagccacacctgcttcaaccgtctggatcttccaccctacaagagctacgaacagctgagagagaagctgctgtatgccattgaggagaccgagggctttggacaggagtaaccgaggccgcccctcccacgccccccagcgcacatgtagtcctgagtcctccctgcctgagaggccactggccccgcagcccttgggaggcccccgtggatgtggccctgtgtgggaccacactgtcatctcgctgctggcagaaaagcctgatcccaggaggccctgcagttcccccgacccgcggatggcagtctggaataaagccccctagttgcctttggccccacctttgcaaagttccagagggctgaccctctctgcaaaactctcccctgtcctctagaccccaccctgggtgtatgtgagtgtgcaagggaaggtgttgcatccccaggggctgccgcagaggccggagacctcctggactagttcggcgaggagactggccactgggggtggctgttcgggactgagagcgccaagggtctttgccagcaaaggaggttctgcctgtaattgagcctctctgatgatggagatgaagtgaaggtctgagggagcgggccctggggcgaggccatctctgcctgcctccctagcaggcgccagcggtggaggctgagtcgcaggacacatgccggccagttaattcattctcagcaaatgaaggtttgtctaagctgcctgggtatccacgggacaaaaacagcaaactccctcagactttgtccatgtataaacttgaagtggttgtgttgtagggttgcaggttttttgttacgctgctgtcactttctgtccaggagctggcaccccaggtgttctgagaccttgagggacccagacctttgggtccaagagtttcccaaacagccacgcctctcaggaacccacctggcggttccgtgagctcaggcaggcctgacccggcggcacagcctggcagggacctcgtccccaagcctggcagaatgagaggggttgaggtcccgagcgccactcctagccttgccgccttcaatagagaagaaatccctttgctagatagggtcccccaggcagtccccagtggcgggacacaggggtccggctgtggagctcccctgccagcccctggagctccaggagggcctgttggtcccctgttcagaatggagtgcagcccgccagcggaaagtgttcattctgcataggtgtgaggctttatctgcacacaggacatgaaaaccagcagaaaggccctgagctgctgcatagccccatctgatttctgcagttcccgccagcctccaacacggggactctgccgtaactggaatcttcataggtcatattgaaatcttcaaggtgaccatgccccaccggggtgctggggcagtagtcatggcagactcccggcctgggcccccaggattctaggacccccaggcagccccttggactggtcccgggtgccttccaagcacagtctccatgctcccagattctcgaccttcccccggcccgggaggtgcagcctgcgtctgcctctgtcgtgtgtgctgatttgagtggcttagcttgccacagcgcaacctcttctgtccctttcagtcatttgctgtacttccctgtggcacgttaccatggaagccgctccagggtgggtcagggtgcaagctgctggtgaggtttggaagcatcaggctcacgggtgttcatgtgtgttcgtgcgtgtgtgtgcgtacgtgtatataactgaagtgtctgtacggaatgccctttgctagccatgggctggtcaccagattgttttgtaatgcccgccccttgcctcgatattgccagtttcttgtgcaataaacaatcagcagctgtgaaaaaaatag

SEQ ID NO: 436135 - DNA, 3399 bp, Homo sapiens
gaattcgcggccgcgtcgaccgcttctgtggccacggcagatgaaacagaaaggctaaagagggctggagtcaggggacttctcttccaccagcttcacggtgatgatatggcatctgccagctctagccgggcaggagtggccctgccttttgagaagtctcagctcactttgaaagtggtgtccgcaaagcccaaggtgcataatcgtcaacctcgaattaactcctacgtggaggtggcggtggatggactccccagtgagaccaagaagactgggaagcgcattgggagctctgagcttctctggaatgagatcatcattttgaatgtcacggcacagagtcatttagatttaaaggtctggagctgccataccttgagaaatgaactgctaggcaccgcatctgtcaacctctccaacgtcttgaagaacaatgggggcaaaatggagaacatgcagctgaccctgaacctgcagacggagaacaaaggcagcgttgtctcaggcggagagctgacaattttcctggacgggccaactgttgatctgggaaatgtgcctaatggcagtgccctgacagatggatcacagctgccttcgagagactccagtggaacagcagtagctccagagaaccggcaccagccccccagcacaaactgctttggtggaagatcccggacgcacagacattcgggtgcttcagccagaacaaccccagcaaccggcgagcaaagccccggtgctcggagccggcaccgccagcccgtcaagaactcaggccacagtggcttggccaatggcacagtgaatgatgaacccacaacagccactgatcccgaagaaccttccgttgttggtgtgacgtccccacctgctgcacccttgagtgtgaccccgaatcccaacacgacttctctccctgccccagccacaccggctgaaggagaggaacccagcacttcgggtacacagcagctcccagcggctgcccaggcccccgacgctctgcctgctggatgggaacagcgagagctgcccaacggacgtgtctattatgttgaccacaataccaagaccaccacctgggagcggccccttcctccaggctgggaaaaacgcacagatccccgaggcaggttttactatgtggatcacaatactcggaccaccacctggcagcgtccgaccgcggagtacgtgcgcaactatgagcagtggcagtcgcagcggaatcagctccagggggccatgcagcacttcagccaaagattcctctaccagtcttcgagtgcttcgactgaccatgatcccctgggccccctccctcctggctgggagaagagacaggacaatggacgggtgtattacgtgaaccataacactcgcacgacccagtgggaggatccccggacccaggggatgatccaggaaccagctctgcccccaggatgggagatgaaatacaccagcgagggggtgcgatactttgtggaccacaatacccgcaccaccacctttaaggatcctcgcccggggtttgagtcggggacgaagcaaggttcccctggtgcttatgaccgcagttttcggtggaagtatcaccagttccgtttcctctgccattcaaatgccctacctagccacgtgaagatcagcgtttccaggcagacgcttttcgaagattccttccaacagatcatgaacatgaaaccctatgacctgcgccgccggctctacatcatcatgcgtggcgaggagggcctggactatgggggcatcgccagagagtggtttttcctcctgtctcatgaggtgctcaaccctatgtattgtttatttgaatatgccggaaagaacaattactgcctgcagatcaaccccgcctcctccatcaacccggaccacctcacctactttcgctttataggcagattcatcgccatggcgctgtaccatggaaagttcatcgacacgggcttcaccctccctttctacaagcggatgctcaataagagaccaaccctgaaagacctggagtccattgaccctgagttctacaactccattgtctggatcaaagagaacaacctggaagaatgtggcctggagctgtacttcatccaggacatggagatactgggcaaggtgacgacccacgagctgaaggagggcggcgagagcatccgggtcacggaggagaacaaggaagagtacatcatgctgctgactgactggcgtttcacccgaggcgtggaagagcagaccaaagccttcctggatggcttcaacgaggtggccccgctggagtggctgcgctactttgacgagaaagagctggagctgatgctgtgcggcatgcaggagatagacatgagcgactggcagaagagcaccatctaccggcactacaccaagaacagcaagcagatccagtggttctggcaggtggtgaaggagatggacaacgagaagaggatccggctgctgcagtttgtcaccggtacctgccgcctgcccgtcgggggatttgccgaactcatcggtagcaacggaccacagaagttttgcattgacaaagttggcaaggaaacctggctgcccagaagccacacctgcttcaaccgtctggatcttccaccctacaagagctacgaacagctgagagagaagctgctgtatgccattgaggagaccgagggctttggacagggctgccgcagaggccggagacctcctggactagttcggcgaggagactggccactgggggtggctgttcgggactgagagcgccaagggtctttgccagcaaaggaggttctgcctgtaattgagcctctctgatgatggagatgaagtgaaggtctgagggagcgggccctggggcgaggccatctctgcctgcctccctagcaggcgccagcggtggaggctgagtcgcaggacacatgccggccagttaattcattctcagcaaatgaagcacaggacatgaaaaccagcagaaaggccctgagctgctgcatagccccatctgatttctgcagttcccgccagcctccaacacggggactctgccgtaactggaatcttcataggtcatattgaaatcttcaagtcatttgctgtacttccctgtggcacgttaccatggaagccgctccagggtgggtcagggtgcaagctgctggtgaggtttggaagcatcaggctcacgggtgttcatgtgtgttcgtgcgtgtgtgtgcgtacgtgtatataactgaagtgtctgtacggaatgccctttgctagccatgggctggtcaccagattgttttgtaatgcccgccccttgcctcgatattgccagtttcttgtgcaataaacaatcagcagctgtgaaaaaaatag

SEQ ID NO: 436136 - DNA, 2408 bp, Homo sapiens
gaattcgcggccgcgtcgaccgcttctgtggccacggcagatgaaacagaaaggctaaagagggctggagtcaggggacttctcttccaccagcttcacggtgatgatatggcatctgccagctctagccgggcaggagtggccctgccttttgagaagtctcagctcactttgaaagtggtgtccgcaaagcccaaggtgcataatcgtcaacctcgaattaactcctacgtggaggtggcggtggatggactccccagtgagaccaagaagactgggaagcgcattgggagctctgagcttctctggaatgagatcatcattttgaatgtcacggcacagagtcatttagatttaaaggtctggagctgccataccttgagaaatgaactgctaggcaccgcatctgtcaacctctccaacgtcttgaagaacaatgggggcaaaatggagaacatgcagctgaccctgaacctgcagacggagaacaaaggcagcgttgtctcaggcggagagctgacaattttcctggacgggccaactgttgatctgggaaatgtgcctaatggcagtgccctgacagatggatcacagctgccttcgagagactccagtggaacagcagtagctccagagaaccggcaccagccccccagcacaaactgctttggtggaagatcccggacgcacagacattcgggtgcttcagccagaacaaccccagcaaccggcgagcaaagccccggtgctcggagccggcaccgccagcccgtcaagaactcaggccacagtggcttggccaatggcacagtgaatgatgaacccacaacagccactgatcccgaagaaccttccgttgttggtgtgacgtccccacctgctgcacccttgagtgtgaccccgaatcccaacacgacttctctccctgccccagccacaccggctgaaggagaggaacccagcacttcgggtacacagcagctcccagcggctgcccaggcccccgacgctctgcctgctggatgggaacagcgagagctgcccaacggacgtgtctattatgttgaccacaataccaagaccaccacctgggagcggccccttcctccaggctgggaaaaacgcacagatccccgaggcaggttttactatgtggatcacaatactcggaccaccacctggcagcgtccgaccgcggagtacgtgcgcaactatgagcagtggcagtcgcagcggaatcagctccagggggccatgcagcacttcagccaaagattcctctaccagtcttcgagtgcttcgactgaccatgatcccctgggccccctccctcctggctgggagaagagacaggacaatggacgggtgtattacgtgaaccataacactcgcacgacccagtgggaggatccccggacccaggggatgatccaggaaccagctctgcccccaggatgggagatgaaatacaccagcgagggggtgcgatactttgtggaccacaatacccgcaccaccacctttaaggatcctcgcccggggtttgagtcggggacgaagcaaggttcccctggtgcttatgaccgcagttttcggtggaagtatcaccagttccgtttcctctgccattcaaatgccctacctagccacgtgaagatcagcgtttccaggcagacgcttttcgaagattccttccaacagatcatgaacatgaaaccctatgacctgcgccgccggctctacatcatcatgcgtggcgaggagggcctggactatgggggcatcgccagagagtggtttttcctcctgtctcatgaggtgctcaaccctatgtattgtttatttgaatatgccggaaagaacaattactgcctgcagatcaaccccgcctcctccatcaacccggaccacctcacctactttcgctttataggcagattcatcgccatggcgctgtaccatggaaagttcatcgacacgggcttcaccctccctttctacaagcggatgctcaataagagaccaaccctgaaagacctggagtccattgaccctgagttctacaactccattgtctggatcaaagagaacaacctggaagaatgtggcctggagctgtacttcatccaggacatggagatactgggcaaggtgacgacccacgagctgaaggagggcggcgagagcatccgggtcacggaggagaacaaggaagagtacatcatgctcacgggtgttcatgtgtgttcgtgcgtgtgtgtgcgtacgtgtatataactgaagtgtctgtacggaatgccctttgctagccatgggctggtcaccagattgttttgtaatgcccgccccttgcctcgatattgccagtttcttgtgcaataaacaatcagcagctgtgaaaaaaatag

SEQ ID NO: 436137 - DNA, 2519 bp, Homo sapiens
gaattcgcggccgcgtcgaccgcttctgtggccacggcagatgaaacagaaaggctaaagagggctggagtcaggggacttctcttccaccagcttcacggtgatgatatggcatctgccagctctagccgggcaggagtggccctgccttttgagaagtctcagctcactttgaaagtggtgtccgcaaagcccaaggtgcataatcgtcaacctcgaattaactcctacgtggaggtggcggtggatggactccccagtgagaccaagaagactgggaagcgcattgggagctctgagcttctctggaatgagatcatcattttgaatgtcacggcacagagtcatttagatttaaaggtctggagctgccataccttgagaaatgaactgctaggcaccgcatctgtcaacctctccaacgtcttgaagaacaatgggggcaaaatggagaacatgcagctgaccctgaacctgcagacggagaacaaaggcagcgttgtctcaggcggagagctgacaattttcctggacgggccaactgttgatctgggaaatgtgcctaatggcagtgccctgacagatggatcacagctgccttcgagagactccagtggaacagcagtagctccagagaaccggcaccagccccccagcacaaactgctttggtggaagatcccggacgcacagacattcgggtgcttcagccagaacaaccccagcaaccggcgagcaaagccccggtgctcggagccggcaccgccagcccgtcaagaactcaggccacagtggcttggccaatggcacagtgaatgatgaacccacaacagccactgatcccgaagaaccttccgttgttggtgtgacgtccccacctgctgcacccttgagtgtgaccccgaatcccaacacgacttctctccctgccccagccacaccggctgaaggagaggaacccagcacttcgggtacacagcagctcccagcggctgcccaggcccccgacgctctgcctgctggatgggaacagcgagagctgcccaacggacgtgtctattatgttgaccacaataccaagaccaccacctgggagcggccccttcctccaggctgggaaaaacgcacagatccccgaggcaggttttactatgtggatcacaatactcggaccaccacctggcagcgtccgaccgcggagtacgtgcgcaactatgagcagtggcagtcgcagcggaatcagctccagggggccatgcagcacttcagccaaagattcctctaccagtcttcgagtgcttcgactgaccatgatcccctgggccccctccctcctggctgggagaagagacaggacaatggacgggtgtattacgtgaaccataacactcgcacgacccagtgggaggatccccggacccaggggatgatccaggaaccagctctgcccccaggatgggagatgaaatacaccagcgagggggtgcgatactttgtggaccacaatacccgcaccaccacctttaaggatcctcgcccggggtttgagtcggggacgaagcaaggttcccctggtgcttatgaccgcagttttcggtggaagtatcaccagttccgtttcctctgccattcaaatgccctacctagccacgtgaagatcagcgtttccaggcagacgcttttcgaagattccttccaacagatcatgaacatgaaaccctatgacctgcgccgccggctctacatcatcatgcgtggcgaggagggcctggactatgggggcatcgccagagagtggtttttcctcctgtctcatgaggtgctcaaccctatgtattgtttatttgaatatgccggaaagaacaattactgcctgcagatcaaccccgcctcctccatcaacccggaccacctcacctactttcgctttataggcagattcatcgccatggcgctgtaccatggaaagttcatcgacacgggcttcaccctccctttctacaagcggatgctcaataagagaccaaccctgaaagacctggagtccattgaccctgagttctacaactccattgtctggatcaaagagaacaacctggaagaatgtggcctggagctgtacttcatccaggacatggagatactgggcaaggtgacgacccacgagctgaaggagggcggcgagagcatccgggtcacggaggagaacaaggaagagtacatcataccatcaacaagatttcaaggctttaaagaaaggagctgcttcaggaagagataaaatgactcgaacgctataaccttcaaatgcagactgggagaagaggtatcagctatgcatgagctggagaggggtgggatagatagagacacaggtgataaagaaaatacagcaaaatgtgaaccctacaatctgggtggtggatgtaaaccctgtagtagcctcacctggggaaagctgccttgcaacaatgaggctgcccattctccaaacccaccccagccaccgagcaggctcca

SEQ ID NO: 436138 - DNA, 2478 bp, Homo sapiens
gcttctctttaaaattgacccaaggcatgagccactgcgcctggccagcaaatgctttttgtgcagaatacacttctttcaggcattgtcaggtgctgttttgtttaagctctaactcacccctggaatacaggggaatgatgacaaccagcccagccaggcctgactcatcatggtcacatccagcccccacccccggccaactaaccactgcaggctcctcttccagactcaccagggggcctcgaggccccggcatctcccttggccctgggtgtgggttttacaagactgtgtctttcatgacatcatagcccaaccatgtgagaagaaggagaaggcccccctttcttcattaatctgaaaaaaaggaaagtgagaataggctgatttttaaaagttaaggggcaagcagcattgcattctgggggaacgatcctggccacagccgccaaacaaacattcactaggcctcttctgttttcatacccttgtaagtgggttatgtggtgggtatggtcagttttttcttttttcttttcttttcttttttttgagacagagtttcgcttttgttgcccgggctggaatgcaatggcgcgattcagctcactgcaatctccgcctcccgggttcaagtgattctcctgccttagcctcctgaaaagctgggattacagggccctgccaccaagcccagctaattgtatttttagtagagacaggatttcaccatgttggccaggccagtctcaaactcctgacctcaggtgatccacctgcctcagcctcccagactgttgggattacaggcatgagccaccacgcctggccagtttcttcattttacatatggtcacattggcgcctagaacagttaggtcgctcgtcacataggcagttaagtggagaaccaggtttcaaaatcaggtaagaaaaccatcatcattaactgagcaccagctgtgctaagcctgccacgggcgtatccttgcagcctcacaacagtgggaggtctgtatcctgaatgtcctcattttacagatgaggacattgaggagaagagacttacccaggctcacacagcagctcagcctgttccaggcgctggtcagtgcgtgttctttgccaccagcctgtcactccagtggcagctccagaaacggaggctgttgcttttatccctaaactgcatccacagagaagccccaagaaggaggttggggccagctcataaaaagcctgaatgccaagccaaggagtggatgcctccagtcatatttagaacaaagtcaagtataaatttacagagaaaaaattctaagacagttggatgttgtcctgttggtgaggaagggaaaggtttttcttgtagggaactggaaccagcccacaactgcacgcttgtgagctgtcatggaaacctgatccccaacagcttttgaggttgtttgtttgtttgtttgtttacctgtcttgggctttgttgcttttggcaaaaggtacttcaaacaagggagggcctggactgagggggaccaggtcttcttgctgacctcgtctacaaaggcaaaggaaggcaaaggaagctgtctcgggtgtttctgaacaacgtgactcatgaggggctttggctacctcttgcgttccccctagagatgtccaggccttacatttaatcggctttctctgcggtggggtagagaatggagctcccgccttgcgggcagtgctaaaggtggagctgggggattttcctgggaatgatttgagggctcttgaaagcccatgtgttccaaagcgtctttaactctgggatagcattggaagccgctgtcatgacaggacatggcactggatggctggcagagagccctggctgggagttagggagccctgggttggaatccagccccacctcttttatgccacaggtttggtcaagttctctcccgctcagggtagggctgtgaactccctcttacagctaagaacatgcagcttagtgaggacaagacccttctagagctttacccctaatccccccccaggagccccgaggccggcattattcctccccattacaggtgatgagcctcaaattcagagagcttaagcaacctgctcagggtcacgtctccaacaggcagtagagtcaaggtataaaccaggtctgtttttgtaccagagtcccagactaactgttggtaggaatcttgtaaccagtcatgttttcttccttgttttggccgctgggaagctcaaagtcaaattcgagacccttttttttccaattgtgctgagtctcctactagactcgcttcattctagctttctgcttttacctttaccctaatctttttatttttatgctattgtactttatttttgtaagttgctgagatatctgttttgcaacaagatgggctatatctaaataaagacatgatcaaaggtttgatttaaaagtctggacta

SEQ ID NO: 436139 - DNA, 1722 bp, Homo sapiens
  misc_feature (1274)..(1274): n is a, c, g, or t
tgcccggggagcatcgtgcagggcgtctgcggctgctgctacacgtgcgccagccagaggaacgagagctgcggcggcaccttcgggatttacggaacctgcgaccgggggctgcgttgtgtcatccgccccccgctcaatggcgactccctcaccgagtacgaagcgggcgtttgcgaagaagagaagccagattgctccaaggcccgctgtgaagtccagttctctccacgttgtcctgaagattctgttctgatcgagggttatgctcctcctggggagtgctgtcccttacccagccgctgcgtgtgcaaccccgcaggctgtctgcgcaaagtctgccagccgggaaacctgaacatactagtgtcaaaagcctcagggaagccgggagagtgctgtgacctctatgagtgcaaaccagttttcggcgtggactgcaggactgtggaatgccctcctgttcagcagaccgcgtgtcccccggacagctatgaaactcaagtcagactaactgcagatggttgctgtactttgccaacaagatgcgagtgtctctctggcttatgtggtttccccgtgtgtgaggtgggatccactccccgcatagtctctcgtggcgatgggacacctggaaagtgctgtgatgtctttgaatgtgttaatgatacaaagccagcctgcgtatttaacaatgtggaatattatgatggagacatgtttcgaatggacaactgtcggttctgtcgatgccaagggggcgttgccatctgcttcaccgcccagtgtggtgagataaactgcgagaggtactacgtgcccgaaggagagtgctgcccagtgtgtgaagatccagtgtatccttttaataatcccgctggctgctatgccaatggcctgatccttgcccacggagaccggtggcgggaagacgactgcacattctgccagtgcgtcaacggtgaacgccactgcgttgcgaccgtctgcggacagacctgcacaaaccctgtgaaagtgcctggggagtgttgccctgtgtgcgaagaaccaaccatcatcacagttgatccacctgcatgtggggagttatcaaactgcactctgacagggaaggactgcattaatggtttcaaacgcgatcacaatggttgtcggacctgtcagtgcataaacaccgaggaactatgttcagaacgtaaacaaggctgcaccttgaactgtcccttcggtttccttactgatgcccaaaactgtgagatctgtgagtgccngccaaggcccaagaagtgcagacccataatctgtgacaagtattgtccacttggattgctgaagaataagcacggctgtgacatctgtcgctgtaagaaatgtccagagctctcatgcagtaagatctgccccttgggtttccagcaggacagtcacggctgtcttatctgcaagtgcagagaggctctgcttcagctgggacaccatcctgtcgggcacttgtctcaccgggggatggtcatcatcatcaaaatgaggagagctgggcacgatgggtcgccggggaatggcagcgggctcaacggacgggaaactgtgttgccctgattaactggccaggggctagcctgggcgcaaccacccatacacctgtgacgtgatcgccacacggcagagcactcgaggcgccaacccagtctaacctcacctggacgcctgaggaacccg

SEQ ID NO: 436140 - DNA, 363 bp, Homo sapiens
cctaggcaggcgccacctaacatgtttctctcagctgcggggtattgaatttgaggctgctctcagcattactgctcatctcaaagaggaacaaatggtcccccaaatggtccagatgcgacagtagggaaaggagtgccaccattcattctgaggtgcctgggccatactctggatgaagctcacagctctaacgtaaggcggctggagtgcaggtgatcatatctacaaaggtgacaagaacatgaacctgcagtcctgttatcagcattttgtctctgtgttccagatttttttttgtaactatgaaatccttgccttgtagtcaacttaaaatgaaataaatccagagtgcaaatgagt

SEQ ID NO: 436141 - DNA, 393 bp, Homo sapiens
ggtgcatattagcttaagaacttttaaacctctgcggcagtaatgagaatctgcatgccaagggcccagcatttctctacaaagcagcccatgagtgcatgtgtgtttgctgtagtgaagggtctatgttagaagctgcggggtattgaatttgaggctgctctcagcattactgctcatctcaaagaggaacaaatggtcccccaaatggtccagatgcgacagtagggaaaggagtgccaccattcattctgaggtgcctgggccatactctggatgaagctcacagctctaacgtaaggcggtctctgtgttccagatttttttttgtaactatgaaatccttgccttgtagtcaacttaaaatgaaataaatccagagtgcaaatgagt

SEQ ID NO: 436142 - DNA, 838 bp, Homo sapiens
tgcccggggagcatcgtgcagggcgtctgcggctgctgctacacgtgcgccagccagaggaacgagagctgcggcggcaccttcgggatttacggaacctgcgaccgggggctgcgttgtgtcatccgccccccgctcaatggcgactccctcaccgagtacgaagcgggcgtttgcgaagctgcggggtattgaatttgaggctgctctcagcattactgctcatctcaaagaggaacaaatggtcccccaaatggtccagatgcgacagtagggaaaggagtgccaccattcattctgaggtgcctgggccatactctggatgaagctcacagctctaacgtaaggcggtaagtcattttttttttaaacttaaggaagttaatttgaaagtttatgctgatgccatttcatatgacagagactaaagggtatacgtccttgtgttctcttggtggggactgctgtcctaaaggtaaaagattttgatccagaggttggattgttcctcgtgtggcaacagtcctctgacctcagtcattttcaaagtctaatgtctttttggctaacaaaagacatcaagctagagattaaaatttgcagaagatgggagtttttttgttgttttcggtttttttttttttttttttggagacggagtctcactctgtcacccaggctggagtgcaggtgatcatatctacaaaggtgacaagaacatgaacctgcagtcctgttatcagcattttgtctctgtgttccagatttttttttgtaactatgaaatccttgccttgtagtcaacttaaaatgaaataaatccagagtgcaaatgagt

SEQ ID NO: 436143 - DNA, 388 bp, Homo sapiens
ggagacggagtctcactctgtcacccaggctggagtgcaggtgatcatatctacaaaggtgacaagaacatgaacctgcagtcctgttatcagcattttgtaagtgcttcttctcattctaaaaatatgtattgattttaaaaatgaattctgtaacaggatagcaacagtagtaaaaatcctttttatggagaaatttagagctttcagctaacatacacacatactcattcaaatgaaacagcttgtcttgttttaaagaaatatttctgttgtccattgtacaaattttaataacttgtctttcctttttttaggtctctgtgttccagatttttttttgtaactatgaaatccttgccttgtagtcaacttaaaatgaaataaa

SEQ ID NO: 436144 - DNA, 652 bp, Homo sapiens
tgcccggggagcatcgtgcagggcgtctgcggctgctgctacacgtgcgccagccagaggaacgagagctgcggcggcaccttcgggatttacggaacctgcgaccgggggctgcgttgtgtcatccgccccccgctcaatggcgactccctcaccgagtacgaagcgggcgtttgcgaagaagagaagccagattgctccaaggcccgctgtgaagtccagttctctccacgttgtcctgaagattctgttctgatcgagggttatgctcctcctggggagtgctgtcccttacccagccgctgcgtgtgcaaccccgcaggctgtctgcgcaaagtctgccagccgggaaacctgaacatactagtgtcaaaagcctcagggaagccgggagagtgctgtgacctctatgagtgcaaaccagttttcggcgtggactgcaggactgtggaatgccctcctgttcagcagaccgcgtgtcccccggacagctatgaaactcaagtcagactaactgcagatggttgctgtactttgccaacaagatgcgagtgtctctctggcttatgtggtttccccgtgtgtgaggtgggatccacttcctgctgagaggacaaatggagagagttttctgccctgaggcatgacaaga

SEQ ID NO: 436145 - DNA, 884 bp, Homo sapiens
caacaaagaaggaggagaaggaggaagaaggagaagaaaagaaaaaaaaaagtcgtcaaaggatattaattgtcgatagataacagataatgccaaaaaatatagaagcaattcttaaaacacagtgttggaactggtccacagctctgatttttaatgagctcccatttctgaggccaatataaacttcattctatgctgcccatctctgacaggtgggcattaactaccagccccccacggtggtccctgtgggagacctggccaaagtgcagcgggcggtgtgcatgctgagcaacaccacggccatcacggaggcctgggcctgcctggaccataagttcggccaagtgcgccttagtgcactggtacgtgggggagggcatggcagtgggggaattctccgaggcccgcgaggatctggcagctctggaggattatgaagatgtgggcatggattccgtggaagctgaggctgaagaaggcgaagaatagtgaggggagggtgcggcaggcaaccatccctctgtattccccaccataacgctaggagagctaattacctattaaaatttccgtattgcaaattagccgggcgtggtggcgggcgcttgtagtcccagctactgtggagggtgaggcagccgaatggcgtgaacccgggaggcggagtttacagtgagccgagatcgcgccactgcactccagcctgggcgacagagcgagactccggtctcaggaaaataataataaaataaaaaataaaatttctgtattgcgatactgtctttctcctgtgttgtactttgagagattcctcctccagataaccctccctgaagtccaccagttttattgaactacatcagaattttactatttag

SEQ ID NO: 436146 - DNA, 2519 bp, Homo sapiens
caacaaagaaggaggagaaggaggaagaaggagaagaaaagaaaaaaaaaagtcgtcaaaggatattaattgtcgatagataacagataatgccaaaaaatatagaagcaattcttaaaacacagtgttggaactggtccacagctctgatttttaatgagctcccatttctgaggccaatataaacttcattctatgctgcccatctctgacaggtgggcattaactaccagccccccacggtggtccctgtgggagacctggccaaagtgcagcgggcggtgtgcatgctgagcaacaccacggccatcacggaggcctgggcctgcctggaccataagttcggccaagtgcgccttagtgcactggtacgtgggggagggcatggcagtgggggaattctccgaggcccgcgaggatctggcagctctggaggattatgaagatgtgggcatggattccgtggaagctgaggctgaagaaggcgaagaatagtgaggggagggtgcggcaggcaaccatccctctgtattccccaccataacgctaggagagctaattacctattaaaatttccgtattgcaaattagccgggcgtggtggcgggcgcttgtagtcccagctactgtggagggtgaggcagccgaatggcgtgaacccgggaggcggagtttacagtgagccgagatcgcgccactgcactccagcctgggcgacagagcgagactccggtctcaggaaaataataataaaataaaaaataaaatttctgtattgcgatactgtctttctcctgtgttgtactttgagagattcctcctccagataaccctccctgaagtccacctccccagtacgagagtgagtgcgggctctggtttttgtcgggttctttcgtgcaagcgtcccaggccccgttttatttcttccgtcagaggtcattccgaggcgagctgccgcccctgcggctttcgaggctcccaggacactgccgctttccgctcccgggccgctcccgaacgctggggccgctccatcgtgccggggtgtttacggagaaaagtgaggcctgagcggacgaaagagaagcccacgtgggcgacaatactggtagtccagggagctgggacgacgcgggcgcgtcagaaactcgcacgctcgcgccgcttactaacccagctagctaggacctcgccccgccccgccccggtggcgggggcacctccggctctccagtctctatggtaccaacttccggcgcgcgctacccctcgcgagacttcggcggcgcagcaatggccagagcgtgagtgccgctgacagaagtcaagagaatcggctgggacggggttggggcgacaacgggccgggggggacccgacaggccagagccccttggggaggagcggcggctggaggcgcgaggctcctccggatgcccggagagccgcttgcgacttaactcccgcctctttcccagatgccgcgtcactgctccgccgccggctgctgcacacgggacacgcgcgagacgcgcaaccgcggcatctccttccacagacttcccaagaaggacaacccgaggcgaggcttgtggctggccaactgccagcggctggaccccagcggccagggcctgtgggacccggcatccgagtacatctacttctgctccaaacactttgaggaggactgctttgagctggtgggaatcagtggatatcacaggctaaaggagggggcagtccccaccatatttgagtctttctccaagttgcgccggacaaccaagaccaaaggacacagttacccacctggcccccctgaagtcagccggctcagacgatgcaggaagcgctgctccgagggccgagggcccacaactccattttctccacctccacctgctgatgtcacctgctttcctgtggaagaggcctcagcacctgccactttgccggcctccccagctgggaggctggagcctggccttagcagccccttttcagacctactgggccccttgggtgcccaggcagatgaagcaggctgcagcgcccagccttcaccagagcggcagccctcccctctcgaaccacggccagtctccccctcagcgtatatgctgcgcctgcccccacccgccggagcctacatccagaatgaacacagctaccaggtgggcagcgccttactctggaagcggcgagccgaggcagcccttgatgcccttgacaaggcccagcgccagctgcaggcctgcaagcggcgggagcagcggctgcggttgagactgaccaagctgcagcaggagcgggcacgggagaagcgggcacaggcagatgcccgccagactctgaaggagcatgtgcaggactttgccatgcagctgagcagcagcatggcctgaggggctgctggactgaccgaggggctgcccagcaagactgcagcctcttcctccctcagatcccaccagacccaccaggtgccataataaagcggattctagacggaa

SEQ ID NO: 436147 - DNA, 2345 bp, Homo sapiens
caacaaagaaggaggagaaggaggaagaaggagaagaaaagaaaaaaaaaagtcgtcaaaggatattaattgtcgatagataacagataatgccaaaaaatatagaagcaattcttaaaacacagtgttggaactggtccacagctctgatttttaatgagctcccatttctgaggccaatataaacttcattctatgctgcccatctctgacaggtgggcattaactaccagccccccacggtggtccctgtgggagacctggccaaagtgcagcgggcggtgtgcatgctgagcaacaccacggccatcacggaggcctgggcctgcctggaccataagttcggccaagtgcgccttagtgcactggtacgtgggggagggcatggcagtgggggaattctccgaggcccgcgaggatctggcagctctggaggattatgaagatgtgggcatggattccgtggaagctgaggctgaagaaggcgaagaatagtgaggggagggtgcggcaggcaaccatccctctgtattccccaccataacgctaggagagctaattacctattaaaatttccgtattgcaaattagccgggcgtggtggcgggcgcttgtagtcccagctactgtggagggtgaggcagccgaatggcgtgaacccgggaggcggagtttacagtgagccgagatcgcgccactgcactccagcctgggcgacagagcgagactccggtctcaggaaaataataataaaataaaaaataaaatttctgtattgcgatactgtctttctcctgtgttgtactttgagagattcctcctccagataaccctccctgaagtccacctccccagtacgagagtgagtgcgggctctggtttttgtcgggttctttcgtgcaagcgtcccaggccccgttttatttcttccgtcagaggtcattccgaggcgagctgccgcccctgcggctttcgaggctcccaggacactgccgctttccgctcccgggccgctcccgaacgctggggccgctccatcgtgccggggtgtttacggagaaaagtgaggcctgagcggacgaaagagaagcccacgtgggcgacaatactggtagtccagggagctgggacgacgcgggcgcgtcagaaactcgcacgctcgcgccgcttactaacccagctagctaggacctcgccccgccccgccccggtggcgggggcacctccggctctccagtctctatggtaccaacttccggcgcgcgctacccctcgcgagacttcggcggcgcagcaatggccagagcatgccgcgtcactgctccgccgccggctgctgcacacgggacacgcgcgagacgcgcaaccgcggcatctccttccacagacttcccaagaaggacaacccgaggcgaggcttgtggctggccaactgccagcggctggaccccagcggccagggcctgtgggacccggcatccgagtacatctacttctgctccaaacactttgaggaggactgctttgagctggtgggaatcagtggatatcacaggctaaaggagggggcagtccccaccatatttgagtctttctccaagttgcgccggacaaccaagaccaaaggacacagttacccacctggcccccctgaagtcagccggctcagacgatgcaggaagcgctgctccgagggccgagggcccacaactccattttctccacctccacctgctgatgtcacctgctttcctgtggaagaggcctcagcacctgccactttgccggcctccccagctgggaggctggagcctggccttagcagccccttttcagacctactgggccccttgggtgcccaggcagatgaagcaggctgcagcgcccagccttcaccagagcggcagccctcccctctcgaaccacggccagtctccccctcagcgtatatgctgcgcctgcccccacccgccggagcctacatccagaatgaacacagctaccaggtgggcagcgccttactctggaagcggcgagccgaggcagcccttgatgcccttgacaaggcccagcgccagctgcaggcctgcaagcggcgggagcagcggctgcggttgagactgaccaagctgcagcaggagcgggcacgggagaagcgggcacaggcagatgcccgccagactctgaaggagcatgtgcaggactttgccatgcagctgagcagcagcatggcctgaggggctgctggactgaccgaggggctgcccagcaagactgcagcctcttcctccctcagatcccaccagacccaccaggtgccataataaagcggattctagacggaa

SEQ ID NO: 436148 - DNA, 2987 bp, Homo sapiens
caacaaagaaggaggagaaggaggaagaaggagaagaaaagaaaaaaaaaagtcgtcaaaggatattaattgtcgatagataacagataatgccaaaaaatatagaagcaattcttaaaacacagtgttggaactggtccacagctctgatttttaatgagctcccatttctgaggccaatataaacttcattctatgctgcccatctctgacaggtgggcattaactaccagccccccacggtggtccctgtgggagacctggccaaagtgcagcgggcggtgtgcatgctgagcaacaccacggccatcacggaggcctgggcctgcctggaccataagttcggccaagtgcgccttagtgcactggtacgtgggggagggcatggcagtgggggaattctccgaggcccgcgaggatctggcagctctggaggattatgaagatgtgggcatggattccgtggaagctgaggctgaagaaggcgaagaatagtgaggggagggtgcggcaggcaaccatccctctgtattccccaccataacgctaggagagctaattacctattaaaatttccgtattgcaaattagccgggcgtggtggcgggcgcttgtagtcccagctactgtggagggtgaggcagccgaatggcgtgaacccgggaggcggagtttacagtgagccgagatcgcgccactgcactccagcctgggcgacagagcgagactccggtctcaggaaaataataataaaataaaaaataaaatttctgtattgcgatactgtctttctcctgtgttgtactttgagagattcctcctccagataaccctccctgaagtccacctccccagtacgagagtgagtgcgggctctggtttttgtcgggttctttcgtgcaagcgtcccaggccccgttttatttcttccgtcagaggtcattccgaggcgagctgccgcccctgcggctttcgaggctcccaggacactgccgctttccgctcccgggccgctcccgaacgctggggccgctccatcgtgccggggtgtttacggagaaaagtgaggcctgagcggacgaaagagaagcccacgtgggcgacaatactggtagtccagggagctgggacgacgcgggcgcgtcagaaactcgcacgctcgcgccgcttactaacccagctagctaggacctcgccccgccccgccccggtggcgggggcacctccggctctccagtctctatggtaccaacttccggcgcgcgctacccctcgcgagacttcggcggcgcagcaatggccagagcgtgagtgccgctgacagaagtcaagagaatcggctgggacggggttggggcgacaacgggccgggggggacccgacaggccagagccccttggggaggagcggcggctggaggcgcgaggctcctccggatgcccggagagccgcttgcgacttaactcccgcctctttcccagatgccgcgtcactgctccgccgccggctgctgcacacgggacacgcgcgagacgcgcaaccgcggcatctccttccacagacttcccaagaaggacaacccgaggcgaggcttgtggctggccaactgccagcggctggaccccagcggccagggcctgtgggacccggcatccgagtacatctacttctgctccaaacactttgaggaggactgctttgagctggtgggaatcaggtgggcctccctgccggccgacgctggggtaggatgtggggctcccggcggactgggacagctgcaggtcatggaagtcccttgagcagcctgcgtccaagggggctgtttcctgttcccagctctgcacagtgaaacccacccccaggatcactgtgcctgtgacacaaggggaaaacaggagcctttccagagagtatctttcagagccccagtcttgccagcaagtccacaaatcaaagaattctttctggctggtcagcccagctcggcttatgcaggctttccacacacctggactgtgaggagtcctgcggggaagcgattggtgtagctgtaacttggcgttccccagacgtattgtttgcacgatgccttccagcatcccacggcgctgctgctgggggcagattggcctggggaggcagcacttgctctccagctcatctgggttgcttttccccgcagtggatatcacaggctaaaggagggggcagtccccaccatatttgagtctttctccaagttgcgccggacaaccaagaccaaaggacacagttacccacctggcccccctgaagtcagccggctcagacgatgcaggaagcgctgctccgagggccgagggcccacaactccattttctccacctccacctgctgatgtcacctgctttcctgtggaagaggcctcagcacctgccactttgccggcctccccagctgggaggctggagcctggccttagcagccccttttcagacctactgggccccttgggtgcccaggcagatgaagcaggctgcagcgcccagccttcaccagagcggcagccctcccctctcgaaccacggccagtctccccctcagcgtatatgctgcgcctgcccccacccgccggagcctacatccagaatgaacacagctaccaggtgggcagcgccttactctggaagcggcgagccgaggcagcccttgatgcccttgacaaggcccagcgccagctgcaggcctgcaagcggcgggagcagcggctgcggttgagactgaccaagctgcagcaggagcgggcacgggagaagcgggcacaggcagatgcccgccagactctgaaggagcatgtgcaggactttgccatgcagctgagcagcagcatggcctgaggggctgctggactgaccgaggggctgcccagcaagactgcagcctcttcctccctcagatcccaccagacccaccaggtgccataataaagcggattctagacggaa

SEQ ID NO: 436149 - DNA, 2805 bp, Homo sapiens
caacaaagaaggaggagaaggaggaagaaggagaagaaaagaaaaaaaaaagtcgtcaaaggatattaattgtcgatagataacagataatgccaaaaaatatagaagcaattcttaaaacacagtgttggaactggtccacagctctgatttttaatgagctcccatttctgaggccaatataaacttcattctatgctgcccatctctgacaggtgggcattaactaccagccccccacggtggtccctgtgggagacctggccaaagtgcagcgggcggtgtgcatgctgagcaacaccacggccatcacggaggcctgggcctgcctggaccataagttcggccaagtgcgccttagtgcactggtacgtgggggagggcatggcagtgggggaattctccgaggcccgcgaggatctggcagctctggaggattatgaagatgtgggcatggattccgtggaagctgaggctgaagaaggcgaagaatagtgaggggagggtgcggcaggcaaccatccctctgtattccccaccataacgctaggagagctaattacctattaaaatttccgtattgcaaattagccgggcgtggtggcgggcgcttgtagtcccagctactgtggagggtgaggcagccgaatggcgtgaacccgggaggcggagtttacagtgagccgagatcgcgccactgcactccagcctgggcgacagagcgagactccggtctcaggaaaataataataaaataaaaaataaaatttctgtattgcgatactgtctttctcctgtgttgtactttgagagattcctcctccagataaccctccctgaagtccacctccccagtacgagagtgagtgcgggctctggtttttgtcgggttctttcgtgcaagcgtcccaggccccgttttatttcttccgtcagaggtcattccgaggcgagctgccgcccctgcggctttcgaggctcccaggacactgccgctttccgctcccgggccgctcccgaacgctggggccgctccatcgtgccggggtgtttacggagaaaagtgaggcctgagcggacgaaagagaagcccacgtgggcgacaatactggtagtccagggagctgggacgacgcgggcgcgtcagaaactcgcacgctcgcgccgcttactaacccagctagctaggacctcgccccgccccgccccggtggcgggggcacctccggctctccagtctctatggtaccaacttccggcgcgcgctacccctcgcgagacttcggcggcgcagcaatggccagagcgtgagtgccgctgacagaagtcaagagaatcggctgggacggggttggggcgacaacgggccgggggggacccgacaggccagagccccttggggaggagcggcggctggaggcgcgaggctcctccggatgcccggagagccgcttgcgacttaactcccgcctctttcccagatgccgcgtcactgctccgccgccggctgctgcacacgggacacgcgcgagacgcgcaaccgcggcatctccttccacaggtcagcgcgcgtgcgccgcgggctcacgtgcgcatgcgctagttgttgctcgcctcgggtcgcaactgcgtagaggcttcgcgcctttctcagatactgaggaggcttgaacctgtgggtgggaggtgaagcggaacggtcccggcgggactgaatgcagtcgggaaggggaggacgggaagtctagccggcttggacccgccccactctgttacctgccagatgacgctgaggaaactgcttttcttctcgaggcctccgttgcctcgtctgtgcccgggcggtgacttcccaagaaggacaacccgaggcgaggcttgtggctggccaactgccagcggctggaccccagcggccagggcctgtgggacccggcatccgagtacatctacttctgctccaaacactttgaggaggactgctttgagctggtgggaatcagtggatatcacaggctaaaggagggggcagtccccaccatatttgagtctttctccaagttgcgccggacaaccaagaccaaaggacacagttacccacctggcccccctgaagtcagccggctcagacgatgcaggaagcgctgctccgagggccgagggcccacaactccattttctccacctccacctgctgatgtcacctgctttcctgtggaagaggcctcagcacctgccactttgccggcctccccagctgggaggctggagcctggccttagcagccccttttcagacctactgggccccttgggtgcccaggcagatgaagcaggctgcagcgcccagccttcaccagagcggcagccctcccctctcgaaccacggccagtctccccctcagcgtatatgctgcgcctgcccccacccgccggagcctacatccagaatgaacacagctaccaggtgggcagcgccttactctggaagcggcgagccgaggcagcccttgatgcccttgacaaggcccagcgccagctgcaggcctgcaagcggcgggagcagcggctgcggttgagactgaccaagctgcagcaggagcgggcacgggagaagcgggcacaggcagatgcccgccagactctgaaggagcatgtgcaggactttgccatgcagctgagcagcagcatggcctgaggggctgctggactgaccgaggggctgcccagcaagactgcagcctcttcctccctcagatcccaccagacccaccaggtgccataataaagcggattctagacggaa

SEQ ID NO: 436150 - DNA, 2636 bp, Homo sapiens
caacaaagaaggaggagaaggaggaagaaggagaagaaaagaaaaaaaaaagtcgtcaaaggatattaattgtcgatagataacagataatgccaaaaaatatagaagcaattcttaaaacacagtgttggaactggtccacagctctgatttttaatgagctcccatttctgaggccaatataaacttcattctatgctgcccatctctgacaggtgggcattaactaccagccccccacggtggtccctgtgggagacctggccaaagtgcagcgggcggtgtgcatgctgagcaacaccacggccatcacggaggcctgggcctgcctggaccataagttcggccaagtgcgccttagtgcactggtacgtgggggagggcatggcagtgggggaattctccgaggcccgcgaggatctggcagctctggaggattatgaagatgtgggcatggattccgtggaagctgaggctgaagaaggcgaagaatagtgaggggagggtgcggcaggcaaccatccctctgtattccccaccataacgctaggagagctaattacctattaaaatttccgtattgcaaattagccgggcgtggtggcgggcgcttgtagtcccagctactgtggagggtgaggcagccgaatggcgtgaacccgggaggcggagtttacagtgagccgagatcgcgccactgcactccagcctgggcgacagagcgagactccggtctcaggaaaataataataaaataaaaaataaaatttctgtattgcgatactgtctttctcctgtgttgtactttgagagattcctcctccagataaccctccctgaagtccacctccccagtacgagagtgagtgcgggctctggtttttgtcgggttctttcgtgcaagcgtcccaggccccgttttatttcttccgtcagaggtcattccgaggcgagctgccgcccctgcggctttcgaggctcccaggacactgccgctttccgctcccgggccgctcccgaacgctggggccgctccatcgtgccggggtgtttacggagaaaagtgaggcctgagcggacgaaagagaagcccacgtgggcgacaatactggtagtccagggagctgggacgacgcgggcgcgtcagaaactcgcacgctcgcgccgcttactaacccagctagctaggacctcgccccgccccgccccggtggcgggggcacctccggctctccagtctctatggtaccaacttccggcgcgcgctacccctcgcgagacttcggcggcgcagcaatggccagagcgtgagtgccgctgacagaagtcaagagaatcggctgggacggggttggggcgacaacgggccgggggggacccgacaggccagagccccttggggaggagcggcggctggaggcgcgaggctcctccggatgcccggagagccgcttgcgacttaactcccgcctctttcccagatgccgcgtcactgctccgccgccggctgctgcacacgggacacgcgcgagacgcgcaaccgcggcatctccttccacaggtcagcgcgcgtgcgccgcgggctcacgtgcgcatgcgctagttgttgctcgcctcgggtcgcaactgcgtagaggcttcgcgcctttctcagatactgaggaggcttgaacctgtgggtgggaggtgaagcggaacggtcccggcgggactgaatgcagtcgggaaggggaggacgggaagtctagccggcttggacccgccccactctgttacctgccagatgacgctgaggaaactgcttttcttctcgaggcctccgttgcctcgtctgtgcccgggcggtggtgcttacccggcggggtcgcagggaggtctcgtggcggcgcgtgttgggtctgcgtttcccctctggggtgcttgggcagcatgagcccagggctgtggacagcctggtgctcacgggtttgtggctccacagacttcccaagaaggacaacccgaggcgaggcttgtggctggccaactgccagcggctggaccccagcggccagggcctgtgggacccggcatccgagtacatctacttctgctccaaacactttgaggaggactgctttgagctggtgggaatcagtggatatcacaggctaaaggagggggcagtccccaccatatttgagtctttctccaagttgcgccggacaaccaagaccaaaggacacagttacccacctggcccccctgaagtcagccggctcagacgatgcaggaagcgctgctccgagggccgagggcccacaactccattttctccacctccacctgctgatgtcacctgctttcctgtggaagaggcctcagcacctgccactttgccggcctccccagctgggaggctggagcctggccttagcagccccttttcagacctactgggccccttgggtgcccaggcagatgcccgccagactctgaaggagcatgtgcaggactttgccatgcagctgagcagcagcatggcctgaggggctgctggactgaccgaggggctgcccagcaagactgcagcctcttcctccctcagatcccaccagacccaccaggtgccataataaagcggattctagacggaa

SEQ ID NO: 436151 - DNA, 2484 bp, Homo sapiens
caacaaagaaggaggagaaggaggaagaaggagaagaaaagaaaaaaaaaagtcgtcaaaggatattaattgtcgatagataacagataatgccaaaaaatatagaagcaattcttaaaacacagtgttggaactggtccacagctctgatttttaatgagctcccatttctgaggccaatataaacttcattctatgctgcccatctctgacaggtgggcattaactaccagccccccacggtggtccctgtgggagacctggccaaagtgcagcgggcggtgtgcatgctgagcaacaccacggccatcacggaggcctgggcctgcctggaccataagttcggccaagtgcgccttagtgcactggtacgtgggggagggcatggcagtgggggaattctccgaggcccgcgaggatctggcagctctggaggattatgaagatgtgggcatggattccgtggaagctgaggctgaagaaggcgaagaatagtgaggggagggtgcggcaggcaaccatccctctgtattccccaccataacgctaggagagctaattacctattaaaatttccgtattgcaaattagccgggcgtggtggcgggcgcttgtagtcccagctactgtggagggtgaggcagccgaatggcgtgaacccgggaggcggagtttacagtgagccgagatcgcgccactgcactccagcctgggcgacagagcgagactccggtctcaggaaaataataataaaataaaaaataaaatttctgtattgcgatactgtctttctcctgtgttgtactttgagagattcctcctccagataaccctccctgaagtccacctccccagtacgagagtgagtgcgggctctggtttttgtcgggttctttcgtgcaagcgtcccaggccccgttttatttcttccgtcagaggtcattccgaggcgagctgccgcccctgcggctttcgaggctcccaggacactgccgctttccgctcccgggccgctcccgaacgctggggccgctccatcgtgccggggtgtttacggagaaaagtgaggcctgagcggacgaaagagaagcccacgtgggcgacaatactggtagtccagggagctgggacgacgcgggcgcgtcagaaactcgcacgctcgcgccgcttactaacccagctagctaggacctcgccccgccccgccccggtggcgggggcacctccggctctccagtctctatggtaccaacttccggcgcgcgctacccctcgcgagacttcggcggcgcagcaatggccagagcgtgagtgccgctgacagaagtcaagagaatcggctgggacggggttggggcgacaacgggccgggggggacccgacaggccagagccccttggggaggagcggcggctggaggcgcgaggctcctccggatgcccggagagccgcttgcgacttaactcccgcctctttcccagatgccgcgtcactgctccgccgccggctgctgcacacgggacacgcgcgagacgcgcaaccgcggcatctccttccacaggtcagcgcgcgtgcgccgcgggctcacgtgcgcatgcgctagttgttgctcgcctcgggtcgcaactgcgtagaggcttcgcgcctttctcagatactgaggaggcttgaacctgtgggtgggaggtgaagcggaacggtcccggcgggactgaatgcagtcgggaaggggaggacgggaagtctagccggcttggacccgccccactctgttacctgccagatgacgctgaggaaactgcttttcttctcgaggcctccgttgcctcacttcccaagaaggacaacccgaggcgaggcttgtggctggccaactgccagcggctggaccccagcggccagggcctgtgggacccggcatccgagtacatctacttctgctccaaacactttgaggaggactgctttgagctggtgggaatcagtggatatcacaggctaaaggagggggcagtccccaccatatttgagtctttctccaagttgcgccggacaaccaagaccaaaggacacagttacccacctggcccccctgaagtcagccggctcagacgatgcaggaagcgctgctccgagggccgagggcccacaactccattttctccacctccacctgctgatgtcacctgctttcctgtggaagaggcctcagcacctgccactttgccggcctccccagctgggaggctggagcctggccttagcagccccttttcagacctactgggccccttgggtgcccaggcagatgcccgccagactctgaaggagcatgtgcaggactttgccatgcagctgagcagcagcatggcctgaggggctgctggactgaccgaggggctgcccagcaagactgcagcctcttcctccctcagatcccaccagacccaccaggtgccataataaagcggattctagacggaa

SEQ ID NO: 436152 - DNA, 2208 bp, Homo sapiens
caacaaagaaggaggagaaggaggaagaaggagaagaaaagaaaaaaaaaagtcgtcaaaggatattaattgtcgatagataacagataatgccaaaaaatatagaagcaattcttaaaacacagtgttggaactggtccacagctctgatttttaatgagctcccatttctgaggccaatataaacttcattctatgctgcccatctctgacaggtgggcattaactaccagccccccacggtggtccctgtgggagacctggccaaagtgcagcgggcggtgtgcatgctgagcaacaccacggccatcacggaggcctgggcctgcctggaccataagttcggccaagtgcgccttagtgcactggtacgtgggggagggcatggcagtgggggaattctccgaggcccgcgaggatctggcagctctggaggattatgaagatgtgggcatggattccgtggaagctgaggctgaagaaggcgaagaatagtgaggggagggtgcggcaggcaaccatccctctgtattccccaccataacgctaggagagctaattacctattaaaatttccgtattgcaaattagccgggcgtggtggcgggcgcttgtagtcccagctactgtggagggtgaggcagccgaatggcgtgaacccgggaggcggagtttacagtgagccgagatcgcgccactgcactccagcctgggcgacagagcgagactccggtctcaggaaaataataataaaataaaaaataaaatttctgtattgcgatactgtctttctcctgtgttgtactttgagagattcctcctccagataaccctccctgaagtccacctccccagtacgagagtgagtgcgggctctggtttttgtcgggttctttcgtgcaagcgtcccaggccccgttttatttcttccgtcagaggtcattccgaggcgagctgccgcccctgcggctttcgaggctcccaggacactgccgctttccgctcccgggccgctcccgaacgctggggccgctccatcgtgccggggtgtttacggagaaaagtgaggcctgagcggacgaaagagaagcccacgtgggcgacaatactggtagtccagggagctgggacgacgcgggcgcgtcagaaactcgcacgctcgcgccgcttactaacccagctagctaggacctcgccccgccccgccccggtggcgggggcacctccggctctccagtctctatggtaccaacttccggcgcgcgctacccctcgcgagacttcggcggcgcagcaatggccagagcgtgagtgccgctgacagaagtcaagagaatcggctgggacggggttggggcgacaacgggccgggggggacccgacaggccagagccccttggggaggagcggcggctggaggcgcgaggctcctccggatgcccggagagccgcttgcgacttaactcccgcctctttcccagatgccgcgtcactgctccgccgccggctgctgcacacgggacacgcgcgagacgcgcaaccgcggcatctccttccacaggtcagcgcgcgtgcgccgcgggctcacgtgcgcatgcgctagttgttgctcgcctcgggtcgcaactgcgtagaggcttcgcgcctttctcagatactgaggaggcttgaacctgtgggtgggaggtgaagcggaacggtcccggcgggactgaatgcagtcgggaaggggaggacgggaagtctagccggcttggacccgccccactctgttacctgccagatgacgctgaggaaactgcttttcttctcgaggcctccgttgcctcgtctgtgcccgggcggtggtgcttacccggcggggtcgcagggaggtctcgtggcggcgcgtgttgggtctgcgtttcccctctggggtgcttgggcagcatgagcccagggctgtggacagcctggtgctcacgggtttgtggctccacagacttcccaagaaggacaacccgaggcgaggcttgtggctggccaactgccagcggctggaccccagcggccagggcctgtgggacccggcatccgagtacatctacttctgctccaaacactttgaggaggatgaccgaggggctgcccagcaagactgcagcctcttcctccctcagatcccaccagacccaccaggtgccataataaagcggattctagacggaa

SEQ ID NO: 436153 - DNA, 3407 bp, Homo sapiens
caacaaagaaggaggagaaggaggaagaaggagaagaaaagaaaaaaaaaagtcgtcaaaggatattaattgtcgatagataacagataatgccaaaaaatatagaagcaattcttaaaacacagtgttggaactggtccacagctctgatttttaatgagctcccatttctgaggccaatataaacttcattctatgctgcccatctctgacaggtgggcattaactaccagccccccacggtggtccctgtgggagacctggccaaagtgcagcgggcggtgtgcatgctgagcaacaccacggccatcacggaggcctgggcctgcctggaccataagttcggccaagtgcgccttagtgcactggtacgtgggggagggcatggcagtgggggaattctccgaggcccgcgaggatctggcagctctggaggattatgaagatgtgggcatggattccgtggaagctgaggctgaagaaggcgaagaatagtgaggggagggtgcggcaggcaaccatccctctgtattccccaccataacgctaggagagctaattacctattaaaatttccgtattgcaaattagccgggcgtggtggcgggcgcttgtagtcccagctactgtggagggtgaggcagccgaatggcgtgaacccgggaggcggagtttacagtgagccgagatcgcgccactgcactccagcctgggcgacagagcgagactccggtctcaggaaaataataataaaataaaaaataaaatttctgtattgcgatactgtctttctcctgtgttgtactttgagagattcctcctccagataaccctccctgaagtccacctccccagtacgagagtgagtgcgggctctggtttttgtcgggttctttcgtgcaagcgtcccaggccccgttttatttcttccgtcagaggtcattccgaggcgagctgccgcccctgcggctttcgaggctcccaggacactgccgctttccgctcccgggccgctcccgaacgctggggccgctccatcgtgccggggtgtttacggagaaaagtgaggcctgagcggacgaaagagaagcccacgtgggcgacaatactggtagtccagggagctgggacgacgcgggcgcgtcagaaactcgcacgctcgcgccgcttactaacccagctagctaggacctcgccccgccccgccccggtggcgggggcacctccggctctccagtctctatggtaccaacttccggcgcgcgctacccctcgcgagacttcggcggcgcagcaatggccagagcgtgagtgccgctgacagaagtcaagagaatcggctgggacggggttggggcgacaacgggccgggggggacccgacaggccagagccccttggggaggagcggcggctggaggcgcgaggctcctccggatgcccggagagccgcttgcgacttaactcccgcctctttcccagatgccgcgtcactgctccgccgccggctgctgcacacgggacacgcgcgagacgcgcaaccgcggcatctccttccacaggtcagcgcgcgtgcgccgcgggctcacgtgcgcatgcgctagttgttgctcgcctcgggtcgcaactgcgtagaggcttcgcgcctttctcagatactgaggaggcttgaacctgtgggtgggaggtgaagcggaacggtcccggcgggactgaatgcagtcgggaaggggaggacgggaagtctagccggcttggacccgccccactctgttacctgccagatgacgctgaggaaactgcttttcttctcgaggcctccgttgcctcgtctgtgcccgggcggtggtgcttacccggcggggtcgcagggaggtctcgtggcggcgcgtgttgggtctgcgtttcccctctggggtgcttgggcagcatgagcccagggctgtggacagcctggtgctcacgggtttgtggctccacagacttcccaagaaggacaacccgaggcgaggcttgtggctggccaactgccagcggctggaccccagcggccagggcctgtgggacccggcatccgagtacatctacttctgctccaaacactttgaggaggactgctttgagctggtgggaatcaggtgggcctccctgccggccgacgctggggtaggatgtggggctcccggcggactgggacagctgcaggtcatggaagtcccttgagcagcctgcgtccaagggggctgtttcctgttcccagctctgcacagtgaaacccacccccaggatcactgtgcctgtgacacaaggggaaaacaggagcctttccagagagtatctttcagagccccagtcttgccagcaagtccacaaatcaaagaattctttctggctggtcagcccagctcggcttatgcaggctttccacacacctggactgtgaggagtcctgcggggaagcgattggtgtagctgtaacttggcgttccccagacgtattgtttgcacgatgccttccagcatcccacggcgctgctgctgggggcagattggcctggggaggcagcacttgctctccagctcatctgggttgcttttccccgcagtggatatcacaggctaaaggagggggcagtccccaccatatttgagtctttctccaagttgcgccggacaaccaagaccaaaggacacagttacccacctggcccccctgaagtcagccggctcagacgatgcaggaagcgctgctccgagggccgagggcccacaactccattttctccacctccacctgctgatgtcacctgctttcctgtggaagaggcctcagcacctgccactttgccggcctccccagctgggaggctggagcctggccttagcagccccttttcagacctactgggccccttgggtgcccaggcagatgaagcaggctgcagcgcccagccttcaccagagcggcagccctcccctctcgaaccacggccagtctccccctcagcgtatatgctgcgcctgcccccacccgccggagcctacatccagaatgaacacagctaccaggtgggcagcgccttactctggaagcggcgagccgaggcagcccttgatgcccttgacaaggcccagcgccagctgcaggcctgcaagcggcgggagcagcggctgcggttgagactgaccaagctgcagcaggagcgggcacgggagaagcgggcacaggcagatgcccgccagactctgaaggagcatgtgcaggactttgccatgcagctgagcagcagcatggcctgaggggctgctggactgaccgaggggctgcccagcaagactgcagcctcttcctccctcagatcccaccagacccaccaggtgccataataaagcggattctagacggaa

SEQ ID NO: 436154 - DNA, 2939 bp, Homo sapiens
caacaaagaaggaggagaaggaggaagaaggagaagaaaagaaaaaaaaaagtcgtcaaaggatattaattgtcgatagataacagataatgccaaaaaatatagaagcaattcttaaaacacagtgttggaactggtccacagctctgatttttaatgagctcccatttctgaggccaatataaacttcattctatgctgcccatctctgacaggtgggcattaactaccagccccccacggtggtccctgtgggagacctggccaaagtgcagcgggcggtgtgcatgctgagcaacaccacggccatcacggaggcctgggcctgcctggaccataagttcggccaagtgcgccttagtgcactggtacgtgggggagggcatggcagtgggggaattctccgaggcccgcgaggatctggcagctctggaggattatgaagatgtgggcatggattccgtggaagctgaggctgaagaaggcgaagaatagtgaggggagggtgcggcaggcaaccatccctctgtattccccaccataacgctaggagagctaattacctattaaaatttccgtattgcaaattagccgggcgtggtggcgggcgcttgtagtcccagctactgtggagggtgaggcagccgaatggcgtgaacccgggaggcggagtttacagtgagccgagatcgcgccactgcactccagcctgggcgacagagcgagactccggtctcaggaaaataataataaaataaaaaataaaatttctgtattgcgatactgtctttctcctgtgttgtactttgagagattcctcctccagataaccctccctgaagtccacctccccagtacgagagtgagtgcgggctctggtttttgtcgggttctttcgtgcaagcgtcccaggccccgttttatttcttccgtcagaggtcattccgaggcgagctgccgcccctgcggctttcgaggctcccaggacactgccgctttccgctcccgggccgctcccgaacgctggggccgctccatcgtgccggggtgtttacggagaaaagtgaggcctgagcggacgaaagagaagcccacgtgggcgacaatactggtagtccagggagctgggacgacgcgggcgcgtcagaaactcgcacgctcgcgccgcttactaacccagctagctaggacctcgccccgccccgccccggtggcgggggcacctccggctctccagtctctatggtaccaacttccggcgcgcgctacccctcgcgagacttcggcggcgcagcaatggccagagcgtgagtgccgctgacagaagtcaagagaatcggctgggacggggttggggcgacaacgggccgggggggacccgacaggccagagccccttggggaggagcggcggctggaggcgcgaggctcctccggatgcccggagagccgcttgcgacttaactcccgcctctttcccagatgccgcgtcactgctccgccgccggctgctgcacacgggacacgcgcgagacgcgcaaccgcggcatctccttccacaggtcagcgcgcgtgcgccgcgggctcacgtgcgcatgcgctagttgttgctcgcctcgggtcgcaactgcgtagaggcttcgcgcctttctcagatactgaggaggcttgaacctgtgggtgggaggtgaagcggaacggtcccggcgggactgaatgcagtcgggaaggggaggacgggaagtctagccggcttggacccgccccactctgttacctgccagatgacgctgaggaaactgcttttcttctcgaggcctccgttgcctcgtctgtgcccgggcggtggtgcttacccggcggggtcgcagggaggtctcgtggcggcgcgtgttgggtctgcgtttcccctctggggtgcttgggcagcatgagcccagggctgtggacagcctggtgctcacgggtttgtggctccacagacttcccaagaaggacaacccgaggcgaggcttgtggctggccaactgccagcggctggaccccagcggccagggcctgtgggacccggcatccgagtacatctacttctgctccaaacactttgaggaggactgctttgagctggtgggaatcagtggatatcacaggctaaaggagggggcagtccccaccatatttgagtctttctccaagttgcgccggacaaccaagaccaaaggacacagttacccacctggcccccctgaagtcagccggctcagacgatgcaggaagcgctgctccgagggccgagggcccacaactccattttctccacctccacctgctgatgtcacctgctttcctgtggaagaggcctcagcacctgccactttgccggcctccccagctgggaggctggagcctggccttagcagccccttttcagacctactgggccccttgggtgcccaggcagatgaagcaggctgcagcgcccagccttcaccagagcggcagccctcccctctcgaaccacggccagtctccccctcagcgtatatgctgcgcctgcccccacccgccggagcctacatccagaatgaacacagctaccaggtgggcagcgccttactctggaagcggcgagccgaggcagcccttgatgcccttgacaaggcccagcgccagctgcaggcctgcaagcggcgggagcagcggctgcggttgagactgaccaagctgcagcaggagcgggcacgggagaagcgggcacaggcagatgcccgccagactctgaaggagcatgtgcaggactttgccatgcagctgagcagcagcatggcctgaggggctgctggactgaccgaggggctgcccagcaagactgcagcctcttcctccctcagatcccaccagacccaccaggtgccataataaagcggattctagacggaa

SEQ ID NO: 436155 - DNA, 2828 bp, Homo sapiens
caacaaagaaggaggagaaggaggaagaaggagaagaaaagaaaaaaaaaagtcgtcaaaggatattaattgtcgatagataacagataatgccaaaaaatatagaagcaattcttaaaacacagtgttggaactggtccacagctctgatttttaatgagctcccatttctgaggccaatataaacttcattctatgctgcccatctctgacaggtgggcattaactaccagccccccacggtggtccctgtgggagacctggccaaagtgcagcgggcggtgtgcatgctgagcaacaccacggccatcacggaggcctgggcctgcctggaccataagttcggccaagtgcgccttagtgcactggtacgtgggggagggcatggcagtgggggaattctccgaggcccgcgaggatctggcagctctggaggattatgaagatgtgggcatggattccgtggaagctgaggctgaagaaggcgaagaatagtgaggggagggtgcggcaggcaaccatccctctgtattccccaccataacgctaggagagctaattacctattaaaatttccgtattgcaaattagccgggcgtggtggcgggcgcttgtagtcccagctactgtggagggtgaggcagccgaatggcgtgaacccgggaggcggagtttacagtgagccgagatcgcgccactgcactccagcctgggcgacagagcgagactccggtctcaggaaaataataataaaataaaaaataaaatttctgtattgcgatactgtctttctcctgtgttgtactttgagagattcctcctccagataaccctccctgaagtccacctccccagtacgagagtgagtgcgggctctggtttttgtcgggttctttcgtgcaagcgtcccaggccccgttttatttcttccgtcagaggtcattccgaggcgagctgccgcccctgcggctttcgaggctcccaggacactgccgctttccgctcccgggccgctcccgaacgctggggccgctccatcgtgccggggtgtttacggagaaaagtgaggcctgagcggacgaaagagaagcccacgtgggcgacaatactggtagtccagggagctgggacgacgcgggcgcgtcagaaactcgcacgctcgcgccgcttactaacccagctagctaggacctcgccccgccccgccccggtggcgggggcacctccggctctccagtctctatggtaccaacttccggcgcgcgctacccctcgcgagacttcggcggcgcagcaatggccagagcgtgagtgccgctgacagaagtcaagagaatcggctgggacggggttggggcgacaacgggccgggggggacccgacaggccagagccccttggggaggagcggcggctggaggcgcgaggctcctccggatgcccggagagccgcttgcgacttaactcccgcctctttcccagatgccgcgtcactgctccgccgccggctgctgcacacgggacacgcgcgagacgcgcaaccgcggcatctccttccacaggtcagcgcgcgtgcgccgcgggctcacgtgcgcatgcgctagttgttgctcgcctcgggtcgcaactgcgtagaggcttcgcgcctttctcagatactgaggaggcttgaacctgtgggtgggaggtgaagcggaacggtcccggcgggactgaatgcagtcgggaaggggaggacgggaagtctagccggcttggacccgccccactctgttacctgccagatgacgctgaggaaactgcttttcttctcgaggcctccgttgcctcgtctgtgcccgggcggtggtgcttacccggcggggtcgcagacttcccaagaaggacaacccgaggcgaggcttgtggctggccaactgccagcggctggaccccagcggccagggcctgtgggacccggcatccgagtacatctacttctgctccaaacactttgaggaggactgctttgagctggtgggaatcagtggatatcacaggctaaaggagggggcagtccccaccatatttgagtctttctccaagttgcgccggacaaccaagaccaaaggacacagttacccacctggcccccctgaagtcagccggctcagacgatgcaggaagcgctgctccgagggccgagggcccacaactccattttctccacctccacctgctgatgtcacctgctttcctgtggaagaggcctcagcacctgccactttgccggcctccccagctgggaggctggagcctggccttagcagccccttttcagacctactgggccccttgggtgcccaggcagatgaagcaggctgcagcgcccagccttcaccagagcggcagccctcccctctcgaaccacggccagtctccccctcagcgtatatgctgcgcctgcccccacccgccggagcctacatccagaatgaacacagctaccaggtgggcagcgccttactctggaagcggcgagccgaggcagcccttgatgcccttgacaaggcccagcgccagctgcaggcctgcaagcggcgggagcagcggctgcggttgagactgaccaagctgcagcaggagcgggcacgggagaagcgggcacaggcagatgcccgccagactctgaaggagcatgtgcaggactttgccatgcagctgagcagcagcatggcctgaggggctgctggactgaccgaggggctgcccagcaagactgcagcctcttcctccctcagatcccaccagacccaccaggtgccataataaagcggattctagacggaa

SEQ ID NO: 436156 - DNA, 625 bp, Homo sapiens
cgccagctcccagcccgggaggacggcaaagtggcaggtgctgaggcctcttccacaggaaagcaggtgacatcagcaggtggagctggagcctggccttagcagccccttttcagacctactgggccccttgggtgcccaggcagatgaagcaggctgcagcgcccagccttcaccagagcggcagccctcccctctcgaaccacggccagtctccccctcagcgtatatgctgcgcctgcccccacccgccggagcctacatccagaatgaacacagctaccaggtgggcagcgccttactctggaagcggcgagccgaggcagcccttgatgcccttgacaaggcccagcgccagctgcaggcctgcaagcggcgggagcagcggctgcggttgagactgaccaagctgcagcaggagcgggcacgggagaagcgggcacaggcagatgcccgccagactctgaaggagcatgtgcaggactttgccatgcagctgagcagcagcatggcctgaggggctgctggactgaccgaggggctgcccagcaagactgcagcctcttcctccctcagatcccaccagacccaccaggtgccataataaagcggattctagacggaa

SEQ ID NO: 436157 - DNA, 3115 bp, Homo sapiens
gctacggcgagagcatagtagcgaactcggagatttgtcttagccggtcaaccggaagccagtgttccctgggtcccggaggtcggtacggaatcatcgggcgggtacatgccaagtactcaggtggacctctgtatgcacagtcactgaatataggacgcgagagtcaagagcgtaggacagtcctgtacattgagcaccgctatgtctgctctgagtgcaaccagctgtatggatcactggaagaggtgcttatgcaccaaaactcccacgtgccccagcagcactttgagctggtgggcgtggctgatcccggagtcactgtggccacagacacagcttcaggcacgggcctctatcagacccttgtgcaggagagccagtaccagtgcctggagtgtggtcaactgctgatgtcacccagccagctcctggagcaccaggagctgcacctgaagatgatggcaccccaggaggcagtgccagctgagccatcacctaaggcaccacccctgagctccagcaccatccactacgagtgtgtggattgcaaggctctctttgccagccaggagctctggctgaaccaccggcagacgcacctccgggccacacccaccaaggctcctgcccctgttgtcctggggtccccagttgttctagggcctcctgtgggccaggcccgagtggctgtggagcactcataccgaaaggcagaagagggtggggaaggggcgactgtcccatctgccgctgccaccaccactgaggtagtgactgaggtggagctgctcctctacaagtgctctgagtgctcccagctcttccagctgccggcggatttcctggagcaccaggccactcacttccctgctcctgtacccgagtctcaggagcctgccttacagcaggaggtgcaggcctcgtcacctgcagaggtgcctgtgtctcagcctgaccccttgccagcttctgaccacagttacgagctgcgcaatggtgaagccattgggcgggatcgccgggggcgcagggcccggaggaacaacagtggagaagcaggcggggcagccacacaggagctcttctgctcagcctgtgaccagctctttctctcaccccaccagctacagcagcacctgcggagtcaccgggagggcgtctttaagtgccccctgtgcagtcgtgtcttccctagcccttccagtctggaccagcaccttggagaccatagcagcgagtcacacttcctgtgtgtagactgtggcctggccttcggcacagaggccctcctcctggcccaccggcgagcccacaccccgaatcctctgcattcatgtccatgtgggaagacctttgtcaaccttaccaagttcctttatcaccggcgtactcatggggtagggggtgtccctctgcccacaacaccagtcccaccagaggaacctgtcattggtttccctgagccagccccagcagagactggagagccagaggcccctgagccccctgtgtctgaggagacctcagcagggcccgctgccccaggcacctaccgctgcctcctgtgcagccgtgaatttggaaaggccttgcagctgacccggcaccaacgttttgtgcatcggctggagcggcgccataaatgcagcatttgtggcaagatgttcaagaagaagtctcacgtgcgtaaccacctgcgcacacacacaggggagcggcccttcccctgccctgactgctccaagcccttcaactcacctgccaacctggcccgccaccggctcacacacacaggagagcggccctaccggtgtggggactgtggcaaggctttcacgcaaagctccacactgaggcagcaccgcttggtgcatgcccagcacttcccctaccgctgccaggaatgtggggtgcgttttcaccgtccttaccgcctgctcatgcaccgctaccatcacacaggtgaatacccctacaagtgtcgcgagtgcccccgctccttcttgctgcgtcggctgctggaggtgcaccagctcgtggtccatgccgggcgccagccccaccgctgcccatcctgtggggctgccttcccctcctcactgcggctccgggagcaccgctgtgcagccgctgctgcccaggccccacggcgctttgagtgtggcacctgtggcaagaaagtgggctcagctgctcgactgcaggcacacgaggcggcccatgcagctgctgggcctggagaggtcctggctaaggagccccctgcccctcgagccccacgggccactcgtgcaccagttgcctctccagcagcccttggaagcactgctacagcatcccctgcggcccctgcccgccgccggggtctagagtgcagcgagtgcaagaagctgttcagcacagagacgtcactgcaggtgcaccggcgcatccacacaggtgagcggccatacccatgtccagactgtggcaaagcgttccgtcagagtacccacctgaaagaccaccggcgcctgcacacaggtgagcggccctttgcctgtgaagtgtgtggcaaggcctttgccatctccatgcgcctggcagaacatcgccgcatccacacaggcgaacgaccctactcctgccctgactgtggcaagagctaccgctccttctccaacctctggaagcaccgcaagacccatcagcagcagcatcaggcagctgtgcggcagcagctggcagaggcggaggctgccgttggcctggccgtcatggagactgctgtggaggcgctacccctggtggaagccattgagatctaccctctggccgaggctgagggggtccagatcagtggctgactctgcccgacttcctctttggcacctccattccctgttgctgaaggccctccagcatccccttaagcatctgtacatactgtgtcccttcctcttcccatccccaccaccttgtaagttctaaattggatttattctctcgtgaggggggtgctctggggtccttgacacacataaaggtgcccccccaccttccacctcttagcactggtgaccccaaaaatgaaaccatcaataaagactgagttgccagcaaaaaaaaaaat

SEQ ID NO: 436158 - DNA, 3033 bp, Homo sapiens
accaacggccgacccggcgcgcgggcagccgggcgggggccgggctggagcggcggcccagggccttgctgccgccatgactgaggaatcagaggagacagtcctgtacattgagcaccgctatgtctgctctgagtgcaaccagctgtatggatcactggaagaggtgcttatgcaccaaaactcccacgtgccccagcagcactttgagctggtgggcgtggctgatcccggagtcactgtggccacagacacagcttcaggcacgggcctctatcagacccttgtgcaggagagccagtaccagtgcctggagtgtggtcaactgctgatgtcacccagccagctcctggagcaccaggagctgcacctgaagatgatggcaccccaggaggcagtgccagctgagccatcacctaaggcaccacccctgagctccagcaccatccactacgagtgtgtggattgcaaggctctctttgccagccaggagctctggctgaaccaccggcagacgcacctccgggccacacccaccaaggctcctgcccctgttgtcctggggtccccagttgttctagggcctcctgtgggccaggcccgagtggctgtggagcactcataccgaaaggcagaagagggtggggaaggggcgactgtcccatctgccgctgccaccaccactgaggtagtgactgaggtggagctgctcctctacaagtgctctgagtgctcccagctcttccagctgccggcggatttcctggagcaccaggccactcacttccctgctcctgtacccgagtctcaggagcctgccttacagcaggaggtgcaggcctcgtcacctgcagaggtgcctgtgtctcagcctgaccccttgccagcttctgaccacagttacgagctgcgcaatggtgaagccattgggcgggatcgccgggggcgcagggcccggaggaacaacagtggagaagcaggcggggcagccacacaggagctcttctgctcagcctgtgaccagctctttctctcaccccaccagctacagcagcacctgcggagtcaccgggagggcgtctttaagtgccccctgtgcagtcgtgtcttccctagcccttccagtctggaccagcaccttggagaccatagcagcgagtcacacttcctgtgtgtagactgtggcctggccttcggcacagaggccctcctcctggcccaccggcgagcccacaccccgaatcctctgcattcatgtccatgtgggaagacctttgtcaaccttaccaagttcctttatcaccggcgtactcatggggtagggggtgtccctctgcccacaacaccagtcccaccagaggaacctgtcattggtttccctgagccagccccagcagagactggagagccagaggcccctgagccccctgtgtctgaggagacctcagcagggcccgctgccccaggcacctaccgctgcctcctgtgcagccgtgaatttggaaaggccttgcagctgacccggcaccaacgttttgtgcatcggctggagcggcgccataaatgcagcatttgtggcaagatgttcaagaagaagtctcacgtgcgtaaccacctgcgcacacacacaggggagcggcccttcccctgccctgactgctccaagcccttcaactcacctgccaacctggcccgccaccggctcacacacacaggagagcggccctaccggtgtggggactgtggcaaggctttcacgcaaagctccacactgaggcagcaccgcttggtgcatgcccagcacttcccctaccgctgccaggaatgtggggtgcgttttcaccgtccttaccgcctgctcatgcaccgctaccatcacacaggtgaatacccctacaagtgtcgcgagtgcccccgctccttcttgctgcgtcggctgctggaggtgcaccagctcgtggtccatgccgggcgccagccccaccgctgcccatcctgtggggctgccttcccctcctcactgcggctccgggagcaccgctgtgcagccgctgctgcccaggccccacggcgctttgagtgtggcacctgtggcaagaaagtgggctcagctgctcgactgcaggcacacgaggcggcccatgcagctgctgggcctggagaggtcctggctaaggagccccctgcccctcgagccccacgggccactcgtgcaccagttgcctctccagcagcccttggaagcactgctacagcatcccctgcggcccctgcccgccgccggggtctagagtgcagcgagtgcaagaagctgttcagcacagagacgtcactgcaggtgcaccggcgcatccacacaggtgagcggccatacccatgtccagactgtggcaaagcgttccgtcagagtacccacctgaaagaccaccggcgcctgcacacaggtgagcggccctttgcctgtgaagtgtgtggcaaggcctttgccatctccatgcgcctggcagaacatcgccgcatccacacaggcgaacgaccctactcctgccctgactgtggcaagagctaccgctccttctccaacctctggaagcaccgcaagacccatcagcagcagcatcaggcagctgtgcggcagcagctggcagaggcggaggctgccgttggcctggccgtcatggagactgctgtggaggcgctacccctggtggaagccattgagatctaccctctggccgaggctgagggggtccagatcagtggctgactctgcccgacttcctctttggcacctccattccctgttgctgaaggccctccagcatccccttaagcatctgtacatactgtgtcccttcctcttcccatccccaccaccttgtaagttctaaattggatttattctctcgtgaggggggtgctctggggtccttgacacacataaaggtgcccccccaccttccacctcttagcactggtgaccccaaaaatgaaaccatcaataaagactgagttgccagcaaaaaaaaaaat

SEQ ID NO: 436159 - DNA, 2721 bp, Homo sapiens
tgctgagggtagctgggggcgagagcgaggctacggagcaggcgagaggcgacggcgagagctagagcgggcgcagcgttagggtggccgtgcaaggggagccgtggcccgggcccggggcgtgcgagacggcggaagcagcccagggccttgctgccgccatgactgaggaatcagaggagacagtcctgtacattgagcaccgctatgtctgctctgagtgcaaccagctgtatggatcactggaagaggtgcttatgcaccaaaactcccacgtgccccagcagcactttgagctggtgggcgtggctgatcccggagtcactgtggccacagacacagcttcaggcacgggcctctatcagacccttgtgcaggagagccagtaccagtgcctggagtgtggtcaactgctgatgtcacccagccagctcctggagcaccaggagctgcacctgaagatgatggcaccccaggaggcagtgccagctgagccatcacctaaggcaccacccctgagctccagcaccatccactacgagtgtgtggattgcaaggctctctttgccagccaggagctctggctgaaccaccggcagacgcacctccgggccacacccaccaaggctcctgcccctgttgtcctggggtccccagttgttctagggcctcctgtgggccaggcccgagtggctgtggagcactcataccgaaaggcagaagagggtggggaaggggcgactgtcccatctgccgctgccaccaccactgaggtagtgactgaggtggagctgctcctctacaagtgctctgagtgctcccagctcttccagctgccggcggatttcctggagcaccaggccactcacttccctgctcctgtacccgagtctcaggagcctgccttacagcaggaggtgcaggcctcgtcacctgcagaggtgcctgtgtctcagcctgaccccttgccagcttctgaccacagttacgagctgcgcaatggtgaagccattgggcgggatcgccgggggcgcagggcccggaggaacaacagtggagaagcaggcggggcagccacacaggagctcttctgctcagcctgtgaccagctctttctctcaccccaccagctacagcagcacctgcggagtcaccgggagggcgtctttaagtgccccctgtgcagtcgtgtcttccctagcccttccagtctggaccagcaccttggagaccatagcagcgagtcacacttcctgtgtgtagactgtggcctggccttcggcacagaggccctcctcctggcccaccggcgagcccacaccccgaatcctctgcattcatgtccatgtgggaagacctttgtcaaccttaccaagttcctttatcaccggcgtactcatggggtagggggtgtccctctgcccacaacaccagtcccaccagaggaacctgtcattggtttccctgagccagccccagcagagactggagagccagaggcccctgagccccctgtgtctgaggagacctcagcagggcccgctgccccaggcacctaccgctgcctcctgtgcagccgtgaatttggaaaggccttgcagctgacccggcaccaacgttttgtgcatcggctggagcggcgccataaatgcagcatttgtggcaagatgttcaagaagaagtctcacgtgcgtaaccacctgcgcacacacacaggggagcggcccttcccctgccctgactgctccaagcccttcaactcacctgccaacctggcccgccaccggctcacacacacaggagagcggccctaccggtgtggggactgtggcaaggctttcacgcaaagctccacactgaggcagcaccgcttggtgcatgcccagcacttcccctaccgctgccaggaatgtggggtgcgttttcaccgtccttaccgcctgctcatgcaccgctaccatcacacaggtgaatacccctacaagtgtcgcgagtgcccccgctccttcttgctgcgtcggctgctggaggtgcaccagctcgtggtccatgccgggcgccagccccaccgctgcccatcctgtggggctgccttcccctcctcactgcggctccgggagcaccgctgtgcagccgctgctgcccaggccccacggcgctttgagtgtggcacctgtggcaagaaagtgggctcagctgctcgactgcaggcacacgaggcggcccatgcagctgctgggcctggagaggtcctggctaaggagccccctgcccctcgagccccacgggccactcgtgcaccagttgcctctccagcagcccttggaagcactgctacagcatcccctgcggcccctgcccgccgccggggtctagagtgcagcgagtgcaagaagctgttcagcacagagacgtcactgcaggtgcaccggcgcatccacacaggtgagcggccatacccatgtccagactgtggcaaagcgttccgtcagagtacccacctgaaagaccaccggcgcctgcacacaggtgagcggccctttgcctgtgaagtgtgtggcaaggcctttgccatctccatgcgcctggcagaacatcgccgcatccacacaggcgaacgaccctactcctgccctgactgggagagtccgtctctcaccttgagcccgagacatacacacatagcctggcgacactgaagcgagctcttgctgcgatgaa

SEQ ID NO: 436160 - DNA, 2239 bp, Homo sapiens
tgctgagggtagctgggggcgagagcgaggctacggagcaggcgagaggcgacggcgagagctagagcgggcgcagcgttagggtggccgtgcaaggggagccgtggcccgggcccggggcgtgcgagacggcggaagcagcccagggccttgctgccgccatgactgaggaatcagaggagacagtcctgtacattgagcaccgctatgtctgctctgagtgcaaccagctgtatggatcactggaagagctacagcagcacctgcggagtcaccgggagggcgtctttaagtgccccctgtgcagtcgtgtcttccctagcccttccagtctggaccagcaccttggagaccatagcagcgagtcacacttcctgtgtgtagactgtggcctggccttcggcacagaggccctcctcctggcccaccggcgagcccacaccccgaatcctctgcattcatgtccatgtgggaagacctttgtcaaccttaccaagttcctttatcaccggcgtactcatggggtagggggtgtccctctgcccacaacaccagtcccaccagaggaacctgtcattggtttccctgagccagccccagcagagactggagagccagaggcccctgagccccctgtgtctgaggagacctcagcagggcccgctgccccaggcacctaccgctgcctcctgtgcagccgtgaatttggaaaggccttgcagctgacccggcaccaacgttttgtgcatcggctggagcggcgccataaatgcagcatttgtggcaagatgttcaagaagaagtctcacgtgcgtaaccacctgcgcacacacacaggggagcggcccttcccctgccctgactgctccaagcccttcaactcacctgccaacctggcccgccaccggctcacacacacaggagagcggccctaccggtgtggggactgtggcaaggctttcacgcaaagctccacactgaggcagcaccgcttggtgcatgcccagcacttcccctaccgctgccaggaatgtggggtgcgttttcaccgtccttaccgcctgctcatgcaccgctaccatcacacaggtgaatacccctacaagtgtcgcgagtgcccccgctccttcttgctgcgtcggctgctggaggtgcaccagctcgtggtccatgccgggcgccagccccaccgctgcccatcctgtggggctgccttcccctcctcactgcggctccgggagcaccgctgtgcagccgctgctgcccaggccccacggcgctttgagtgtggcacctgtggcaagaaagtgggctcagctgctcgactgcaggcacacgaggcggcccatgcagctgctgggcctggagaggtcctggctaaggagccccctgcccctcgagccccacgggccactcgtgcaccagttgcctctccagcagcccttggaagcactgctacagcatcccctgcggcccctgcccgccgccggggtctagagtgcagcgagtgcaagaagctgttcagcacagagacgtcactgcaggtgcaccggcgcatccacacaggtgagcggccatacccatgtccagactgtggcaaagcgttccgtcagagtacccacctgaaagaccaccggcgcctgcacacaggtgagcggccctttgcctgtgaagtgtgtggcaaggcctttgccatctccatgcgcctggcagaacatcgccgcatccacacaggcgaacgaccctactcctgccctgactgtggcaagagctaccgctccttctccaacctctggaagcaccgcaagacccatcagcagcagcatcaggcagctgtgcggcagcagctggcagaggcggaggctgccgttggcctggccgtcatggagactgctgtggaggcgctacccctggtggaagccattgagatctaccctctggccgaggctgagggggtccagatcagtggctgactctgcccgacttcctctttggcacctccattccctgttgctgaaggccctccagcatccccttaagcatctgtacatactgtgtcccttcctcttcccatccccaccaccttgtaagttctaaattggatttattctctcgtgaggggggtgctctggggtccttgacacacataaaggtgcccccccaccttccacctcttagcactggtgaccccaaaaatgaaaccatcaataaagactgagttgccagcaaaaaaaaaaat

SEQ ID NO: 436161 - DNA, 3118 bp, Homo sapiens
tgctgagggtagctgggggcgagagcgaggctacggagcaggcgagaggcgacggcgagagctagagcgggcgcagcgttagggtggccgtgcaaggggagccgtggcccgggcccggggcgtgcgagacggcggaagcagcccagggccttgctgccgccatgactgaggaatcagaggagacagtcctgtacattgagcaccgctatgtctgctctgagtgcaaccagctgtatggatcactggaagaggtgcttatgcaccaaaactcccacgtgccccagcagcactttgagctggtgggcgtggctgatcccggagtcactgtggccacagacacagcttcaggcacgggcctctatcagacccttgtgcaggagagccagtaccagtgcctggagtgtggtcaactgctgatgtcacccagccagctcctggagcaccaggagctgcacctgaagatgatggcaccccaggaggcagtgccagctgagccatcacctaaggcaccacccctgagctccagcaccatccactacgagtgtgtggattgcaaggctctctttgccagccaggagctctggctgaaccaccggcagacgcacctccgggccacacccaccaaggctcctgcccctgttgtcctggggtccccagttgttctagggcctcctgtgggccaggcccgagtggctgtggagcactcataccgaaaggcagaagagggtggggaaggggcgactgtcccatctgccgctgccaccaccactgaggtagtgactgaggtggagctgctcctctacaagtgctctgagtgctcccagctcttccagctgccggcggatttcctggagcaccaggccactcacttccctgctcctgtacccgagtctcaggagcctgccttacagcaggaggtgcaggcctcgtcacctgcagaggtgcctgtgtctcagcctgaccccttgccagcttctgaccacagttacgagctgcgcaatggtgaagccattgggcgggatcgccgggggcgcagggcccggaggaacaacagtggagaagcaggcggggcagccacacaggagctcttctgctcagcctgtgaccagctctttctctcaccccaccagctacagcagcacctgcggagtcaccgggagggcgtctttaagtgccccctgtgcagtcgtgtcttccctagcccttccagtctggaccagcaccttggagaccatagcagcgagtcacacttcctgtgtgtagactgtggcctggccttcggcacagaggccctcctcctggcccaccggcgagcccacaccccgaatcctctgcattcatgtccatgtgggaagacctttgtcaaccttaccaagttcctttatcaccggcgtactcatggggtagggggtgtccctctgcccacaacaccagtcccaccagaggaacctgtcattggtttccctgagccagccccagcagagactggagagccagaggcccctgagccccctgtgtctgaggagacctcagcagggcccgctgccccaggcacctaccgctgcctcctgtgcagccgtgaatttggaaaggccttgcagctgacccggcaccaacgttttgtgcatcggctggagcggcgccataaatgcagcatttgtggcaagatgttcaagaagaagtctcacgtgcgtaaccacctgcgcacacacacaggggagcggcccttcccctgccctgactgctccaagcccttcaactcacctgccaacctggcccgccaccggctcacacacacaggagagcggccctaccggtgtggggactgtggcaaggctttcacgcaaagctccacactgaggcagcaccgcttggtgcatgcccagcacttcccctaccgctgccaggaatgtggggtgcgttttcaccgtccttaccgcctgctcatgcaccgctaccatcacacaggtgaatacccctacaagtgtcgcgagtgcccccgctccttcttgctgcgtcggctgctggaggtgcaccagctcgtggtccatgccgggcgccagccccaccgctgcccatcctgtggggctgccttcccctcctcactgcggctccgggagcaccgctgtgcagccgctgctgcccaggccccacggcgctttgagtgtggcacctgtggcaagaaagtgggctcagctgctcgactgcaggcacacgaggcggcccatgcagctgctgggcctggagaggtcctggctaaggagccccctgcccctcgagccccacgggccactcgtgcaccagttgcctctccagcagcccttggaagcactgctacagcatcccctgcggcccctgcccgccgccggggtctagagtgcagcgagtgcaagaagctgttcagcacagagacgtcactgcaggtgcaccggcgcatccacacaggtgagcggccatacccatgtccagactgtggcaaagcgttccgtcagagtacccacctgaaagaccaccggcgcctgcacacaggtgagcggccctttgcctgtgaagtgtgtggcaaggcctttgccatctccatgcgcctggcagaacatcgccgcatccacacaggcgaacgaccctactcctgccctgactgtggcaagagctaccgctccttctccaacctctggaagcaccgcaagacccatcagcagcagcatcaggcagctgtgcggcagcagctggcagaggcggaggctgccgttggcctggccgtcatggagactgctgtggaggcgctacccctggtggaagccattgagatctaccctctggccgaggctgagggggtccagatcagtggctgactctgcccgacttcctctttggcacctccattccctgttgctgaaggccctccagcatccccttaagcatctgtacatactgtgtcccttcctcttcccatccccaccaccttgtaagttctaaattggatttattctctcgtgaggggggtgctctggggtccttgacacacataaaggtgcccccccaccttccacctcttagcactggtgaccccaaaaatgaaaccatcaataaagactgagttgccagcaaaaaaaaaaat

SEQ ID NO: 436162 - DNA, 3382 bp, Homo sapiens
cagcctccaagctcagaggcagagagagggaggaggacaggtgagcggaggcacagaatagaaagagaaatggaaagagacctgccgagggagacttggaaagagggaagccagggtggaggagttctgacagagagagggatctaaacagagacatgccgagagcaacctgggctaacagcaaagagagaagttgggcagagtcagagaggggcccaagagacacaggaaatgggggctcaaaagcggaaagacatatccaggagatagagactggacggggtggggacagggccaaggcccaccgcaggcagaggatgaggctcagaggaacagaaagagccagtctgggaccaggacggaggcttggagacagcaggggcacggacatgccaggggcccgggcccagggccttgctgccgccatgactgaggaatcagaggagacagtcctgtacattgagcaccgctatgtctgctctgagtgcaaccagctgtatggatcactggaagaggtgcttatgcaccaaaactcccacgtgccccagcagcactttgagctggtgggcgtggctgatcccggagtcactgtggccacagacacagcttcaggcacgggcctctatcagacccttgtgcaggagagccagtaccagtgcctggagtgtggtcaactgctgatgtcacccagccagctcctggagcaccaggagctgcacctgaagatgatggcaccccaggaggcagtgccagctgagccatcacctaaggcaccacccctgagctccagcaccatccactacgagtgtgtggattgcaaggctctctttgccagccaggagctctggctgaaccaccggcagacgcacctccgggccacacccaccaaggctcctgcccctgttgtcctggggtccccagttgttctagggcctcctgtgggccaggcccgagtggctgtggagcactcataccgaaaggcagaagagggtggggaaggggcgactgtcccatctgccgctgccaccaccactgaggtagtgactgaggtggagctgctcctctacaagtgctctgagtgctcccagctcttccagctgccggcggatttcctggagcaccaggccactcacttccctgctcctgtacccgagtctcaggagcctgccttacagcaggaggtgcaggcctcgtcacctgcagaggtgcctgtgtctcagcctgaccccttgccagcttctgaccacagttacgagctgcgcaatggtgaagccattgggcgggatcgccgggggcgcagggcccggaggaacaacagtggagaagcaggcggggcagccacacaggagctcttctgctcagcctgtgaccagctctttctctcaccccaccagctacagcagcacctgcggagtcaccgggagggcgtctttaagtgccccctgtgcagtcgtgtcttccctagcccttccagtctggaccagcaccttggagaccatagcagcgagtcacacttcctgtgtgtagactgtggcctggccttcggcacagaggccctcctcctggcccaccggcgagcccacaccccgaatcctctgcattcatgtccatgtgggaagacctttgtcaaccttaccaagttcctttatcaccggcgtactcatggggtagggggtgtccctctgcccacaacaccagtcccaccagaggaacctgtcattggtttccctgagccagccccagcagagactggagagccagaggcccctgagccccctgtgtctgaggagacctcagcagggcccgctgccccaggcacctaccgctgcctcctgtgcagccgtgaatttggaaaggccttgcagctgacccggcaccaacgttttgtgcatcggctggagcggcgccataaatgcagcatttgtggcaagatgttcaagaagaagtctcacgtgcgtaaccacctgcgcacacacacaggggagcggcccttcccctgccctgactgctccaagcccttcaactcacctgccaacctggcccgccaccggctcacacacacaggagagcggccctaccggtgtggggactgtggcaaggctttcacgcaaagctccacactgaggcagcaccgcttggtgcatgcccagcacttcccctaccgctgccaggaatgtggggtgcgttttcaccgtccttaccgcctgctcatgcaccgctaccatcacacaggtgaatacccctacaagtgtcgcgagtgcccccgctccttcttgctgcgtcggctgctggaggtgcaccagctcgtggtccatgccgggcgccagccccaccgctgcccatcctgtggggctgccttcccctcctcactgcggctccgggagcaccgctgtgcagccgctgctgcccaggccccacggcgctttgagtgtggcacctgtggcaagaaagtgggctcagctgctcgactgcaggcacacgaggcggcccatgcagctgctgggcctggagaggtcctggctaaggagccccctgcccctcgagccccacgggccactcgtgcaccagttgcctctccagcagcccttggaagcactgctacagcatcccctgcggcccctgcccgccgccggggtctagagtgcagcgagtgcaagaagctgttcagcacagagacgtcactgcaggtgcaccggcgcatccacacaggtgagcggccatacccatgtccagactgtggcaaagcgttccgtcagagtacccacctgaaagaccaccggcgcctgcacacaggtgagcggccctttgcctgtgaagtgtgtggcaaggcctttgccatctccatgcgcctggcagaacatcgccgcatccacacaggcgaacgaccctactcctgccctgactgtggcaagagctaccgctccttctccaacctctggaagcaccgcaagacccatcagcagcagcatcaggcagctgtgcggcagcagctggcagaggcggaggctgccgttggcctggccgtcatggagactgctgtggaggcgctacccctggtggaagccattgagatctaccctctggccgaggctgagggggtccagatcagtggctgactctgcccgacttcctctttggcacctccattccctgttgctgaaggccctccagcatccccttaagcatctgtacatactgtgtcccttcctcttcccatccccaccaccttgtaagttctaaattggatttattctctcgtgaggggggtgctctggggtccttgacacacataaaggtgcccccccaccttccacctcttagcactggtgaccccaaaaatgaaaccatcaataaagactgagttgccagcaaaaaaaaaaat

SEQ ID NO: 436163 - DNA, 2299 bp, Homo sapiens
tgctgagggtagctgggggcgagagcgaggctacggagcaggcgagaggcgacggcgagagctagagcgggcgcagcgttagggtggccgtgcaaggggagccgtggcccgggcccggggcgtgcgagacggcggaagcagcccagggccttgctgccgccatgactgaggaatcagaggagacagtcctgtacattgagcaccgctatgtctgctctgagtgcaaccagctgtatggatcactggaagaggtgcttatgcaccaaaactcccacgtgccccagcagcactttgagctggtgggcgtggctgatcccggagtcactgtggccacagacacagcttcaggcacgggcctctatcagacccttgtgcaggagagccagtaccagtgcctggagtgtggtcaactgctgatgtcacccagccagctcctggagcaccaggagctgcacctgaagatgatggcaccccaggaggcagtgccagctgagccatcacctaaggcaccacccctgagctccagcaccatccactacgagtgtgtggattgcaaggctctctttgccagccaggagctctggctgaaccaccggcagacgcacctccgggccacacccaccaaggctcctgcccctgttgtcctggggtccccagttgttctagggcctcctgtgggccaggcccgagtggctgtggagcactcataccgaaaggcagaagagggtggggaaggggcgactgtcccatctgccgctgccaccaccactgaggtagtgactgaggtggagctgctcctctacaagtgctctgagtgctcccagctcttccagctgccggcggatttcctggagcaccaggccactcacttccctgctcctgtacccgagtctcaggagcctgccttacagcaggaggtgcaggcctcgtcacctgcagaggtgcctgtgtctcagcctgaccccttgccagcttctgaccacagttacgagctgcgcaatggtgaagccattgggcgggatcgccgggggcgcagggcccggaggaacaacagtggagaagcaggcggggcagccacacaggagctcttctgctcagcctgtgaccagctctttctctcaccccaccagctacagcagcacctgcggagtcaccgggagggcgtctttaagtgccccctgtgcagtcgtgtcttccctagcccttccagtctggaccagcaccttggagaccatagcagcgagtcacacttcctgtgtgtagactgtggcctggccttcggcacagaggccctcctcctggcccaccggcgagcccacaccccgaatcctctgcattcatgtccatgtgggaagacctttgtcaaccttaccaagttcctttatcaccggcgtactcatggggtagggggtgtccctctgcccacaacaccagtcccaccagaggaacctgtcattggtttccctgagccagccccagcagagactggagagccagaggcccctgagccccctgtgtctgaggagacctcagcagggcccgctgccccaggcacctaccgctgcctcctgtgcagccgtgaatttggaaaggccttgcagctgacccggcaccaacgttttgtgcatcggctggagcggcgccataaatgcagcatttgtggcaagatgttcaagaagaagtctcacgtgcgtaaccacctgcgcacacacacaggggagcggcccttcccctgccctgactgctccaagcccttcaactcacctgccaacctggcccgccaccggctcacacacacaggagagcggccctaccggtgtggggactgtggcaaggctttcacgcaaagctccacactgaggcagcaccgcttggtgcatgcccagcacttcccctaccgctgccaggaatgtggggtgcgttttcaccgtccttaccgcctgctcatgcaccgctaccatcacacaggtgaatacccctacaagtgtcgcgagtgcccccgctccttcttgctgcgtcggctgctggaggtgcaccagctcgtggtccatgccgggcagcccacgtgccatcctggggtggctaccctcctaatggggtcggagcccgtgtgagcgcgcgcagcccagggttgagggggccgggcaaaatgggcactgcgatgagccaaagggcctggagtggcgcgaaagctggataagccgaccaaccaggatggcacagctcgcgctgaaggaagacccgccgcccggtaaagaggaatcacacaaggcgcagagcaagggacaaccgccggggc

SEQ ID NO: 436164 - DNA, 1196 bp, Homo sapiens
  misc_feature (36)..(36): n is a, c, g, or t
gcaggtacctcgcggttatggtacgaggctgggtgncatcacacaggtgaatacccctacaagtgtcgcgagtgcccccgctccttcttgctgcgtcggctgctggaggtgcaccagctcgtggtccatgccgggcgccagccccaccgctgcccatcctgtggggctgccttcccctcctcactgcggctccgggagcaccgctgtgcagccgctgctgcccaggccccacggcgctttgagtgtggcacctgtggcaagaaagtgggctcagctgctcgactgcaggcacacgaggcggcccatgcagctgctgggcctggagaggtcctggctaaggagccccctgcccctcgagccccacgggccactcgtgcaccagttgcctctccagcagcccttggaagcactgctacagcatcccctgcggcccctgcccgccgccggggtctagagtgcagcgagtgcaagaagctgttcagcacagagacgtcactgcaggtgcaccggcgcatccacacaggtgagcggccatacccatgtccagactgtggcaaagcgttccgtcagagtacccacctgaaagaccaccggcgcctgcacacaggtgagcggccctttgcctgtgaagtgtgtggcaaggcctttgccatctccatgcgcctggcagaacatcgccgcatccacacaggcgaacgaccctactcctgccctgactgtggcaagagctaccgctccttctccaacctctggaagcaccgcaagacccatcagcagcagcatcaggcagctgtgcggcagcagctggcagaggcggaggctgccgttggcctggccgtcatggagactgctgtggaggcgctacccctggtggaagccattgagatctaccctctggccgaggctgagggggtccagatcagtggctgactctgcccgacttcctctttggcacctccattccctgttgctgaaggccctccagcatccccttaagcatctgtacatactgtgtcccttcctcttcccatccccaccaccttgtaagttctaaattggatttattctctcgtgaggggggtgctctggggtccttgacacacataaaggtgcccccccaccttccacctcttagcactggtgaccccaaaaatgaaaccatcaataaagactgagttgccagcaaaaaaaaaaat

SEQ ID NO: 436165 - DNA, 5980 bp, Homo sapiens
gtcctaatctacttgtcccctgctctcgatgcccaagagtcaatgggctctgtgaacttgtccttgattttcattattgccctgggctccattgcgggcatcctctttgtaactatgatcttcgtggcaatcaagtgcaagcgagacaacaaagagatccggacctacaactgcagaattgctgagtactcctatggggcatcaaaagaaatcaagcaagaagaaaaaaatcagtaagaatgacatccgcctggtaccccgggatgtggaggagacagacaagatgaacgttgtcagttgctcttccctgacctcctccctcaactattttgactaccaccagcagacgctgcccctgggctgccgccgctctgagagcactttcctgaatgtggagaaccagaatacccgcaacaccagtgctaaccacatctaccatcactctttcaacagccaggggccccagcagcctgacctgattatcaacggtgtgcctctgcctgagactgaaaactattcttttgactccaactacgtgaatagccgagcccatttaatcaagagcagctccaccttcaaggacttagagggcaacagcctgaaggatagtggacatgaggagagtgaccaaactgacagtgagcatgatgtccagcggagcctgtattgtgatactgctgtcaacgatgtgctgaacaccagtgtgacctccatgggatctcagatgcctgatcatgatcagaatgaaggatttcattgccgggaagaatgccggattcttggccactctgacaggtgctggatgccccggaaccccatgcccatccgttccaagtcccctgagcatgtgaggaacatcatcgcgctgtctattgaagctactgctgctgatgtcgaggcttatgacgactgcggccccaccaaacggactttcgcaacctttgggaaagatgtcagcgaccacccggctgaggagaggcctaccctgaaaggcaagaggactgtcgatgtgaccatctgcagccccaaggtcaacagcgttatccgggaggcaggcaatggctgtgaggcgattagccctgtcacctcccccctccacctcaagagctctctgcccaccaagccttccgtgtcttacaccattgccctggctcccccagcccgtgatctggagcagtatgtcaacaatgtcaacaatggccctactcgtccctctgaagctgagccccgtggagctgatagcgagaaagtcatgcatgaggtcagccccattctgaaggaaggtcgcaacaaagagtcccctggtgtgaagcgtctgaaggatatcgttctctaaaccagtctccaggaagaagagaaagaaaccacactggctagtgaagaagcaggagcttcttgttttaattgctcaccaatggttggttcttgagtggctatatttcagagcttttcctaaatgtattgtttataggtgattatcattctgtgacagtcccttgtttcaacaggcagcaggggtgttcagttggagcaaattagctttggcttgagttgttcatggggccttgatgttggggaaacagagacaaattcagttgtgaaaagtattatgtattaagtgtttgaatttatatatttttctatgtcaaaattataatataaattaccattgtttgtggaggattacatttaaaaaagcaaaaagtgaaaaaaaaaagctctggacacctttaataagctcgccactgttttttgtagtgtagacaagttaatggtcatttattgtgtactattcattgattcagtgatgtgaaattgagcccccaaaaggttgtttctgaagctcgagtacttcccaatgccgctactttgctgtggacacccctgctttaaaaacccttttgctagctgtgctattgttgtatttgatattgcaaattgctatgtgtgtggtgatggcaaaaggcttttaaaagttggtgttttctttttcttaaaaaaataataaaactacagacaaaaacaaagtgcaaacaactgagacagcaaatgaatgagcaacaccatgcatatagattgagtacttggagaatactcacgttttttaactcatgtagtgattgctcaccactttgcaaagtatttttcctgcctttcagtggtctgcccaggtccatgatagatcattgcagaaagtcatttttggataggctgctatctaatttgcagttgtcagaaatactgtgctgaaagttttatgacatccatcttttaaattttcaggccctgaacaggaaagttgctcctgaagttatgtttccaggcttagaaattccctctctccaatcatctaaaattgaagatgactgaatctattttaagatctaaattagcatctcttcagacacacacttcctgattcagtgtttcccaatcatgattagaattagactgcaaagcacgtcatgggctgggattgagaactccatgttgctctgtatcttaggcttatatacgtagggatagagtaagcagtacaaagtgtatattttggaaaagacaggtaacaggtaacagcatcgctaatccaattactgtgccttctaaacggagacactcagacacttgaactcatctttttatgactaatagttttttgattaaaaatgtgaacaagaaaatactaaaataaaaatcctttcgatttagccaactctttttgctgtaggctaggaatacaccctttttaaattaacacactgtagatcctttttttctgttttaacattcctctaactcccccatttatcttttgtctattaatattcactagccaacatagtatttttgcagcctaagagttcattatttaaaaataaactaaagaaatatgtcacctttgttctgccttggtcttaagagagttgtttctagagaaacaagttttatggttctgttttcatttgtttcattttttgaaattcaggaatacacagagagaaggcctagaggttagagcactagaatgcaaaagaggatttattttcttaagtttaggtagataagtcagctcttttgaatgttttacttatttttgcctgagttcctagctttacgcattactaggaatattttcttttacaggagggagaagggttttgagggagggggtgggtaaggcagtagggatggggttaggtaggggagaacatttctgaaaaagaacttataatgaagctacaaatccatccttatttcttattcagtgctgaatactacctcatgcaaaatattggtgtggctgcaaatttccctctgaagctgacacaattaaggatgaattaccataacatcttcatttttcctcatttcattgcctctcatacagttttctccctctgatttatttcattttggtagtggattttgaattaagtatttatttctctttgcaagtgactatttgattaacacattaaaaattttttaaaaatttcccctttaagttatgatggctgcctatagaatttagactgtttctcaccctgatccatcctgatattatgttattagctacgatttcaaggtcactttgaagtcagacttcacagttttctacaggtgtatttcttgctatgctcagtgggaaccagggagcagaaaagattgtggaaagtgggaacattaattgtcacgtggctgttgagccagagaggccactggctgccatgcctcttaccagccaagttttaaatggttagagtggcattggcattgattttgcttttctcttgggttttcttcatttcttttcataattcatcttcaagctatagatccatccttcttccctatccaaatactttgttctcagtgggcagtcagatttttttggcttccaaacctcactgagcatgttcagagaattcctctcattaaggaaatatttttccccacaattgtctgatgtatgagtcctctcagaagcacaagtgcatactaggaaggctttgtaaactggttttgtaggcaggctgtacctgcaaataggcattctgagcaaggatcctaaatttccctttggctcatgtcccccccgccccaccccaccttctcctttttggcatgtctggtgaaaagctacaaggttcacagggccaaatattctcccttttgttctctaaacatgttgcacacataaactcaagggagtgatttcggttcctaagtcctagggagttctattccatttattctgatgtcccttttaaggaggagttggtgttgaagtgtgacatgctttaatgataactgctttggcaattccccagacaggtatacttcttcatccaaaattgcacctaaggtgttcatttagacaaaattgttcgcttagtgatccactgatctctaatcagaaatatttttaaaaaatacaatttagatctctgaaaattggaaccactcaagagtatcatcttgatagtgttacttcagcatatgactgactgattttatgaagggagtttagctgacttttccctgtagccctatcatattaaaaacaaaaagtggtccacttgaagcagcaaggacaaagggcagtttagggagaggcagggtgaaggggatagctcgattgggcatccagagtggaaaaggattattattgtacataatagcagttctggctggaattccaatccactttctggggatcattttgatgttgaatgttcccccaaagcattctgacaagtttggtccacttggctctttaccccgggtaataagacccttattgactttgaaaaactggcataaatgagcttaaggaaatccattgtatacagtcctagtgtttgccttcttggtaaaattacatttaaggatgtcatttcatgagtcaaattgtatctgctgacactgaagtgtattgagatgttgttctttagtttaagtatgtaacaaagtaatattcaaaggggatgtttgggggtggggctgggaccgggtggctttatattgataatgaaatattccagagcaaaacacattgtcctaatgaagttgttgcagctctcttcgttttcttgtgccgctggaattggcttgtgggtcacttgttgtgcaaaagtgaattaatttcaaataggaatcatattgcttttgtgaaacaaagaaaatttaccaccttgtctgatacatagattggaaggcgctcttggtaaagaataacccacaaacacctgatcttgattggaaagcattgtaggtcattagggaaaactgatgatgctgactgttgctccagctgtgttggcaattcaagatgaccttgttactaactgaaagttgctgtcaaccttagcaaacaaaccagctaacaccattacagcactggttaagtagatttttactggcactggctggcgttcagctgaggaaggctaggatacagactttaatgaccaagagccagactagctcgagctagaaatcagcaacaaatacctccttgtgctatttgaatgctaaggtattagttgcaataggcttacgccttcgctcctctagtgaggggaatgagcctgatgacactattactgtttacctgtcaaaccagggtggaaatttagagggatgcaagtacagtatgtctcattaagcagtctctgttgctgattatatgaagataaaattgttgtatatgctgatctgtatgttatgtacattttcacagtgattgaatcattgtaaaaagaaaaaagacaaaaaagaatcaccactgtctattttatgaagatgataaagcagctttattaaattattacagttatgtttcaaatggtgttatctgccacattgtttccttttatctggtggttctctgtttccccctttaaatgtgttttctctgcttcaaaaatttaatgcattttagtattaaaggctattatggaaaaagtaaaaaaaaaat

SEQ ID NO: 436166 - DNA, 1795 bp, Homo sapiens
gtcctaatctacttgtcccctgctctcgatgcccaagagtcaatgggctctgtgaacttgtccttgattttcattattgccctgggctccattgcgggcatcctctttgtaactatgatcttcgtggcaatcaagtgcaagcgagacaacaaagagatccggacctacaactgcagtaattgtttaaccatcacttgtctcctcggctgttttataaaaggacaaaacagcaagtgtctgcattgcatctcggtttctcccattagcgaggagcaagacaaaaagacagaggagaaagtgagcctaaggggaaagagaattgctgagtactcctatggggcatcaaaagaaatcaagcaagaagaaaaaaatcagtaagaatgacatccgcctggtaccccgggatgtggaggagacagacaagatgaacgttgtcagttgctcttccctgacctcctccctcaactattttgactaccaccagcagacgctgcccctgggctgccgccgctctgagagcactttcctgaatgtggagaaccagaatacccgcaacaccagtgctaaccacatctaccatcactctttcaacagccaggggccccagcagcctgacctgattatcaacggtgtgcctctgcctgagactgaaaactattcttttgactccaactacgtgaatagccgagcccatttaatcaagagcagctccaccttcaaggacttagagggcaacagcctgaaggatagtggacatgaggagagtgaccaaactgacagtgagcatgatgtccagcggagcctgtattgtgatactgctgtcaacgatgtgctgaacaccagtgtgacctccatgggatctcagatgcctgatcatgatcagaatgaaggatttcattgccgggaagaatgccggattcttggccactctgacaggtgctggatgccccggaaccccatgcccatccgttccaagtcccctgagcatgtgaggaacatcatcgcgctgtctattgaagctactgctgctgatgtcgaggcttatgacgactgcggccccaccaaacggactttcgcaacctttgggaaagatgtcagcgaccacccggctgaggagaggcctaccctgaaaggcaagaggactgtcgatgtgaccatctgcagccccaaggtcaacagcgttatccgggaggcaggcaatggctgtgaggcgattagccctgtcacctcccccctccacctcaagagctctctgcccaccaagccttccgtgtcttacaccattgccctggctcccccagcccgtgatctggagcagtatgtcaacaatgtcaacaatggccctactcgtccctctgaagctgagccccgtggagctgatagcgagaaagtcatgcatgaggtcagccccattctgaaggaaggtcgcaacaaagagtcccctggtgtgaagcgtctgaaggatatcgttctctaaaccagtctccaggaagaagagaaagaaaccacactggctagtgaagaagcaggagcttcttgttttaattgctcaccaatgtgattgaatcattgtaaaaagaaaaaagacaaaaaagaatcaccactgtctattttatgaagatgataaagcagctttattaaattattacagttatgtttcaaatggtgttatctgccacattgtttccttttatctggtggttctctgtttccccctttaaatgtgttttctctgcttcaaaaatttaatgcattttagtattaaaggctattatggaaaaagtaaaaaaaaaat

SEQ ID NO: 436167 - DNA, 6121 bp, Homo sapiens
gtcctaatctacttgtcccctgctctcgatgcccaagagtcaatgggctctgtgaacttgtccttgattttcattattgccctgggctccattgcgggcatcctctttgtaactatgatcttcgtggcaatcaagtgcaagcgagacaacaaagagatccggacctacaactgcagtaattgtttaaccatcacttgtctcctcggctgttttataaaaggacaaaacagcaagtgtctgcattgcatctcggtttctcccattagcgaggagcaagacaaaaagacagaggagaaagtgagcctaaggggaaagagaattgctgagtactcctatggggcatcaaaagaaatcaagcaagaagaaaaaaatcagtaagaatgacatccgcctggtaccccgggatgtggaggagacagacaagatgaacgttgtcagttgctcttccctgacctcctccctcaactattttgactaccaccagcagacgctgcccctgggctgccgccgctctgagagcactttcctgaatgtggagaaccagaatacccgcaacaccagtgctaaccacatctaccatcactctttcaacagccaggggccccagcagcctgacctgattatcaacggtgtgcctctgcctgagactgaaaactattcttttgactccaactacgtgaatagccgagcccatttaatcaagagcagctccaccttcaaggacttagagggcaacagcctgaaggatagtggacatgaggagagtgaccaaactgacagtgagcatgatgtccagcggagcctgtattgtgatactgctgtcaacgatgtgctgaacaccagtgtgacctccatgggatctcagatgcctgatcatgatcagaatgaaggatttcattgccgggaagaatgccggattcttggccactctgacaggtgctggatgccccggaaccccatgcccatccgttccaagtcccctgagcatgtgaggaacatcatcgcgctgtctattgaagctactgctgctgatgtcgaggcttatgacgactgcggccccaccaaacggactttcgcaacctttgggaaagatgtcagcgaccacccggctgaggagaggcctaccctgaaaggcaagaggactgtcgatgtgaccatctgcagccccaaggtcaacagcgttatccgggaggcaggcaatggctgtgaggcgattagccctgtcacctcccccctccacctcaagagctctctgcccaccaagccttccgtgtcttacaccattgccctggctcccccagcccgtgatctggagcagtatgtcaacaatgtcaacaatggccctactcgtccctctgaagctgagccccgtggagctgatagcgagaaagtcatgcatgaggtcagccccattctgaaggaaggtcgcaacaaagagtcccctggtgtgaagcgtctgaaggatatcgttctctaaaccagtctccaggaagaagagaaagaaaccacactggctagtgaagaagcaggagcttcttgttttaattgctcaccaatggttggttcttgagtggctatatttcagagcttttcctaaatgtattgtttataggtgattatcattctgtgacagtcccttgtttcaacaggcagcaggggtgttcagttggagcaaattagctttggcttgagttgttcatggggccttgatgttggggaaacagagacaaattcagttgtgaaaagtattatgtattaagtgtttgaatttatatatttttctatgtcaaaattataatataaattaccattgtttgtggaggattacatttaaaaaagcaaaaagtgaaaaaaaaaagctctggacacctttaataagctcgccactgttttttgtagtgtagacaagttaatggtcatttattgtgtactattcattgattcagtgatgtgaaattgagcccccaaaaggttgtttctgaagctcgagtacttcccaatgccgctactttgctgtggacacccctgctttaaaaacccttttgctagctgtgctattgttgtatttgatattgcaaattgctatgtgtgtggtgatggcaaaaggcttttaaaagttggtgttttctttttcttaaaaaaataataaaactacagacaaaaacaaagtgcaaacaactgagacagcaaatgaatgagcaacaccatgcatatagattgagtacttggagaatactcacgttttttaactcatgtagtgattgctcaccactttgcaaagtatttttcctgcctttcagtggtctgcccaggtccatgatagatcattgcagaaagtcatttttggataggctgctatctaatttgcagttgtcagaaatactgtgctgaaagttttatgacatccatcttttaaattttcaggccctgaacaggaaagttgctcctgaagttatgtttccaggcttagaaattccctctctccaatcatctaaaattgaagatgactgaatctattttaagatctaaattagcatctcttcagacacacacttcctgattcagtgtttcccaatcatgattagaattagactgcaaagcacgtcatgggctgggattgagaactccatgttgctctgtatcttaggcttatatacgtagggatagagtaagcagtacaaagtgtatattttggaaaagacaggtaacaggtaacagcatcgctaatccaattactgtgccttctaaacggagacactcagacacttgaactcatctttttatgactaatagttttttgattaaaaatgtgaacaagaaaatactaaaataaaaatcctttcgatttagccaactctttttgctgtaggctaggaatacaccctttttaaattaacacactgtagatcctttttttctgttttaacattcctctaactcccccatttatcttttgtctattaatattcactagccaacatagtatttttgcagcctaagagttcattatttaaaaataaactaaagaaatatgtcacctttgttctgccttggtcttaagagagttgtttctagagaaacaagttttatggttctgttttcatttgtttcattttttgaaattcaggaatacacagagagaaggcctagaggttagagcactagaatgcaaaagaggatttattttcttaagtttaggtagataagtcagctcttttgaatgttttacttatttttgcctgagttcctagctttacgcattactaggaatattttcttttacaggagggagaagggttttgagggagggggtgggtaaggcagtagggatggggttaggtaggggagaacatttctgaaaaagaacttataatgaagctacaaatccatccttatttcttattcagtgctgaatactacctcatgcaaaatattggtgtggctgcaaatttccctctgaagctgacacaattaaggatgaattaccataacatcttcatttttcctcatttcattgcctctcatacagttttctccctctgatttatttcattttggtagtggattttgaattaagtatttatttctctttgcaagtgactatttgattaacacattaaaaattttttaaaaatttcccctttaagttatgatggctgcctatagaatttagactgtttctcaccctgatccatcctgatattatgttattagctacgatttcaaggtcactttgaagtcagacttcacagttttctacaggtgtatttcttgctatgctcagtgggaaccagggagcagaaaagattgtggaaagtgggaacattaattgtcacgtggctgttgagccagagaggccactggctgccatgcctcttaccagccaagttttaaatggttagagtggcattggcattgattttgcttttctcttgggttttcttcatttcttttcataattcatcttcaagctatagatccatccttcttccctatccaaatactttgttctcagtgggcagtcagatttttttggcttccaaacctcactgagcatgttcagagaattcctctcattaaggaaatatttttccccacaattgtctgatgtatgagtcctctcagaagcacaagtgcatactaggaaggctttgtaaactggttttgtaggcaggctgtacctgcaaataggcattctgagcaaggatcctaaatttccctttggctcatgtcccccccgccccaccccaccttctcctttttggcatgtctggtgaaaagctacaaggttcacagggccaaatattctcccttttgttctctaaacatgttgcacacataaactcaagggagtgatttcggttcctaagtcctagggagttctattccatttattctgatgtcccttttaaggaggagttggtgttgaagtgtgacatgctttaatgataactgctttggcaattccccagacaggtatacttcttcatccaaaattgcacctaaggtgttcatttagacaaaattgttcgcttagtgatccactgatctctaatcagaaatatttttaaaaaatacaatttagatctctgaaaattggaaccactcaagagtatcatcttgatagtgttacttcagcatatgactgactgattttatgaagggagtttagctgacttttccctgtagccctatcatattaaaaacaaaaagtggtccacttgaagcagcaaggacaaagggcagtttagggagaggcagggtgaaggggatagctcgattgggcatccagagtggaaaaggattattattgtacataatagcagttctggctggaattccaatccactttctggggatcattttgatgttgaatgttcccccaaagcattctgacaagtttggtccacttggctctttaccccgggtaataagacccttattgactttgaaaaactggcataaatgagcttaaggaaatccattgtatacagtcctagtgtttgccttcttggtaaaattacatttaaggatgtcatttcatgagtcaaattgtatctgctgacactgaagtgtattgagatgttgttctttagtttaagtatgtaacaaagtaatattcaaaggggatgtttgggggtggggctgggaccgggtggctttatattgataatgaaatattccagagcaaaacacattgtcctaatgaagttgttgcagctctcttcgttttcttgtgccgctggaattggcttgtgggtcacttgttgtgcaaaagtgaattaatttcaaataggaatcatattgcttttgtgaaacaaagaaaatttaccaccttgtctgatacatagattggaaggcgctcttggtaaagaataacccacaaacacctgatcttgattggaaagcattgtaggtcattagggaaaactgatgatgctgactgttgctccagctgtgttggcaattcaagatgaccttgttactaactgaaagttgctgtcaaccttagcaaacaaaccagctaacaccattacagcactggttaagtagatttttactggcactggctggcgttcagctgaggaaggctaggatacagactttaatgaccaagagccagactagctcgagctagaaatcagcaacaaatacctccttgtgctatttgaatgctaaggtattagttgcaataggcttacgccttcgctcctctagtgaggggaatgagcctgatgacactattactgtttacctgtcaaaccagggtggaaatttagagggatgcaagtacagtatgtctcattaagcagtctctgttgctgattatatgaagataaaattgttgtatatgctgatctgtatgttatgtacattttcacagtgattgaatcattgtaaaaagaaaaaagacaaaaaagaatcaccactgtctattttatgaagatgataaagcagctttattaaattattacagttatgtttcaaatggtgttatctgccacattgtttccttttatctggtggttctctgtttccccctttaaatgtgttttctctgcttcaaaaatttaatgcattttagtattaaaggctattatggaaaaagtaaaaaaaaaat

SEQ ID NO: 436168 - DNA, 2443 bp, Homo sapiens
gaactatttttagtgccagtgtaaaggattaagaataacattcaattagttggctatttcaggctttattgtacatggtaatgtttcagggagtgtgatttggtctagaatatatccagatccttgtaattatgatattgggttatgacaggattctattatttttagctatgaatggtgcttatttttccctatattaggaatgttaatatttggattatcagagtccatgttataaacagaatttacctatgcaagacaaattctaactgtgcaacattttcatgagaattaaaagttgtgtgttaaggggaaaaccctctgaatgtttttatgtgtaagtgcctaaagaaccgtagaaacagtacatcaaaagctcttataaaagaaaaactgattgaacattagccagaaacaaaatatgatttacatttttttttttggttgctgggactgaataccctaaaaactaagagatgtgagtggggaaaatgtctaattgataagaaagttgatttatattatatttacatgcatcttctaagattgcctttacagtagccaatcagaactttaaaaaaaaaaaagctaacaacatagatcctatgtgttgcccttaagactaaaatactttgcacacgtgattgaatggctcacttaagttgttgaatttccttatacatttaaagtgtacttccgttaagaattattccattttaaatgggtaactttcagcttccgaactattttcctaaacattccagttgtgtattataaaagatcaaaatatctctaggtggtagtacaattttcatttataacgtggaaaagttaactgttaggtttaacattagtattagtgtttttgcaattgctcatagaaaagaacactgaataatggttttcatacaatttttgtaaaacattcttctcccagtttgattccaaatgcttttccccaaattgtctaatatatcataagctagtgtttccttgtatttaatttttccttccaacacaatatttaggaaaaatatgaataacattgtgagtagcgggagacaacacgaaaaagaaacctttcattgttgtggaggggtaggtgttatgtgattgatgcccttcctggcgtttgttttatcctgttattttctcaaaaaagagcacggctttttcttaaatacatttaaattcagaattgcttgcaaaagattggcctggatagatagacatcctagatttaagatagtaccatcttaaaagtatgttgaaaggtaaaataaatcatttcaaaatacttaactttcctaataaggatgttaggttttcttctctttcattagctggccataagtcaaggtccttataacactaggaaattacctttttttactttcaaaattgcattatagtgaattactgtttacaaaatacacatactgtgaacagatataagtttctgtcttttataaggtttgtagaatgaatgtttttttaaagtgagtattatatgttaaatattttaagttttttataaatactagtaactgtttactaatttttgtttggtcaaatgcttgtaaatgtagctgaaagaagatagggagaaactgcggatcccaaactgttccctttttcatttcttgaaatgttaccactacagacatttttttaaggtgaataaacagttgtgatgtgctgtacctaaaatcatgtttaatcgtataaggaaacatttcaatacacttatacaggaagaaaactatagatgaagtacatgtgtgtgattcagtctgattcacagaattctgagagtaatatggaataaaacaactccacttagatgataactgaagcatttcctgccttgtgaaaatttggattttaaattgctgttagaatgggaaatttggacactttatatcattgtataatttcagaatttagtttctgtatcttttggaaaacatgattatagcaaaaacatagaaaataatctattactaaaacaccataaatgtaaaactagtatgcttggctgttaactctaaagatgttacttatgtctgtttttaaaacatgcatgtatttaacaattttatcatagtattgtcatggaaaaaataaatatattttcttacatcttacactgacagacttgggcattattgggtttttccccatgttacacacttaggagaagtggctctgctttgttgttgtatttttttgttctatcccgtaagaaatacagtggttgtaaagcaatcacatagcgctatggatgtatttttaacatttgagtacattgctgtgccattggtgtaacatccatctgtccattaagtcattattgtttacctgagaagttagcatcaaaataatcaaatagtgggaatccaacattagcaaataaataataaatactggtctttaaagtaat

SEQ ID NO: 436169 - DNA, 2390 bp, Homo sapiens
gaactatttttagtgccagtgtaaaggattaagaataacattcaattagttggctatttcaggctttattgtacatggtaatgtttcagggagtgtgatttggtctagaatatatccagatccttgtaattatgatattgggttatgacaggattctattatttttagctatgaatggtgcttatttttccctatattaggaatgttaatatttggattatcagagtccatgttataaacagaatttacctatgcaagacaaattctaactgtgcaacattttcatgagaattaaaagttgtgtgttaaggggaaaaccctctgaatgtttttatgtgtaagtgcctaaagaaccgtagaaacagtacatcaaaagctcttataaaagaaaaactgattgaacattagccagaaacaaaatatgatttacatttttttttttggttgctgggactgaataccctaaaaactaagagatgtgagtggggaaaatgtctaattgataagaaagttgatttatattatatttacatgcatcttctaagattgcctttacagtagccaatcagaactttaaaaaaaaaaaagctaacaacatagatcctatgtgttgcccttaagactaaaatactttgcacacgtgattgaatggctcacttaagttgttgaatttccttatacatttaaagtgtacttccgttaagaattattccattttaaatgggtaactttcagcttccgaactattttcctaaacattccagttgtgtattataaaagatcaaaatatctctaggtggtagtacaattttcatttataacgtggaaaagttaactgttaggtttaacattagtattagtgtttttgcaattgctcatagaaaagaacactgaataatggttttcatacaatttttgtaaaacattcttctcccagtttgattccaaatgcttttccccaaattgtctaatatatcataagctagtgtttccttgtatttaatttttccttccaacacaatatttaggaaaaatatgaataacattgtgagtagcgggagacaacacgaaaaagaaacctttcattgttgtggaggggtaggtgttatgtgattgatgcccttcctggcgtttgttttatcctgttattttctcaaaaaagagcacggctttttcttaaatacatttaaattcagaattgcttgcaaaagattggcctggatagatagacatcctagatttaagatagtaccatcttaaaagtatgttgaaaggtaaaataaatcatttctggccataagtcaaggtccttataacactaggaaattacctttttttactttcaaaattgcattatagtgaattactgtttacaaaatacacatactgtgaacagatataagtttctgtcttttataaggtttgtagaatgaatgtttttttaaagtgagtattatatgttaaatattttaagttttttataaatactagtaactgtttactaatttttgtttggtcaaatgcttgtaaatgtagctgaaagaagatagggagaaactgcggatcccaaactgttccctttttcatttcttgaaatgttaccactacagacatttttttaaggtgaataaacagttgtgatgtgctgtacctaaaatcatgtttaatcgtataaggaaacatttcaatacacttatacaggaagaaaactatagatgaagtacatgtgtgtgattcagtctgattcacagaattctgagagtaatatggaataaaacaactccacttagatgataactgaagcatttcctgccttgtgaaaatttggattttaaattgctgttagaatgggaaatttggacactttatatcattgtataatttcagaatttagtttctgtatcttttggaaaacatgattatagcaaaaacatagaaaataatctattactaaaacaccataaatgtaaaactagtatgcttggctgttaactctaaagatgttacttatgtctgtttttaaaacatgcatgtatttaacaattttatcatagtattgtcatggaaaaaataaatatattttcttacatcttacactgacagacttgggcattattgggtttttccccatgttacacacttaggagaagtggctctgctttgttgttgtatttttttgttctatcccgtaagaaatacagtggttgtaaagcaatcacatagcgctatggatgtatttttaacatttgagtacattgctgtgccattggtgtaacatccatctgtccattaagtcattattgtttacctgagaagttagcatcaaaataatcaaatagtgggaatccaacattagcaaataaataataaatactggtctttaaagtaat

SEQ ID NO: 436170 - DNA, 2603 bp, Homo sapiens
gaactatttttagtgccagtgtaaaggattaagaataacattcaattagttggctatttcaggctttattgtacatggtaatgtttcagggagtgtgatttggtctagaatatatccagatccttgtaattatgatattgggttatgacaggattctattatttttagctatgaatggtgcttatttttccctatattaggaatgttaatatttggattatcagagtccatgttataaacagaatttacctatgcaagacaaattctaactgtgcaacattttcatgagaattaaaagttgtgtgttaaggggaaaaccctctgaatgtttttatgtgtaagtgcctaaagaaccgtagaaacagtacatcaaaagctcttataaaagaaaaactgattgaacattagccagaaacaaaatatgatttacatttttttttttggttgctgggactgaataccctaaaaactaagagatgtgagtggggaaaatgtctaattgataagaaagttgatttatattatatttacatgcatcttctaagattgcctttacagtagccaatcagaactttaaaaaaaaaaaagctaacaacatagatcctatgtgttgcccttaagactaaaatactttgcacacgtgattgaatggctcacttaagttgttgaatttccttatacatttaaagtgtacttccgttaagaattattccattttaaatgggtaactttcagcttccgaactattttcctaaacattccagttgtgtattataaaagatcaaaatatctctaggtggtagtacaattttcatttataacgtggaaaagttaactgttaggtttaacattagtattagtgtttttgcaattgctcatagaaaagaacactgaataatggttttcatacaatttttgtaaaacattcttctcccagtttgattccaaatgcttttccccaaattgtctaatatatcataagctagtgtttccttgtatttaatttttccttccaacacaatatttaggaaaaatatgaataacattgtgagtagcgggagacaacacgaaaaagaaacctttcattgttgtggaggggtaggtgttatgtgattgatgcccttcctggcgtttgttttatcctgttattttctcaaaaaagagcacggctttttcttaaatacatttaaattcagaattgcttgcaaaagattggcctggatagatagacatcctagatttaagatagtaccatcttaaaagtatgttgaaaggtaaaataaatcatttcaaaatacttaactttcctaataaggatgttaggttttcttctctttcattagctggccataagtcaaggtccttataacactaggaaattacctttttttactttcaaaattgcattatagtgaattactgtttacaaaatacacatactgtgaacagatataagtttctgtcttttataaggtttgtagaatgaatgtttttttaaagtgagtattatatgttaaatattttaagttttttataaatactagtaactgtttactaatttttgtttggtcaaatgcttgtaaatgtagctgaaagaagatagggagaaactgcggatcccaaactgttccctttttcatttcttgaaatgttaccactacagacatttttttaaggtgaataaacagttgtgatgtgctgtacctaaaatcatgtttaatcgtataaggaaacatttcaatacacttatacaggaagaaaactatagatgaagtacatgtgtgtgattcagtctgattcacagaattctgagagtaatatggaataaaacaactccacttagatgataactgaagcatttcctgccttgtgaaaatttggattttaaattgctgttagaatgggaaatttggacactttatatcattgtataatttcagaatttagtttctgtatcttttggaaaacatgattatagcaaaaacatagaaaataatctattactaaaacaccataaatgtaaaactagtatgcttggctgttaactctaaagatgttacttatgtctgtttttaaaacatgcatgtatttaacaattttatcatagtattgtcatggaaaaaataaatatattttcttacatctaaaaaaaaaaaaaaaaaaaaaaaaaaacaaaaaaaaaaaaagaaaaagaaagaagagaggaagaaaacaaaaagagaaaacaaagaagaggagaaggaaagaaaagaaaagaagagaagaggagagaggggagacgagaaagagggcgaaaggggagggagagaggcacgagcgggcgggggcggcgggagagcccccaccccccacccacagaccggagacgagaaaagagaacccaacaccaaggacaccgccggggaggcacccagcacgactaccagctaagatgaaacaccagacgcgcgtccgactccagcaaccacacgggagcagtctgcgcgaccatgaccaaccaaacaccaaaccaaaggcgaaaaaccctgcagtaggcacagacggccacaccacaaccaacaacacacagcaacccacgcacccaatggcaagcaagagtacac

SEQ ID NO: 436171 - DNA, 744 bp, Homo sapiens
gaagtgtctgagtgctgctgaagaaaagtactctcaaaaagaagataaatatgaggaagaaaactatagatgaagtacatgtgtgtgattcagtctgattcacagaattctgagagtaatatggaataaaacaactccacttagatgataactgaagcatttcctgccttgtgaaaatttggattttaaattgctgttagaatgggaaatttggacactttatatcattgtataatttcagaatttagtttctgtatcttttggaaaacatgattatagcaaaaacatagaaaataatctattactaaaacaccataaatgtaaaactagtatgcttggctgttaactctaaagatgttacttatgtctgtttttaaaacatgcatgtatttaacaattttatcatagtattgtcatggaaaaaataaatatattttcttacatcttacactgacagacttgggcattattgggtttttccccatgttacacacttaggagaagtggctctgctttgttgttgtatttttttgttctatcccgtaagaaatacagtggttgtaaagcaatcacatagcgctatggatgtatttttaacatttgagtacattgctgtgccattggtgtaacatccatctgtccattaagtcattattgtttacctgagaagttagcatcaaaataatcaaatagtgggaatccaacattagcaaataaataataaatactggtctttaaagtaat

SEQ ID NO: 436172 - DNA, 759 bp, Homo sapiens
gccttcagcataaaagctgatccacaaacaagaggagcaccagacctcctcttggcttcgagatggcttcgccacaccaagagcccaaacctggagacctgattgagattttccgccttggctatgagcactgggccctgtatataggagatggctacgtgatccatctggctcctccaagtgagtaccccggggctggctcctccagtgtcttctcagtcctgagcaacagtgcagaggtgaaacgggagcgcctggaagatgtggtgggaggctgttgctatcgggtcaacaacagcttggaccatgagtaccaaccacggcccgtggaggtgatcatcagttctgcgaaggagatggttggtcagaagatgaagtacagtattgtgagcaggaactgtgagcactttgtcacccagctgagatatggcaagtcccgctgtaaacaggtggaaaaggccaaggttgaagtcggtgtggccacggcgcttggaatcctggttgttgctggatgctcttttgcgattaggagataccaaaaaaaagcgacagcctgaagcagccacaaaatcctgtgttagaagcagctgtgggggtcccagtggagatgagcctcccccatgcctccagcagcctgaccctcgtgccctgtctcaggcgttctctagatcctttcctctgtttccctctctcgctggcaaaagtatgatctaattgaaacaagactgaaggatcaataaacagccatctgccccttca

SEQ ID NO: 436173 - DNA, 922 bp, Homo sapiens
gccttcagcataaaagctgatccacaaacaagaggagcaccagacctcctcttggcttcgagatggcttcgccacaccaagagcccaaacctggagacctgattgagattttccgccttggctatgagcactgggccctgtatataggagatggctacgtgatccatctggctcctccaagtgagtaccccggggctggctcctccagtgtcttctcagtcctgagcaacagtgcagaggtgaaacgggagcgcctggaagatgtggtgggaggctgttgctatcgggtcaacaacagcttggaccatgagtaccaaccacggcccgtggaggtgatcatcagttctgcgaaggagatggttggtcagaagatgaagtacagtattgtgagcaggaactgtgagcactttgtcacccagctgagatatggcaagtcccgctgtaaacaggtaaggacctctctggataatccatctccctctgcttggggctggactcacggggctgtgcagccaggcgatcactgtgaatgatgcaaatgcagcctcttagagacctgctggctgagagtcaggacctctgagctccaatgccagatctgcttctaatccacagagggtctttggacagttcccttccccccaggcctctccatgtgcagaggagggggtggatggaggagctctgaggatccttcccctctaaaacctatcctgaaaatggctcctgaagttctgggggtcatcaggagaatctgggccaacccaggacaatgacaggtcctgcaaccccccaaagagtactcaggcaagggacgctcagggtccgtggacctgtgtaagagctcaaggacatttgtgtgtaagatctgggcacagcctccatcccttgccccttcacagtctttcacatttgttgcccc

SEQ ID NO: 436174 - DNA, 484 bp, Homo sapiens
cggcttctctgggagaggattctgagccagccagctgggagagaagagaggagatgccaggccttaggggaggcaggagagaggggagagggagaggagttccaggcccttgggagggagaaagtgccagcctggcttgccgtgaacgctcaacaaaagctgcttgctttgcaggtggaaaaggccaaggttgaagtcggtgtggccacggcgcttggaatcctggttgttgctggatgctcttttgcgattaggagataccaaaaaaaagcgacagcctgaagcagccacaaaatcctgtgttagaagcagctgtgggggtcccagtggagatgagcctcccccatgcctccagcagcctgaccctcgtgccctgtctcaggcgttctctagatcctttcctctgtttccctctctcgctggcaaaagtatgatctaattgaaacaagactgaaggatcaataaacagccatctgccccttca

SEQ ID NO: 436175 - DNA, 524 bp, Homo sapiens
  misc_feature (24)..(24): n is a, c, g, or t
gcccctaccagatccctccttganccagtgatctaaggcccctcttttccctatctgcctaacagtgcctcacaaggcttgggggctggactccctctactccctctggccatagcccctcctggagatggggtcaaggcagcaggactgatcaagtgactactggttagccagaggagctcagctgagatatggcaagtcccgctgtaaacaggtggaaaaggccaaggttgaagtcggtgtggccacggcgcttggaatcctggttgttgctggatgctcttttgcgattaggagataccaaaaaaaagcgacagcctgaagcagccacaaaatcctgtgttagaagcagctgtgggggtcccagtggagatgagcctcccccatgcctccagcagcctgaccctcgtgccctgtctcaggcgttctctagatcctttcctctgtttccctctctcgctggcaaaagtatgatctaattgaaacaagactgaaggatcaataaacagccatctgccccttca

SEQ ID NO: 436176 - DNA, 827 bp, Homo sapiens
gccttcagcataaaagctgatccacaaacaagaggagcaccagacctcctcttggcttcgagatggcttcgccacaccaagagcccaaacctggagacctgattgagattttccgccttggctatgagcactgggccctgtatataggagatggctacgtgatccatctggctcctccaagtgagtaccccggggctggctcctccagtgtcttctcagtcctgagcaacagtgcagaggtgaaacgggagcgcctggaagatgtggtgggaggctgttgctatcgggtcaacaacagcttggaccatgagtaccaaccacggcccgtggaggtgatcatcagttctgcgaaggagatggttggtcagaagatgaagtacagtattgtgagcaggaactgtgagcactttgtcacccagctgagatatggcaagtcccgctgtaaacaggtggaaaaggccaaggttgaagtcggtgtggccacggcgcttggaatcctggttgttgctggatgctcttttgcgattaggagataccaaaaaaaagcgacagcctgaagcagccacaaaatcctgtgttagaagcagctgtgggggtcccagtggagatgagcctcccccatgcctccagcagcctgaccctcgtgccctgtctcaggcgttctctagatcctttcctctgtttccctctctcgctggcaaaagtatgatctaattgaaacaagactgaaggatcaataaacagccatctgccccttcaaaaaacacagttaatcactacctaccaaatgctatccgcagagttggattgtacataggtctttattt

SEQ ID NO: 436177 - DNA, 994 bp, Homo sapiens
  misc_feature (761)..(761): n is a, c, g, or t
  misc_feature (765)..(765): n is a, c, g, or t
  misc_feature (767)..(767): n is a, c, g, or t
  misc_feature (769)..(769): n is a, c, g, or t
  misc_feature (771)..(771): n is a, c, g, or t
  misc_feature (775)..(775): n is a, c, g, or t
gccttcagcataaaagctgatccacaaacaagaggagcaccagacctcctcttggcttcgagatggcttcgccacaccaagagcccaaacctggagacctgattgagattttccgccttggctatgagcactgggccctgtatataggagatggctacgtgatccatctggctcctccaagtgagtaccccggggctggctcctccagtgtcttctcagtcctgagcaacagtgcagaggtgaaacgggagcgcctggaagatgtggtgggaggctgttgctatcgggtcaacaacagcttggaccatgagtaccaaccacggcccgtggaggtgatcatcagttctgcgaaggagatggttggtcagaagatgaagtacagtattgtgagcaggaactgtgagcactttgtcacccagctgagatatggcaagtcccgctgtaaacaggtggaaaaggccaaggttgaagtcggtgtggccacggcgcttggaatcctggttgttgctggatgctcttttgcgattaggagataccaaaaaaaagcgacagcctgaagcagccacaaaatcctgtgttagaagcagctgtgggggtcccagtggagatgagcctcccccatgcctccagcagcctgaccctcgtgccctgtctcaggcgttctctagatcctttcctctgtttccctctctcgctggcaaaagtatgatctaattgaaacaagactgaaggatcaataaacagccatctgccccttcaanacananananaaanaaaaaacacaacaggggagacacgaccaaaagtatcccactcggaggggggcccaagacatgacagcgtcaccagggacgcgtggcaaccgggggggccccatagaagaggagcacggaaatagaaggccgaggccgagggagagaccggtaaaaagaaggcagaaaggggaaaaagagaaagctggaaacaacggcgaaaagacaccggaaaccgggg

SEQ ID NO: 436178 - DNA, 851 bp, Homo sapiens
ggatgcaagtgggtgagcctcacagcagtaccgacgtcagataagccaacaatatgtaaaacaaggatacaggttccttcttcaccatacaattttgctacatcaatgagcctgcctcacagccgtgaagcccacccactctgcctcctcctctgggatggcaattccttgatacttttcgtaattggaaaacccctgcggggggtcctcggggtgcagctgggggtcctgccgggcaagccgcagcagcatccctcgcttcaggtccatcccaaacttggagcacaggtcctcctccagtgtcttctcagtcctgagcaacagtgcagaggtgaaacgggagcgcctggaagatgtggtgggaggctgttgctatcgggtcaacaacagcttggaccatgagtaccaaccacggcccgtggaggtgatcatcagttctgcgaaggagatggttggtcagaagatgaagtacagtattgtgagcaggaactgtgagcactttgtcacccagctgagatatggcaagtcccgctgtaaacaggtggaaaaggccaaggttgaagtcggtgtggccacggcgcttggaatcctggttgttgctggatgctcttttgcgattaggagataccaaaaaaaagcgacagcctgaagcagccacaaaatcctgtgttagaagcagctgtgggggtcccagtggagatgagcctcccccatgcctccagcagcctgaccctcgtgccctgtctcaggcgttctctagatcctttcctctgtttccctctctcgctggcaaaagtatgatctaattgaaacaagactgaaggatcaataaacagccatctgccccttca

SEQ ID NO: 436179 - DNA, 609 bp, Homo sapiens
aaaaagtatcatcaaagtgtgaatgtaaagcaaattctgactgtatcataattgtaacgaaactttgctccctgctgtgctggaagatctaatctaagcaaaagtcagactttctaggtttcacgcttgttttcctgtgatagaaacctgctcataacatttagctcaggagaaataaaaaatcatatgcctaaaacatgaacatcactccctgagtgcattccccaagaagcactttataaaatcggataatacaatgttaaggattaggtctttagattgctcaagccaagaccagttcttctgatcagatttttttatcaaaatgctttgtcttcttactaattgtccagcctgagcaagcctctctgtagaattcatctctaatggttgtccattgacacacacaaagtagatactgtcaaactccattagctcagcaaatctctgtttgtagaattcttgagctagaggacctccatcttttgttctgcgccgtatgtggagaaccacagcagaagattgagaaattcagactagtgtttccacattcctaaaagccgtcactgtccgacaaatatatttcggtctttctgcatttagctgccc

SEQ ID NO: 436180 - DNA, 981 bp, Homo sapiens
cggacgcgtgggtcgacccacgcgtcgccacgcgatgggaattcaggtatgaaagaaaacaggcaaggaggcactgagggagaaagacacagactttatcgctctgtggctcattgttactggaatattctaaaactcttgttcacatgctattatgacttataaagcagcaacagctgaggcgcaccaggacacagcttccatttctttaacgtctgttcccttaacatcgctgaaatgatttactgttgaagagatgccttgcggtgtggccagctgtgaggagaaagcagctggcagtgttaggacattagtccaccttcagcgcagggtctctggccgggtctgactcagaaaccttggtactcgccccttggccacagtgcccagacccatgtaacccactggctcctgcattaacccagaaatacctcgcttctatctgtgcacttagctgggaacttacccactgtaatcacctaaataaagtgtttataaacatgaaaaacacagacaaaaacaaaacaaaacacagacacacacacagaaaaaacacaaagacagcacaagacaaaaaaaaccagaaacaacacgagcacggcacagaaagaacacacccacgaagaaagacgaaagacaggacaacacagccagggagcggagcccgccacacaagcagcggaggagagggagggcgcgggccggcaggcgcggagccgacgggcgtcaacagcagcaggggggcagcgcacgaaacaggagaggggagaggagcggcggaggaagggggcggcacggagaccagacatggaacgcgggaagcaaagagcaaacgagcaggcggaggcaaaccgcgagcaaggggcgaccgcaccgctacccgacgcaggagcgacgcaagacagcgcacggcgcacccaccccccaaggagaccgaacacgaacgacgcaggagagagaccgcacaaacaacgaaaggca

SEQ ID NO: 436181 - DNA, 630 bp, Homo sapiens
  misc_feature (499)..(500): n is a, c, g, or t
  misc_feature (520)..(520): n is a, c, g, or t
  misc_feature (522)..(522): n is a, c, g, or t
  misc_feature (538)..(538): n is a, c, g, or t
  misc_feature (558)..(558): n is a, c, g, or t
  misc_feature (560)..(561): n is a, c, g, or t
  misc_feature (564)..(565): n is a, c, g, or t
  misc_feature (569)..(569): n is a, c, g, or t
  misc_feature (619)..(619): n is a, c, g, or t
cgccgagtgacgtctttgccccgcgccgcgccgtcccacccatctccctggcctccggtcccaacttcgcttctctgctgaccctctctcgtcgccgctgccgccgccgcagctgccaaaatgtctacaggtccaactgctgccactggcagtaatcgaagacttcagcagacacaaaatcaagtagatgaggtggtggacataatgcgagttaacgtggacaaggttctggaaagagaccagaagctctctgagttagacgaccgtgcagacgcactgcaggcaggcgcttctcaatttgaaacgagcgcagccaagttgaagaggaaatattggtggaagaattgcaagatgtgggcaatcgggattactgttctggttatcttcatcatcatcatcatcgtgtgggttgtctcttcatgaagaaccagcggaactcaaaactgctgttcaagaaacctcttcaagacttttgacttagaacctgctatattatganngttcggtcgtgttctgtgtncnctttttttttttttantttccctttatcctttgtcnanncannttgnttttttttttcctctggatggcctttcgcacggggggggggttgtgcttnttgcgctttgg

SEQ ID NO: 436182 - DNA, 2687 bp, Homo sapiens
cgccgagtgacgtctttgccccgcgccgcgccgtcccacccatctccctggcctccggtcccaacttcgcttctctgctgaccctctctcgtcgccgctgccgccgccgcagctgccaaaatgtctacaggtccaactgctgccactggcagtaatcgaagacttcagcagacacaaaatcaagtagatgaggtggtggacataatgcgagttaacgtggacaaggttctggaaagagaccagaagctctctgagttagacgaccgtgcagacgcactgcaggcaggcgcttctcaatttgaaacgagcgcagccaagttgaagaggaaatattggtggaagaattgcaagatgtgggcaatcgggattactgttctggttatcttcatcatcatcatcatcgtgtgggttgtctcttcatgaagaaccagcggaactcaaaactgctgttcaagaaacctcttcaagacttttgacttagaacctgctatattatcaagcttacctactgttatctctaaaattttttttgtgttaatgtaaagttgaatttctaggaaacgtgcctttgttttttaatatgcactccaaattagaaggccggccccgtccacattttgcacagtgcctttacagatttacgtatgggctgatgaagaggccttcttaagttccagagtgctataatctagatgtaatgttgtcactaattaattgccattactcccagttagttacccttgtcatttggcattattttcagaaccacattttaaacctttgggtaatcagatttccaacttatgccttccagaaaaaaacactactgcctaacacaaatctgtgataacaacaggctgtgccttattttgataattttctgattccctagaagagaaccctctactttttgtaagcactactgactctcgctgtatttaagatgctggtgaagagcttttgctcttgcattagatttgaagatgtttacattgttgttattgttatgtatcacttgctaaaaatattgttttaatcagagataacctctttaaaaaaatttttaaagaactatggctatgaccaaagcttctattttgccaaaaagttaaataccgataaaatggccttaagtgtattcctgacagttaaattcagaaacgtgccaaatggaactcaaggtgccccttcagaattaaaatcattaccttgtgtgtgaaccttctacatcttcataggcctttcttccttttgaaaggctgtagacagtgtggctccccttctgattcagtattttgcatgggggttagagaaggtttgaggtagactctgaccgtctcataaaagagttctacccagcagttggcagattatcagctgtggactccagcatgtttctgataattatgcaagcaacaattctgtagcctcaagtaagaccacctgtgaacttgatcattatctggcccaaatatgaagataaactataactttggagtttgtttcctatttgtattcacattctgcttcctaaatcagttttctaaattatgcctgcaattaggcattggtcaggggtgaatggctcttttcacagagagtagccaaccagagacctttgctttgatatcatcaactgcagacaatgctgttgatgggaatgctggaagcagaaactttgtcatcggaaaaacttttcttgtatgcatgagactcaacatcaggatccacagcttaaagatgggaattcaggtatgaaagaaaacaggcaaggaggcactgagggagaaagacacagactttatcgctctgtggctcattgttactggaatattctaaaactcttgttcacatgctattatgacttataaagcagcaacagctgaggcgcaccaggacacagcttccatttctttaacgtctgttcccttaacatcgctgaaatgatttactgttgaagagatgccttgcggtgtggccagctgtgaggagaaagcagctggcagtgttaggacattagtccaccttcagcgcagggtctctggccgggtctgactcagaaaccttggtactcgccccttggccacagtgcccagacccatgtaacccactggctcctgcattaacccagaaatacctcgcttctatctgtgcacttagctgggaacttacccactgtaatcacctaaataaagtgtttataaacatgaaaaacacagacaaaaacaaaacaaaacacagacacacacacagaaaaaacacaaagacagcacaagacaaaaaaaaccagaaacaacacgagcacggcacagaaagaacacacccacgaagaaagacgaaagacaggacaacacagccagggagcggagcccgccacacaagcagcggaggagagggagggcgcgggccggcaggcgcggagccgacgggcgtcaacagcagcaggggggcagcgcacgaaacaggagaggggagaggagcggcggaggaagggggcggcacggagaccagacatggaacgcgggaagcaaagagcaaacgagcaggcggaggcaaaccgcgagcaaggggcgaccgcaccgctacccgacgcaggagcgacgcaagacagcgcacggcgcacccaccccccaaggagaccgaacacgaacgacgcaggagagagaccgcacaaacaacgaaaggca

SEQ ID NO: 436183 - DNA, 3681 bp, Homo sapiens
aagatctagagccaaggtacacaggacctgatctaaaaacaagctgtcctgcagccagctgtgttgactctctaaacctcactttactcatttgtaaaataggagtaatattcccctcagagagttatgagggttaaaggaggaaaagcatggaaagagtctagcgccacggcatggtccttacttatctaccagatactaaactccgtgaggacggtgatgagatctgttgtagccctggtcattgacacatgacagatgtaaagtgactgttcaaacagcccatcagactgttgtataccaaggcacatgctaggtgctatctaggatacagagaagagagtaagaagacccaggaacctgtgatctattcgaggaggcgggactttatacctgaaaaaccaaagtgatactttccaagtaatggagccaataatgacttcagagtcagagtggttaagaaagatctgcatggggagaaataaagcctttgatgaagattttaaaagatgagtaccttcctgggccgggcgcggtggctcatgcctgtaatcccagcactttgggaggccgaggtggacggatcacttgaggtcaggagttcgagaccagcttgaccaacatggtgaaaccccgtctctactaaaaaatacaaaattagccgggcgtggtggcacatgcctgtaatcccagctgcttgggagactgaggcaagagaattgcttggacccaggaagcggaggttacagtgagccgagatcgcgccattgcactccagcccgggcaacaggagcgaaactccgtctctcaaaagagggggaaaaagaaagagtaccttcctaaaagaggaggcatttcttcaacacacctttccactcacaccacccactccctgcatcccagtgttcctgactctgtttctgtaaattaatctatttttccatattggaaaaagggcattctgtaactgtttgtaactatgaaaacagttccttccacaatgaaaagatcaggaaagtactgagtacattcaagcagatgtgtgccttagaacaagtttcaaaaaaggacagtagagcttacctatcgtgggatcagatacttcagggatacaaagtctacaggtccaactgctgccactggcagtaatcgaagacttcagcagacacaaaatcaagtagatgaggtggtggacataatgcgagttaacgtggacaaggttctggaaagagaccagaagctctctgagttagacgaccgtgcagacgcactgcaggcaggcgcttctcaatttgaaacgagcgcagccaagttgaagaggaaatattggtggaagaattgcaagatgtgggcaatcgggattactgttctggttatcttcatcatcatcatcatcgtgtgggttgtctcttcatgaagaaccagcggaactcaaaactgctgttcaagaaacctcttcaagacttttgacttagaacctgctatattatcaagcttacctactgttatctctaaaattttttttgtgttaatgtaaagttgaatttctaggaaacgtgcctttgttttttaatatgcactccaaattagaaggccggccccgtccacattttgcacagtgcctttacagatttacgtatgggctgatgaagaggccttcttaagttccagagtgctataatctagatgtaatgttgtcactaattaattgccattactcccagttagttacccttgtcatttggcattattttcagaaccacattttaaacctttgggtaatcagatttccaacttatgccttccagaaaaaaacactactgcctaacacaaatctgtgataacaacaggctgtgccttattttgataattttctgattccctagaagagaaccctctactttttgtaagcactactgactctcgctgtatttaagatgctggtgaagagcttttgctcttgcattagatttgaagatgtttacattgttgttattgttatgtatcacttgctaaaaatattgttttaatcagagataacctctttaaaaaaatttttaaagaactatggctatgaccaaagcttctattttgccaaaaagttaaataccgataaaatggccttaagtgtattcctgacagttaaattcagaaacgtgccaaatggaactcaaggtgccccttcagaattaaaatcattaccttgtgtgtgaaccttctacatcttcataggcctttcttccttttgaaaggctgtagacagtgtggctccccttctgattcagtattttgcatgggggttagagaaggtttgaggtagactctgaccgtctcataaaagagttctacccagcagttggcagattatcagctgtggactccagcatgtttctgataattatgcaagcaacaattctgtagcctcaagtaagaccacctgtgaacttgatcattatctggcccaaatatgaagataaactataactttggagtttgtttcctatttgtattcacattctgcttcctaaatcagttttctaaattatgcctgcaattaggcattggtcaggggtgaatggctcttttcacagagagtagccaaccagagacctttgctttgatatcatcaactgcagacaatgctgttgatgggaatgctggaagcagaaactttgtcatcggaaaaacttttcttgtatgcatgagactcaacatcaggatccacagcttaaagatgggaattcaggtatgaaagaaaacaggcaaggaggcactgagggagaaagacacagactttatcgctctgtggctcattgttactggaatattctaaaactcttgttcacatgctattatgacttataaagcagcaacagctgaggcgcaccaggacacagcttccatttctttaacgtctgttcccttaacatcgctgaaatgatttactgttgaagagatgccttgcggtgtggccagctgtgaggagaaagcagctggcagtgttaggacattagtccaccttcagcgcagggtctctggccgggtctgactcagaaaccttggtactcgccccttggccacagtgcccagacccatgtaacccactggctcctgcattaacccagaaatacctcgcttctatctgtgcacttagctgggaacttacccactgtaatcacctaaataaagtgtttataaacatgaaaaacacagacaaaaacaaaacaaaacacagacacacacacagaaaaaacacaaagacagcacaagacaaaaaaaaccagaaacaacacgagcacggcacagaaagaacacacccacgaagaaagacgaaagacaggacaacacagccagggagcggagcccgccacacaagcagcggaggagagggagggcgcgggccggcaggcgcggagccgacgggcgtcaacagcagcaggggggcagcgcacgaaacaggagaggggagaggagcggcggaggaagggggcggcacggagaccagacatggaacgcgggaagcaaagagcaaacgagcaggcggaggcaaaccgcgagcaaggggcgaccgcaccgctacccgacgcaggagcgacgcaagacagcgcacggcgcacccaccccccaaggagaccgaacacgaacgacgcaggagagagaccgcacaaacaacgaaaggca

SEQ ID NO: 436184 - DNA, 2900 bp, Homo sapiens
aagatctagagccaaggtacacaggacctgatctaaaaacaagctgtcctgcagccagctgtgttgactctctaaacctcactttactcatttgtaaaataggagtaatattcccctcagagagttatgagggttaaaggaggaaaagcatggaaagagtctagcgccacggcatggtccttacttatctaccagatactaaactccgtgaggacggtgatgagatctgttgtagccctggtcattgacacatgacagatgtaaagtgactgttcaaacagcccatcagactgttgtataccaaggcacatgctaggtgctatctaggatacaggcgtgagccaccgcacctggccctgttcctccattctttgtgcattacttgctgtgatcacactcatctaggtggtggacataatgcgagttaacgtggacaaggttctggaaagagaccagaagctctctgagttagacgaccgtgcagacgcactgcaggcaggcgcttctcaatttgaaacgagcgcagccaagttgaagaggaaatattggtggaagaattgcaagatgtgggcaatcgggattactgttctggttatcttcatcatcatcatcatcgtgtgggttgtctcttcatgaagaaccagcggaactcaaaactgctgttcaagaaacctcttcaagacttttgacttagaacctgctatattatcaagcttacctactgttatctctaaaattttttttgtgttaatgtaaagttgaatttctaggaaacgtgcctttgttttttaatatgcactccaaattagaaggccggccccgtccacattttgcacagtgcctttacagatttacgtatgggctgatgaagaggccttcttaagttccagagtgctataatctagatgtaatgttgtcactaattaattgccattactcccagttagttacccttgtcatttggcattattttcagaaccacattttaaacctttgggtaatcagatttccaacttatgccttccagaaaaaaacactactgcctaacacaaatctgtgataacaacaggctgtgccttattttgataattttctgattccctagaagagaaccctctactttttgtaagcactactgactctcgctgtatttaagatgctggtgaagagcttttgctcttgcattagatttgaagatgtttacattgttgttattgttatgtatcacttgctaaaaatattgttttaatcagagataacctctttaaaaaaatttttaaagaactatggctatgaccaaagcttctattttgccaaaaagttaaataccgataaaatggccttaagtgtattcctgacagttaaattcagaaacgtgccaaatggaactcaaggtgccccttcagaattaaaatcattaccttgtgtgtgaaccttctacatcttcataggcctttcttccttttgaaaggctgtagacagtgtggctccccttctgattcagtattttgcatgggggttagagaaggtttgaggtagactctgaccgtctcataaaagagttctacccagcagttggcagattatcagctgtggactccagcatgtttctgataattatgcaagcaacaattctgtagcctcaagtaagaccacctgtgaacttgatcattatctggcccaaatatgaagataaactataactttggagtttgtttcctatttgtattcacattctgcttcctaaatcagttttctaaattatgcctgcaattaggcattggtcaggggtgaatggctcttttcacagagagtagccaaccagagacctttgctttgatatcatcaactgcagacaatgctgttgatgggaatgctggaagcagaaactttgtcatcggaaaaacttttcttgtatgcatgagactcaacatcaggatccacagcttaaagatgggaattcaggtatgaaagaaaacaggcaaggaggcactgagggagaaagacacagactttatcgctctgtggctcattgttactggaatattctaaaactcttgttcacatgctattatgacttataaagcagcaacagctgaggcgcaccaggacacagcttccatttctttaacgtctgttcccttaacatcgctgaaatgatttactgttgaagagatgccttgcggtgtggccagctgtgaggagaaagcagctggcagtgttaggacattagtccaccttcagcgcagggtctctggccgggtctgactcagaaaccttggtactcgccccttggccacagtgcccagacccatgtaacccactggctcctgcattaacccagaaatacctcgcttctatctgtgcacttagctgggaacttacccactgtaatcacctaaataaagtgtttataaacatgaaaaacacagacaaaaacaaaacaaaacacagacacacacacagaaaaaacacaaagacagcacaagacaaaaaaaaccagaaacaacacgagcacggcacagaaagaacacacccacgaagaaagacgaaagacaggacaacacagccagggagcggagcccgccacacaagcagcggaggagagggagggcgcgggccggcaggcgcggagccgacgggcgtcaacagcagcaggggggcagcgcacgaaacaggagaggggagaggagcggcggaggaagggggcggcacggagaccagacatggaacgcgggaagcaaagagcaaacgagcaggcggaggcaaaccgcgagcaaggggcgaccgcaccgctacccgacgcaggagcgacgcaagacagcgcacggcgcacccaccccccaaggagaccgaacacgaacgacgcaggagagagaccgcacaaacaacgaaaggca

SEQ ID NO: 436185 - DNA, 2476 bp, Homo sapiens
cgccgagtgacgtctttgccccgcgccgcgccgtcccacccatctccctggcctccggtcccaacttcgcttctctgctgaccctctctcgtcgccgctgccgccgccgcagctgccaaaatgtctacaggtccaactgctgccactggcagtaatcgaagacttcagcagacacaaaatcaagtagatgagtgtgggttgtctcttcatgaagaaccagcggaactcaaaactgctgttcaagaaacctcttcaagacttttgacttagaacctgctatattatcaagcttacctactgttatctctaaaattttttttgtgttaatgtaaagttgaatttctaggaaacgtgcctttgttttttaatatgcactccaaattagaaggccggccccgtccacattttgcacagtgcctttacagatttacgtatgggctgatgaagaggccttcttaagttccagagtgctataatctagatgtaatgttgtcactaattaattgccattactcccagttagttacccttgtcatttggcattattttcagaaccacattttaaacctttgggtaatcagatttccaacttatgccttccagaaaaaaacactactgcctaacacaaatctgtgataacaacaggctgtgccttattttgataattttctgattccctagaagagaaccctctactttttgtaagcactactgactctcgctgtatttaagatgctggtgaagagcttttgctcttgcattagatttgaagatgtttacattgttgttattgttatgtatcacttgctaaaaatattgttttaatcagagataacctctttaaaaaaatttttaaagaactatggctatgaccaaagcttctattttgccaaaaagttaaataccgataaaatggccttaagtgtattcctgacagttaaattcagaaacgtgccaaatggaactcaaggtgccccttcagaattaaaatcattaccttgtgtgtgaaccttctacatcttcataggcctttcttccttttgaaaggctgtagacagtgtggctccccttctgattcagtattttgcatgggggttagagaaggtttgaggtagactctgaccgtctcataaaagagttctacccagcagttggcagattatcagctgtggactccagcatgtttctgataattatgcaagcaacaattctgtagcctcaagtaagaccacctgtgaacttgatcattatctggcccaaatatgaagataaactataactttggagtttgtttcctatttgtattcacattctgcttcctaaatcagttttctaaattatgcctgcaattaggcattggtcaggggtgaatggctcttttcacagagagtagccaaccagagacctttgctttgatatcatcaactgcagacaatgctgttgatgggaatgctggaagcagaaactttgtcatcggaaaaacttttcttgtatgcatgagactcaacatcaggatccacagcttaaagatgggaattcaggtatgaaagaaaacaggcaaggaggcactgagggagaaagacacagactttatcgctctgtggctcattgttactggaatattctaaaactcttgttcacatgctattatgacttataaagcagcaacagctgaggcgcaccaggacacagcttccatttctttaacgtctgttcccttaacatcgctgaaatgatttactgttgaagagatgccttgcggtgtggccagctgtgaggagaaagcagctggcagtgttaggacattagtccaccttcagcgcagggtctctggccgggtctgactcagaaaccttggtactcgccccttggccacagtgcccagacccatgtaacccactggctcctgcattaacccagaaatacctcgcttctatctgtgcacttagctgggaacttacccactgtaatcacctaaataaagtgtttataaacatgaaaaacacagacaaaaacaaaacaaaacacagacacacacacagaaaaaacacaaagacagcacaagacaaaaaaaaccagaaacaacacgagcacggcacagaaagaacacacccacgaagaaagacgaaagacaggacaacacagccagggagcggagcccgccacacaagcagcggaggagagggagggcgcgggccggcaggcgcggagccgacgggcgtcaacagcagcaggggggcagcgcacgaaacaggagaggggagaggagcggcggaggaagggggcggcacggagaccagacatggaacgcgggaagcaaagagcaaacgagcaggcggaggcaaaccgcgagcaaggggcgaccgcaccgctacccgacgcaggagcgacgcaagacagcgcacggcgcacccaccccccaaggagaccgaacacgaacgacgcaggagagagaccgcacaaacaacgaaaggca

SEQ ID NO: 436186 - DNA, 1794 bp, Homo sapiens
cggacgcgtgggtcgacccacgcgtcgccacgcgtctcgctgtatttaagatgctggtgaagagcttttgctcttgcattagatttgaagatgtttacattgttgttattgttatgtatcacttgctaaaaatattgttttaatcagagataacctctttaaaaaaatttttaaagaactatggctatgaccaaagcttctattttgccaaaaagttaaataccgataaaatggccttaagtgtattcctgacagttaaattcagaaacgtgccaaatggaactcaaggtgccccttcagaattaaaatcattaccttgtgtgtgaaccttctacatcttcataggcctttcttccttttgaaaggctgtagacagtgtggctccccttctgattcagtattttgcatgggggttagagaaggtttgaggtagactctgaccgtctcataaaagagttctacccagcagttggcagattatcagctgtggactccagcatgtttctgataattatgcaagcaacaattctgtagcctcaagtaagaccacctgtgaacttgatcattatctggcccaaatatgaagataaactataactttggagtttgtttcctatttgtattcacattctgcttcctaaatcagttttctaaattatgcctgcaattaggcattggtcaggggtgaatggctcttttcacagagagtagccaaccagagacctttgctttgatatcatcaactgcagacaatgctgttgatgggaatgctggaagcagaaactttgtcatcggaaaaacttttcttgtatgcatgagactcaacatcaggatccacagcttaaagatgggaattcaggtatgaaagaaaacaggcaaggaggcactgagggagaaagacacagactttatcgctctgtggctcattgttactggaatattctaaaactcttgttcacatgctattatgacttataaagcagcaacagctgaggcgcaccaggacacagcttccatttctttaacgtctgttcccttaacatcgctgaaatgatttactgttgaagagatgccttgcggtgtggccagctgtgaggagaaagcagctggcagtgttaggacattagtccaccttcagcgcagggtctctggccgggtctgactcagaaaccttggtactcgccccttggccacagtgcccagacccatgtaacccactggctcctgcattaacccagaaatacctcgcttctatctgtgcacttagctgggaacttacccactgtaatcacctaaataaagtgtttataaacatgaaaaacacagacaaaaacaaaacaaaacacagacacacacacagaaaaaacacaaagacagcacaagacaaaaaaaaccagaaacaacacgagcacggcacagaaagaacacacccacgaagaaagacgaaagacaggacaacacagccagggagcggagcccgccacacaagcagcggaggagagggagggcgcgggccggcaggcgcggagccgacgggcgtcaacagcagcaggggggcagcgcacgaaacaggagaggggagaggagcggcggaggaagggggcggcacggagaccagacatggaacgcgggaagcaaagagcaaacgagcaggcggaggcaaaccgcgagcaaggggcgaccgcaccgctacccgacgcaggagcgacgcaagacagcgcacggcgcacccaccccccaaggagaccgaacacgaacgacgcaggagagagaccgcacaaacaacgaaaggca

SEQ ID NO: 436187 - DNA, 928 bp, Homo sapiens
  misc_feature (13)..(13): n is a, c, g, or t
ccctagaggattnctagggtcttagggagaaagacacagactttatcgctctgtggctcattgttactggaatattctaaaactcttgttcacatgctattatgacttataaagcagcaacagctgaggcgcaccaggacacagcttccatttctttaacgtctgttcccttaacatcgctgaaatgatttactgttgaagagatgccttgcggtgtggccagctgtgaggagaaagcagctggcagtgttaggacattagtccaccttcagcgcagggtctctggccgggtctgactcagaaaccttggtactcgccccttggccacagtgcccagacccatgtaacccactggctcctgcattaacccagaaatacctcgcttctatctgtgcacttagctgggaacttacccactgtaatcacctaaataaagtgtttataaacatgaaaaacacagacaaaaacaaaacaaaacacagacacacacacagaaaaaacacaaagacagcacaagacaaaaaaaaccagaaacaacacgagcacggcacagaaagaacacacccacgaagaaagacgaaagacaggacaacacagccagggagcggagcccgccacacaagcagcggaggagagggagggcgcgggccggcaggcgcggagccgacgggcgtcaacagcagcaggggggcagcgcacgaaacaggagaggggagaggagcggcggaggaagggggcggcacggagaccagacatggaacgcgggaagcaaagagcaaacgagcaggcggaggcaaaccgcgagcaaggggcgaccgcaccgctacccgacgcaggagcgacgcaagacagcgcacggcgcacccaccccccaaggagaccgaacacgaacgacgcaggagagagaccgcacaaacaacgaaaggca

SEQ ID NO: 436188 - DNA, 468 bp, Homo sapiens
tgaaaaaacagttaaagttatgtcagatactgttgttaaataatatagtaatgttttgatctgatggttttgttcatgaacttatacaattttagattttcacagtaagaaacccattgtaattctgtcctgcctggaaattctgtttacttacaaaatcaaattggatttttttttttagccaaaggaattttaaggagagttgtttttttattgaggcaaaattaccataacatacaactaaacattttaaactgtatataattgagtgttatttagtatattgataatattttgcaaccattacctctttccattttcagaactttttcatcaccccagaacacctcatgcccatttagtaatcattcactatttccccttcctcccattctctggttacctctaatcagctctctctttctgtggatttgcctgttctgggtatgtcatataaaaggaatcata

SEQ ID NO: 436189 - DNA, 384 bp, Homo sapiens
atttggaatcgtaatgtactcatgctcatgcctttacatgttccaggtctacaggtccaactgctgccactggcagtaatcgaagacttcagcagacacaaaatcaagtagatgaggtattgctctgaaatgttggaaatatgaattttaaacaaatatgagtactctggaaatctgtttagaaaaagtatcatcaaagtgtgaatgtaaagcaaattctgactgtatcataattgtaacgaaactttgctccctgctgtgctggaagatctaatctaagcaaaagtcagactttctaggtttcacgcttgttttcctgtgatagaaacctgctcataacatttagctcaggagaaataaaaaatcatatgcctaaaacatgaa

SEQ ID NO: 436190 - DNA, 194 bp, Homo sapiens
cactgagagactaacctgctgtttcccctgcctttttgcatctctcctccttcttagtgtgggttgtctcttcatgaagaaccagcggaactcaaaactgctgttcaagaaacctcttcaagacttttgacttagaacctgctatattatcaagcttacctactgttatctctaaaattttttttgtgttaatg

SEQ ID NO: 436191 - DNA, 3475 bp, Homo sapiens
cgccgagtgacgtctttgccccgcgccgcgccgtcccacccatctccctggcctccggtcccaacttcgcttctctgctgaccctctctcgtcgccgctgccgccgccgcagctgccaaaatgtctacaggtccaactgctgccactggcagtaatcgaagacttcagcagacacaaaatcaagtagatgaggtggtggacataatgcgagttaacgtggacaaggttctggaaagagaccagaagctctctgagttagacgaccgtgcagacgcactgcaggcaggcgcttctcaatttgaaacgagcgcagccaagttgaagaggaaatattggtggaagaattgcaagatgtgggcaatcgggattactgttctggttatcttcatcatcatcatcatcgtgtgggttgtctcttcatgaagaaccagcggaactcaaaactgctgttcaagaaacctcttcaagacttttgacttagaacctgctatattatcaagcttacctactgttatctctaaaattttttttgtgttaatgtaaagttgaatttctaggaaacgtgcctttgttttttaatatgcactccaaattagaaggccggccccgtccacattttgcacagtgcctttacagatttacgtatgggctgatgaagaggccttcttaagttccagagtgctataatctagatgtaatgttgtcactaattaattgccattactcccagttagttacccttgtcatttggcattattttcagaaccacattttaaacctttgggtaatcagatttccaacttatgccttccagaaaaaaacactactgcctaacacaaatctgtgataacaacaggctgtgccttattttgataattttctgattccctagaagagaaccctctactttttgtaagcactactgactctcgctgtatttaagatgctggtgaagagcttttgctcttgcattagatttgaagatgtttacattgttgttattgttatgtatcacttgctaaaaatattgttttaatcagagataacctctttaaaaaaatttttaaagaactatggctatgaccaaagcttctattttgccaaaaagttaaataccgataaaatggccttaagtgtattcctgacagttaaattcagaaacgtgccaaatggaactcaaggtgccccttcagaattaaaatcattaccttgtgtgtgaaccttctacatcttcataggcctttcttccttttgaaaggctgtagacagtgtggctccccttctgattcagtattttgcatgggggttagagaaggtttgaggtagactctgaccgtctcataaaagagttctacccagcagttggcagattatcagctgtggactccagcatgtttctgataattatgcaagcaacaattctgtagcctcaagtaagaccacctgtgaacttgatcattatctggcccaaatatgaagataaactataactttggagtttgtttcctatttgtattcacattctgcttcctaaatcagttttctaaattatgcctgcaattaggcattggtcaggggtgaatggctcttttcacagagagtagccaaccagagacctttgctttgatatcatcaactgcagacaatgctgttgatgggaatgctggaagcagaaactttgtcatcggaaaaacttttcttgtatgcatgagactcaacatcaggatccacagcttaaagatgggaattcaggtatgaaagaaaacaggcaaggaggcactgagggagaaagacacagactttatcgctctgtggctcattgttactggaatattctaaaactcttgttcacatgctattatgacttataaagcagcaacagctgaggcgcaccaggacacagcttccatttctttaacgtctgttcccttaacatcgctgaaatgatttactgttgaagagatgccttgcggtgtggccagctgtgaggagaaagcagctggcagtgttaggacattagtccaccttcagcgcagggtctctggccgggtctgactcagaaaccttggtactcgccccttggccacagtgcccagacccatgtaacccactggctcctgcattaacccagaaatacctcgcttctatctgtgcacttagctgggaacttacccactgtaatcacctaaataaagtgtttataaacatgaaaaaaaacaaagaaaaaaaaaaaaaaaaaaaaaaacaaaaaaaaaaaaaaaaaaaaaaaaaaacaaaaacaaaaaaaaaaaaaaaaaaaaaacaaaaaacaaaaaagaaaagaaggagaggggaggggagagcaaaaagaaacaaacacagagaagaacagagaaacaagcagacaaacaaaaagaggaagcacagggaagcagaaaaacagcaagcaagaaaaaaaaaagaaagaaagagaggaacgcaaagaaaaaaaaagagagaagaagacgaccagcagaaaacaacaaaacaaacatacacaagaacgacgacaaccagcgaccaaacagacaacagacgcggtcgctaccaagagaaagaccaagagaaaaacgaccaaaagaacgaagaaaacagacaagcacagaagacaacacggacggtcgaagacaaacacacgacagacacgaacaagaggagagagaaggggagcaggggaggcagcacggcgacagagaaccgaacaaaagaaagagcaaagcagagaaagggcgcagcgaggcagcgccagcacacgcgccagcgaacaacagcaccaggagacagaaggggagagagagcaagagaacgagaaggccgcaccaaaacccgaaaccagagagaacagaggagagacagcagacaggacgaaagacagaagaaggcacgagcatagagcaaaccaaaatgcagagcagcaagagagtgagaggacgaagcggactcagtgccagagcacgcagccacgcacgaagaggacacggcacagaaccgaagcaggagcgcggccagcgcgggcccagacgaggggacagaagcggagatggaacaaacacgaccgagcaagcgcgagggaggagaggagagagcagcagggtcagacagagaagacagagggaccgaagaaggagcaggcagaagcacagggacagagggaacggaggcgaacaagagcagagagagaacggcagcggaaaaaagagagacgagacaggacagacgagcacaaaaaaggatagaaacatgcacacgcgaagaggggagcgccacgggaaagcgacgaaagcgacgaagcaaggcaaagacggaggacgcaacagcgagccgccgacgcgaaaggagcgagcggagagacgagacgacgaaaccgcacgagacacgcacactagaggagccagcggcagccagcaggcggataggagaacgagacacagagacgagcggagcacgcgagcacaca

SEQ ID NO: 436192 - DNA, 1354 bp, Homo sapiens
ctacctcaaaccttctctaacccccatgcaaaatactgaatcagaaggggactccagcatgtttctgataattatgcaagcaacaattctgtagcctcaagtaagaccacctgtgaacttgatcattatctggcccaaatatgaagataaactataactttggagtttgtttcctatttgtattcacattctgcttcctaaatcagttttctaaattatgcctgcaattaggcattggtcaggggtgaatggctcttttcacagagagtagccaaccagagacctttgctttgatatcatcaactgcagacaatgctgttgatgggaatgctggaagcagaaactttgtcatcggaaaaacttttcttgtatgcatgagactcaacatcaggatccacagcttaaagatgggaattcaggtatgaaagaaaacaggcaaggaggcactgagggagaaagacacagactttatcgctctgtggctcattgttactggaatattctaaaactcttgttcacatgctattatgacttataaagcagcaacagctgaggcgcaccaggacacagcttccatttctttaacgtctgttcccttaacatcgctgaaatgatttactgttgaagagatgccttgcggtgtggccagctgtgaggagaaagcagctggcagtgttaggacattagtccaccttcagcgcagggtctctggccgggtctgactcagaaaccttggtactcgccccttggccacagtgcccagacccatgtaacccactggctcctgcattaacccagaaatacctcgcttctatctgtgcacttagctgggaacttacccactgtaatcacctaaataaagtgtttataaacatgaaaaacacagacaaaaacaaaacaaaacacagacacacacacagaaaaaacacaaagacagcacaagacaaaaaaaaccagaaacaacacgagcacggcacagaaagaacacacccacgaagaaagacgaaagacaggacaacacagccagggagcggagcccgccacacaagcagcggaggagagggagggcgcgggccggcaggcgcggagccgacgggcgtcaacagcagcaggggggcagcgcacgaaacaggagaggggagaggagcggcggaggaagggggcggcacggagaccagacatggaacgcgggaagcaaagagcaaacgagcaggcggaggcaaaccgcgagcaaggggcgaccgcaccgctacccgacgcaggagcgacgcaagacagcgcacggcgcacccaccccccaaggagaccgaacacgaacgacgcaggagagagaccgcacaaacaacgaaaggca

SEQ ID NO: 436193 - DNA, 2267 bp, Homo sapiens
cgccgagtgacgtctttgccccgcgccgcgccgtcccacccatctccctggcctccggtcccaacttcgcttctctgctgaccctctctcgtcgccgctgccgccgccgcagctgccaaaatgtctacaggtccaactgctgccactggcagtaatcgaagacttcagcagacacaaaatcaagtagatgaggtggtggacataatgcgagttaacgtggacaaggttctggaaagagaccagaagctctctgagttagacgaccgtgcagacgcactgcaggcaggcgcttctcaatttgaaacgagcgcagccaagttgaagaggaaatattggtggaagaattgcaagatgtgggcaatcgggattactgttctggttatcttcatcatcatcatcatcgtgtgggttgtctcttcatgaagaaccagcggaactcaaaactgctgttcaagaaacctcttcaagacttttgacttagaacctgctatattatcaagcttacctactgttatctctaaaattttttttgtgttaatgtaaagttgaatttctaggaaacgtgcctttgttttttaatatgcactccaaattagaaggccggccccgtccacattttgcacagtgcctttacagatttacgtatgggctgatgaagaggccttcttaagttccagagtgctataatctagatgtaatgttgtcactaattaattgccattactcccagttagttacccttgtcatttggcattattttcagaaccacattttaaacctttgggtaatcagatttccaacttatgccttccagaaaaaaacactactgcctaacacaaatctgtgataacaacaggctgtgccttattttgataattttctgattccctagaagagaaccctctactttttgtaagcactactgactctcgctgtatttaagatgctggtgaagagcttttgctcttgcattagatttgaagatgtttacattgttgttattgttatgtatcacttgctaaaaatattgttttaatcagagataacctctttaaaaaaatttttaaagaactatggctatgaccaaagcttctattttgccaaaaagttaaataccgataaaatggccttaagtgtattcctgacagttaaattcagaaacgtgccaaatggaactcaaggtgccccttcagaattaaaatcattaccttgtgtgtgaaccttctacatcttcataggcctttcttccttttgaaaggctgtagacagtgtggctccccttctgattcagtattttgcatgggggttagagaaggtttgaggtagactctgaccgtctcataaaagagttctacccagcagttggcagattatcagctgtggactccagcatgtttctgataattatgcaagcaacaattctgtagcctcaagtaagaccacctgtgaacttgatcattatctggcccaaatatgaagataaactataactttggagtttgtttcctatttgtattcacattctgcttcctaaatcagttttctaaattatgcctgcaattaggcattggtcaggggtgaatggctcttttcacagagagtagccaaccagagacctttgctttgatatcatcaactgcagacaatgctgttgatgggaatgctggaagcagaaactttgtcatcggaaaaacttttcttgtatgcatgagactcaacatcaggatccacagcttaaagatgggaattcaggtatgaaagaaaacaggcaaggaggcactgagggagaaagacacagactttatcgctctgtggctcattgttactggaatattctaaaactcttgttcacatgctattatgacttataaagcagcaacagctgaggcgcaccaggacacagcttccatttctttaacgtctgttcccttaacatcgctgaaatgatttactgttgaagagatgccttgcggtgtggccagctgtgaggagaaagcagctggcagtgttaggacattagtccaccttcagcgcagggtctctggccgggtctgactcagaaaccttggtactcgccccttggccacagtgcccagacccatgtaacccactggctcctgcattaacccagaaatacctcgcttctatctgtgcacttagctgggaacttacccactgtaatcacctaaatagaggagtcggggggtggggtggggtgggggtggggtgtgggggggtgagtgggggggggggtgtgcggggggttg

SEQ ID NO: 436194 - DNA, 1214 bp, Homo sapiens
cgccgagtgacgtctttgccccgcgccgcgccgtcccacccatctccctggcctccggtcccaacttcgcttctctgctgaccctctctcgtcgccgctgccgccgccgcagctgccaaaatgtctacaggtccaactgctgccactggcagtaatcgaagacttcagcagacacaaaatcaagtagatgaggtggtggacataatgcgagttaacgtggacaaggttctggaaagagaccagaagctctctgagttagacgaccgtgcagacgcactgcaggcaggcgcttctcaatttgaaacgagcgcagccaagttgaagaggaaatattggtggaagaattgcaagatgtgggcaatcgggattactgttctggttatcttcatcatcatcatcatcgtgtgggttgtctcttcatgaagaaccagcggaactcaaaactgctgttcaagaaacctcttcaagacttttgacttagaacctgctatattatcaagcttacctactgttatctctaaaattttttttgtgttaatgtaaagttgaatttctaggaaacgtgcctttgttttttaatatgcactccaaattagaaggccggccccgtccacattttgcacagtgcctttacagatttacgtatgggctgatgaagaggccttcttaagttccagagtgctataatctagatgtaatgttgtcactaattaattgccattactcccagttagttacccttgtcatttggcattattttcagaaccacattttaaacctttgggtaatcagatttccaacttatgccttccagaaaaaaacactactgcctaacacaaatctgtgataacaacaggctgtgccttattttgataattttctgattccctagaagagaaccctctactttttgtaagcactactgactctcgctgtatttaagatgctggtgaagagcttttgctcttgcattagatttgaagatgtttacattgttgttattgttatgtatcacttgctaaaaatattgttttaatcagagataacctctttaaaaaaatttttaaagaactatggctatgaccaaagcttctattttgccaaaaagttaaataccgataaaatggccttaagtgtattcctgacagttaaattcagaaacgtgccaaatggaactcaaggtgccccttcagaattaaaatcattaccttgtg

SEQ ID NO: 436195 - DNA, 382 bp, Homo sapiens
gagctcggtacccagttcgacggagactctcagtttcttctctataactggtcctgtgaggtcacattacaaaagaagaaactgagggtctctgaggttaagtagctttactaaattataaggaaacctagctggtaggtagacagcaagaatccaggtcttctgactcctctttcagttctctttccacttagaccatagctgcttccttttcttattttttagcttccatctaaccattgcctatcttgcctgtcctaatgttctccatcttctctcacccctaatcccactcactgcttctctaccactttgctttttggtggatgctagcaatgtgctttgagagtctccgtcgaactgggatcctctagatcaacgg

SEQ ID NO: 436196 - DNA, 6102 bp, Homo sapiens
  misc_feature (41)..(41): n is a, c, g, or t
cagggctgacagcacacacggcctgggggcctagagaaggnttgctgatcacctgccacccagggtcggggccccgcaccatccgggggcgagctcccgggaaggggctccgcctctacacccaccccccaacctctgacatcgccggccgaacgggagctgccgcttccttcccggccccgctgcacctccccagggagccgagggcgggcgtggacgggaccgacgtggaacgcattctgtagcccagacgggcggccccggcggcttcgggagtggggtcacgcccagctggagaagcagttagggcggacgaagcaggagccgcggggctgggaggattccagtcggaacgcaaccgatcctggggaggcgagaggtgaatcaacctggacccttccacagcctggctgctaggccagcagtgcgactcccttccgagctgagcttaccctgggcgcaaacgagcgaggcaggggcgcgagtggaagctggagttccggggtgggcggggaggcgactgtccgtggtgctgagcgccggcgagagcgggcgcggagcggctgatcggctccctcgaactggggaggtccagtggggtcgcttagggcccaaagcccccacccggctccaaaagctcccagggcctccccaggcaccggtgctcggcccttccttcggtcagaaagtcgccccctgggggcagttcgtcccaaagggtttcctcgaaagaatctgagagggcgcagtccttgaccgagggaatctctctgtgtagccttggaagccgccagccccagaagatgcctgccttcaatagattgtttcccctggcttctctcgtgcttatctactgggtcagtgtctgcttccctgtgtgtgtggaagtgccctcggagacggaggccgtgcagggcaaccccatgaagctgcgctgcatctcctgcatgaagagagaggaggtggaggccaccacggtggtggaatggttctacaggcccgagggcggtaaagatttccttatttacgagtatcggaatggccaccaggaggtggagagcccctttcaggggcgcctgcagtggaatggcagcaaggacctgcaggacgtgtccatcactgtgctcaacgtcactctgaacgactctggcctctacacctgcaatgtgtcccgggagtttgagtttgaggcgcatcggccctttgtgaagacgacgcggctgatccccctaagagtcaccgaggaggctggagaggacttcacctctgtggtctcagaaatcatgatgtacatccttctggtcttcctcaccttgtggctgctcatcgagatgatatattgctacagaaaggtctcaaaagccgaagaggcagcccaagaaaacgcgtctgactaccttgccatcccatctgagaacaaggagaactctgcggtaccagtggaggaatagaacaggagcagtgtgacatgaggtggcctgaacacctgagggactggacatcccatgttcagcaatgtcaatggcatcaggagggcgccccaagggccccatcgcttcccttcatgcatccattgttctgttcattcattcatccatacatccacctgcctctgagctttcacctctgactccctaactccatcagacctctacgcaccataagactctgccagaactgagaagccaacatttctacatagactcaacctcaccctctcctagttttccaacaagacactccaaagccaactggatttctcccctgtgctccaaatgactttgtacaagtgctggagttagcacctccctctgcccttaactggctggaactggttcattctccattactgcaagagaatggaagtcttaatagaaggaagcaggagtgattagttcgggttaaagcaaaagtgtgtcatgaacttggattccctgaagtcagttttgtcaggttcatggcccactttgctacagcatcagagtgaagcacgcctgtctaggttctccagtgacagaaagatcctgaagcatggactaacatgctctctggagcttagtactccagagctagatcctgatgggtctctaaggttccctccaagaagacaaggacaggagacttgggaaggaccaatggtaatttaagtggctcttaaaaagtcatgcaacatgtttctggacacgttcctgatcctattgcgataatgtatgtgtgccctccctgtgggcacaccacctgggcattaggactgaaattcctgagttcttcctctcaaaatttctgtgcaccagtattattcctcattttacatacaggaggcaactaagactcatacagggctcaactgaataagaggcttaagaggataaactggagcagaaataagccttaggtgctgcccagtttacacttcctgggatggatgtttttgtttgttttgttttttgttttttttgtttgagatggagtctcactctgtcacctaggctagagtgcagtggtgtgatctcggctcactgcaacctctgcctcttgggttcaagcaattctcatgcctcggcctctccagtagctgggattacaggtgtgcaccaccacgcctggctaaattttgtatttttagtacagacagggtttgactatgttggccaggctagtcttgaactcctgacctcaaatgacccacccacctcagcctcccaaagtgctgagattacaggcgtgaggcactgcgcccggtggataactttgtttctgaaaagactgacattgaacttgtctatggcaatgcttctttcacaagcacggactgggctgaggtcaactctgatagattcagatgactagaaattggccaaaaaagcagggagaagaacatgaggtagacttaaagaacttcctttatgtaaagatctgtgactctgaaatatcctccaaaaggagagtgcatctgagactgatatttaaactaagaaaaatgtttagtctgagatggatcataagtaaatgagcagtgtgagaggggagggatgggtaggtgctttccaaatacttcgcctatgaatgcataattttcagatttttttcccctagattttgagggagcagagaaactggaaaaaactttagtcaatatctcgtgtttcattttaattaagtgacaggtccaagtgtgacatccttcagcacccagggacaagagaggggaaagatgctttatggaatgtaagaagatgaaggtgactgggattcagcgagagagaggtccctcagacctgggacctccctttatagggaaagaccatattccataggtttagggctttaccttaaaagctcatttttttcattcttccatccctaggaaagtacttaaaaccagacttttaaatttttatttatttattattatttttttgagacagattctcactctgtctcccaggctagagtgcagtggtgcaatctcagctcactgcagcctcaactgccccaggtttaagcaatcctcccacctcagcccccaggtaactgggactacaggcatgcaccaccatgcctggctaatttttgtattttatgtagagacaggggtcttgccatgtcgcccaggctgatcttgaactcctgggctcaagcaatctgccagcctcagcctctcaaagtgctgggattacaggcctgagcaactgtgcctggcccaaaaccagaccgttaacacattaaagagtctgattttgttgaagaaaatatttgcaataaattcaagactcttcttattggtaattttccacacaatccctctgaaataagggagaggatatagacctttttaactttatagttagaaaaattggcctcagtgtgaaatttttccagtcccatagctcatggatgccaccagcttgcggtagtagcaagatgcttactaccacaccgttttcctcggtggcccaatagctcgtgtatctaagttgaacccggcagtatgcatgattgcctttttctcttctttttaaaaaaacccaactcagatgctgcttgcgtggcttttaatgaagctgaatggtatctatcacttatttatccttgacaggttatcttccccactcttcctttttctaacttctccattcttctcattcttgacactttcattagaactatatggtttacgaagtattttcacttaactattttatttcttctctataactggtcctgtgaggtcacattacaaaagaagaaactgagggtctctgaggttaagtagctttactaaattataaggaaacctagctggtaggtagacagcaagaatccaggtcttctgactcctctttcagttctctttccacttagaccatagctgcttccttttcttattttttagcttccatctaaccattgcctatcttgcctgtcctaatgttctccatcttctctcacccctaatcccactcactgcttctctaccactttgctttttggtggatgctagcaatgtgctttgagagtcagtcctattttggttctctttctagttggtttgtacatcattatttctcctgaattgcaattaaactccttcctgggagatttgataatgactgtaaatcaataaggtactgtgatcaccagcctacttccaatctccacccacctccctgtctcttcccataatcctacgaaagacccagactagatgtctgtttctctggaagctttatctggcatgatgttgcttattaaagggcttagaagagttctcaagggctattaatatcactttagaaaccccatctgttgtcttggtgctggatatttcccatgtctgatcctcaataacacaattcactaaaggccaagcttggctcaatctgattttcccattcttactacttcacagccatgaatgtgattgctcaatccagttggccctgagagcaccttgccctgctgaccttcactgtcacctcggtcttgaatcagagccccaacccaaacactccctgcctgtccctaccccagcctttattctcaccacttgtttaacggcatgaccttttagtttctccattcccagacacccacacacccagacttccttctgagttgcaggtttctccttagatgtccaactagaaatattactaggaaagttacttttcaaagcaggaatgtgctgggaagtaggagacagcaactccctcctctctccccaaaattattggatcaaaaaagaaattccatccatctcagaatctgtgagtcctcctcacataaatctgagggaaaaggctgtgtcactgcatctttgcaggaagaaagagaagcaagagctagacacacttcagaatatatcttagtttcccctttcccagtttaacatgaaaatgaaaaaagaaaaaaatgaaaaacaaaaacaaaagaagccttcctctcacctcattttgtaaatgaaaaatccctaattcagtgaattcacctagtcactgcaaatgtatctgaatagtgcttggtgtgcttgccagtctgatcatccactcattctactaacatctttttgcacccactctgtcaagctctagcctagacctttagtgtgccatgcagtcacaggtctgaaaagcagcatcatccaaaccttacttaatctctaaaatctcagctggtggacagctcatgattagttcagcccacttcctcccccttagttgagtttgcagcaggacgcaggagataagcacttccaagcaagtctgatttatatatcaaactcggtctccatcccaggccagctgaccctcagagccagcaatgctctgtgcttcctccctgcgtcacggcttggcaagagctgcctctgctgagcagtgtgtgtgatggagacggaggccgctgaaggccgagtgcttgcaggcttgtgaactgccatcgaacacaatccaaactctggaaatgttcctgaccacctaagccctcaacaacgtaatgcctgtatgtgctgtttttcagtaaactccttgttcatgtcatatgccattgtggggtgcggtggtgtcgggtgggggggtggggtgtggggtgggggcgggg

SEQ ID NO: 436197 - DNA, 443 bp, Homo sapiens
ggaaattctcagtgagttattttatctttggtaggtggcctgaacacctgagggactggacatcccatgttcagcaatgtcaatggcatcaggagggcgccccaagggccccatcgcttcccttcatgcatccattgttctgttcattcattcatccatacatccacctgcctctgagctttcacctctgactccctaactccatcagacctctacgcaccataagactctgccagaactgagaagccaacatttctacatagactcaacctcaccctctcctagttttccaacaagacactccaaagccaactggatttctcccctgtgctccaaatgactttgtacaagtgctggagttagcacctccctctgcccttaactggctggaactggttcattctccattactgcaagagaatggaagtcttaatagaaggaag

SEQ ID NO: 436198 - DNA, 6242 bp, Homo sapiens
  misc_feature (41)..(41): n is a, c, g, or t
cagggctgacagcacacacggcctgggggcctagagaaggnttgctgatcacctgccacccagggtcggggccccgcaccatccgggggcgagctcccgggaaggggctccgcctctacacccaccccccaacctctgacatcgccggccgaacgggagctgccgcttccttcccggccccgctgcacctccccagggagccgagggcgggcgtggacgggaccgacgtggaacgcattctgtagcccagacgggcggccccggcggcttcgggagtggggtcacgcccagctggagaagcagttagggcggacgaagcaggagccgcggggctgggaggattccagtcggaacgcaaccgatcctggggaggcgagaggtgaatcaacctggacccttccacagcctggctgctaggccagcagtgcgactcccttccgagctgagcttaccctgggcgcaaacgagcgaggcaggggcgcgagtggaagctggagttccggggtgggcggggaggcgactgtccgtggtgctgagcgccggcgagagcgggcgcggagcggctgatcggctccctcgaactggggaggtccagtggggtcgcttagggcccaaagcccccacccggctccaaaagctcccagggcctccccaggcaccggtgctcggcccttccttcggtcagaaagtcgccccctgggggcagttcgtcccaaagggtttcctcgaaagaatctgagagggcgcagtccttgaccgagggaatctctctgtgtagccttggaagccgccagccccagaagatgcctgccttcaatagattgtttcccctggcttctctcgtgcttatctactgggtcagtgtctgcttccctgtgtgtgtggaagtgccctcggagacggaggccgtgcagggcaaccccatgaagctgcgctgcatctcctgcatgaagagagaggaggtggaggccaccacggtggtggaatggttctacaggcccgagggcggtaaagatttccttatttacgagtatcggaatggccaccaggaggtggagagcccctttcaggggcgcctgcagtggaatggcagcaaggacctgcaggacgtgtccatcactgtgctcaacgtcactctgaacgactctggcctctacacctgcaatgtgtcccgggagtttgagtttgaggcgcatcggccctttgtgaagacgacgcggctgatccccctaagagtcaccgaggaggctggagaggacttcacctctgtggtctcagaaatcatgatgtacatccttctggtcttcctcaccttgtggctgctcatcgagatgatatattgctacagaaaggtctcaaaagccgaagaggcagcccaagaaaacgcgtctgactaccttgccatcccatctgagaacaaggagaactctgcggtaccagtggaggaatagaacaggagcagtgtgacatgaggtggcctgaacacctgagggactggacatcccatgttcagcaatgtcaatggcatcaggagggcgccccaagggccccatcgcttcccttcatgcatccattgttctgttcattcattcatccatacatccacctgcctctgagctttcacctctgactccctaactccatcagacctctacgcaccataagactctgccagaactgagaagccaacatttctacatagactcaacctcaccctctcctagttttccaacaagacactccaaagccaactggatttctcccctgtgctccaaatgactttgtacaagtgctggagttagcacctccctctgcccttaactggctggaactggttcattctccattactgcaagagaatggaagtcttaatagaaggaagcaggagtgattagttcgggttaaagcaaaagtgtgtcatgaacttggattccctgaagtcagttttgtcaggttcatggcccactttgctacagcatcagagtgaagcacgcctgtctaggttctccagtgacagaaagatcctgaagcatggactaacatgctctctggagcttagtactccagagctagatcctgatgggtctctaaggttccctccaagaagacaaggacaggagacttgggaaggaccaatggtaatttaagtggctcttaaaaagtcatgcaacatgtttctggacacgttcctgatcctattgcgataatgtatgtgtgccctccctgtgggcacaccacctgggcattaggactgaaattcctgagttcttcctctcaaaatttctgtgcaccagtattattcctcattttacatacaggaggcaactaagactcatacagggctcaactgaataagaggcttaagaggataaactggagcagaaataagccttaggtgctgcccagtttacacttcctgggatggatgtttttgtttgttttgttttttgttttttttgtttgagatggagtctcactctgtcacctaggctagagtgcagtggtgtgatctcggctcactgcaacctctgcctcttgggttcaagcaattctcatgcctcggcctctccagtagctgggattacaggtgtgcaccaccacgcctggctaaattttgtatttttagtacagacagggtttgactatgttggccaggctagtcttgaactcctgacctcaaatgacccacccacctcagcctcccaaagtgctgagattacaggcgtgaggcactgcgcccggtggataactttgtttctgaaaagactgacattgaacttgtctatggcaatgcttctttcacaagcacggactgggctgaggtcaactctgatagattcagatgactagaaattggccaaaaaagcagggagaagaacatgaggtagacttaaagaacttcctttatgtaaagatctgtgactctgaaatatcctccaaaaggagagtgcatctgagactgatatttaaactaagaaaaatgtttagtctgagatggatcataagtaaatgagcagtgtgagaggggagggatgggtaggtgctttccaaatacttcgcctatgaatgcataattttcagatttttttcccctagattttgagggagcagagaaactggaaaaaactttagtcaatatctcgtgtttcattttaattaagtgacaggtccaagtgtgacatccttcagcacccagggacaagagaggggaaagatgctttatggaatgtaagaagatgaaggtgactgggattcagcgagagagaggtccctcagacctgggacctccctttatagggaaagaccatattccataggtttagggctttaccttaaaagctcatttttttcattcttccatccctaggaaagtacttaaaaccagacttttaaatttttatttatttattattatttttttgagacagattctcactctgtctcccaggctagagtgcagtggtgcaatctcagctcactgcagcctcaactgccccaggtttaagcaatcctcccacctcagcccccaggtaactgggactacaggcatgcaccaccatgcctggctaatttttgtattttatgtagagacaggggtcttgccatgtcgcccaggctgatcttgaactcctgggctcaagcaatctgccagcctcagcctctcaaagtgctgggattacaggcctgagcaactgtgcctggcccaaaaccagaccgttaacacattaaagagtctgattttgttgaagaaaatatttgcaataaattcaagactcttcttattggtaattttccacacaatccctctgaaataagggagaggatatagacctttttaactttatagttagaaaaattggcctcagtgtgaaatttttccagtcccatagctcatggatgccaccagcttgcggtagtagcaagatgcttactaccacaccgttttcctcggtggcccaatagctcgtgtatctaagttgaacccggcagtatgcatgattgcctttttctcttctttttaaaaaaacccaactcagatgctgcttgcgtggcttttaatgaagctgaatggtatctatcacttatttatccttgacaggttatcttccccactcttcctttttctaacttctccattcttctcattcttgacactttcattagaactatatggtttacgaagtattttcacttaactattttatttcttctctataactggtcctgtgaggtcacattacaaaagaagaaactgagggtctctgaggttaagtagctttactaaattataaggaaacctagctggtaggtagacagcaagaatccaggtcttctgactcctctttcagttctctttccacttagaccatagctgcttccttttcttattttttagcttccatctaaccattgcctatcttgcctgtcctaatgttctccatcttctctcacccctaatcccactcactgcttctctaccactttgctttttggtggatgctagcaatgtgctttgagagtcagtcctattttggttctctttctagttggtttgtacatcattatttctcctgaattgcaattaaactccttcctgggagatttgataatgactgtaaatcaataaggtactgtgatcaccagcctacttccaatctccacccacctccctgtctcttcccataatcctacgaaagacccagactagatgtctgtttctctggaagctttatctggcatgatgttgcttattaaagggcttagaagagttctcaagggctattaatatcactttagaaaccccatctgttgtcttggtgctggatatttcccatgtctgatcctcaataacacaattcactaaaggccaagcttggctcaatctgattttcccattcttactacttcacagccatgaatgtgattgctcaatccagttggccctgagagcaccttgccctgctgaccttcactgtcacctcggtcttgaatcagagccccaacccaaacactccctgcctgtccctaccccagcctttattctcaccacttgtttaacggcatgaccttttagtttctccattcccagacacccacacacccagacttccttctgagttgcaggtttctccttagatgtccaactagaaatattactaggaaagttacttttcaaagcaggaatgtgctgggaagtaggagacagcaactccctcctctctccccaaaattattggatcaaaaaagaaattccatccatctcagaatctgtgagtcctcctcacataaatctgagggaaaaggctgtgtcactgcatctttgcaggaagaaagagaagcaagagctagacacacttcagaatatatcttagtttcccctttcccagtttaacatgaaaatgaaaaaagaaaaaaatgaaaaacaaaaacaaaagaagccttcctctcacctcattttgtaaatgaaaaatccctaattcagtgaattcacctagtcactgcaaatgtatctgaatagtgcttggtgtgcttgccagtctgatcatccactcattctactaacatctttttgcacccactctgtcaagctctagcctagacctttagtgtgccatgcagtcacaggtctgaaaagcagcatcatccaaaccttacttaatctctaaaatctcagctggtggacagctcatgattagttcagcccacttcctcccccttagttgagtttgcagcaggacgcaggagataagcacttccaagcaagtctgatttatatatcaaactcggtctccatcccaggccagctgaccctcagagccagcaatgctctgtgcttcctccctgcgtcacggcttggcaagagctgcctctgctgagcagtgtgtgtgatggagacggaggccgctgaaggccgagtgcttgcaggcttgtgaactgccatcgaacacaatccaaactctggaaatgttcctgaccacctaagccctcaacaacgtaatgcctgtatgtgctgtttttcagtaaactccttgttcatgtcaataaagtatccctgaaaaccaaataaataaatatataactaacacaattacaattaattggcgggcgctattactaccgcagggatggtttaaaaccatgtcttacataactaaattggcttgcgtacactcattttttgaatcgacgctagataggttctgacgtatggctatccttacattagccacgcatggggagtc

SEQ ID NO: 436199 - DNA, 5843 bp, Homo sapiens
  misc_feature (41)..(41): n is a, c, g, or t
cagggctgacagcacacacggcctgggggcctagagaaggnttgctgatcacctgccacccagggtcggggccccgcaccatccgggggcgagctcccgggaaggggctccgcctctacacccaccccccaacctctgacatcgccggccgaacgggagctgccgcttccttcccggccccgctgcacctccccagggagccgagggcgggcgtggacgggaccgacgtggaacgcattctgtagcccagacgggcggccccggcggcttcgggagtggggtcacgcccagctggagaagcagttagggcggacgaagcaggagccgcggggctgggaggattccagtcggaacgcaaccgatcctggggaggcgagagccttggaagccgccagccccagaagatgcctgccttcaatagattgtttcccctggcttctctcgtgcttatctactgggtcagtgtctgcttccctgtgtgtgtggaagtgccctcggagacggaggccgtgcagggcaaccccatgaagctgcgctgcatctcctgcatgaagagagaggaggtggaggccaccacggtggtggaatggttctacaggcccgagggcggtaaagatttccttatttacgagtatcggaatggccaccaggaggtggagagcccctttcaggggcgcctgcagtggaatggcagcaaggacctgcaggacgtgtccatcactgtgctcaacgtcactctgaacgactctggcctctacacctgcaatgtgtcccgggagtttgagtttgaggcgcatcggccctttgtgaagacgacgcggctgatccccctaagagtcaccgaggaggctggagaggacttcacctctgtggtctcagaaatcatgatgtacatccttctggtcttcctcaccttgtggctgctcatcgagatgatatattgctacagaaaggtctcaaaagccgaagaggcagcccaagaaaacgcgtctgactaccttgccatcccatctgagaacaaggagaactctgcggtaccagtggaggaatagaacaggagcagtgtgacatgaggtggcctgaacacctgagggactggacatcccatgttcagcaatgtcaatggcatcaggagggcgccccaagggccccatcgcttcccttcatgcatccattgttctgttcattcattcatccatacatccacctgcctctgagctttcacctctgactccctaactccatcagacctctacgcaccataagactctgccagaactgagaagccaacatttctacatagactcaacctcaccctctcctagttttccaacaagacactccaaagccaactggatttctcccctgtgctccaaatgactttgtacaagtgctggagttagcacctccctctgcccttaactggctggaactggttcattctccattactgcaagagaatggaagtcttaatagaaggaagcaggagtgattagttcgggttaaagcaaaagtgtgtcatgaacttggattccctgaagtcagttttgtcaggttcatggcccactttgctacagcatcagagtgaagcacgcctgtctaggttctccagtgacagaaagatcctgaagcatggactaacatgctctctggagcttagtactccagagctagatcctgatgggtctctaaggttccctccaagaagacaaggacaggagacttgggaaggaccaatggtaatttaagtggctcttaaaaagtcatgcaacatgtttctggacacgttcctgatcctattgcgataatgtatgtgtgccctccctgtgggcacaccacctgggcattaggactgaaattcctgagttcttcctctcaaaatttctgtgcaccagtattattcctcattttacatacaggaggcaactaagactcatacagggctcaactgaataagaggcttaagaggataaactggagcagaaataagccttaggtgctgcccagtttacacttcctgggatggatgtttttgtttgttttgttttttgttttttttgtttgagatggagtctcactctgtcacctaggctagagtgcagtggtgtgatctcggctcactgcaacctctgcctcttgggttcaagcaattctcatgcctcggcctctccagtagctgggattacaggtgtgcaccaccacgcctggctaaattttgtatttttagtacagacagggtttgactatgttggccaggctagtcttgaactcctgacctcaaatgacccacccacctcagcctcccaaagtgctgagattacaggcgtgaggcactgcgcccggtggataactttgtttctgaaaagactgacattgaacttgtctatggcaatgcttctttcacaagcacggactgggctgaggtcaactctgatagattcagatgactagaaattggccaaaaaagcagggagaagaacatgaggtagacttaaagaacttcctttatgtaaagatctgtgactctgaaatatcctccaaaaggagagtgcatctgagactgatatttaaactaagaaaaatgtttagtctgagatggatcataagtaaatgagcagtgtgagaggggagggatgggtaggtgctttccaaatacttcgcctatgaatgcataattttcagatttttttcccctagattttgagggagcagagaaactggaaaaaactttagtcaatatctcgtgtttcattttaattaagtgacaggtccaagtgtgacatccttcagcacccagggacaagagaggggaaagatgctttatggaatgtaagaagatgaaggtgactgggattcagcgagagagaggtccctcagacctgggacctccctttatagggaaagaccatattccataggtttagggctttaccttaaaagctcatttttttcattcttccatccctaggaaagtacttaaaaccagacttttaaatttttatttatttattattatttttttgagacagattctcactctgtctcccaggctagagtgcagtggtgcaatctcagctcactgcagcctcaactgccccaggtttaagcaatcctcccacctcagcccccaggtaactgggactacaggcatgcaccaccatgcctggctaatttttgtattttatgtagagacaggggtcttgccatgtcgcccaggctgatcttgaactcctgggctcaagcaatctgccagcctcagcctctcaaagtgctgggattacaggcctgagcaactgtgcctggcccaaaaccagaccgttaacacattaaagagtctgattttgttgaagaaaatatttgcaataaattcaagactcttcttattggtaattttccacacaatccctctgaaataagggagaggatatagacctttttaactttatagttagaaaaattggcctcagtgtgaaatttttccagtcccatagctcatggatgccaccagcttgcggtagtagcaagatgcttactaccacaccgttttcctcggtggcccaatagctcgtgtatctaagttgaacccggcagtatgcatgattgcctttttctcttctttttaaaaaaacccaactcagatgctgcttgcgtggcttttaatgaagctgaatggtatctatcacttatttatccttgacaggttatcttccccactcttcctttttctaacttctccattcttctcattcttgacactttcattagaactatatggtttacgaagtattttcacttaactattttatttcttctctataactggtcctgtgaggtcacattacaaaagaagaaactgagggtctctgaggttaagtagctttactaaattataaggaaacctagctggtaggtagacagcaagaatccaggtcttctgactcctctttcagttctctttccacttagaccatagctgcttccttttcttattttttagcttccatctaaccattgcctatcttgcctgtcctaatgttctccatcttctctcacccctaatcccactcactgcttctctaccactttgctttttggtggatgctagcaatgtgctttgagagtcagtcctattttggttctctttctagttggtttgtacatcattatttctcctgaattgcaattaaactccttcctgggagatttgataatgactgtaaatcaataaggtactgtgatcaccagcctacttccaatctccacccacctccctgtctcttcccataatcctacgaaagacccagactagatgtctgtttctctggaagctttatctggcatgatgttgcttattaaagggcttagaagagttctcaagggctattaatatcactttagaaaccccatctgttgtcttggtgctggatatttcccatgtctgatcctcaataacacaattcactaaaggccaagcttggctcaatctgattttcccattcttactacttcacagccatgaatgtgattgctcaatccagttggccctgagagcaccttgccctgctgaccttcactgtcacctcggtcttgaatcagagccccaacccaaacactccctgcctgtccctaccccagcctttattctcaccacttgtttaacggcatgaccttttagtttctccattcccagacacccacacacccagacttccttctgagttgcaggtttctccttagatgtccaactagaaatattactaggaaagttacttttcaaagcaggaatgtgctgggaagtaggagacagcaactccctcctctctccccaaaattattggatcaaaaaagaaattccatccatctcagaatctgtgagtcctcctcacataaatctgagggaaaaggctgtgtcactgcatctttgcaggaagaaagagaagcaagagctagacacacttcagaatatatcttagtttcccctttcccagtttaacatgaaaatgaaaaaagaaaaaaatgaaaaacaaaaacaaaagaagccttcctctcacctcattttgtaaatgaaaaatccctaattcagtgaattcacctagtcactgcaaatgtatctgaatagtgcttggtgtgcttgccagtctgatcatccactcattctactaacatctttttgcacccactctgtcaagctctagcctagacctttagtgtgccatgcagtcacaggtctgaaaagcagcatcatccaaaccttacttaatctctaaaatctcagctggtggacagctcatgattagttcagcccacttcctcccccttagttgagtttgcagcaggacgcaggagataagcacttccaagcaagtctgatttatatatcaaactcggtctccatcccaggccagctgaccctcagagccagcaatgctctgtgcttcctccctgcgtcacggcttggcaagagctgcctctgctgagcagtgtgtgtgatggagacggaggccgctgaaggccgagtgcttgcaggcttgtgaactgccatcgaacacaatccaaactctggaaatgttcctgaccacctaagccctcaacaacgtaatgcctgtatgtgctgtttttcagtaaactccttgttcatgtcaataaagtatccctgaaaaccaaataaataaatatataactaacacaattacaattaattggcgggcgctattactaccgcagggatggtttaaaaccatgtcttacataactaaattggcttgcgtacactcattttttgaatcgacgctagataggttctgacgtatggctatccttacattagccacgcatggggagtc

SEQ ID NO: 436200 - DNA, 949 bp, Homo sapiens
atatcattctgggattgggaatatgtaaactcaactggagattttttttcataaaaatttatatagttccagccctctcattgcttcctatcctaaatcctcttccagtctgtccatccctcactaccatgatagtctacattctgataagctgtgaggccactgccaagggagggagaaatggtcactttctggtggtggttaatgctttgttagatagcttcatccagtcaatagttgaaaagttttcacataatccagtattggcatcagagccagaaatgccctccctaggtccaggaccaaagataaaacaaacacgaggaacatgtagcgtctacacaggaaagtaaagaattatagaattaactaattctacttgaaatcaggagttttataaaacaacatttttagacgtggtcatcttttattggtttccatcatctcttccccttctctctgggaacagttacccgggtattctttgggaagctatcctttctcagctatgtggtttggcaccaccaccatcttcatgagtggaccctgtttggcttgtgtcaatcagtttatcccatccccttggccacagagccattgtgatatgaggagatactggctcttctggaaaagagaggcttttcttcatcgagagctaccagaggagatattatctgtcctctgtgtggcacataggaaaatgtgagacctagaattatagcaactttttttttctgttaaaaggggagattctcaagcttccaggtgctaccatatggagcctaaggataaagccaataccaaagaaaacagtgactaaacagagagaaactaggtccttggtgacatcttttgagccactagaccaagctttacctgaagcagagctacctcagaacttttcagctatgtgagccaataaacatctgtcaaacgaaaaaagaaaaaa

SEQ ID NO: 436201 - DNA, 730 bp, Homo sapiens
cgtttttgtcgcgggaggttttggtttgtgaggatcggcgagtggcgcccaccatctctgcttgctgaaaagctgcagaggccgccaggagcccacgcacctgagacttttacctttacccagaaaggaataaaagaggtcagatgatgacagctgtgtccttaacaaccaggccccaggaatcagtggcttttgaggacgtggctgtgtacttcactacgaaggaatgggccatcatggtgcctgccgagagggccttgtacagggatgtgatgctggagaactatgaggctgtggcctttgtagtgccacccacttccaaaccagctttggtctctcatctggagcaagggaaagagtcctgtttcacccagccacagggagtcctaagcaggaatgactggagagcaggctggataggatacttggaactaagaagatatacttacttagctaaagcagtgttacgtagaatagtatcaaaaatttttcgaaatcgtcaatgctgggaagacaggagaaaagcttaattcttgacatttaaataccagttttccaagtaaggagttgatgtaagagccaccttaaacgatgtcaaatacacattttctttttctgtagactggtagatttaatgtttttcattcattaaaataactcattttgatgtacaaacaaaaaaacaaaaaacaacacaacacaaaaacacaaaaaacaaaaacaaaagggg

SEQ ID NO: 436202 - DNA, 1011 bp, Homo sapiens
tgcccttttcccctcgggcagcggaggcgagcaccgcgaacgccgtgtcccgagcgccgccgcctgcggacgcctcacgggccgggaagggatgcggcctttctcctaaggcaccagtttctccaatgtttaacttatacatgcatcagaatgacagtgaggcgttggtgagagctgctctggttgctaatggagatctggcctgccacagtgggagcagagcttgcccagtgcgccgggacgactgcgggctccatccattccgctcccagggcggttgtcggccaggaccgtgagctgtcaggtcccccgcgggatccttcctggagcttacactatagtaggaggcagccagtacttgcaagcacggggtcgcgggaactacgacctcacccaggccaggcgacctttctctcaagaaggagatgtcagaggcccctcgtgacagcgagcttccggggacagggctcctaatgtgtagagatggggtttcaccacgttggccaggatggtcttgatctcctgacctcatgatctgccttcctcagcctcctattgatcaaagttttacatgatgcaggagccttcagagtgaagacccaaagatacaggatacagtacgggatcctttctggaatggaggtcttatgagctgctattgaacacggcagatggagtctcactctgtcgccaggctgcagtacaatggtgtgatctcggctcactgcaacctccacctctcgggttcaagtgattcttctgcctcagcctcctgagtagctgggactacagaatcacaccctttctccaggaccactctccttctgctggaagtacgttcttcagtgagttccttgagtctcactctcctgagtttcgtgttgtgataaattctgtttcccatctggaaatgccctttaccgtgagcagattcttgaacaaccatcaatttcaactcctgattctaatttgatggtgaagagtcccaagtcacactcactgtatcccatg

SEQ ID NO: 436203 - DNA, 562 bp, Homo sapiens
actgacaccgtgtgtgtgtgtgtgtgtgtgtgtgtgtgtgtgtgtgtgtgtgtgttgccacccagctgtgctaattggatttgggcaattatagataatgattatagtcctcaaaatcaccatgatacaatcaatccagctcctgatgtccaacaaataagccccttactggacataaaagtgccacaatggctcactgacaacagattgctaaagtatcaagtgttgttagaaatcccacaggtaacagttgagtggtgctccaccctcatcccagcctccttactgccattaccaggagaggatgactcaacacattcatgttgtgagatacttaaccaaatttatgccagatgggaagacttaaaggatcagcccttggacaatctggtcaaaatatggttttcagatgggagcagttttgttcagaatgaaactatatatgcagggtacacagaggctaaagctctatccttggggacctcaggacaactagcaaaactcatcttttaaccacaggcctaacactaggttaaggctcccggggatctctagacaccac

SEQ ID NO: 436204 - DNA, 462 bp, Homo sapiens
tcctaatggacttgtctttacattctagcctttctcctaaggcaccagtttctccaatgtttaacttatacatgcatcagaatgacagtgaggcgttggtgagagctgctctggttgctaatggagatctggcctgccacagtgggagcagagcttgcccagtgcgccgggacgactgcgggctccatccattccgctcccagggcggttgtcggccaggaccgtgagctgtcaggtcccccgcgggatccttcctggagcttacactatagtaggaggcagccagtacttgcaagcacggggtcgcgggaactacgacctcacccaggccaggcgacctttctctcaagaaggagatgtcagaggcccctcgtgacagcgagcttccggggacagggctcctaatgtgcttctgcagcagcagctccttgaagggtcgggctctgaaagtgcttacttttt

SEQ ID NO: 436205 - DNA, 5626 bp, Homo sapiens
tgcccttttcccctcgggcagcggaggcgagcaccgcgaacgccgtgtcccgagcgccgccgcctgcggacgcctcacgggccgggaagggatgcggcctttctcctaaggcaccagtttctccaatgtttaacttatacatgcatcagaatgacagtgaggcgttggtgagagctgctctggttgctaatggagatctggcctgccacagtgggagcagagcttgcccagtgcgccgggacgactgcgggctccatccattccgctcccagggcggttgtcggccaggaccgtgagctgtcaggtcccccgcgggatccttcctggagcttacactatagtaggaggcagccagtacttgcaagcacggggtcgcgggaactacgacctcacccaggccaggcgacctttctctcaagaaggagatgtcagaggcccctcgtgacagcgagcttccggggacagggctcctaatgtgtagagatggggtttcaccacgttggccaggatggtcttgatctcctgacctcatgatctgccttcctcagcctcctattgatcaaagttttacatgatgcaggagccttcagagtgaagacccaaagatacaggatacagtacgggatcctttctggaatggaggtcttatgagctgctattgaacacggcagagcctgttggtgacctgcacacaggagccctccagtcagtactgattgaattactcaaggctgcctctctgcaaagttgagcactacaggacgtcgggactgggcatttccttccaacatggccgccactgcctctccgcagccactcgccactgaggatgccgattctgagaatagcagcttctattactatgactacctggatgaagtggccttcatgctctgcaggaaggatgcagtggtgtcctttggcaaagtcttcctcccagtcttctatagcctgatttttgtgttgggcctcagcgggaacctccttcttctcatggtcttgctccgttacgtgcctcgcaggcggatggttgagatctatctgctgaatctggccatctccaaccttctgtttctggtgacactgcccttctggggcatctccgtggcctggcattgggtcttcgggagtttcttgtgcaagatggtgagcactctttatactattaacttttacagtggcatctttttcattagctgcatgagcctggacaagtacctggagatcgttcatgctcagccctaccacaggctgaggacccgggccaagagcctgctccttgctaccatagtatgggctgtgtccctggccgtctccatccctgatatggtctttgtacagacacatgaaaatcccaagggtgtgtggaactgccacgcagatttcggcgggcatgggaccatttggaagctcttcctccgcttccagcagaacctcctagggtttctccttccactccttgccatgatcttcttctactcccgtattggttgtgtcttggtgaggctgaggcccgcaggccagggccgggctttaaaaatagctgcagccttggtggtggccttcttcgtgctatggttcccatacaatctcaccttgtttctgcatacgctgttggacctgcaagtattcgggaactgtgaggtcagccagcatctagactacgcactccaggtaacagagagcatcgccttccttcactgctgcttttcccccatcctgtatgccttctccagtcaccgcttccgccagtacctgaaggctttcctggctgccgtgcttggatggcacctggcacctggcactgcccaggcctcattatccagctgttctgagagcagcatacttactgcccaagaggaaatgactggcatgaatgaccttggagagaggcagtctgagaactaccctaacaaggaggatgtggggaataaatcagcctgagtgaccaaattttggtctggtgggaacagatgggaaccagctcaattgggtgtccactcaaagtgctctctccaggggcctcagtgactgtgttgctaaacccagtggtcagttctcagttctcagccatcagcagcatttgctcgccccgccttcttcctccactttcttcacttgcttccaggataccacgctttcttttctgaattgctacaatctttcttccttccttccttgcttccttccttccttccttccctctctccctccctccctccctcgcttcttcccttcctcctttcctcccttcctactttccttccttccttctgacagggtcttgctctattgctctgtcacccaggctggaatgcagtggcgagatctccgctcactgtagcctcctccccctgggttgaagcaattctcatgcctcagcctcccaagtagccaggactataggcacctgccaccatgcctggctaatttttgtattttttttctttctttctttcttttcttttttttttttttttgagacggagtctcactcttgttgcccaggctggacaacaatggcgcgatctcggctcactgcaacctccacctcccggattcaagcgattctcctgcctcagcctcctgagtagctggaactacatgcgcgtgccaccacgcacagctaatttttataattttagtagagatggggtttcactgcgttggccaggatgatctcgatctcttgaccttgggatccacccgccttggcctcccaaagtgctgggattacaggtgtgagccaccatgcctggccctaatttttgtgtttttattagaaacagagtttcaccatgttggccaggctggagaattgctgtaatagttttccaactggcccctgtccttcctctctcttgctctcctcccatctcatctgcacctagcagccagagtgatcctgatactctcggcctttacttccgcctccctcagagcagcagcctgtcaaaacaccagattacaacaaatttagtttaaaggtctcaattagcgttattggcaattctagaatcaggcaacagactcattgaatcaggaacagattcactccataaaatacagagagtgctgcaatgagctgggtagaagaggttagttttatagacaggaaggggctgtcaaaggcagaaagaaatgaagaacaaaaaaaaagattgatttttttttttttgagacaggatctcactctgtcatccaggctgaagtccaatcccacaatcatggctcactgcagccaccacctcctgagctcaagtgatcctcccatctaagcccccaagtagctaggactacaggagcacaccaccacacctggctaatttttgtattttttgtggagacagggtctcagtatgttacccaggttggactggaaacccttggctcaagcaatttgcctgcctcagcctcccaaagtgctgggattacaggcgtgagccactgcacagggccagattcatcatttcaaagttactttctatatgcggccggaacagggtggttgacatcagttttcttcaggttactttttaataatgattaaaacggggaacttcattatcatgagcatggttactgtctgcattattacgccaactgaaactgtcatgtttgggaatttggctgttaactctgtctccaggagtctcaaaggtcagataacaacttagttttggtttgaggacatggaactttaatacgacagattccattttggtttggtctggtcagctgggacctagtgcaggaggttagtccaaaacaatggccttccatagtttttacttaacaagcccaactccttacggtaatcctttaaggcctatgtgatctgcccccaccctggctacactctttgcccttatgtccaccagcctccagtgctccagacacaactgatctcaaatactcctgacacatccccctggggattcctcttcctggattactctcctctcagctgtctgcttggctcactctctcaccttctgaggtcttagctcagataccacctttcactcacctgtccaacctatttaacacaaactggcccatctctgacgctcctgatcttcctgatgctctatttttaaattttttcaatagtgcttatttctttcagacattgtatatgtttctcctatttgtgatgttcagtggctactgtccccacccacattgtcccagggtgaattccacaaggtaggggatcttggttaggctcactgctgtacccaaccccctaacacagggcctggtgtgtaggttttcagaaagtatctgtaaaatgcatgggtggaggagggagcattttccttctggcactgctggggaaaaagaacctaaggccctccactcaccagggttccacattctctgtagtccagctgggaaatgctattaaaaggaccattctcgtagccttgatggtggacccagcatctggcaatcaggagggccttgaagtactctgcctagggaatgtcccaggaccatatacagtctgcagaaggaggcagtgaacacacttggcctaggccccatctcaggagccttcacatctccctgggacctgcacaatcaagtccaaaatctttgtctgatgtcaaggctagggcttttgcaaataggatcccatacatcttccagccctcatactcctccactcccttttcatttcctgaacattccaacttctatgcctttgctcttgtgggctccctcatgtaattaggataatttccagccaggtattccctcacccttgttttacaactgaatcccactttctctgggactccactgcttggtcactctgccctgtgctttgagaggaggttgggtggagcatgggacatgggccatttactgccttcacatttccctggtcacggtgatttttttaggggtgggcacatgacctaggtagagccaatgaagtgcaatatcactagaacatgtgagaagagaggcatgaaaccgaagctgagagggtttgagatctggagctactccttcctccacccaaacttcagaaggtgaaggagatagtgcatgtgagtgagcagatcccgagggcactgtttgagcctcagaatcaaagcacttctgaagctagtcccaatcttggattcgacagttacaagaaccaataaattcctttccttgtggagtcatgttgttttgttacttgcaacctaaagattcctgactgatatactgtgcccagtgcttttctcttcatatctctaatgcttggcattctccctgccccctgacacatccactgagaagcctttccccagggagctgcctgcccacatggcatctctctctcccgagcttctaaagcacccactgctcttcccacctcatagaactacctggtgcaacctgcccacgtcccagcatgtctgccctgcacaattgaacgtggaacctggcacacaggaaaggaaactttttggtggatggaatggagggtaggagaacagacggctgggtgaatgtaagctccatgagagcagggactttgccatgtgtaaactctgcatcccctgtgcttcaacacatgctcagagcatagtagactttttttggaatgaatggataagttttt

SEQ ID NO: 436206 - DNA, 4958 bp, Homo sapiens
acttccctgaggaagaggcactggcgctgccgctctcctcccaggcttgtggtggacattctcaagcaagtcattctggctccgcactacaggacgtcgggactgggcatttccttccaacatggccgccactgcctctccgcagccactcgccactgaggatgccgattctgagaatagcagcttctattactatgactacctggatgaagtggccttcatgctctgcaggaaggatgcagtggtgtcctttggcaaagtcttcctcccagtcttctatagcctgatttttgtgttgggcctcagcgggaacctccttcttctcatggtcttgctccgttacgtgcctcgcaggcggatggttgagatctatctgctgaatctggccatctccaaccttctgtttctggtgacactgcccttctggggcatctccgtggcctggcattgggtcttcgggagtttcttgtgcaagatggtgagcactctttatactattaacttttacagtggcatctttttcattagctgcatgagcctggacaagtacctggagatcgttcatgctcagccctaccacaggctgaggacccgggccaagagcctgctccttgctaccatagtatgggctgtgtccctggccgtctccatccctgatatggtctttgtacagacacatgaaaatcccaagggtgtgtggaactgccacgcagatttcggcgggcatgggaccatttggaagctcttcctccgcttccagcagaacctcctagggtttctccttccactccttgccatgatcttcttctactcccgtattggttgtgtcttggtgaggctgaggcccgcaggccagggccgggctttaaaaatagctgcagccttggtggtggccttcttcgtgctatggttcccatacaatctcaccttgtttctgcatacgctgttggacctgcaagtattcgggaactgtgaggtcagccagcatctagactacgcactccaggtaacagagagcatcgccttccttcactgctgcttttcccccatcctgtatgccttctccagtcaccgcttccgccagtacctgaaggctttcctggctgccgtgcttggatggcacctggcacctggcactgcccaggcctcattatccagctgttctgagagcagcatacttactgcccaagaggaaatgactggcatgaatgaccttggagagaggcagtctgagaactaccctaacaaggaggatgtggggaataaatcagcctgagtgaccaaattttggtctggtgggaacagatgggaaccagctcaattgggtgtccactcaaagtgctctctccaggggcctcagtgactgtgttgctaaacccagtggtcagttctcagttctcagccatcagcagcatttgctcgccccgccttcttcctccactttcttcacttgcttccaggataccacgctttcttttctgaattgctacaatctttcttccttccttccttgcttccttccttccttccttccctctctccctccctccctccctcgcttcttcccttcctcctttcctcccttcctactttccttccttccttctgacagggtcttgctctattgctctgtcacccaggctggaatgcagtggcgagatctccgctcactgtagcctcctccccctgggttgaagcaattctcatgcctcagcctcccaagtagccaggactataggcacctgccaccatgcctggctaatttttgtattttttttctttctttctttcttttcttttttttttttttttgagacggagtctcactcttgttgcccaggctggacaacaatggcgcgatctcggctcactgcaacctccacctcccggattcaagcgattctcctgcctcagcctcctgagtagctggaactacatgcgcgtgccaccacgcacagctaatttttataattttagtagagatggggtttcactgcgttggccaggatgatctcgatctcttgaccttgggatccacccgccttggcctcccaaagtgctgggattacaggtgtgagccaccatgcctggccctaatttttgtgtttttattagaaacagagtttcaccatgttggccaggctggagaattgctgtaatagttttccaactggcccctgtccttcctctctcttgctctcctcccatctcatctgcacctagcagccagagtgatcctgatactctcggcctttacttccgcctccctcagagcagcagcctgtcaaaacaccagattacaacaaatttagtttaaaggtctcaattagcgttattggcaattctagaatcaggcaacagactcattgaatcaggaacagattcactccataaaatacagagagtgctgcaatgagctgggtagaagaggttagttttatagacaggaaggggctgtcaaaggcagaaagaaatgaagaacaaaaaaaaagattgatttttttttttttgagacaggatctcactctgtcatccaggctgaagtccaatcccacaatcatggctcactgcagccaccacctcctgagctcaagtgatcctcccatctaagcccccaagtagctaggactacaggagcacaccaccacacctggctaatttttgtattttttgtggagacagggtctcagtatgttacccaggttggactggaaacccttggctcaagcaatttgcctgcctcagcctcccaaagtgctgggattacaggcgtgagccactgcacagggccagattcatcatttcaaagttactttctatatgcggccggaacagggtggttgacatcagttttcttcaggttactttttaataatgattaaaacggggaacttcattatcatgagcatggttactgtctgcattattacgccaactgaaactgtcatgtttgggaatttggctgttaactctgtctccaggagtctcaaaggtcagataacaacttagttttggtttgaggacatggaactttaatacgacagattccattttggtttggtctggtcagctgggacctagtgcaggaggttagtccaaaacaatggccttccatagtttttacttaacaagcccaactccttacggtaatcctttaaggcctatgtgatctgcccccaccctggctacactctttgcccttatgtccaccagcctccagtgctccagacacaactgatctcaaatactcctgacacatccccctggggattcctcttcctggattactctcctctcagctgtctgcttggctcactctctcaccttctgaggtcttagctcagataccacctttcactcacctgtccaacctatttaacacaaactggcccatctctgacgctcctgatcttcctgatgctctatttttaaattttttcaatagtgcttatttctttcagacattgtatatgtttctcctatttgtgatgttcagtggctactgtccccacccacattgtcccagggtgaattccacaaggtaggggatcttggttaggctcactgctgtacccaaccccctaacacagggcctggtgtgtaggttttcagaaagtatctgtaaaatgcatgggtggaggagggagcattttccttctggcactgctggggaaaaagaacctaaggccctccactcaccagggttccacattctctgtagtccagctgggaaatgctattaaaaggaccattctcgtagccttgatggtggacccagcatctggcaatcaggagggccttgaagtactctgcctagggaatgtcccaggaccatatacagtctgcagaaggaggcagtgaacacacttggcctaggccccatctcaggagccttcacatctccctgggacctgcacaatcaagtccaaaatctttgtctgatgtcaaggctagggcttttgcaaataggatcccatacatcttccagccctcatactcctccactcccttttcatttcctgaacattccaacttctatgcctttgctcttgtgggctccctcatgtaattaggataatttccagccaggtattccctcacccttgttttacaactgaatcccactttctctgggactccactgcttggtcactctgccctgtgctttgagaggaggttgggtggagcatgggacatgggccatttactgccttcacatttccctggtcacggtgatttttttaggggtgggcacatgacctaggtagagccaatgaagtgcaatatcactagaacatgtgagaagagaggcatgaaaccgaagctgagagggtttgagatctggagctactccttcctccacccaaacttcagaaggtgaaggagatagtgcatgtgagtgagcagatcccgagggcactgtttgagcctcagaatcaaagcacttctgaagctagtcccaatcttggattcgacagttacaagaaccaataaattcctttccttgtggagtcatgttgttttgttacttgcaacctaaagattcctgactgatatactgtgcccagtgcttttctcttcatatctctaatgcttggcattctccctgccccctgacacatccactgagaagcctttccccagggagctgcctgcccacatggcatctctctctcccgagcttctaaagcacccactgctcttcccacctcatagaactacctggtgcaacctgcccacgtcccagcatgtctgccctgcacaattgaacgtggaacctggcacacaggaaaggaaactttttggtggatggaatggagggtaggagaacagacggctgggtgaatgtaagctccatgagagcagggactttgccatgtgtaaactctgcatcccctgtgcttcaacacatgctcagagcatagtagactttttttggaatgaatggataagttttt

SEQ ID NO: 436207 - DNA, 4210 bp, Homo sapiens
tgcccttttcccctcgggcagcggaggcgagcaccgcgaacgccgtgtcccgagcgccgccgcctgcggacgcctcacgggccgggaagggatgcggcctttctcctaaggcaccagtttctccaatgtttaacttatacatgcatcagaatgacagtgaggcgttggtgagagctgctctggttgctaatggagatctggcctgccacagtgggagcagagcttgcccagtgcgccgggacgactgcgggctccatccattccgctcccagggcggttgtcggccaggaccgtgagctgtcaggtcccccgcgggatccttcctggagcttacactatagtaggaggcagccagtacttgcaagcacggggtcgcgggaactacgacctcacccaggccaggcgacctttctctcaagaaggagatgtcagaggcccctcgtgacagcgagcttccggggacagggctcctaatgtgtagagatggggtttcaccacgttggccaggatggtcttgatctcctgacctcatgatctgccttcctcagcctcctattgatcaaagttttacatgatgcaggagccttcagagtgaagacccaaagatacaggatacagtacgggatcctttctggaatggaggtcttatgagctgctattgaacacggcagagcctgttggtgacctgcacacaggagccctccagtcagtactgattgaattactcaaggctgcctctctgcaaagttgaggcggtggagaactactgaggacttctgagcagagaggttggtggaagaggaagcaccaaaaatccatctcatcacctagagagcattgtactggcagaactgtctaaagtgactattttggaactctgggatcaatttgaatacttgcagcttccaaaggaaagatgggcaatcacatctccataccacaggacacaccccttggatgcatcctcaagaactgggaaaagtttgacccacaagctctaaaaaggaaaaggctaattttttttgtcacacagcctggttctgatatggacttggggaccagcaatcttggccagaaaatggaagtattaattttaatactatccatcaactagattcgttttgctgccagcagggaaaatggacagaaatcccttatgcacaggctttcatggccgtaagagacaaccctgacctttgttgggcttgtaaaatggacccagtgatgatagcagccatcaccaggcaactcctccagtagatttgggagaccctttatcagatttgcacagggctcaagccccagaggaaccaaaggtggaatttagttcaaacattgcctcttttattcccattatatccaagtctcccagtcccatagccttcccctccctacccagggccaccctctggataccacccccttaagttatccccacttcaggaggttagcagccctattgggtcaactagagtccagactccattcactatgtaagacctgagccagattaaaatggagctatggaagtttatggaaaaccctgactaatgcattgaagggttccattaactaggcttaacatttgaacttacttgggaggacttcacagtcacactaggccaaactctaagggagaacatgactccattatggaggcagcccagcaatttgcaagtgcaatgcacatgactgaccctggtggctaccttgtgagggccactgcccttccccaggttggcccccaactgggaatacaatacccaggggggtatatgggcagtgaaccacatccccataatggggatgaaggatagcagaggaaagcctgtaaactacaataaattggccttaatagatcaagactctcttgaaaatcccactactttcttagagaggctacattaggcccaagtgaaacatactaaccttgacccagacaccccagaaggatgccttcttttgtatccccatagacccatcttcccaattgctatttgcctttgaatgggaaaatgaaaaaggaaggagccaacagctcacctggactgtgcttctgcaaggttttagagatagtccccatttggttgggcaagccttggctaaagattttcaagacctgactcttgagggggcagatgtgtcctacagtatgtgaatgacctgctaatctcctcccccacaagacaactgggaatccaacatctagtccagacactacattttcttgcagacagagggtacaaagcatccaaggccaaggcacagcttctcagacaagaggtccaatacgtggggataatcctgatccctcgagaacataagttctccccagaacggatacaggccatccttaaaatacctatcccagccacccaaaatcagcatcaggcctttctagggatcacaggatattgcagactttagactgggttatggtgggattgttaagtccttatattagactctaaaagaagggactgatagggactcacttctctgggaaaaagatcaggagcaagcctttaggcagctaaagactgctctctcataagccccagcccttgggctacccatactaagcaaactgttttagcttttcatcaccaaaagccaaggtgtagccttaggagtcctaactcaaactgttgggtcaatcaaatgtcctgtaggttactttttaaagaacctagacccagtagcacacaggtggccacactgcctcaaggtagtggctgcacaagccctcctactggaggaggtcctcaaaatcaccatgatacaatcaatccagctcctgatgtccaacaaataagccccttactggacataaaagtgccacaatggctcactgacaacagattgctaaagtatcaagtgttgttagaaatcccacaggtaacagttgagtggtgctccaccctcatcccagcctccttactgccattaccaggagaggatgactcaacacattcatgttgtgagatacttaaccaaatttatgccagatgggaagacttaaaggatcagcccttggacaatctggtcaaaatatggttttcagatgggagcagttttgttcagaatgaaactatatatgcagggtacacagaggctaaagctctatccttggggacctcaggacaactagcaaaactcatcttttaaccacaggcctaacactaggggaagggaaaagaataaccatttatacagattccaaatatgcctttttggtgcttcatgcccaagccactatctggaaggaaagggagtacccagcaacttgggatactcctactaagtaggggccccaaatcttagagctactagaggccattcacttgacccaggaggtggcagtagagagggttctggaaatggcaggcactcattgggtaatggtcaagctatcataaaactgtccctctgaaatgagaagtggccatgactgggaccaagacagagaggagttctgcaacagatagaaaacatctggagccagcaaatcacaattccctgatcaggtttttgtttgtttttgttttgttttgttttgtttggggtggagtctcactctgtcacccaggctggagtacagtggcacgacctcggctcactgcaacctctgcctcccggattcaagtgattctcctgcctcagcctccccagtagctgagattacaggcacctgccaccacacctggctaattttttaaaatttttagtagagacaaggttttgccatgttggccaggctggtcttgaactcctgacctcaaatgatccacctgccttggcctcccaaagtgctgggcgtgagccaccgtgcccagcccctgatctggtcttaagcatggggcaaaagtagggggggaaatggtggtgtttgactggtatatgaccttcctctggaggtgatcaaccagtaagggaaaatcgctccaagtgagcatgcacacaacctcagtaaacacactgtgcatgtggcttctcccaagtactagcaggccactgcacatgtcacaactgagcaacagcccaccccaatggagggatcaagggaggagaagaaaaaccccggaaccaaaagccagtttataaaaatcctgagccaaaggctgaggggggcacttgatctctcaagttccctacttggccctcttccaagtgtgatttgcttcttttaataaacctttgcctctgcttt

SEQ ID NO: 436208 - DNA, 3099 bp, Homo sapiens
tgcccttttcccctcgggcagcggaggcgagcaccgcgaacgccgtgtcccgagcgccgccgcctgcggacgcctcacgggccgggaagggatgcggcctttctcctaaggcaccagtttctccaatgtttaacttatacatgcatcagaatgacagtgaggcgttggtgagagctgctctggttgctaatggagatctggcctgccacagtgggagcagagcttgcccagtgcgccgggacgactgcgggctccatccattccgctcccagggcggttgtcggccaggaccgtgagctgtcaggtcccccgcgggatccttcctggagcttacactatagtaggaggcagccagtacttgcaagcacggggtcgcgggaactacgacctcacccaggccaggcgacctttctctcaagaaggagatgtcagaggcccctcgtgacagcgagcttccggggacagggctcctaatgtgtagagatggggtttcaccacgttggccaggatggtcttgatctcctgacctcatgatctgccttcctcagcctcctattgatcaaagttttacatgatgcaggagccttcagagtgaagacccaaagatacaggatacagtacgggatcctttctggaatggaggtcttatgagctgctattgaacacggcagagcctgttggtgacctgcacacaggagccctccagtcagtactgattgaattactcaaggctgcctctctgcaaagttgagcagcatttccatttcccaaaccggctctgatttcccagctggagcgaggggaaacaccctggtgctcggttcctcggggagctctggatggagaggccccaaggggcatctcctcagcacctgagacttttacctttacccagaaaggaataaaagaggtcagatgatgacagctgtgtccttaacaaccaggccccaggaatcagtggcttttgaggacgtggctgtgtacttcactacgaaggaatgggccatcatggtgcctgccgagagggccttgtacagggatgtgatgctggagaactatgaggctgtggcctttgtagtgccacccacttccaaaccagctttggtctctcatctggagcaagggaaagagtcctgtttcacccagccacagggagtcctaagcaggaatgactggagagcaggctggataggatacttggaactaagaagatatacttacttagctaaagcagtgttacgtagaatagtatcaaaaatttttcgaaatcgtcaatgctgggaagacaggagaaaagcttaattcttgacatttaaataccagttttccaagtaaggagttgatgtaagagccaccttaaacgatgtcaaatacacattttctttttctgtagactggtagatttaatgtttttcattcattaaaataactcattttgatgtacaaaaaaaaaaaaaaaaaaaaaaaaaaactcgagactagttccttacctcgactcttagcttgtcggggacggtaaccgggacccggtgtctgctcctgtcgccttcgcctcctaatccctagccactatgcgtgagtgcatctccatccacgttggccaggctggtgtccagattggcaatgcctgctgggagctctactgcctggaacacggcatccagcccgatggccagatgccaagtgacaagaccattgggggaggagatgactccttcaacaccttcttcagtgagacgggcgctggcaagcacgtgccccgggctgtgtttgtagacttggaacccacagtcattgatgaagttcgcactggcacctaccgccagctcttccaccctgagcagctcatcacaggcaaggaagatgctgccaataactatgcccgagggcactacaccattggcaaggagatcattgaccttgtgttggaccgaattcgcaagctggctgaccagtgcaccggtcttcagggcttcttggttttccacagctttggtgggggaactggttctgggttcacctccctgctcatggaacgtctctcagttgattatggcaagaaatccaagctggagttctccatttacccggcaccccaggtttccacagctgtagttgagccctacaactccatcctcaccacccacaccaccctggagcactctgattgtgccttcatggtagacaatgaggccatctatgacatctgtcgtagaaacctcgatatcgagcgcccaacctacactaaccttaaccgccttattagccagattgtgtcctccatcactgcttccctgagatttgatggagccctgaatgttgacctgacagaattccagaccaacctggtgccctacccccgcatccacttccctctggccacatatgcccctgtcatctctgctgagaaagcctaccatgaacagctttctgtagcagagatcaccaatgcttgctttgagccagccaaccagatggtgaaatgtgaccctcgccatggtaaatacatggcttgctgcctgttgtaccgtggtgacgtggttcccaaagatgtcaatgctgccattgccaccatcaaaaccaagcgcagcatccagtttgtggattggtgccccactggcttcaaggttggcatcaactaccagcctcccactgtggtgcctggtggagacctggccaaggtacagagagctgtgtgcatgctgagcaacaccacagccattgctgaggcctgggctcgcctggaccacaagtttgacctgatgtatgccaagcgtgcctttgttcactggtacgtgggtgaggggatggaggaaggcgagttttcagaggcccgtgaagatatggctgcccttgagaaggattatgaggaggttggtgtggattctgttgaaggagagggtgaggaagaaggagaggaatactaattatccattccttttggccctgcagcatgtcatgctcccagaatttcagcttcagcttaactgacagatgttaaagctttctggttagattgttttcacttggtgatcatgtcttttccatgtgtacctgtaatatttttccatcatatctcaaagtaaagtcattaacatc

SEQ ID NO: 436209 - DNA, 1111 bp, Homo sapiens
ccttgtgttgtgggtatagtgagaagagagcaaattcatggtgctccactgagccttcagttccctcccctctcggtttgcaagatccagcctaattccaagcatcctcatgaggatgtctgaacttgagagctctaagagggagaggacaggtaagaattgaggactcaattcctcaatgagtgaaatcatccatttgctgactcaaacagttactgagtcgtctgtcaacttcctgacctttgtaagtctcctggcccctctcttgtcctttcccctggaattccttttcttgttcttcctagttatttccgtttttttcccctcctacccctgaagacactggcctgggaggagccttgggattactgtgtgccatgccactcacctgcctgtcccatttctttccttttaagcagcatttccatttcccaaaccggctctgatttcccagctggagcgaggggaaacaccctggtgctcggttcctcggggagctctggatggagaggccccaaggggcatctcctcagcacctgagacttttacctttacccagaaaggaataaaagaggtcagatgatgacagctgtgtccttaacaaccaggccccaggaatcagtggcttttgaggacgtggctgtgtacttcactacgaaggaatgggccatcatggtgcctgccgagagggccttgtacagggatgtgatgctggagaactatgaggctgtggcctttgtagtgccacccacttccaaaccagctttggtctctcatctggagcaagggaaagagtcctgtttcacccagccacagggagtcctaagcaggaatgactggagagcaggctggataggatacttggaactaagaagatatacttacttagctaaagcagtgttacgtagaatagtatcaaaaatttttcgaaatcgtcaatgctgggaagacaggagaaaagcttaattcttgacatttaaataccagttttccaagtaaggagttgatgtaagagccaccttaaacgatgtcaaatacacattttctttttctgtagactggtagatttaatgtttttcattcattaaaataactcattttgatgtacaaa

SEQ ID NO: 436210 - DNA, 3961 bp, Homo sapiens
tgcccttttcccctcgggcagcggaggcgagcaccgcgaacgccgtgtcccgagcgccgccgcctgcggacgcctcacgggccgggaagggatgcggcctttctcctaaggcaccagtttctccaatgtttaacttatacatgcatcagaatgacagtgaggcgttggtgagagctgctctggttgctaatggagatctggcctgccacagtgggagcagagcttgcccagtgcgccgggacgactgcgggctccatccattccgctcccagggcggttgtcggccaggaccgtgagctgtcaggtcccccgcgggatccttcctggagcttacactatagtaggaggcagccagtacttgcaagcacggggtcgcgggaactacgacctcacccaggccaggcgacctttctctcaagaaggagatgtcagaggcccctcgtgacagcgagcttccggggacagggctcctaatgtgtagagatggggtttcaccacgttggccaggatggtcttgatctcctgacctcatgatctgccttcctcagcctcctattgatcaaagttttacatgatgcaggagccttcagagtgaagacccaaagatacaggatacagtacgggatcctttctggaatggaggtcttatgagctgctattgaacacggcagagcctgttggtgacctgcacacaggagccctccagtcagtactgattgaattactcaaggctgcctctctgcaaagttgaggcggtggagaactactgaggacttctgagcagagaggttggtggaagaggaagcaccaaaaatccatctcatcacctagagagcattgtactggcagaactgtctaaagtgactattttggaactctgggatcaatttgaatacttgcagcttccaaaggaaagatgggcaatcacatctccataccacaggacacaccccttggatgcatcctcaagaactgggaaaagtttgacccacaagctctaaaaaggaaaaggctaattttttttgtcacacagcctggttctgatatggacttggggaccagcaatcttggccagaaaatggaagtattaattttaatactatccatcaactagattcgttttgctgccagcagggaaaatggacagaaatcccttatgcacaggctttcatggccgtaagagacaaccctgacctttgttgggcttgtaaaatggacccagtgatgatagcagccatcaccaggcaactcctccagtagatttgggagaccctttatcagatttgcacagggctcaagccccagaggaaccaaaggtggaatttagttcaaacattgcctcttttattcccattatatccaagtctcccagtcccatagccttcccctccctacccagggccaccctctggataccacccccttaagttatccccacttcaggaggttagcagccctattgggtcaactagagtccagactccattcactatgtaagacctgagccagattaaaatggagctatggaagtttatggaaaaccctgactaatgcattgaagggttccattaactaggcttaacatttgaacttacttgggaggacttcacagtcacactaggccaaactctaagggagaacatgactccattatggaggcagcccagcaatttgcaagtgcaatgcacatgactgaccctggtggctaccttgtgagggccactgcccttccccaggttggcccccaactgggaatacaatacccaggggggtatatgggcagtgaaccacatccccataatggggatgaaggatagcagaggaaagcctgtaaactacaataaattggccttaatagatcaagactctcttgaaaatcccactactttcttagagaggctacattaggcccaagtgaaacatactaaccttgacccagacaccccagaaggatgccttcttttgtatccccatagacccatcttcccaattgctatttgcctttgaatgggaaaatgaaaaaggaaggagccaacagctcacctggactgtgcttctgcaaggttttagagatagtccccatttggttgggcaagccttggctaaagattttcaagacctgactcttgagggggcagatgtgtcctacagtatgtgaatgacctgctaatctcctcccccacaagacaactgggaatccaacatctagtccagacatctaaaagaagggactgatagggactcacttctctgggaaaaagatcaggagcaagcctttaggcagctaaagactgctctctcataagccccagcccttgggctacccatactaagcaaactgttttagcttttcatcaccaaaagccaaggtgtagccttaggagtcctaactcaaactgttgggtcaatcaaatgtcctgtaggttactttttaaagaacctagacccagtagcacacaggtggccacactgcctcaaggtagtggctgcacaagccctcctactggaggaggtcctcaaaatcaccatgatacaatcaatccagctcctgatgtccaacaaataagccccttactggacataaaagtgccacaatggctcactgacaacagattgctaaagtatcaagtgttgttagaaatcccacaggtaacagttgagtggtgctccaccctcatcccagcctccttactgccattaccaggagaggatgactcaacacattcatgttgtgagatacttaaccaaatttatgccagatgggaagacttaaaggatcagcccttggacaatctggtcaaaatatggttttcagatgggagcagttttgttcagaatgaaactatatatgcagggtacacagaggctaaagctctatccttggggacctcaggacaactagcaaaactcatcttttaaccacaggcctaacactaggggaagggaaaagaataaccatttatacagattccaaatatgcctttttggtgcttcatgcccaagccactatctggaaggaaagggagtacccagcaacttgggatactcctactaagtaggggccccaaatcttagagctactagaggccattcacttgacccaggaggtggcagtagagagggttctggaaatggcaggcactcattgggtaatggtcaagctatcataaaactgtccctctgaaatgagaagtggccatgactgggaccaagacagagaggagttctgcaacagatagaaaacatctggagccagcaaatcacaattccctgatcaggtttttgtttgtttttgttttgttttgttttgtttggggtggagtctcactctgtcacccaggctggagtacagtggcacgacctcggctcactgcaacctctgcctcccggattcaagtgattctcctgcctcagcctccccagtagctgagattacaggcacctgccaccacacctggctaattttttaaaatttttagtagagacaaggttttgccatgttggccaggctggtcttgaactcctgacctcaaatgatccacctgccttggcctcccaaagtgctgggcgtgagccaccgtgcccagcccctgatctggtcttaagcatggggcaaaagtagggggggaaatggtggtgtttgactggtatatgaccttcctctggaggtgatcaaccagtaagggaaaatcgctccaagtgagcatgcacacaacctcagtaaacacactgtgcatgtggcttctcccaagtactagcaggccactgcacatgtcacaactgagcaacagcccaccccaatggagggatcaagggaggagaagaaaaaccccggaaccaaaagccagtttataaaaatcctgagccaaaggctgaggggggcacttgatctctcaagttccctacttggccctcttccaagtgtgatttgcttcttttaataaacctttgcctctgcttt

SEQ ID NO: 436211 - DNA, 4315 bp, Homo sapiens
tgcccttttcccctcgggcagcggaggcgagcaccgcgaacgccgtgtcccgagcgccgccgcctgcggacgcctcacgggccgggaagggatgcggcctttctcctaaggcaccagtttctccaatgtttaacttatacatgcatcagaatgacagtgaggcgttggtgagagctgctctggttgctaatggagatctggcctgccacagtgggagcagagcttgcccagtgcgccgggacgactgcgggctccatccattccgctcccagggcggttgtcggccaggaccgtgagctgtcaggtcccccgcgggatccttcctggagcttacactatagtaggaggcagccagtacttgcaagcacggggtcgcgggaactacgacctcacccaggccaggcgacctttctctcaagaaggagatgtcagaggcccctcgtgacagcgagcttccggggacagggctcctaatgtgtagagatggggtttcaccacgttggccaggatggtcttgatctcctgacctcatgatctgccttcctcagcctcctattgatcaaagttttacatgatgcaggagccttcagagtgaagacccaaagatacaggatacagtacgggatcctttctggaatggaggtcttatgagctgctattgaacacggcaggtagctcatggtgctcccttccttggtgcagacgggcagttcaaaccacacaaactccagcctgtgggagagggatccttcatcctggacgcacctgccctctgcccagccactataaaaaccagagccacgtgccccttcttttgcttgagtgtgggccctgctgtccccagaaagcctcattacgcggtggagaactactgaggacttctgagcagagaggttggtggaagaggaagcaccaaaaatccatctcatcacctagagagcattgtactggcagaactgtctaaagtgactattttggaactctgggatcaatttgaatacttgcagcttccaaaggaaagatgggcaatcacatctccataccacaggacacaccccttggatgcatcctcaagaactgggaaaagtttgacccacaagctctaaaaaggaaaaggctaattttttttgtcacacagcctggttctgatatggacttggggaccagcaatcttggccagaaaatggaagtattaattttaatactatccatcaactagattcgttttgctgccagcagggaaaatggacagaaatcccttatgcacaggctttcatggccgtaagagacaaccctgacctttgttgggcttgtaaaatggacccagtgatgatagcagccatcaccaggcaactcctccagtagatttgggagaccctttatcagatttgcacagggctcaagccccagaggaaccaaaggtggaatttagttcaaacattgcctcttttattcccattatatccaagtctcccagtcccatagccttcccctccctacccagggccaccctctggataccacccccttaagttatccccacttcaggaggttagcagccctattgggtcaactagagtccagactccattcactatgtaagacctgagccagattaaaatggagctatggaagtttatggaaaaccctgactaatgcattgaagggttccattaactaggcttaacatttgaacttacttgggaggacttcacagtcacactaggccaaactctaagggagaacatgactccattatggaggcagcccagcaatttgcaagtgcaatgcacatgactgaccctggtggctaccttgtgagggccactgcccttccccaggttggcccccaactgggaatacaatacccaggggggtatatgggcagtgaaccacatccccataatggggatgaaggatagcagaggaaagcctgtaaactacaataaattggccttaatagatcaagactctcttgaaaatcccactactttcttagagaggctacattaggcccaagtgaaacatactaaccttgacccagacaccccagaaggatgccttcttttgtatccccatagacccatcttcccaattgctatttgcctttgaatgggaaaatgaaaaaggaaggagccaacagctcacctggactgtgcttctgcaaggttttagagatagtccccatttggttgggcaagccttggctaaagattttcaagacctgactcttgagggggcagatgtgtcctacagtatgtgaatgacctgctaatctcctcccccacaagacaactgggaatccaacatctagtccagacactacattttcttgcagacagagggtacaaagcatccaaggccaaggcacagcttctcagacaagaggtccaatacgtggggataatcctgatccctcgagaacataagttctccccagaacggatacaggccatccttaaaatacctatcccagccacccaaaatcagcatcaggcctttctagggatcacaggatattgcagactttagactgggttatggtgggattgttaagtccttatattagactctaaaagaagggactgatagggactcacttctctgggaaaaagatcaggagcaagcctttaggcagctaaagactgctctctcataagccccagcccttgggctacccatactaagcaaactgttttagcttttcatcaccaaaagccaaggtgtagccttaggagtcctaactcaaactgttgggtcaatcaaatgtcctgtaggttactttttaaagaacctagacccagtagcacacaggtggccacactgcctcaaggtagtggctgcacaagccctcctactggaggaggtcctcaaaatcaccatgatacaatcaatccagctcctgatgtccaacaaataagccccttactggacataaaagtgccacaatggctcactgacaacagattgctaaagtatcaagtgttgttagaaatcccacaggtaacagttgagtggtgctccaccctcatcccagcctccttactgccattaccaggagaggatgactcaacacattcatgttgtgagatacttaaccaaatttatgccagatgggaagacttaaaggatcagcccttggacaatctggtcaaaatatggttttcagatgggagcagttttgttcagaatgaaactatatatgcagggtacacagaggctaaagctctatccttggggacctcaggacaactagcaaaactcatcttttaaccacaggcctaacactaggggaagggaaaagaataaccatttatacagattccaaatatgcctttttggtgcttcatgcccaagccactatctggaaggaaagggagtacccagcaacttgggatactcctactaagtaggggccccaaatcttagagctactagaggccattcacttgacccaggaggtggcagtagagagggttctggaaatggcaggcactcattgggtaatggtcaagctatcataaaactgtccctctgaaatgagaagtggccatgactgggaccaagacagagaggagttctgcaacagatagaaaacatctggagccagcaaatcacaattccctgatcaggtttttgtttgtttttgttttgttttgttttgtttggggtggagtctcactctgtcacccaggctggagtacagtggcacgacctcggctcactgcaacctctgcctcccggattcaagtgattctcctgcctcagcctccccagtagctgagattacaggcacctgccaccacacctggctaattttttaaaatttttagtagagacaaggttttgccatgttggccaggctggtcttgaactcctgacctcaaatgatccacctgccttggcctcccaaagtgctgggcgtgagccaccgtgcccagcccctgatctggtcttaagcatggggcaaaagtagggggggaaatggtggtgtttgactggtatatgaccttcctctggaggtgatcaaccagtaagggaaaatcgctccaagtgagcatgcacacaacctcagtaaacacactgtgcatgtggcttctcccaagtactagcaggccactgcacatgtcacaactgagcaacagcccaccccaatggagggatcaagggaggagaagaaaaaccccggaaccaaaagccagtttataaaaatcctgagccaaaggctgaggggggcacttgatctctcaagttccctacttggccctcttccaagtgtgatttgcttcttttaataaacctttgcctctgcttt

SEQ ID NO: 436212 - DNA, 893 bp, Homo sapiens
ccttgtgttgtgggtatagtgagaagagagcaaattcatggtgctccactgagccttcagttccctcccctctcggtttgcaagatccagcctaattccaagcatcctcatgaggatgtctgaacttgagagctctaagagggagaggacaggtaagaattgaggactcaattcctcaatgagtgaaatcatccatttgctgactcaaacagttactgagtcgtctgtcaacttcctgacctttgtaagtctcctggcccctctcttgtcctttcccctggaattccttttcttgttcttcctagttatttccgtttttttcccctcctacccctgaagacactggcctgggaggagccttgggattactgtgtgccatgccactcacctgcctgtcccatttctttccttttaagcagcatttccatttcccaaaccggctctgatttcccagctggagcgaggggaaacaccctggtgctcggttcctcggggagctctggatggagaggccccaaggggcatctcctcagggataggtgaagaagaggccttcatcttttctatttcttcttgacgttttaaagatatccatttctaaagcctgctgggatttcccatcctgagcaggtggaagagccattaaacctgaaactgcaaggagagggtccaagcctgatttgtccgggggagattctcaagcttccaggtgctaccatatggagcctaaggataaagccaataccaaagaaaacagtgactaaacagagagaaactaggtccttggtgacatcttttgagccactagaccaagctttacctgaagcagagctacctcagaacttttcagctatgtgagccaataaacatctgtcaaacgaaaaaagaaaaaa

SEQ ID NO: 436213 - DNA, 1352 bp, Homo sapiens
tgcccttttcccctcgggcagcggaggcgagcaccgcgaacgccgtgtcccgagcgccgccgcctgcggacgcctcacgggccgggaagggatgcggcctttctcctaaggcaccagtttctccaatgtttaacttatacatgcatcagaatgacagtgaggcgttggtgagagctgctctggttgctaatggagatctggcctgccacagtgggagcagagcttgcccagtgcgccgggacgactgcgggctccatccattccgctcccagggcggttgtcggccaggaccgtgagctgtcaggtcccccgcgggatccttcctggagcttacactatagtaggaggcagccagtacttgcaagcacggggtcgcgggaactacgacctcacccaggccaggcgacctttctctcaagaaggagatgtcagaggcccctcgtgacagcgagcttccggggacagggctcctaatgtgtagagatggggtttcaccacgttggccaggatggtcttgatctcctgacctcatgatctgccttcctcagcctcctattgatcaaagttttacatgatgcaggagccttcagagtgaagacccaaagatacaggatacagtacgggatcctttctggaatggaggtcttatgagctgctattgaacacggcagcactacaggacgtcgggactgggcatttccttccaacatggccgccactgcctctccgcagccactcgccactgaggatgccgattctgagaatagcagcttctattactatgactacctggatgaagtggccttcatgctctgcaggaaggatgcagtggtgtcctttggcaaagtcttcctcccagtcttctatagcctgatttttgtgttgggcctcagcgggaacctccttcttctcatggtcttgctccgttacgtgcctcgcaggcggatggttgagatctatctgctgaatctggccatctccaaccttctgtttctggtgacactgcccttctggggcatctccgtggcctggcattgggtcttcgggagtttcttgtgcaagatggcggtggagaactactgaggacttctgagcagagaggttggtggaagaggaagcaccaaaaatccatctcatcacctagagagcattgtactggcagaactgtctaaagtgactattttggaactctgggatcaatttgaatacttgcagcttccaaaggaaaggtgggtaatcgtgccgtccataaaacaaagatggaaccgacagttacagggtacctgatgggccaatcacatcctccatacacaggagaaaccccgttggatgcctcctccaagaactggaac

SEQ ID NO: 436214 - DNA, 439 bp, Homo sapiens
ccctcactgtttcctggctctttccagtagaaaagagctgggctccctcactgtttcctggcacacggtatgatattgagttccatgattatgcatgtaccttgggttacaacccccctggcggcagaacctctattgtgtccttctttgtattgcccacagagcctgttggtgacctgcacacaggagccctccagtcagtactgattgaattactcaaggctgcctctctgcaaagttgaggtaagcagctgagttcaatgatgctggctgcattttcagctattggggctgcagtagctaggcaggggctgcaggcccttctggctttttagccctcctgctcacccaccatttacacagtcttcctttcagagcccccctttctcctcctgcacttccttgaatattgactgcctctctgatttccctcactttg

SEQ ID NO: 436215 - DNA, 675 bp, Homo sapiens
cgtttttgtcgcgggaggttttggtttgtgaggatcggcgagtggcgcccaccatctctgcttgctgaaaagctgcagaggccgccaggagcccacgcacctgagacttttacctttacccagaaaggaataaaagaggtcagatgatgacagctgtgtccttaacaaccaggccccaggaatcagtggcttttgaggacgtggctgtgtacttcactacgaaggaatgggccatcatggtgcctgccgagagggccttgtacagggatgtgatgctggagaactatgaggctgtggcctttgtagtgccacccacttccaaaccagctttggtctctcatctggagcaagggaaagagtcctgtttcacccagccacagggagtcctaagcaggaatgactggagagcaggctggataggatacttggaactaagaagatatacttacttagctaaagcagtgttacgtagaatagtatcaaaaatttttcgaaatcgtcaatgctgggaagacaggagaaaagcttaattcttgacatttaaataccagttttccaagtaaggagttgatgtaagagccaccttaaacgatgtcaaatacacattttctttttctgtagactggtagatttaatgtttttcattcattaaaataactcattttgatgtacaaa

SEQ ID NO: 436216 - DNA, 734 bp, Homo sapiens
ggggcctggcgggtgtggagcacggggagtcgggcgtggggcgggcagggagtggagtcggggtcttactccggtggctgcagggcgcagggtagccgtgtcaggcctgcccaggtgcagagcgctcctccgcgaccccaacagcctctggtccggtctggcgcgccctcgctttcccagagggcgacctgggctatggcggccgtggcgctggcgagcgggacacgcctcggccttgtcctcgagctgctcccgggacagcccgcgctgccccgggcgcgccgggagtcagtgaccttcgaggatgtggccgtctacttctctgagaacgaatggatcggcctgggccctgctcagagagccctgtacagggatgtgatgctggagaattatggggctgtggcttccctggcagcatttccatttcccaaaccggctctgatttcccagctggagcgaggggaaacaccctggtgctcggttcctcggggagctctggatggagaggccccaaggggcatctcctcaggggagattctcaagcttccaggtgctaccatatggagcctaaggataaagccaataccaaagaaaacagtgactaaacagagagaaactaggtccttggtgacatcttttgagccactagaccaagctttacctgaagcagagctacctcagaacttttcagctatgtgagccaataaacatctgtcaaacgaaaaaagaaaaaa

SEQ ID NO: 436217 - DNA, 756 bp, Homo sapiens
  misc_feature (625)..(625): n is a, c, g, or t
  misc_feature (739)..(739): n is a, c, g, or t
acttccctgaggaagaggcactggcgctgccgctctcctcccaggcttgtggtggacattctcaagcaagtcattctggctccgcactacaggacgtcgggactgggcatttccttccaacatggccgccactgcctctccgcagccactcgccactgaggatgccgattctgagaatagcagcttctattactatgactacctggatgaagtggccttcatgctctgcaggaaggatgcagtggtgtcctttggcaaagtcttcctcccagtcttctatagcctgatttttgtgttgggcctcagcgggaacctccttcttctcatggtcttgctccgttacgtgcctcgcaggcggatggttgagatctatctgctgaatctggccatctccaaccttctgtttctggtgacactgcccttctggggcatctccgtggcctggcattgggtcttcgggagtttcttgtgcaagatggtgagcactctttatactattaacttttacagtggcatctttttcattagctgcatgagcctggacaagtacctggagatcgttcatgctcagccctaccacaggctgaggacccgggccaagagcctgctccttgctaccaataanttaatggggctggttgttccccttgggcccggttcttccaatccccctggaataatggggttctttttggtttacaagaaccaccatttgaaaaaattccccaaaagggggttntttgtttggaaaacttg

SEQ ID NO: 436218 - DNA, 3569 bp, Homo sapiens
tgcccttttcccctcgggcagcggaggcgagcaccgcgaacgccgtgtcccgagcgccgccgcctgcggacgcctcacgggccgggaagggatgcggcctttctcctaaggcaccagtttctccaatgtttaacttatacatgcatcagaatgacagtgaggcgttggtgagagctgctctggttgctaatggagatctggcctgccacagtgggagcagagcttgcccagtgcgccgggacgactgcgggctccatccattccgctcccagggcggttgtcggccaggaccgtgagctgtcaggtcccccgcgggatccttcctggagcttacactatagtaggaggcagccagtacttgcaagcacggggtcgcgggaactacgacctcacccaggccaggcgacctttctctcaagaaggagatgtcagaggcccctcgtgacagcgagcttccggggacagggctcctaatgtgtagagatggggtttcaccacgttggccaggatggtcttgatctcctgacctcatgatctgccttcctcagcctcctattgatcaaagttttacatgatgcaggagccttcagagtgaagacccaaagatacaggatacagtacgggatcctttctggaatggaggtcttatgagctgctattgaacacggcagagcctgttggtgacctgcacacaggagccctccagtcagtactgattgaattactcaaggctgcctctctgcaaagttgagcactacaggacgtcgggactgggcatttccttccaacatggccgccactgcctctccgcagccactcgccactgaggatgccgattctgagaatagcagcttctattactatgactacctggatgaagtggccttcatgctctgcaggaaggatgcagtggtgtcctttggcaaagtcttcctcccagtcttctatagcctgatttttgtgttgggcctcagcgggaacctccttcttctcatggtcttgctccgttacgtgcctcgcaggcggatggttgagatctatctgctgaatctggccatctccaaccttctgtttctggtgacactgcccttctggggcatctccgtggcctggcattgggtcttcgggagtttcttgtgcaagatggtgagcactctttatactattaacttttacagtggcatctttttcattagctgcatgagcctggacaagtacctggagatcgttcatgctcagccctaccacaggctgaggacccgggccaagagcctgctccttgctaccatagtatgggctgtgtccctggccgtctccatccctgatatggtctttgtacagacacatgaaaatcccaagggtgtgtggaactgccacgcagatttcggcgggcatgggaccatttggaagctcttcctccgcttccagcagaacctcctagggtttctccttccactccttgccatgatcttcttctactcccgtattggttgtgtcttggtgaggctgaggcccgcaggccagggccgggctttaaaaatagctgcagccttggtggtggccttcttcgtgctatggttcccatacaatctcaccttgtttctgcatacgctgttggacctgcaagtattcgggaactgtgaggtcagccagcatctagactacgcactccaggtaacagagagcatcgccttccttcactgctgcttttcccccatcctgtatgccttctccagtcaccgcttccgccagtacctgaaggctttcctggctgccgtgcttggatggcacctggcacctggcactgcccaggcctcattatccagctgttctgagagcagcatacttactgcccaagaggaaatgactggcatgaatgaccttggagagaggcagtctgagaactaccctaacaaggaggatgtggggaataaatcagcctgagtgaccaaattttggtctggtgggaacagatgggaaccagctcaattgggtgtccactcaaagtgctctctccaggggcctcagtgactgtgttgctaaacccagtggtcagttctcagttctcagccatcagcagcatttgctcgccccgccttcttcctccactttcttcacttgcttccaggataccacgctttcttttctgaattgctacaatctttcttccttccttccttgcttccttccttccttccttccctctctccctccctccctccctcgcttcttcccttcctcctttcctcccttcctactttccttccttccttctgacagggtcttgctctattgctctgtcacccaggctggaatgcagtggcgagatctccgctcactgtagcctcctccccctgggttgaagcaattctcatgcctcagcctcccaagtagccaggactataggcacctgccaccatgcctggctaatttttgtattttttttctttctttctttcttttcttttttttttttttttgagacggagtctcactcttgttgcccaggctggacaacaatggcgcgatctcggctcactgcaacctccacctcccggattcaagcgattctcctgcctcagcctcctgagtagctggaactacatgcgcgtgccaccacgcacagctaatttttataattttagtagagatggggtttcactgcgttggccaggatgatctcgatctcttgaccttgggatccacccgccttggcctcccaaagtgctgggattacaggtgtgagccaccatgcctggccctaatttttgtgtttttattagaaacagagtttcaccatgttggccaggctggagaattgctgtaatagttttccaactggcccctgtccttcctctctcttgctctcctcccatctcatctgcacctagcagccagagtgatcctgatactctcggcctttacttccgcctccctcagagcagcagcctgtcaaaacaccagattacaacaaatttagtttaaaggtctcaattagcgttattggcaattctagaatcaggcaacagactcattgaatcaggaacagattcactccataaaatacagagagtgctgcaatgagctgggtagaagaggttagttttatagacaggaaggggctgtcaaaggcagaaagaaatgaagaacaaaaaaaaagattgatttttttttttttgagacaggatctcactctgtcatccaggctgaagtccaatcccacaatcatggctcactgcagccaccacctcctgagctcaagtgatcctcccatctaagcccccaagtagctaggactacaggagcacaccaccacacctggctaatttttgtattttttgtggagacagggtctcagtatgttacccaggttggactggaaacccttggctcaagcaatttgcctgcctcagcctcccaaagtgctgggattacaggcgtgagccactgcacagggccagattcatcatttcaaagttactttctatatgcggccggaacagggtggttgacatcagttttcttcaggttactttttaataatgattaaaacggggaacttcattatc

SEQ ID NO: 436219 - DNA, 5143 bp, Homo sapiens
gattgtagcatttctcctttcaggatacagtacgggatcctttctggaatggaggtcttatgagctgctattgaacacggcaggtagctcatggtgctcccttccttggtgcagacgggcagttcaaaccacacaaactccagcctgtgggagagggatccttcatcctggacgcacctgccctctgcccagccactataaaaaccagagccacgtgccccttcttttgcttgagtgtgggccctgctgtccccagaaagcctcattaccactacaggacgtcgggactgggcatttccttccaacatggccgccactgcctctccgcagccactcgccactgaggatgccgattctgagaatagcagcttctattactatgactacctggatgaagtggccttcatgctctgcaggaaggatgcagtggtgtcctttggcaaagtcttcctcccagtcttctatagcctgatttttgtgttgggcctcagcgggaacctccttcttctcatggtcttgctccgttacgtgcctcgcaggcggatggttgagatctatctgctgaatctggccatctccaaccttctgtttctggtgacactgcccttctggggcatctccgtggcctggcattgggtcttcgggagtttcttgtgcaagatggtgagcactctttatactattaacttttacagtggcatctttttcattagctgcatgagcctggacaagtacctggagatcgttcatgctcagccctaccacaggctgaggacccgggccaagagcctgctccttgctaccatagtatgggctgtgtccctggccgtctccatccctgatatggtctttgtacagacacatgaaaatcccaagggtgtgtggaactgccacgcagatttcggcgggcatgggaccatttggaagctcttcctccgcttccagcagaacctcctagggtttctccttccactccttgccatgatcttcttctactcccgtattggttgtgtcttggtgaggctgaggcccgcaggccagggccgggctttaaaaatagctgcagccttggtggtggccttcttcgtgctatggttcccatacaatctcaccttgtttctgcatacgctgttggacctgcaagtattcgggaactgtgaggtcagccagcatctagactacgcactccaggtaacagagagcatcgccttccttcactgctgcttttcccccatcctgtatgccttctccagtcaccgcttccgccagtacctgaaggctttcctggctgccgtgcttggatggcacctggcacctggcactgcccaggcctcattatccagctgttctgagagcagcatacttactgcccaagaggaaatgactggcatgaatgaccttggagagaggcagtctgagaactaccctaacaaggaggatgtggggaataaatcagcctgagtgaccaaattttggtctggtgggaacagatgggaaccagctcaattgggtgtccactcaaagtgctctctccaggggcctcagtgactgtgttgctaaacccagtggtcagttctcagttctcagccatcagcagcatttgctcgccccgccttcttcctccactttcttcacttgcttccaggataccacgctttcttttctgaattgctacaatctttcttccttccttccttgcttccttccttccttccttccctctctccctccctccctccctcgcttcttcccttcctcctttcctcccttcctactttccttccttccttctgacagggtcttgctctattgctctgtcacccaggctggaatgcagtggcgagatctccgctcactgtagcctcctccccctgggttgaagcaattctcatgcctcagcctcccaagtagccaggactataggcacctgccaccatgcctggctaatttttgtattttttttctttctttctttcttttcttttttttttttttttgagacggagtctcactcttgttgcccaggctggacaacaatggcgcgatctcggctcactgcaacctccacctcccggattcaagcgattctcctgcctcagcctcctgagtagctggaactacatgcgcgtgccaccacgcacagctaatttttataattttagtagagatggggtttcactgcgttggccaggatgatctcgatctcttgaccttgggatccacccgccttggcctcccaaagtgctgggattacaggtgtgagccaccatgcctggccctaatttttgtgtttttattagaaacagagtttcaccatgttggccaggctggagaattgctgtaatagttttccaactggcccctgtccttcctctctcttgctctcctcccatctcatctgcacctagcagccagagtgatcctgatactctcggcctttacttccgcctccctcagagcagcagcctgtcaaaacaccagattacaacaaatttagtttaaaggtctcaattagcgttattggcaattctagaatcaggcaacagactcattgaatcaggaacagattcactccataaaatacagagagtgctgcaatgagctgggtagaagaggttagttttatagacaggaaggggctgtcaaaggcagaaagaaatgaagaacaaaaaaaaagattgatttttttttttttgagacaggatctcactctgtcatccaggctgaagtccaatcccacaatcatggctcactgcagccaccacctcctgagctcaagtgatcctcccatctaagcccccaagtagctaggactacaggagcacaccaccacacctggctaatttttgtattttttgtggagacagggtctcagtatgttacccaggttggactggaaacccttggctcaagcaatttgcctgcctcagcctcccaaagtgctgggattacaggcgtgagccactgcacagggccagattcatcatttcaaagttactttctatatgcggccggaacagggtggttgacatcagttttcttcaggttactttttaataatgattaaaacggggaacttcattatcatgagcatggttactgtctgcattattacgccaactgaaactgtcatgtttgggaatttggctgttaactctgtctccaggagtctcaaaggtcagataacaacttagttttggtttgaggacatggaactttaatacgacagattccattttggtttggtctggtcagctgggacctagtgcaggaggttagtccaaaacaatggccttccatagtttttacttaacaagcccaactccttacggtaatcctttaaggcctatgtgatctgcccccaccctggctacactctttgcccttatgtccaccagcctccagtgctccagacacaactgatctcaaatactcctgacacatccccctggggattcctcttcctggattactctcctctcagctgtctgcttggctcactctctcaccttctgaggtcttagctcagataccacctttcactcacctgtccaacctatttaacacaaactggcccatctctgacgctcctgatcttcctgatgctctatttttaaattttttcaatagtgcttatttctttcagacattgtatatgtttctcctatttgtgatgttcagtggctactgtccccacccacattgtcccagggtgaattccacaaggtaggggatcttggttaggctcactgctgtacccaaccccctaacacagggcctggtgtgtaggttttcagaaagtatctgtaaaatgcatgggtggaggagggagcattttccttctggcactgctggggaaaaagaacctaaggccctccactcaccagggttccacattctctgtagtccagctgggaaatgctattaaaaggaccattctcgtagccttgatggtggacccagcatctggcaatcaggagggccttgaagtactctgcctagggaatgtcccaggaccatatacagtctgcagaaggaggcagtgaacacacttggcctaggccccatctcaggagccttcacatctccctgggacctgcacaatcaagtccaaaatctttgtctgatgtcaaggctagggcttttgcaaataggatcccatacatcttccagccctcatactcctccactcccttttcatttcctgaacattccaacttctatgcctttgctcttgtgggctccctcatgtaattaggataatttccagccaggtattccctcacccttgttttacaactgaatcccactttctctgggactccactgcttggtcactctgccctgtgctttgagaggaggttgggtggagcatgggacatgggccatttactgccttcacatttccctggtcacggtgatttttttaggggtgggcacatgacctaggtagagccaatgaagtgcaatatcactagaacatgtgagaagagaggcatgaaaccgaagctgagagggtttgagatctggagctactccttcctccacccaaacttcagaaggtgaaggagatagtgcatgtgagtgagcagatcccgagggcactgtttgagcctcagaatcaaagcacttctgaagctagtcccaatcttggattcgacagttacaagaaccaataaattcctttccttgtggagtcatgttgttttgttacttgcaacctaaagattcctgactgatatactgtgcccagtgcttttctcttcatatctctaatgcttggcattctccctgccccctgacacatccactgagaagcctttccccagggagctgcctgcccacatggcatctctctctcccgagcttctaaagcacccactgctcttcccacctcatagaactacctggtgcaacctgcccacgtcccagcatgtctgccctgcacaattgaacgtggaacctggcacacaggaaaggaaactttttggtggatggaatggagggtaggagaacagacggctgggtgaatgtaagctccatgagagcagggactttgccatgtgtaaactctgcatcccctgtgcttcaacacatgctcagagcatagtagactttttttggaatgaatggataagttttt

SEQ ID NO: 436220 - DNA, 5115 bp, Homo sapiens
cttatccaagagtaagtgtcccagagtaagtgggattcagttataagacaaaggtgaggggatatcttggtgacataactattaagtggtgcagatggctccctaagcttttgctcttacttgctggactgcaggtactgatgtagatttgaagagtctattggacatcccagggcagcagcaaaagtgggtttagagaaaggtagagaatgctaggtctcaccatattttccccccgcagcactacaggacgtcgggactgggcatttccttccaacatggccgccactgcctctccgcagccactcgccactgaggatgccgattctgagaatagcagcttctattactatgactacctggatgaagtggccttcatgctctgcaggaaggatgcagtggtgtcctttggcaaagtcttcctcccagtcttctatagcctgatttttgtgttgggcctcagcgggaacctccttcttctcatggtcttgctccgttacgtgcctcgcaggcggatggttgagatctatctgctgaatctggccatctccaaccttctgtttctggtgacactgcccttctggggcatctccgtggcctggcattgggtcttcgggagtttcttgtgcaagatggtgagcactctttatactattaacttttacagtggcatctttttcattagctgcatgagcctggacaagtacctggagatcgttcatgctcagccctaccacaggctgaggacccgggccaagagcctgctccttgctaccatagtatgggctgtgtccctggccgtctccatccctgatatggtctttgtacagacacatgaaaatcccaagggtgtgtggaactgccacgcagatttcggcgggcatgggaccatttggaagctcttcctccgcttccagcagaacctcctagggtttctccttccactccttgccatgatcttcttctactcccgtattggttgtgtcttggtgaggctgaggcccgcaggccagggccgggctttaaaaatagctgcagccttggtggtggccttcttcgtgctatggttcccatacaatctcaccttgtttctgcatacgctgttggacctgcaagtattcgggaactgtgaggtcagccagcatctagactacgcactccaggtaacagagagcatcgccttccttcactgctgcttttcccccatcctgtatgccttctccagtcaccgcttccgccagtacctgaaggctttcctggctgccgtgcttggatggcacctggcacctggcactgcccaggcctcattatccagctgttctgagagcagcatacttactgcccaagaggaaatgactggcatgaatgaccttggagagaggcagtctgagaactaccctaacaaggaggatgtggggaataaatcagcctgagtgaccaaattttggtctggtgggaacagatgggaaccagctcaattgggtgtccactcaaagtgctctctccaggggcctcagtgactgtgttgctaaacccagtggtcagttctcagttctcagccatcagcagcatttgctcgccccgccttcttcctccactttcttcacttgcttccaggataccacgctttcttttctgaattgctacaatctttcttccttccttccttgcttccttccttccttccttccctctctccctccctccctccctcgcttcttcccttcctcctttcctcccttcctactttccttccttccttctgacagggtcttgctctattgctctgtcacccaggctggaatgcagtggcgagatctccgctcactgtagcctcctccccctgggttgaagcaattctcatgcctcagcctcccaagtagccaggactataggcacctgccaccatgcctggctaatttttgtattttttttctttctttctttcttttcttttttttttttttttgagacggagtctcactcttgttgcccaggctggacaacaatggcgcgatctcggctcactgcaacctccacctcccggattcaagcgattctcctgcctcagcctcctgagtagctggaactacatgcgcgtgccaccacgcacagctaatttttataattttagtagagatggggtttcactgcgttggccaggatgatctcgatctcttgaccttgggatccacccgccttggcctcccaaagtgctgggattacaggtgtgagccaccatgcctggccctaatttttgtgtttttattagaaacagagtttcaccatgttggccaggctggagaattgctgtaatagttttccaactggcccctgtccttcctctctcttgctctcctcccatctcatctgcacctagcagccagagtgatcctgatactctcggcctttacttccgcctccctcagagcagcagcctgtcaaaacaccagattacaacaaatttagtttaaaggtctcaattagcgttattggcaattctagaatcaggcaacagactcattgaatcaggaacagattcactccataaaatacagagagtgctgcaatgagctgggtagaagaggttagttttatagacaggaaggggctgtcaaaggcagaaagaaatgaagaacaaaaaaaaagattgatttttttttttttgagacaggatctcactctgtcatccaggctgaagtccaatcccacaatcatggctcactgcagccaccacctcctgagctcaagtgatcctcccatctaagcccccaagtagctaggactacaggagcacaccaccacacctggctaatttttgtattttttgtggagacagggtctcagtatgttacccaggttggactggaaacccttggctcaagcaatttgcctgcctcagcctcccaaagtgctgggattacaggcgtgagccactgcacagggccagattcatcatttcaaagttactttctatatgcggccggaacagggtggttgacatcagttttcttcaggttactttttaataatgattaaaacggggaacttcattatcatgagcatggttactgtctgcattattacgccaactgaaactgtcatgtttgggaatttggctgttaactctgtctccaggagtctcaaaggtcagataacaacttagttttggtttgaggacatggaactttaatacgacagattccattttggtttggtctggtcagctgggacctagtgcaggaggttagtccaaaacaatggccttccatagtttttacttaacaagcccaactccttacggtaatcctttaaggcctatgtgatctgcccccaccctggctacactctttgcccttatgtccaccagcctccagtgctccagacacaactgatctcaaatactcctgacacatccccctggggattcctcttcctggattactctcctctcagctgtctgcttggctcactctctcaccttctgaggtcttagctcagataccacctttcactcacctgtccaacctatttaacacaaactggcccatctctgacgctcctgatcttcctgatgctctatttttaaattttttcaatagtgcttatttctttcagacattgtatatgtttctcctatttgtgatgttcagtggctactgtccccacccacattgtcccagggtgaattccacaaggtaggggatcttggttaggctcactgctgtacccaaccccctaacacagggcctggtgtgtaggttttcagaaagtatctgtaaaatgcatgggtggaggagggagcattttccttctggcactgctggggaaaaagaacctaaggccctccactcaccagggttccacattctctgtagtccagctgggaaatgctattaaaaggaccattctcgtagccttgatggtggacccagcatctggcaatcaggagggccttgaagtactctgcctagggaatgtcccaggaccatatacagtctgcagaaggaggcagtgaacacacttggcctaggccccatctcaggagccttcacatctccctgggacctgcacaatcaagtccaaaatctttgtctgatgtcaaggctagggcttttgcaaataggatcccatacatcttccagccctcatactcctccactcccttttcatttcctgaacattccaacttctatgcctttgctcttgtgggctccctcatgtaattaggataatttccagccaggtattccctcacccttgttttacaactgaatcccactttctctgggactccactgcttggtcactctgccctgtgctttgagaggaggttgggtggagcatgggacatgggccatttactgccttcacatttccctggtcacggtgatttttttaggggtgggcacatgacctaggtagagccaatgaagtgcaatatcactagaacatgtgagaagagaggcatgaaaccgaagctgagagggtttgagatctggagctactccttcctccacccaaacttcagaaggtgaaggagatagtgcatgtgagtgagcagatcccgagggcactgtttgagcctcagaatcaaagcacttctgaagctagtcccaatcttggattcgacagttacaagaaccaataaattcctttccttgtggagtcatgttgttttgttacttgcaacctaaagattcctgactgatatactgtgcccagtgcttttctcttcatatctctaatgcttggcattctccctgccccctgacacatccactgagaagcctttccccagggagctgcctgcccacatggcatctctctctcccgagcttctaaagcacccactgctcttcccacctcatagaactacctggtgcaacctgcccacgtcccagcatgtctgccctgcacaattgaacgtggaacctggcacacaggaaaggaaactttttggtggatggaatggagggtaggagaacagacggctgggtgaatgtaagctccatgagagcagggactttgccatgtgtaaactctgcatcccctgtgcttcaacacatgctcagagcatagtagactttttttggaatgaatggataagttttt

SEQ ID NO: 436221 - DNA, 1447 bp, Homo sapiens
tgcccttttcccctcgggcagcggaggcgagcaccgcgaacgccgtgtcccgagcgccgccgcctgcggacgcctcacgggccgggaagggatgcggcctttctcctaaggcaccagtttctccaatgtttaacttatacatgcatcagaatgacagtgaggcgttggtgagagctgctctggttgctaatggagatctggcctgccacagtgggagcagagcttgcccagtgcgccgggacgactgcgggctccatccattccgctcccagggcggttgtcggccaggaccgtgagctgtcaggtcccccgcgggatccttcctggagcttacactatagtaggaggcagccagtacttgcaagcacggggtcgcgggaactacgacctcacccaggccaggcgacctttctctcaagaaggagatgtcagaggcccctcgtgacagcgagcttccggggacagggctcctaatgtgtagagatggggtttcaccacgttggccaggatggtcttgatctcctgacctcatgatctgccttcctcagcctcctattgatcaaagttttacatgatgcaggagccttcagagtgaagacccaaagatacaggatacagtacgggatcctttctggaatggaggtcttatgagctgctattgaacacggcagagcctgttggtgacctgcacacaggagccctccagtcagtactgattgaattactcaaggctgcctctctgcaaagttgagcagcatttccatttcccaaaccggctctgatttcccagctggagcgaggggaaacaccctggtgctcggttcctcggggagctctggatggagaggccccaaggggcatctcctcagcacctgagacttttacctttacccagaaaggaataaaagaggtcagatgatgacagctgtgtccttaacaaccaggccccaggaatcagtggcttttgaggacgtggctgtgtacttcactacgaaggaatgggccatcatggtgcctgccgagagggccttgtacagggatgtgatgctggagaactatgaggctgtggcctttgtagtgccacccacttccaaaccagctttggtctctcatctggagcaagggaaagagtcctgtttcacccagccacagggagtcctaagcaggaatgactggagagcaggctggataggatacttggaactaagaagatatacttacttagctaaagcagtgttacgtagaatagtatcaaaaatttttcgaaatcgtcaatgctgggaagacaggagaaaagcttaattcttgacatttaaataccagttttccaagtaaggagttgatgtaagagccaccttaaacgatgtcaaatacacattttctttttctgtagactggtagatttaatgtttttcattcattaaaataactcattttgatgtacaaa

SEQ ID NO: 436222 - DNA, 1107 bp, Homo sapiens
ggggcctggcgggtgtggagcacggggagtcgggcgtggggcgggcagggagtggagtcggggtcttactccggtggctgcagggcgcagggtagccgtgtcaggcctgcccaggtgcagagcgctcctccgcgaccccaacagcctctggtccggtctggcgcgccctcgctttcccagagggcgacctgggctatggcggccgtggcgctggcgagcgggacacgcctcggccttgtcctcgagctgctcccgggacagcccgcgctgccccgggcgcgccgggagtcagtgaccttcgaggatgtggccgtctacttctctgagaacgaatggatcggcctgggccctgctcagagagccctgtacagggatgtgatgctggagaattatggggctgtggcttccctggcagcatttccatttcccaaaccggctctgatttcccagctggagcgaggggaaacaccctggtgctcggttcctcggggagctctggatggagaggccccaaggggcatctcctcagcacctgagacttttacctttacccagaaaggaataaaagaggtcagatgatgacagctgtgtccttaacaaccaggccccaggaatcagtggcttttgaggacgtggctgtgtacttcactacgaaggaatgggccatcatggtgcctgccgagagggccttgtacagggatgtgatgctggagaactatgaggctgtggcctttgtagtgccacccacttccaaaccagctttggtctctcatctggagcaagggaaagagtcctgtttcacccagccacagggagtcctaagcaggaatgactggagagcaggctggataggatacttggaactaagaagatatacttacttagctaaagcagtgttacgtagaatagtatcaaaaatttttcgaaatcgtcaatgctgggaagacaggagaaaagcttaattcttgacatttaaataccagttttccaagtaaggagttgatgtaagagccaccttaaacgatgtcaaatacacattttctttttctgtagactggtagatttaatgtttttcattcattaaaataactcattttgatgtacaaa

SEQ ID NO: 436223 - DNA, 2921 bp, Homo sapiens
tgcccttttcccctcgggcagcggaggcgagcaccgcgaacgccgtgtcccgagcgccgccgcctgcggacgcctcacgggccgggaagggatgcggcctttctcctaaggcaccagtttctccaatgtttaacttatacatgcatcagaatgacagtgaggcgttggtgagagctgctctggttgctaatggagatctggcctgccacagtgggagcagagcttgcccagtgcgccgggacgactgcgggctccatccattccgctcccagggcggttgtcggccaggaccgtgagctgtcaggtcccccgcgggatccttcctggagcttacactatagtaggaggcagccagtacttgcaagcacggggtcgcgggaactacgacctcacccaggccaggcgacctttctctcaagaaggagatgtcagaggcccctcgtgacagcgagcttccggggacagggctcctaatgtgtagagatggggtttcaccacgttggccaggatggtcttgatctcctgacctcatgatctgccttcctcagcctcctattgatcaaagttttacatgatgcaggagccttcagagtgaagacccaaagatacaggatacagtacgggatcctttctggaatggaggtcttatgagctgctattgaacacggcagagcctgttggtgacctgcacacaggagccctccagtcagtactgattgaattactcaaggctgcctctctgcaaagttgaggcggtggagaactactgaggacttctgagcagagaggttggtggaagaggaagcaccaaaaatccatctcatcacctagagagcattgtactggcagaactgtctaaagtgactattttggaactctgggatcaatttgaatacttgcagcttccaaaggaaagatgggcaatcacatctccataccacaggacacaccccttggatgcatcctcaagaactgggaaaagtttgacccacaagctctaaaaaggaaaaggctaattttttttgtcacacagcctggttctgatatggacttggggaccagcaatcttggccagaaaatggaagtattaattttaatactatccatcaactagattcgttttgctgccagcagggaaaatggacagaaatcccttatgcacaggctttcatggccgtaagagacaaccctgacctttgttgggcttgtaaaatggacccagtgatgatagcagccatcaccaggcaactcctccagtagatttgggagaccctttatcagatttgcacagggctcaagccccagaggaaccaaaggtggaatttagttcaaacattgcctcttttattcccattatatccaagtctcccagtcccatagccttcccctccctacccagggccaccctctggataccacccccttaagttatccccacttcaggaggttagcagccctattgggtcaactagagtccagactccattcactatgtaagacctgagccagattaaaatggagctatggaagtttatggaaaaccctgactaatgcattgaagggttccattaactaggcttaacatttgaacttacttgggaggacttcacagtcacactaggccaaactctaagggagaacatgactccattatggaggcagcccagcaatttgcaagtgcaatgcacatgactgaccctggtggctaccttgtgagggccactgcccttccccaggttggcccccaactgggaatacaatacccaggggggtatatgggcagtgaaccacatccccataatggggatgaaggatagcagaggaaagcctgtaaactacaataaattggccttaatagatcaagactctcttgaaaatcccactactttcttagagaggctacattaggcccaagtgaaacatactaaccttgacccagacaccccagaaggatgccttcttttgtatccccatagacccatcttcccaattgctatttgcctttgaatgggaaaatgaaaaaggaaggagccaacagctcacctggactgtgcttctgcaaggttttagagatagtccccatttggttgggcaagccttggctaaagattttcaagacctgactcttgagggggcagatgtgtcctacagtatgtgaatgacctgctaatctcctcccccacaagacaactgggaatccaacatctagtccagacactacattttcttgcagacagagggtacaaagcatccaaggccaaggcacagcttctcagacaagaggtccaatacgtggggataatcctgatccctcgagaacataagttctccccagaacggatacaggccatccttaaaatacctatcccagccacccaaaatcagcatcaggcctttctagggatcacaggatattgcagactttagactgggttatggtgggattgttaagtccttatattagactctaaaagaagggactgatagggactcacttctctgggaaaaagatcaggagcaagcctttaggcagctaaagactgctctctcataagccccagcccttgggctacccatactaagcaaactgttttagcttttcatcaccaaaagccaaggtgtagccttaggagtcctaactcaaactgttgggtcaatcaaatgtcctgtaggttactttttaaagaacctagacccagtagcacacaggtggccacactgcctcaaggtagtggctgcacaagccctcctactggaggaggtcctcaaaatcaccatgatacaatcaatccagctcctgatgtccaacaaataagccccttactggacataaaagtgccacaatggctcactgacaacagattgctaaagtatcaagtgttgttagaaatcccacagagatagcgtcccccacagagaga

SEQ ID NO: 436224 - DNA, 959 bp, Homo sapiens
tgcccttttcccctcgggcagcggaggcgagcaccgcgaacgccgtgtcccgagcgccgccgcctgcggacgcctcacgggccgggaagggatgcggcctttctcctaaggcaccagtttctccaatgtttaacttatacatgcatcagaatgacagtgaggcgttggtgagagctgctctggttgctaatggagatctggcctgccacagtgggagcagagcttgcccagtgcgccgggacgactgcgggctccatccattccgctcccagggcggttgtcggccaggaccgtgagctgtcaggtcccccgcgggatccttcctggagcttacactatagtaggaggcagccagtacttgcaagcacggggtcgcgggaactacgacctcacccaggccaggcgacctttctctcaagaaggagatgtcagaggcccctcgtgacagcgagcttccggggacagggctcctaatgtgtagagatggggtttcaccacgttggccaggatggtcttgatctcctgacctcatgatctgccttcctcagcctcctattgatcaaagttttacatgatgcaggagccttcagagtgaagacccaaagatacaggatacagtacgggatcctttctggaatggaggtcttatgagctgctattgaacacggcaggtgagagaatttctttatggccaattcttagacaaaaagtaggggaagcggttgggcacagtggctcacgcctgtaatcctagcactttgggaggccaaggcgggtggatcacgagctcaggagtttgagaccagcctgaccaacatggtgataccccatctctactaaaaatacaaaaattagccaggcgtggtggcgtgcacctgtaatctcagctactcaggaggctaaggcaggagaattgtgtgaacctgggaggcagaggttgcagtgacccgagatcgcgc

SEQ ID NO: 436225 - DNA, 890 bp, Homo sapiens
gctggggaagaggccgatgcataaagtcagcctgttccaagtgctcagggacttagcaaaatgagaagatgtgacctgtgccaaaactattttgagaattttaaatgtgaccatttttctggtatgaataaacttacagcaacaaataatcaaagatacaattaatctgatattatatttgttgaaatagaaatttgattgtactataaatgatttttgtaaataatttatattctgctctaaaaaagggcggctggggaatggctgctgccatggtgccggggcgcagcgagagctgggagcgcggggagcctggccgcccggccctgtacttctgcgggagcattcgcggcggacgcgaggacaggacgctgtacgagcggatcgtgtctcggctgcggcgattcgggacagtgctcaccgagcacgtggcggccgccgagctgggcgcgcgcggggaagaggctgctgggggtgacaggctcatccatgagcaggacctggagtggctgcagcaggcggacgtggtcgtggcagaagtgacacagccatccttgggtgtaggctatgagctgggccgggccgtggcctttaacaagcggatcctgtgcctgttccgcccgcagtctggccgcgtgctttcggccatgatccggggagcagcagatggctctcggttccaggtgtgggactatgaggagggagaggtggaggccctgctggatcgatacttcgaggctgatcctccagggcaggtggctgcctcccctgacccaaccacttgacttaatctcactttcttaaattcttctattctcagacactgctctagtaccattccttcctcttagccccaggagcaaattaaaagggtacagttaaaatcctaa

SEQ ID NO: 436226 - DNA, 901 bp, Homo sapiens
  misc_feature (16)..(16): n is a, c, g, or t
tcaacaaccaaacatntattgagcacctactggtcagggccctggaaccactagactcttagtccagtgctcttcaggaccctggaggaccctctgcaatttggcctgagactccagccagcagctggaaactcctcgtccaggagactgtccaggtgaggagctcagcagtgaggagggcggaccccatcagcccacttgccaacctgcaatgccaccaccatcctgtggtccagagacatagaagtggcaggatgggggcggctggggaatggctgctgccatggtgccggggcgcagcgagagctgggagcgcggggagcctggccgcccggccctgtacttctgcgggagcattcgcggcggacgcgaggacaggacgctgtacgagcggatcgtgtctcggctgcggcgattcgggacagtgctcaccgagcacgtggcggccgccgagctgggcgcgcgcggggaagaggctgctgggggtgacaggctcatccatgagcaggacctggagtggctgcagcaggcggacgtggtcgtggcagaagtgacacagccatccttgggtgtaggctatgagctgggccgggccgtggcctttaacaagcggatcctgtgcctgttccgcccgcagtctggccgcgtgctttcggccatgatccggggagcagcagatggctctcggttccaggtgtgggactatgaggagggagaggtggaggccctgctggatcgatacttcgaggctgatcctccagggcaggtggctgcctcccctgacccaaccacttgacttaatctcactttcttaaattcttctattctcagacactgctctagtaccattccttcctcttagccccaggagcaaattaaaagggtacagttaaaatcctaa

SEQ ID NO: 436227 - DNA, 1041 bp, Homo sapiens
gctggggaagaggccgatgcataaagtcagcctgttccaagtgctcagggacttagcaaaatgagaagatgtgacctgtgccaaaactattttgagaattttaaatgtgaccatttttctggtatgaataaacttacagcaacaaataatcaaagatacaattaatctgatattatatttgttgaaatagaaatttgattgtactataaatgatttttgtaaataatttatattctgctctaaaaaagggcggctggggaatggctgctgccatggtgccggggcgcagcgagagctgggagcgcggggagcctggccgcccggccctgtacttctgcgggagcattcgcggcggacgcgaggacaggacgctgtacgagcggatcgtgtctcggctgcggcgattcgggacagtgctcaccgagcacgtggcggccgccgagctgggcgcgcgcggggaagaggctgctgggggtgacaggctcatccatgagcaggacctggagtggctgcagcaggcggacgtggtcgtggcagaagtgacacagccatccttgggtgtaggctatgagctgggccgggccgtggcctttaacaagcggatcctgtgcctgttccgcccgcagtctggccgcggtgagcaccccaagcctccctcctggctttctatggacccagccctcagctccttccctggtgggctctgagcaccgcgcctctcccaaggggtaagggagctgtgagggtgtggatgggaggcagcttcacctttccctgccctttccagtgctttcggccatgatccggggagcagcagatggctctcggttccaggtgtgggactatgaggagggagaggtggaggccctgctggatcgatacttcgaggctgatcctccagggcaggtggctgcctcccctgacccaaccacttgacttaatctcactttcttaaattcttctattctcagacactgctctagtaccattccttcctcttagccccaggagcaaattaaaagggtacagttaaaatcctaa

SEQ ID NO: 436228 - DNA, 801 bp, Homo sapiens
gctggggaagaggccgatgcataaagtcagcctgttccaagtgctcagggacttagcaaaatgagaagatgtgacctgtgccaaaactattttgagaattttaaatgtgaccatttttctggtatgaataaacttacagcaacaaataatcaaagatacaattaatctgatattatatttgttgaaatagaaatttgattgtactataaatgatttttgtaaataatttatattctgctctaaaaaagggcggctggggaatggctgctgccatggtgccggggcgcagcgagagctgggagcgcggggagcctggccgcccggccctgtacttctgcgggagcattcgcggcggacgcgaggacaggacgctgtacgagcggatcgtgtctcggctgcggcgattcgggacagtgctcaccgagcacgtggcggccgccgagctgggcgcgcgcggggaagaggctgctgggggtgacaggctcatccatgagcaggacctggagtggctgcagcaggcggacgtggtcgtggcagaagtgacacagccatccttgggtgtaggctatgagctgggccgggccgtggcctttaacaagcggatcctgtgcctgttccgcccgcagtctggccgcgtgctttcggccatgatccggggagcagcagatggctctcggttccaggtgtgggactatgaggaggcagccacctgccctggaggatcagcctcgaagtatcgatccagcagggcctccacctctccctcctcataggtcgacgcggccgcgaatttagtagtag

SEQ ID NO: 436229 - DNA, 666 bp, Homo sapiens
tgatgttcctcattcggccctaatcacatgtcccaccttgcatagggttgaatttttctttttgtggctattccatttcctcgctgctttgatgagattgtcatgtttggtcaggtcatctggcacaaggctcccaccctccctgagcagggtgggtatggacatacaagggcataggagttactgggagccagcatgaggcatgtccttgaccagctttccctcaacacaggggaagaggctgctgggggtgacaggctcatccatgagcaggacctggagtggctgcagcaggcggacgtggtcgtggcagaagtgacacagccatccttgggtgtaggctatgagctgggccgggccgtggcctttaacaagcggatcctgtgcctgttccgcccgcagtctggccgcgtgctttcggccatgatccggggagcagcagatggctctcggttccaggtgtgggactatgaggagggagaggtggaggccctgctggatcgatacttcgaggctgatcctccagggcaggtggctgcctcccctgacccaaccacttgacttaatctcactttcttaaattcttctattctcagacactgctctagtaccattccttcctcttagccccaggagcaaattaaaagggtacagttaaaatcctaa

SEQ ID NO: 436230 - DNA, 937 bp, Homo sapiens
  misc_feature (830)..(830): n is a, c, g, or t
  misc_feature (833)..(833): n is a, c, g, or t
  misc_feature (839)..(839): n is a, c, g, or t
  misc_feature (857)..(857): n is a, c, g, or t
  misc_feature (882)..(882): n is a, c, g, or t
  misc_feature (884)..(884): n is a, c, g, or t
  misc_feature (888)..(888): n is a, c, g, or t
  misc_feature (908)..(908): n is a, c, g, or t
gctggggaagaggccgatgcataaagtcagcctgttccaagtgctcagggacttagcaaaatgagaagatgtgacctgtgccaaaactattttgagaattttaaatgtgaccatttttctggtatgaataaacttacagcaacaaataatcaaagatacaattaatctgatattatatttgttgaaatagaaatttgattgtactataaatgatttttgtaaataatttatattctgctctaaaaaagggcggctggggaatggctgctgccatggtgccggggcgcagcgagagctgggagcgcggggagcctggccgcccggccctgtacttctgcgggagcattcgcggcggacgcgaggacaggacgctgtacgagcggatcgtgtctcggctgcggcgattcgggacagtgctcaccgagcacgtggcggccgccgagctgggcgcgcgcggggaagaggctgctgggggtgacaggctcatccatgagcaggacctggagtggctgcagcaggcggacgtggtcgtggcagaagtgacacagccatccttgggtgtaggctatgagctgggccgggccgtggcctttaacaagcggatcctgtgcctgttccgcccgcagtctggccgcgtgctttcggccatgatccggggagcagcagatggctctcggttccaggtgtgggactatgaggagggagaggtggaggccctgctggatcgatacttcgaggctgatcctccagggcaggtggctgcctcccctgacccaaccacttgacttaatctcactttcttaaaaattccttcctaattcctcaagacnaanttgctnctaagttaacccaatttncctttcccctctttaaaggcccccnangggnggcaaaaattttaaaaaaangggtaccaaaggtttaaaaaaattcccct

SEQ ID NO: 436231 - DNA, 329 bp, Homo sapiens
tttttgcaaaaaccaaggaaatgaattatttttaatatcacatatccaaaaaacgattatttcttattattctattattattctagtaattcagttttagattttactttggattttctatgaacaaaattacatcattagaagttaatgctaattttgtttgttttttcttcttataccttttctaaaaatttaacctagtaaatctggaagatcctcttatatcttttattttttggcttacttcagcacaggctagaatattcatttagaaactgggatgctggaaatagatcttattaaaaaatcatttatagtttctctttgtt

SEQ ID NO: 436232 - DNA, 1987 bp, Homo sapiens
aacaaacgcccatgtagccacaaccaggacatcaaatcccgtattttgtttcctttcctcctcccgtggaatctttgagtttattgcgcaccaccccctacatgttgccattcttttagtgcactcgtatatatccagaagcaatacacagtgatttttaactctcctagatgaaatatttccatctttgctggttttgtaggttttttggtgtggtgttgggaattatttccataccccatggctgtcaggctattcttctgtattttcttctgtgagtttggctttttcctgttctgcgtaggattcatgtgtgtgtacagagtaaggcagaaatcttaactgtacctttcccacccaaccagttgtcctggcaatgtgtggggtgccctcttccctgcctcactcccacacctgctgggcctggcttcgcccctgtcaggcatgacctgcgctgaccccctcttctctcagctaccgctcagctgtttttagcccatggctttcccccaaggacttttcccctaaggattttaggatcgccttatattcaccccaaagagtcctgttagattttcagttgcattgaatttacaggcgtggttggcatccttttccatgaatatggtacaaaactattacatcatttttggacgtgaagttttgactagatttagtttcaggtatcacatagattttgggggtctttggatttttgtgttgcctgtgattattccttagatcagaggaatcacagatgatcaaacctgcaaatacaaggtttggttctttccttttgaatttgtctgattgtcttgtcactccagtgctgccaaagagaggcactggtggggcccttgtctgtgaaactttaaagcatcccattaaagagtgaaggttcccatttccggagtttttcatcctttgattttttttttcttgatgttgctccatccttgttgaatttgttagtacttttaggatttttaatgtatgttcgttagtattagactctagttttattgtactttggtatccagattgtgagcactttccctgtttttcatttgctgaaacactgtgtataaggtagggatttgtcctgaaagatgtgaagtcactctcctgttcaaactaggcctggtatcttttggtagagcagaggctttattttattaattaaatctgtgctttaggtgtactctggcctttttccagcagcctaaactgaaagcctatttttttttttttgaaagctgcattttaaggccatcaaatttcttcctaatctgtatcaaattgcctttaggtcctggatcctttgtctttattcctgtgtattgggcttaatttagtgacgtttatgtatttatcggtacaattcaaagggctgggagcattgtggtccacaggagaggccttcgctggctgcactggagagaggttttgggctctgctgggcagggtgtgaagaggagagcacaaagcgggccttcgggctcctgcatacggaaaatacatcaccatctcctgtcttttcagagcaaaatctggagcggcaggtgttacagacacaatgtagacgactggaggcccggcactacagcctcagcctgacggcagagcagctctcccacagcgtggcggtgagttgggaagggatggaaaccttcaaacacgcaaccttttgagtttgggttcagaaacacccatgcagataagtttcagagaggaaatgtgctcttaagagatcaaaatttggcggatcacgaggtcaggagatcgagaccatcccggctaaaacggtgaaaccctgtctctactaaaaatacaaaaaattagccgggcgtagtggcgggcgcctgtagtcccagctacttgggaggctgaggcaggagaatggcgtgaacccgggaggcggagcttgcagtgagccgagattgcgccactgcactccagcctgggcgacagagcgagactccgtctc

SEQ ID NO: 436233 - DNA, 7462 bp, Homo sapiens
ggaggtggttgggggcagaccagcaccttcggcccaggggcagtgccagcttcctttgcccctgccctccacgtgggcaccagggccaggacatctgcggccaggtgggcagctgtcggcgcagttgacgtcttggctacatcgtggcactcgcttcacggcgtgctgggtgccaacggtgtctgcttccccgggtgtgtgtctggtgtgaccttcggatgtccacaccaggaggggtggaggcaggagcccctgccaccctgcatccttcacctgcacacattgtgtttctggggggttctagttcttttgctggactgaggaggcccagggagggagacggatcccgagacgcacttcaccccagacctgtcgcagccacatcccctttcttacggttctgcttcccacaccacatgcaccatgttttgcgtagaaagccttagggaaaggatgtttctagaacatgaactaaatctagcgccttcccgtgagtcaggagacctggctgtgtcctgtggtcagtggcctataccaggctcctgccctgactggacgctctcctcccgcaggatgccggctccaggagcagcagtggaggtcgggaacgcctcattgtggagcccccgctccctcaggagaaggcagggggaccagccatcccctcgcacctgctcagcaccccctaccccttcggcctctcccccagctcagttgtgcaggattcccgcttcccgccactcaacctccagcggcccgtgcaccacgtggtgccccccagtaccgtgaccgaggactacctgagaagcttccggccctaccacaccaccgacgacctccgcatgtcctcactgcctcccctcggcctggacccggccactgctgcagcctactaccaccccagctacctggccccacaccccttcccccacccggccttcaggatggacgactcctactgcctgtctgccctgaggtccccgttctaccccatccccacccccggctccctgcccccactgcacccatcagcgatgcacctgcacctctctggggtccgctaccctcccgagctctcccactcatccctggcagcgctgcactcggagcgcatgtctggcctcagcgcggagaggctgcagatggacgaggagctaaggcgggagagggagcgcgagcgcgagcgcgagcgtgagcgtgaggctgaccgcgagcgggagaaggaacgtgagcgcgaacgcgagaaggagcgcgagcaagagaaggagcgtgagcgtgagaaggagcgcgagcgcgagctggagcgccagcgggagcagcgggcccgggagaaggagctgctggccgccaaggccctggagcccagcttcctgcccgtggccgagctgcatgggctgcgtggccatgccactgaggagcggggcaagccctcggagcagctgaccccaacccgagcagagaagctgaaggatgccggcctgcaggcgcccaagcccgtccaacaccccttgcatccggtgcccaccccacaccacacggtgcccagcctcatctccaaccatggcatcttctctctgcctagcagcagtgctgccacagccctgctgatccagcgcaccaatgaggaggagaagtggctggcgcggcagcggcggctgcggcaggagaaggaggaccggcagtctcaggtgtccgagttccggcagcaggtgctggagcagcacctggatatgggccggcccccggtgccggcggaggcagagcacaggccggagagcaccaccaggccaggaccaaaccgtcacgagccaggtggccgtgaccctccgcagcactttggggggccaccacctctgatttcgcccaagccccagctccatgctgcacccacggccctctggaaccccgtgtccctgatggacaacaccttggagacgcggcgggccgaaagccactctctgcacagccacccggctgcatttgagcccagccgccaggcagccgtgccgctggtgaaggtggagcgggtcttctgcccggagaaagcagaggaggggccacggaagcgtgagcctgcccctctggacaagtaccagccacctccgccgccaccacgagagggagggagcctggagcaccagcccttcctgcccgggcccgggcccttcctggctgagctcgagaagtccacccagaccatcctgggccagcagcgggcctccctcccacaggcggccaccttcggggagctcagcggacccctgaagcctggctcgccctaccggcccccagtgccacgggcccccgaccctgcctacatctatgatgagttcctgcagcagcgccggaggctggtcagcaagctggacctggaggagcgcaggcggcgggaggcccaggagaaagggtactactacgacctcgatgactcttacgacgagagcgatgaggaggaggtcagggcccacctccgttgcgtggccgagcagccgcccctcaaactggacacgtcctctgagaagctagagtttttgcaactttttggcttgaccacccaacagcagaaggaggaattggtggcccagaagcggaggaagcggcggaggatgctgcgagagagaagcccgtcgcccccaacaattcagagcaagcggcagacgccttcaccgagactggcgctgtctacccgctacagccctgatgagatgaacaacagtcccaacttcgaagaaaagaagaagttcctgaccatcttcaacctgacccacatcagcgctgagaagaggaaagacaaagagagacttgttgaaatgctccgtgccatgaagcagaaggcactgtcagcagcagtggccgactccttgacaaactctccgagggacagtcctgccgtctccctgagtgaaccagccacgcagcaagcctctctggatgtggagaagccggttggtgttgctgcttccttgtctgacatcccaaaggccgcggagcctgggaagctggaacaggtccggccccaggagctgtcgagagtccaggagctagctcctgccagcggggagaaggccaggctgagcgaggcccctggaggcaaaaagagtctgagcatgcttcactatatccggggcgctgcacccaaggacattcctgtgccgctgtcccacagcaccaatgggaagagcaagccgtgggagccctttgtggcagaagagtttgcacatcagttccacgagtcagtgctgcagtccacccagaaggccctgcagaagcataaagggagcgtggctgtgctgtctgcagagcagaaccacaaggttgacacgtccgtccactacaacattcctgagctgcagtcctccagccgcgcccctccaccccagcacaatgggcagcaggagccccccactgcaaggaagggccccccaacccaggagttggaccgggactcggaggaggaggaagaggaggatgatgaagatggagaagatgaggaggaagtccccaagcgcaagtggcaagggatcgaggccgtttttgaagcttaccaggaacacatagaagagcaaaatctggagcggcaggtgttacagacacaatgtagacgactggaggcccggcactacagcctcagcctgacggcagagcagctctcccacagcgtggcggagttgaggagccagaaacagaagatggtctcagaacgggagcggctccaggcagaactggaccacttacgaaagtgccttgccttgcctgcaatgcactggcctaggggctacctgaagggatatcccaggtgacggtttcccttgcactaggccgaacctatagtatagaaatattatctattttattaccttgaatatttaatatttttcactgggaggtttgaagcttacaaaatgagaatgtgccatgcatgaagcaaaggattccaggctccagaaaaaatgaatgaactcaccttgacgtcaatgcaattgaatcaccgttgtcattcagcgagcaaccaatgtaggattgcccacagtttttctttttaaaggtggttttcgcccttcctctcccacattatttcttaatctgaacatgaaggctccattagcaacactaaaacttgatcattaacagccccctgtgcatatgagtggatcaaaccggttctgttctttcttgtgttgccatgttactatgcctcaagcccagtttgcttttgccgcagcgatggggccagtctcattcctccccaggagtgaaacttgcttcagctgaaaaggttgggtgcattgtcagtaaaaagggcttatttgtttcattttactttcctgcaaaattttcttcaaagcaacaagtcctaggagcacacaaagcaacccaaaggcttttccctggaaaagctctttcttacctaaagataaaaccaattcacaaactgaaggtagctttttattactccgtggggagcatgtacagagctctgtgtatacacagcttcacacccaccagattgttactacagtgggttgggttttcatacagacgtaaattttgagagaaaagtcaaaggtgcttcagccttgtactgtgtatatatattaaaaaaaaaacaaagttttgtatgtttttattactttaactattgttataaaaagcctgccatttttaatatgtggtttgggggatttttgtttgtttttcctgtttgggggttttgtttgttgttttggttttttttgggcaaaaaaaaaaaaaaaaccttgcttttagtgtttgtactgctgctggtcaggacattaaaatattgaagtgtttttaaaaattaaagaagaagaaaagtaaaagagcttaccactggcgcctatgcgatcacttcatttttagtttgagttgcaccagaagctgccgtagaaagccatgcgctactgcttacctcctccactccccctgcctgcccccagcatctggacaagctaatagcaaatattacccattgctatcaagggaggagggggtagtctgtagaacccatgtgtgacagtcatgtgcacacatgggcgggggcttttaaaaacctttcaggaagtcaatgatttctgtgattgatataattctaaggtgtctgagagcaggtacagaataggaacttcagaggctttgtttaaacgcaaagctttgtaaaagccacaaggtctgagctgaacccctcctttttgaacttactgtgacaagcacaggaacggtcagaaactgggctcatcacaccaaggcaaagcaacgggcgagtcttcctccttgtcctagttactgcctatggaggcagtgtttagatcaagaaggcctctcttgctcccaagggccctcaccagaggccagggctgccagtcactggtctggggggtggaggcctgagctgagggcagggtgcctgacctgtgtgccggctgctcactgctgtgaccagcagccgagcccttggccctagcccttgctgcgcagaacagcttgctggcagctggcatcgtgtcgctttatctgcccccgcacagtttgctttgtacgtctgccaagaatcttccagttattagcaaactcagacgaatgtaccgccagtattatcagcagtcaacaagcaccttcctctccacagaagcagctggaagagaactcgaggggctgtgctgcaggcctcccctcgaaagacactgggaggtcagcatgttccacaggtgttcagagggagtctgctacaaactatcagggcaaaatctcactggatttctccactgaaaacctacttgaggtttctggtctgaaggcttaagagtcacatcttagcacttccgctctcaggcctcctcctccatcacagatgtctggatgcttttggaaatggccttggctaaagtaaaagggaaaagtagatccgataacttaaaaacgtagctcatcccttaccatccaaggggcactcccttggttggattttctatgacagcacaggggacaggtggcacaccatgagaggtctgcccagggtgggagcagtgtcactgtgctagcaatagttggcttctcccctgtcagtggaaaccccacttctgcccggcccttgagcttcttgcccactgtctccccatccttccacctacttgtggcgatctgagtactctactcttgctcaagaagtaatacgacaatcagaatacaaaccagtaaggcaacacgaataaactaagaaaaaggtaagaactgtctcaaaaacgaaagcacaccacccaagacacagtacccagtcatggtttccccatccaactattagtttcatactttgaaaacttactttcagattattctcaaagaacacagtagcacctaaatctgttttcaattgggcttaaaaattgacatgcaatctcttaagttttttgttcagctacttcacactgagtacctcaaatctgctctggagtcgattatgccacctgtgtgtcaggatgcacctgaaagccctcggctcggtccttagaccatcttcctacattacctggaagggagctgccatctgtccctctgcagagggataccttccaatagtaaattatctggttcctcactgaaacaagttatttttgcttcatatagtcagagtcagactgacatgataaaatatcatgttcctaatctgttgtctcagataagtgaccaagacgggactttccacattttagtctacattctaatcttaaaggaataaagcactgaattgggactaacattctgataggttgcacccttaagagtattcagagagcatcaaaaggagcccacaccttcagcagtgaaggattctaacacagggaatctgcagtttgtagcagaatggtattttcctcaagtagctcataatactgccaaatctcaaaagttaagctgaatttcacaccagatcctacccctttccctgagccacatgtttcacacaagtgtagaaaatgccagggatccaccacaagatggagatggtcagcacaaaccgattctgttcctctttaaagtgtatattagccacttagcaatctctatattctttcaagtaaccaagctgttgactttcttactacttgcagtagcctgtccccaacttttccatccagtgcttaacctaaaaaactccttaactctgccttgacctgaggaagaccatgctaactggtgttattttgtatgtaccctgtgcttaattctataacagtaaaccccatacgcaggtgggagggaggaacaccggtgcctcggtcactctgggggcagtttagatgctgtgaaattaaacctgttctaagtgtacttgtttgaattaattgtattgtaatattatttgttgaatgtagtaattaggtatttatgaatatattgctgtaatttctgacaacatccaaaaaataaaatcttcctaaattat

SEQ ID NO: 436234 - DNA, 7212 bp, Homo sapiens
cccacgcgtccgaaattatagcgtccggccaaggccgcaagggggggcgccgccggtgagctggcgggtcgtgcggggaagcagcacccccgcgccgtgccaggaccggccagcgtccgcagggtcctcactgagcagcgagtcgtcccccgtgtcctctccggccaccaaccacagctcccccgccagcacacccaagcgcgtgcccatgggccctatcatcgtcccccctgggggccacagcgtgcccagcaccccccccgtggtgaccatcgctccaaccaaaaccgtgaatggtgtctggaggagtgagagccggcaggatgccggctccaggagcagcagtggaggtcgggaacgcctcattgtggagcccccgctccctcaggagaaggcagggggaccagccatcccctcgcacctgctcagcaccccctaccccttcggcctctcccccagctcagttgtgcaggattcccgcttcccgccactcaacctccagcggcccgtgcaccacgtggtgccccccagtaccgtgaccgaggactacctgagaagcttccggccctaccacaccaccgacgacctccgcatgtcctcactgcctcccctcggcctggacccggccactgctgcagcctactaccaccccagctacctggccccacaccccttcccccacccggccttcaggatggacgactcctactgcctgtctgccctgaggtccccgttctaccccatccccacccccggctccctgcccccactgcacccatcagcgatgcacctgcacctctctggggtccgctaccctcccgagctctcccactcatccctggcagcgctgcactcggagcgcatgtctggcctcagcgcggagaggctgcagatggacgaggagctaaggcgggagagggagcgcgagcgcgagcgcgagcgtgagcgtgaggctgaccgcgagcgggagaaggaacgtgagcgcgaacgcgagaaggagcgcgagcaagagaaggagcgtgagcgtgagaaggagcgcgagcgcgagctggagcgccagcgggagcagcgggcccgggagaaggagctgctggccgccaaggccctggagcccagcttcctgcccgtggccgagctgcatgggctgcgtggccatgccactgaggagcggggcaagccctcggagcagctgaccccaacccgagcagagaagctgaaggatgccggcctgcaggcgcccaagcccgtccaacaccccttgcatccggtgcccaccccacaccacacggtgcccagcctcatctccaaccatggcatcttctctctgcctagcagcagtgctgccacagccctgctgatccagcgcaccaatgaggaggagaagtggctggcgcggcagcggcggctgcggcaggagaaggaggaccggcagtctcaggtgtccgagttccggcagcaggtgctggagcagcacctggatatgggccggcccccggtgccggcggaggcagagcacaggccggagagcaccaccaggccaggaccaaaccgtcacgagccaggtggccgtgaccctccgcagcactttggggggccaccacctctgatttcgcccaagccccagctccatgctgcacccacggccctctggaaccccgtgtccctgatggacaacaccttggagacgcggcgggccgaaagccactctctgcacagccacccggctgcatttgagcccagccgccaggcagccgtgccgctggtgaaggtggagcgggtcttctgcccggagaaagcagaggaggggccacggaagcgtgagcctgcccctctggacaagtaccagccacctccgccgccaccacgagagggagggagcctggagcaccagcccttcctgcccgggcccgggcccttcctggctgagctcgagaagtccacccagaccatcctgggccagcagcgggcctccctcccacaggcggccaccttcggggagctcagcggacccctgaagcctggctcgccctaccggcccccagtgccacgggcccccgaccctgcctacatctatgatgagttcctgcagcagcgccggaggctggtcagcaagctggacctggaggagcgcaggcggcgggaggcccaggagaaagggtactactacgacctcgatgactcttacgacgagagcgatgaggaggaggtcagggcccacctccgttgcgtggccgagcagccgcccctcaaactggacacgtcctctgagaagctagagtttttgcaactttttggcttgaccacccaacagcagaaggaggaattggtggcccagaagcggaggaagcggcggaggatgctgcgagagagaagcccgtcgcccccaacaattcagagcaagcggcagacgccttcaccgagactggcgctgtctacccgctacagccctgatgagatgaacaacagtcccaacttcgaagaaaagaagaagttcctgaccatcttcaacctgacccacatcagcgctgagaagaggaaagacaaagagagacttgttgaaatgctccgtgccatgaagcagaaggcactgtcagcagcagtggccgactccttgacaaactctccgagggacagtcctgccgtctccctgagtgaaccagccacgcagcaagcctctctggatgtggagaagccggttggtgttgctgcttccttgtctgacatcccaaaggccgcggagcctgggaagctggaacaggtccggccccaggagctgtcgagagtccaggagctagctcctgccagcggggagaaggccaggctgagcgaggcccctggaggcaaaaagagtctgagcatgcttcactatatccggggcgctgcacccaaggacattcctgtgccgctgtcccacagcaccaatgggaagagcaagccgtgggagccctttgtggcagaagagtttgcacatcagttccacgagtcagtgctgcagtccacccagaaggccctgcagaagcataaagggagcgtggctgtgctgtctgcagagcagaaccacaaggttgacacgtccgtccactacaacattcctgagctgcagtcctccagccgcgcccctccaccccagcacaatgggcagcaggagccccccactgcaaggaagggccccccaacccaggagttggaccgggactcggaggaggaggaagaggaggatgatgaagatggagaagatgaggaggaagtccccaagcgcaagtggcaagggatcgaggccgtttttgaagcttaccaggaacacatagaagagcaaaatctggagcggcaggtgttacagacacaatgtagacgactggaggcccggcactacagcctcagcctgacggcagagcagctctcccacagcgtggcggagttgaggagccagaaacagaagatggtctcagaacgggagcggctccaggcagaactggaccacttacgaaagtgccttgccttgcctgcaatgcactggcctaggggctacctgaagggatatcccaggtgacggtttcccttgcactaggccgaacctatagtatagaaatattatctattttattaccttgaatatttaatatttttcactgggaggtttgaagcttacaaaatgagaatgtgccatgcatgaagcaaaggattccaggctccagaaaaaatgaatgaactcaccttgacgtcaatgcaattgaatcaccgttgtcattcagcgagcaaccaatgtaggattgcccacagtttttctttttaaaggtggttttcgcccttcctctcccacattatttcttaatctgaacatgaaggctccattagcaacactaaaacttgatcattaacagccccctgtgcatatgagtggatcaaaccggttctgttctttcttgtgttgccatgttactatgcctcaagcccagtttgcttttgccgcagcgatggggccagtctcattcctccccaggagtgaaacttgcttcagctgaaaaggttgggtgcattgtcagtaaaaagggcttatttgtttcattttactttcctgcaaaattttcttcaaagcaacaagtcctaggagcacacaaagcaacccaaaggcttttccctggaaaagctctttcttacctaaagataaaaccaattcacaaactgaaggtagctttttattactccgtggggagcatgtacagagctctgtgtatacacagcttcacacccaccagattgttactacagtgggttgggttttcatacagacgtaaattttgagagaaaagtcaaaggtgcttcagccttgtactgtgtatatatattaaaaaaaaaacaaagttttgtatgtttttattactttaactattgttataaaaagcctgccatttttaatatgtggtttgggggatttttgtttgtttttcctgtttgggggttttgtttgttgttttggttttttttgggcaaaaaaaaaaaaaaaaccttgcttttagtgtttgtactgctgctggtcaggacattaaaatattgaagtgtttttaaaaattaaagaagaagaaaagtaaaagagcttaccactggcgcctatgcgatcacttcatttttagtttgagttgcaccagaagctgccgtagaaagccatgcgctactgcttacctcctccactccccctgcctgcccccagcatctggacaagctaatagcaaatattacccattgctatcaagggaggagggggtagtctgtagaacccatgtgtgacagtcatgtgcacacatgggcgggggcttttaaaaacctttcaggaagtcaatgatttctgtgattgatataattctaaggtgtctgagagcaggtacagaataggaacttcagaggctttgtttaaacgcaaagctttgtaaaagccacaaggtctgagctgaacccctcctttttgaacttactgtgacaagcacaggaacggtcagaaactgggctcatcacaccaaggcaaagcaacgggcgagtcttcctccttgtcctagttactgcctatggaggcagtgtttagatcaagaaggcctctcttgctcccaagggccctcaccagaggccagggctgccagtcactggtctggggggtggaggcctgagctgagggcagggtgcctgacctgtgtgccggctgctcactgctgtgaccagcagccgagcccttggccctagcccttgctgcgcagaacagcttgctggcagctggcatcgtgtcgctttatctgcccccgcacagtttgctttgtacgtctgccaagaatcttccagttattagcaaactcagacgaatgtaccgccagtattatcagcagtcaacaagcaccttcctctccacagaagcagctggaagagaactcgaggggctgtgctgcaggcctcccctcgaaagacactgggaggtcagcatgttccacaggtgttcagagggagtctgctacaaactatcagggcaaaatctcactggatttctccactgaaaacctacttgaggtttctggtctgaaggcttaagagtcacatcttagcacttccgctctcaggcctcctcctccatcacagatgtctggatgcttttggaaatggccttggctaaagtaaaagggaaaagtagatccgataacttaaaaacgtagctcatcccttaccatccaaggggcactcccttggttggattttctatgacagcacaggggacaggtggcacaccatgagaggtctgcccagggtgggagcagtgtcactgtgctagcaatagttggcttctcccctgtcagtggaaaccccacttctgcccggcccttgagcttcttgcccactgtctccccatccttccacctacttgtggcgatctgagtactctactcttgctcaagaagtaatacgacaatcagaatacaaaccagtaaggcaacacgaataaactaagaaaaaggtaagaactgtctcaaaaacgaaagcacaccacccaagacacagtacccagtcatggtttccccatccaactattagtttcatactttgaaaacttactttcagattattctcaaagaacacagtagcacctaaatctgttttcaattgggcttaaaaattgacatgcaatctcttaagttttttgttcagctacttcacactgagtacctcaaatctgctctggagtcgattatgccacctgtgtgtcaggatgcacctgaaagccctcggctcggtccttagaccatcttcctacattacctggaagggagctgccatctgtccctctgcagagggataccttccaatagtaaattatctggttcctcactgaaacaagttatttttgcttcatatagtcagagtcagactgacatgataaaatatcatgttcctaatctgttgtctcagataagtgaccaagacgggactttccacattttagtctacattctaatcttaaaggaataaagcactgaattgggactaacattctgataggttgcacccttaagagtattcagagagcatcaaaaggagcccacaccttcagcagtgaaggattctaacacagggaatctgcagtttgtagcagaatggtattttcctcaagtagctcataatactgccaaatctcaaaagttaagctgaatttcacaccagatcctacccctttccctgagccacatgtttcacacaagtgtagaaaatgccagggatccaccacaagatggagatggtcagcacaaaccgattctgttcctctttaaagtgtatattagccacttagcaatctctatattctttcaagtaaccaagctgttgactttcttactacttgcagtagcctgtccccaacttttccatccagtgcttaacctaaaaaactccttaactctgccttgacctgaggaagaccatgctaactggtgttattttgtatgtaccctgtgcttaattctataacagtaaaccccatacgcaggtgggagggaggaacaccggtgcctcggtcactctgggggcagtttagatgctgtgaaattaaacctgttctaagtgtacttgtttgaattaattgtattgtaatattatttgttgaatgtagtaattaggtatttatgaatatattgctgtaatttctgacaacatccaaaaaataaaatcttcctaaattat

SEQ ID NO: 436235 - DNA, 5285 bp, Homo sapiens
gtgtttccctttgtcttagcgggctagtgacgtgttgattgccagcccagttccctagatacaaagcatctttttccctgaatttttggaggaaaaaaaattaagggcgatgcagcccttgagtttcacagtcaagaagggccgggtgacatcagggatctgctgcgtggaacatcgtggggtcatctttccccttcaggaagtggcagtaatggtaggagtgggggagaaggcaccctgcctcagaggccaggcctgggtctttggggtgtttctttgtgttggggccaccttgtctgacttgaaataagaatacatcctcgcacgtcaccaccgaggtccgtgggcacagtgattcacagaggcgtcgtcaccgcacggacagctgtctttggagcacgtctaggacattgtgtagtggatgccgagagcaatctgggctcgctttgagatggttgcttcctttcaactgggcctgccccatcacacctgcttttggtttttcgggctttagtgctttgcctgcccctcaaggctcggctagaatcccgctgtccttctctccaaaaaatgatgcaactggctcgttaatctcaggctgcttttctcatagacaaagagagacttgttgaaatgctccgtgccatgaagcagaaggcactgtcagcagcagtggccgactccttgacaaactctccgagggacagtcctgccgtctccctgagtgaaccagccacgcagcaagcctctctggatgtggagaagccggttggtgttgctgcttccttgtctgacatcccaaaggccgcggagcctgggaagctggaacaggtccggccccaggagctgtcgagagtccaggagctagctcctgccagcggggagaaggccaggctgagcgaggcccctggaggcaaaaagagtctgagcatgcttcactatatccggggcgctgcacccaaggacattcctgtgccgctgtcccacagcaccaatgggaagagcaagccgtgggagccctttgtggcagaagagtttgcacatcagttccacgagtcagtgctgcagtccacccagaaggccctgcagaagcataaagggagcgtggctgtgctgtctgcagagcagaaccacaaggttgacacgtccgtccactacaacattcctgagctgcagtcctccagccgcgcccctccaccccagcacaatgggcagcaggagccccccactgcaaggaagggccccccaacccaggagttggaccgggactcggaggaggaggaagaggaggatgatgaagatggagaagatgaggaggaagtccccaagcgcaagtggcaagggatcgaggccgtttttgaagcttaccaggaacacatagaagagcaaaatctggagcggcaggtgttacagacacaatgtagacgactggaggcccggcactacagcctcagcctgacggcagagcagctctcccacagcgtggcggagttgaggagccagaaacagaagatggtctcagaacgggagcggctccaggcagaactggaccacttacgaaagtgccttgccttgcctgcaatgcactggcctaggggctacctgaagggatatcccaggtgacggtttcccttgcactaggccgaacctatagtatagaaatattatctattttattaccttgaatatttaatatttttcactgggaggtttgaagcttacaaaatgagaatgtgccatgcatgaagcaaaggattccaggctccagaaaaaatgaatgaactcaccttgacgtcaatgcaattgaatcaccgttgtcattcagcgagcaaccaatgtaggattgcccacagtttttctttttaaaggtggttttcgcccttcctctcccacattatttcttaatctgaacatgaaggctccattagcaacactaaaacttgatcattaacagccccctgtgcatatgagtggatcaaaccggttctgttctttcttgtgttgccatgttactatgcctcaagcccagtttgcttttgccgcagcgatggggccagtctcattcctccccaggagtgaaacttgcttcagctgaaaaggttgggtgcattgtcagtaaaaagggcttatttgtttcattttactttcctgcaaaattttcttcaaagcaacaagtcctaggagcacacaaagcaacccaaaggcttttccctggaaaagctctttcttacctaaagataaaaccaattcacaaactgaaggtagctttttattactccgtggggagcatgtacagagctctgtgtatacacagcttcacacccaccagattgttactacagtgggttgggttttcatacagacgtaaattttgagagaaaagtcaaaggtgcttcagccttgtactgtgtatatatattaaaaaaaaaacaaagttttgtatgtttttattactttaactattgttataaaaagcctgccatttttaatatgtggtttgggggatttttgtttgtttttcctgtttgggggttttgtttgttgttttggttttttttgggcaaaaaaaaaaaaaaaaccttgcttttagtgtttgtactgctgctggtcaggacattaaaatattgaagtgtttttaaaaattaaagaagaagaaaagtaaaagagcttaccactggcgcctatgcgatcacttcatttttagtttgagttgcaccagaagctgccgtagaaagccatgcgctactgcttacctcctccactccccctgcctgcccccagcatctggacaagctaatagcaaatattacccattgctatcaagggaggagggggtagtctgtagaacccatgtgtgacagtcatgtgcacacatgggcgggggcttttaaaaacctttcaggaagtcaatgatttctgtgattgatataattctaaggtgtctgagagcaggtacagaataggaacttcagaggctttgtttaaacgcaaagctttgtaaaagccacaaggtctgagctgaacccctcctttttgaacttactgtgacaagcacaggaacggtcagaaactgggctcatcacaccaaggcaaagcaacgggcgagtcttcctccttgtcctagttactgcctatggaggcagtgtttagatcaagaaggcctctcttgctcccaagggccctcaccagaggccagggctgccagtcactggtctggggggtggaggcctgagctgagggcagggtgcctgacctgtgtgccggctgctcactgctgtgaccagcagccgagcccttggccctagcccttgctgcgcagaacagcttgctggcagctggcatcgtgtcgctttatctgcccccgcacagtttgctttgtacgtctgccaagaatcttccagttattagcaaactcagacgaatgtaccgccagtattatcagcagtcaacaagcaccttcctctccacagaagcagctggaagagaactcgaggggctgtgctgcaggcctcccctcgaaagacactgggaggtcagcatgttccacaggtgttcagagggagtctgctacaaactatcagggcaaaatctcactggatttctccactgaaaacctacttgaggtttctggtctgaaggcttaagagtcacatcttagcacttccgctctcaggcctcctcctccatcacagatgtctggatgcttttggaaatggccttggctaaagtaaaagggaaaagtagatccgataacttaaaaacgtagctcatcccttaccatccaaggggcactcccttggttggattttctatgacagcacaggggacaggtggcacaccatgagaggtctgcccagggtgggagcagtgtcactgtgctagcaatagttggcttctcccctgtcagtggaaaccccacttctgcccggcccttgagcttcttgcccactgtctccccatccttccacctacttgtggcgatctgagtactctactcttgctcaagaagtaatacgacaatcagaatacaaaccagtaaggcaacacgaataaactaagaaaaaggtaagaactgtctcaaaaacgaaagcacaccacccaagacacagtacccagtcatggtttccccatccaactattagtttcatactttgaaaacttactttcagattattctcaaagaacacagtagcacctaaatctgttttcaattgggcttaaaaattgacatgcaatctcttaagttttttgttcagctacttcacactgagtacctcaaatctgctctggagtcgattatgccacctgtgtgtcaggatgcacctgaaagccctcggctcggtccttagaccatcttcctacattacctggaagggagctgccatctgtccctctgcagagggataccttccaatagtaaattatctggttcctcactgaaacaagttatttttgcttcatatagtcagagtcagactgacatgataaaatatcatgttcctaatctgttgtctcagataagtgaccaagacgggactttccacattttagtctacattctaatcttaaaggaataaagcactgaattgggactaacattctgataggttgcacccttaagagtattcagagagcatcaaaaggagcccacaccttcagcagtgaaggattctaacacagggaatctgcagtttgtagcagaatggtattttcctcaagtagctcataatactgccaaatctcaaaagttaagctgaatttcacaccagatcctacccctttccctgagccacatgtttcacacaagtgtagaaaatgccagggatccaccacaagatggagatggtcagcacaaaccgattctgttcctctttaaagtgtatattagccacttagcaatctctatattctttcaagtaaccaagctgttgactttcttactacttgcagtagcctgtccccaacttttccatccagtgcttaacctaaaaaactccttaactctgccttgacctgaggaagaccatgctaactggtgttattttgtatgtaccctgtgcttaattctataacagtaaaccccatacgcaggtgggagggaggaacaccggtgcctcggtcactctgggggcagtttagatgctgtgaaattaaacctgttctaagtgtacttgtttgaattaattgtattgtaatattatttgttgaatgtagtaattaggtatttatgaatatattgctgtaatttctgacaacatccaaaaaataaaatcttcctaaattat

SEQ ID NO: 436236 - DNA, 8586 bp, Homo sapiens
ggaggtggttgggggcagaccagcaccttcggcccaggggcagtgccagcttcctttgcccctgccctccacgtgggcaccagggccaggacatctgcggccaggtgggcagctgtcggcgcagttgacgtcttggctacatcgtggcactcgcttcacggcgtgctgggtgccaacggtgtctgcttccccgggtgtgtgtctggtgtgaccttcggatgtccacaccaggaggggtggaggcaggagcccctgccaccctgcatccttcacctgcacacattgtgtttctggggggttctagttcttttgctggactgaggaggcccagggagggagacggatcccgagacgcacttcaccccagacctgtcgcagccacatcccctttcttacggttctgcttcccacaccacatgcaccatgttttgcgtagaaagccttagggaaaggatgtttctagaacatgaactaaatctagcgccttcccgtgagtcaggagacctggctgtgtcctgtggtcagtggcctataccaggctcctgccctgactggacgctctcctcccgcaggatgccggctccaggagcagcagtggaggtcgggaacgcctcattgtggagcccccgctccctcaggagaaggcagggggaccagccatcccctcgcacctgctcagcaccccctaccccttcggcctctcccccagctcagttgtgcaggattcccgcttcccgccactcaacctccagcggcccgtgcaccacgtggtgccccccagtaccgtgaccgaggactacctgagaagcttccggccctaccacaccaccgacgacctccgcatgtcctcactgcctcccctcggcctggacccggccactgctgcagcctactaccaccccagctacctggccccacaccccttcccccacccggccttcaggatggacgactcctactgcctgtctgccctgaggtccccgttctaccccatccccacccccggctccctgcccccactgcacccatcagcgatgcacctgcacctctctggggtccgctaccctcccgagctctcccactcatccctggcagcgctgcactcggagcgcatgtctggcctcagcgcggagaggctgcagatggacgaggagctaaggcgggagagggagcgcgagcgcgagcgcgagcgtgagcgtgaggctgaccgcgagcgggagaaggaacgtgagcgcgaacgcgagaaggagcgcgagcaagagaaggagcgtgagcgtgagaaggagcgcgagcgcgagctggagcgccagcgggagcagcgggcccgggagaaggagctgctggccgccaaggccctggagcccagcttcctgcccgtggccgagctgcatgggctgcgtggccatgccactgaggagcggggcaagccctcggagcagctgaccccaacccgagcagagaagctgaaggatgccggcctgcaggcgcccaagcccgtccaacaccccttgcatccggtgcccaccccacaccacacggtgcccagcctcatctccaaccatggcatcttctctctgcctagcagcagtgctgccacagccctgctgatccagcgcaccaatgaggaggagaagtggctggcgcggcagcggcggctgcggcaggagaaggaggaccggcagtctcaggtgtccgagttccggcagcaggtgctggagcagcacctggatatgggccggcccccggtgccggcggaggcagagcacaggccggagagcaccaccaggccaggaccaaaccgtcacgagccaggtggccgtgaccctccgcagcactttggggggccaccacctctgatttcgcccaagccccagctccatgctgcacccacggccctctggaaccccgtgtccctgatggacaacaccttggagacgcggcgggccgaaagccactctctgcacagccacccggctgcatttgagcccagccgccaggcagccgtgccgctggtgaaggtggagcgggtcttctgcccggagaaagcagaggaggggccacggaagcgtgagcctgcccctctggacaagtaccagccacctccgccgccaccacgagagggagggagcctggagcaccagcccttcctgcccgggcccgggcccttcctggctgagctcgagaagtccacccagaccatcctgggccagcagcgggcctccctcccacaggcggccaccttcggggagctcagcggacccctgaagcctggctcgccctaccggcccccagtgccacgggcccccgaccctgcctacatctatgatgagttcctgcagcagcgccggaggctggtcagcaagctggacctggaggagcgcaggcggcgggaggcccaggagaaagggtactactacgacctcgatgactcttacgacgagagcgatgaggaggaggtcagggcccacctccgttgcgtggccgagcagccgcccctcaaactggacacgtcctctgagaagctagagtttttgcaactttttggcttgaccacccaacagcagaaggaggaattggtggcccagaagcggaggaagcggcggaggatgctgcgagagagaagcccgtcgcccccaacaattcagagcaagcggcagacgccttcaccgagactggcgctgtctacccgctacagccctgatgagatgaacaacagtcccaacttcgaagaaaagaagaagttcctgaccatcttcaacctgacccacatcagcgctgagaagaggaaagacaaagagagacttgttgaaatgctccgtgccatgaagcagaaggcactgtcagcagcagtggccgactccttgacaaactctccgagggacagtcctgccgtctccctgagtgaaccagccacgcagcaagcctctctggatgtggagaagccggttggtgttgctgcttccttgtctgacatcccaaaggccgcggagcctgggaagctggaacaggtccggccccaggagctgtcgagagtccaggagctagctcctgccagcggggagaaggccaggctgagcgaggcccctggaggcaaaaagagtctgagcatgcttcactatatccggggcgctgcacccaaggacattcctgtgccgctgtcccacagcaccaatgggaagagcaagccgtgggagccctttgtggcagaagagtttgcacatcagttccacgagtcagtgctgcagtccacccagaaggccctgcagaagcataaagggagcgtggctgtgctgtctgcagagcagaaccacaaggttgacacgtccgtccactacaacattcctgagctgcagtcctccagccgcgcccctccaccccagcacaatgggcagcaggagccccccactgcaaggaagggccccccaacccaggagttggaccgggactcggaggaggaggaagaggaggatgatgaagatggagaagatgaggaggaagtccccaagcgcaagtggcaagggatcgaggccgtttttgaagcttaccaggaacacatagaagagcaaaatctggagcggcaggtgttacagacacaatgtagacgactggaggcccggcactacagcctcagcctgacggcagagcagctctcccacagcgtggcggagttgaggagccagaaacagaagatggtctcagaacgggagcggctccaggcagaactggaccacttacgaaagtgccttgccttgcctgcaatgcactggcctaggggctacctgaagggatatcccaggtgacggtttcccttgcactaggccgaacctatagtatagaaatattatctattttattaccttgaatatttaatatttttcactgggaggtttgaagcttacaaaatgagaatgtgccatgcatgaagcaaaggattccaggctccagaaaaaatgaatgaactcaccttgacgtcaatgcaattgaatcaccgttgtcattcagcgagcaaccaatgtaggattgcccacagtttttctttttaaaggtggttttcgcccttcctctcccacattatttcttaatctgaacatgaaggctccattagcaacactaaaacttgatcattaacagccccctgtgcatatgagtggatcaaaccggttctgttctttcttgtgttgccatgttactatgcctcaagcccagtttgcttttgccgcagcgatggggccagtctcattcctccccaggagtgaaacttgcttcagctgaaaaggttgggtgcattgtcagtaaaaagggcttatttgtttcattttactttcctgcaaaattttcttcaaagcaacaagtcctaggagcacacaaagcaacccaaaggcttttccctggaaaagctctttcttacctaaagataaaaccaattcacaaactgaaggtagctttttattactccgtggggagcatgtacagagctctgtgtatacacagcttcacacccaccagattgttactacagtgggttgggttttcatacagacgtaaattttgagagaaaagtcaaaggtgcttcagccttgtactgtgtatatatattaaaaaaaaaacaaagttttgtatgtttttattactttaactattgttataaaaagcctgccatttttaatatgtggtttgggggatttttgtttgtttttcctgtttgggggttttgtttgttgttttggttttttttgggcaaaaaaaaaaaaaaaaccttgcttttagtgtttgtactgctgctggtcaggacattaaaatattgaagtgtttttaaaaattaaagaagaagaaaagtaaaagagcttaccactggcgcctatgcgatcacttcatttttagtttgagttgcaccagaagctgccgtagaaagccatgcgctactgcttacctcctccactccccctgcctgcccccagcatctggacaagctaatagcaaatattacccattgctatcaagggaggagggggtagtctgtagaacccatgtgtgacagtcatgtgcacacatgggcgggggcttttaaaaacctttcaggaagtcaatgatttctgtgattgatataattctaaggtgtctgagagcaggtacagaataggaacttcagaggctttgtttaaacgcaaagctttgtaaaagccacaaggtctgagctgaacccctcctttttgaacttactgtgacaagcacaggaacggtcagaaactgggctcatcacaccaaggcaaagcaacgggcgagtcttcctccttgtcctagttactgcctatggaggcagtgtttagatcaagaaggcctctcttgctcccaagggccctcaccagaggccagggctgccagtcactggtctggggggtggaggcctgagctgagggcagggtgcctgacctgtgtgccggctgctcactgctgtgaccagcagccgagcccttggccctagcccttgctgcgcagaacagcttgctggcagctggcatcgtgtcgctttatctgcccccgcacagtttgctttgtacgtctgccaagaatcttccagttattagcaaactcagacgaatgtaccgccagtattatcagcagtcaacaagcaccttcctctccacagaagcagctggaagagaactcgaggggctgtgctgcaggcctcccctcgaaagacactgggaggtcagcatgttccacaggtgttcagagggagtctgctacaaactatcagggcaaaatctcactggatttctccactgaaaacctacttgaggtttctggtctgaaggcttaagagtcacatcttagcacttccgctctcaggcctcctcctccatcacagatgtctggatgcttttggaaatggccttggctaaagtaaaagggaaaagtagatccgataacttaaaaacgtagctcatcccttaccatccaaggggcactcccttggttggattttctatgacagcacaggggacaggtggcacaccatgagaggtctgcccagggtgggagcagtgtcactgtgctagcaatagttggcttctcccctgtcagtggaaaccccacttctgcccggcccttgagcttcttgcccactgtctccccatccttccacctacttgtggcgatctgagtactctactcttgctcaagaagtaatacgacaatcagaatacaaaccagtaaggcaacacgaataaactaagaaaaaggtaagaactgtctcaaaaacgaaagcacaccacccaagacacagtacccagtcatggtttccccatccaactattagtttcatactttgaaaacttactttcagattattctcaaagaacacagtagcacctaaatctgttttcaattgggcttaaaaattgacatgcaatctcttaagttttttgttcagctacttcacactgagtacctcaaatctgctctggagtcgattatgccacctgtgtgtcaggatgcacctgaaagccctcggctcggtccttagaccatcttcctacattacctggaagggagctgccatctgtccctctgcagagggataccttccaatagtaaattatctggttcctcactgaaacaagttatttttgcttcatatagtcagagtcagactgacatgataaaatatcatgttcctaatctgttgtctcagataagtgaccaagacgggactttccacattttagtctacattctaatcttaaaggaataaagcactgaattgggactaacattctgataggttgcacccttaagagtattcagagagcatcaaaaggagcccacaccttcagcagtgaaggattctaacacagggaatctgcagtttgtagcagaatggtattttcctcaagtagctcataatactgccaaatctcaaaagttaagctgaatttcacaccagatcctacccctttccctgagccacatgtttcacacaagtgtagaaaatgccagggatccaccacaagatggagatggtcagcacaaaccgattctgttcctctttaaagtgtatattagccacttagcaatctctatattctttcaagtaaccaagctgttgactttcttactacttgcagtagcctgtccccaacttttccatccagtgcttaacctaaaaaactccttaactctgccttgacctgaggaagaccatgctaactggtgttattttgtatgtaccctgtgcttaattctataacagtaaaccccatacgcaggtgggagggaggaacaccggtgcctcggtcactctgggggcagtttagatgctgtgaaattaaacctgttctaagtgtacttgtttgaattaattgtattgtaatattatttgttgaatgtagtaattaggtatttatgaatatattgctgtaatttctgacaacatccaaaaaataaaatcttcctaaattatgttaagaggaaaatcttttttatgatataaaacaaagccaaacaaagaaaagctcaataactatacatctccgcagacggagctgcctccactggctcaggctctaagaggagggcattaggaccccttgccctccacaataacaagtggtttcattctaaaagatccccagatgaaagcaggaggattccaaggaaggctgagatgaaagaacaagtcctatgagctgaaccaagtctgaacagcaccttaaattatggagacctcatcttttggtcccagtcttccaggtctgacccttcagtgtccaaataaccaccaaaacctgcctggcggggacacgtgggcagcaacatggagtgatagtgtgcagcatgctagacactggagggcagatgctgggtgataagtctttaggctcagcctgtcacacatgcgcattctcagagctccccagacagcaccccactgcttttggcccactggtgtccagccaaaaataggctggccaggcatggcggctcatgcttgcaatcccagtgctttgggaggctgtggtgggagaactgtgtgaacccaggagttcgaggctgcagtgagctataatcacgccactctactgcagcctggatgacagaacgagaccctgtctaaaaaaaaaggttaaaaatttttttgtttgagacagagtcttgctctcgttgcccaggcaggagtacagtggtgcaatcttggctcactacaacctccgcctctcgggttcaagcgattctcctgcctcagcctcccgagtagctgcgactataggcgtgtgccaccgtgcccagccctgctggtctcgaacttctgacctcatgatccacccgcctcagcctcccgaaatgctgggattacaggcgtgagccactgtgcctggccaaaacattgtttttaattagtgggagccttttctttaaataaacactacccagatgctcaattggtaaatgagagttgctttcggagggtagggggtagcaggttagcacagagacagtggaagggagctcagtctctccggccttcgcaaggcaggctcaagtacctctaggtaccttcctcatgaacagttccaaacctttggc

SEQ ID NO: 436237 - DNA, 4615 bp, Homo sapiens
ggaggtggttgggggcagaccagcaccttcggcccaggggcagtgccagcttcctttgcccctgccctccacgtgggcaccagggccaggacatctgcggccaggtgggcagctgtcggcgcagttgacgtcttggctacatcgtggcactcgcttcacggcgtgctgggtgccaacggtgtctgcttccccgggtgtgtgtctggtgtgaccttcggatgtccacaccaggaggggtggaggcaggagcccctgccaccctgcatccttcacctgcacacattgtgtttctggggggttctagttcttttgctggactgaggaggcccagggagggagacggatcccgagacgcacttcaccccagacctgtcgcagccacatcccctttcttacggttctgcttcccacaccacatgcaccatgttttgcgtagaaagccttagggaaaggatgtttctagaacatgaactaaatctagcgccttcccgtgagtcaggagacctggctgtgtcctgtggtcagtggcctataccaggctcctgccctgactggacgctctcctcccgcaggatgccggctccaggagcagcagtggaggtcgggaacgcctcattgtggagcccccgctccctcaggagaaggcagggggaccagccatcccctcgcacctgctcagcaccccctaccccttcggcctctcccccagctcagttgtgcaggattcccgcttcccgccactcaacctccagcggcccgtgcaccacgtggtgccccccagtaccgtgaccgaggactacctgagaagcttccggccctaccacaccaccgacgacctccgcatgtcctcactgcctcccctcggcctggacccggccactgctgcagcctactaccaccccagctacctggccccacaccccttcccccacccggccttcaggatggacgactcctactgcctgtctgccctgaggtccccgttctaccccatccccacccccggctccctgcccccactgcacccatcagcgatgcacctgcacctctctggggtccgctaccctcccgagctctcccactcatccctggcagcgctgcactcggagcgcatgtctggcctcagcgcggagaggctgcagatggacgaggagctaaggcgggagagggagcgcgagcgcgagcgcgagcgtgagcgtgaggctgaccgcgagcgggagaaggaacgtgagcgcgaacgcgagaaggagcgcgagcaagagaaggagcgtgagcgtgagaaggagcgcgagcgcgagctggagcgccagcgggagcagcgggcccgggagaaggagctgctggccgccaaggccctggagcccagcttcctgcccgtggccgagctgcatgggctgcgtggccatgccactgaggagcggggcaagccctcggagcagctgaccccaacccgagcagagaagctgaaggatgccggcctgcaggcgcccaagcccgtccaacaccccttgcatccggtgcccaccccacaccacacggtgcccagcctcatctccaaccatggcatcttctctctgcctagcagcagtgctgccacagccctgctgatccagcgcaccaatgaggaggagaagtggctggcgcggcagcggcggctgcggcaggagaaggaggaccggcagtctcaggtgtccgagttccggcagcaggtgctggagcagcacctggatatgggccggcccccggtgccggcggaggcagagcacaggccggagagcaccaccaggccaggaccaaaccgtcacgagccaggtggccgtgaccctccgcagcactttggggggccaccacctctgatttcgcccaagccccagctccatgctgcacccacggccctctggaaccccgtgtccctgatggacaacaccttggagacgcggcgggccgaaagccactctctgcacagccacccggctgcatttgagcccagccgccaggcagccgtgccgctggtgaaggtggagcgggtcttctgcccggagaaagcagaggaggggccacggaagcgtgagcctgcccctctggacaagtaccagccacctccgccgccaccacgagagggagggagcctggagcaccagcccttcctgcccgggcccgggcccttcctggctgagctcgagaagtccacccagaccatcctgggccagcagcgggcctccctcccacaggcggccaccttcggggagctcagcggacccctgaagcctggctcgccctaccggcccccagtgccacgggcccccgaccctgcctacatctatgatgagttcctgcagcagcgccggaggctggtcagcaagctggacctggaggagcgcaggcggcgggaggcccaggagaaagggtactactacgacctcgatgactcttacgacgagagcgatgaggaggaggtcagggcccacctccgttgcgtggccgagcagccgcccctcaaactggacacgtcctctgagaagctagagtttttgcaactttttggcttgaccacccaacagcagaaggaggaattggtggcccagaagcggaggaagcggcggaggatgctgcgagagagaagcccgtcgcccccaacaattcagagcaagcggcagacgccttcaccgagactggcgctgtctacccgctacagccctgatgagatgaacaacagtcccaacttcgaagaaaagaagaagttcctgaccatcttcaacctgacccacatcagcgctgagaagaggaaagacaaagagagacttgttgaaatgctccgtgccatgaagcagaaggcactgtcagcagcagtggccgactccttgacaaactctccgagggacagtcctgccgtctccctgagtgaaccagccacgcagcaagcctctctggatgtggagaagccggttggtgttgctgcttccttgtctgacatcccaaaggccgcggagcctgggaagctggaacaggtccggccccaggagctgtcgagagtccaggagctagctcctgccagcggggagaaggccaggctgagcgaggcccctggaggcaaaaagagtctgagcatgcttcactatatccggggcgctgcacccaaggacattcctgtgccgctgtcccacagcaccaatgggaagagcaagccgtgggagccctttgtggcagaagagtttgcacatcagttccacgagtcagtgctgcagtccacccagaaggccctgcagaagcataaagggagcgtggctgtgctgtctgcagagcagaaccacaaggttgacacgtccgtccactacaacattcctgagctgcagtcctccagccgcgcccctccaccccagcacaatgggcagcaggagccccccactgcaaggaagggccccccaacccaggagttggaccgggactcggaggaggaggaagaggaggatgatgaagatggagaagatgaggaggaagtccccaagcgcaagtggcaagggatcgaggccgtttttgaagcttaccaggaacacatagaagagcaaaatctggagcggcaggtgttacagacacaatgtagacgactggaggcccggcactacagcctcagcctgacggcagagcagctctcccacagcgtggcggagttgaggagccagaaacagaagatggtctcagaacgggagcggctccaggcagaactggaccacttacgaaagtgccttgccttgcctgcaatgcactggcctaggggctacctgaagggatatcccaggtgacggtttcccttgcactaggccgaacctatagtatagaaatattatctattttattaccttgaatatttaatatttttcactgggaggtttgaagcttacaaaatgagaatgtgccatgcatgaagcaaaggattccaggctccagaaaaaatgaatgaactcaccttgacgtcaatgcaattgaatcaccgttgtcattcagcgagcaaccaatgtaggattgcccacagtttttctttttaaaggtggttttcgcccttcctctcccacattatttcttaatctgaacatgaaggctccattagcaacactaaaacttgatcattaacagccccctgtgcatatgagtggatcaaaccggttctgttctttcttgtgttgccatgttactatgcctcaagcccagtttgcttttgccgcagcgatggggccagtctcattcctccccaggagtgaaacttgcttcagctgaaaaggttgggtgcattgtcagtaaaaagggcttatttgtttcattttactttcctgcaaaattttcttcaaagcaacaagtcctaggagcacacaaagcaacccaaaggcttttccctggaaaagctctttcttacctaaagataaaaccaattcacaaactgaaggtagctttttattactccgtggggagcatgtacagagctctgtgtatacacagcttcacacccaccagattgttactacagtgggttgggttttcatacagacgtaaattttgagagaaaagtcaaaggtgcttcagccttgtactgtgtatatatattaaaaaaaaaacaaagttt

SEQ ID NO: 436238 - DNA, 4761 bp, Homo sapiens
ggaggtggttgggggcagaccagcaccttcggcccaggggcagtgccagcttcctttgcccctgccctccacgtgggcaccagggccaggacatctgcggccaggtgggcagctgtcggcgcagttgacgtcttggctacatcgtggcactcgcttcacggcgtgctgggtgccaacggtgtctgcttccccgggtgtgtgtctggtgtgaccttcggatgtccacaccaggaggggtggaggcaggagcccctgccaccctgcatccttcacctgcacacattgtgtttctggggggttctagttcttttgctggactgaggaggcccagggagggagacggatcccgagacgcacttcaccccagacctgtcgcagccacatcccctttcttacggttctgcttcccacaccacatgcaccatgttttgcgtagaaagccttagggaaaggatgtttctagaacatgaactaaatctagcgccttcccgtgagtcaggagacctggctgtgtcctgtggtcagtggcctataccaggctcctgccctgactggacgctctcctcccgcaggatgccggctccaggagcagcagtggaggtcgggaacgcctcattgtggagcccccgctccctcaggagaaggcagggggaccagccatcccctcgcacctgctcagcaccccctaccccttcggcctctcccccagctcagttgtgcaggattcccgcttcccgccactcaacctccagcggcccgtgcaccacgtggtgccccccagtaccgtgaccgaggactacctgagaagcttccggccctaccacaccaccgacgacctccgcatgtcctcactgcctcccctcggcctggacccggccactgctgcagcctactaccaccccagctacctggccccacaccccttcccccacccggccttcaggatggacgactcctactgcctgtctgccctgaggtccccgttctaccccatccccacccccggctccctgcccccactgcacccatcagcgatgcacctgcacctctctggggtccgctaccctcccgagctctcccactcatccctggcagcgctgcactcggagcgcatgtctggcctcagcgcggagaggctgcagatggacgaggagctaaggcgggagagggagcgcgagcgcgagcgcgagcgtgagcgtgaggctgaccgcgagcgggagaaggaacgtgagcgcgaacgcgagaaggagcgcgagcaagagaaggagcgtgagcgtgagaaggagcgcgagcgcgagctggagcgccagcgggagcagcgggcccgggagaaggagctgctggccgccaaggccctggagcccagcttcctgcccgtggccgagctgcatgggctgcgtggccatgccactgaggagcggggcaagccctcggagcagctgaccccaacccgagcagagaagctgaaggatgccggcctgcaggcgcccaagcccgtccaacaccccttgcatccggtgcccaccccacaccacacggtgcccagcctcatctccaaccatggcatcttctctctgcctagcagcagtgctgccacagccctgctgatccagcgcaccaatgaggaggagaagtggctggcgcggcagcggcggctgcggcaggagaaggaggaccggcagtctcaggtgtccgagttccggcagcaggtgctggagcagcacctggatatgggccggcccccggtgccggcggaggcagagcacaggccggagagcaccaccaggccaggaccaaaccgtcacgagccaggtggccgtgaccctccgcagcactttggggggccaccacctctgatttcgcccaagccccagctccatgctgcacccacggccctctggaaccccgtgtccctgatggacaacaccttggagacgcggcgggccgaaagccactctctgcacagccacccggctgcatttgagcccagccgccaggcagccgtgccgctggtgaaggtggagcgggtcttctgcccggagaaagcagaggaggggccacggaagcgtgagcctgcccctctggacaagtaccagccacctccgccgccaccacgagagggagggagcctggagcaccagcccttcctgcccgggcccgggcccttcctggctgagctcgagaagtccacccagaccatcctgggccagcagcgggcctccctcccacaggcggccaccttcggggagctcagcggacccctgaagcctggctcgccctaccggcccccagtgccacgggcccccgaccctgcctacatctatgatgagttcctgcagcagcgccggaggctggtcagcaagctggacctggaggagcgcaggcggcgggaggcccaggagaaagggtactactacgacctcgatgactcttacgacgagagcgatgaggaggaggtcagggcccacctccgttgcgtggccgagcagccgcccctcaaactggacacgtcctctgagaagctagagtttttgcaactttttggcttgaccacccaacagcagaaggaggaattggtggcccagaagcggaggaagcggcggaggatgctgcgagagagaagcccgtcgcccccaacaattcagagcaagcggcagacgccttcaccgagactggcgctgtctacccgctacagccctgatgagatgaacaacagtcccaacttcgaagaaaagaagaagttcctgaccatcttcaacctgacccacatcagcgctgagaagaggaaagacaaagagagacttgttgaaatgctccgtgccatgaagcagaaggcactgtcagcagcagtggccgactccttgacaaactctccgagggacagtcctgccgtctccctgagtgaaccagccacgcagcaagcctctctggatgtggagaagccggttggtgttgctgcttccttgtctgacatcccaaaggccgcggagcctgggaagctggaacaggtccggccccaggagctgtcgagagtccaggagctagctcctgccagcggggagaaggccaggctgagcgaggcccctggaggcaaaaagagtctgagcatgcttcactatatccggggcgctgcacccaaggacattcctgtgccgctgtcccacagcaccaatgggaagagcaagccgtgggagccctttgtggcagaagagtttgcacatcagttccacgagtcagtgctgcagtccacccagaaggccctgcagaagcataaagggagcgtggctgtgctgtctgcagagcagaaccacaaggttgacacgtccgtccactacaacattcctgagctgcagtcctccagccgcgcccctccaccccagcacaatgggcagcaggagccccccactgcaaggaagggccccccaacccaggagttggaccgggactcggaggaggaggaagaggaggatgatgaagatggagaagatgaggaggaagtccccaagcgcaagtggcaagggatcgaggccgtttttgaagcttaccaggaacacatagaagagcaaaatctggagcggcaggtgttacagacacaatgtagacgactggaggcccggcactacagcctcagcctgacggcagagcagctctcccacagcgtggcggagttgaggagccagaaacagaagatggtctcagaacgggagcggctccaggcagaactggaccacttacgaaagtgccttgccttgcctgcaatgcactggcctaggggctacctgaagggatatcccaggtgacggtttcccttgcactaggccgaacctatagtatagaaatattatctattttattaccttgaatatttaatatttttcactgggaggtttgaagcttacaaaatgagaatgtgccatgcatgaagcaaaggattccaggctccagaaaaaatgaatgaactcaccttgacgtcaatgcaattgaatcaccgttgtcattcagcgagcaaccaatgtaggattgcccacagtttttctttttaaaggtggttttcgcccttcctctcccacattatttcttaatctgaacatgaaggctccattagcaacactaaaacttgatcattaacagccccctgtgcatatgagtggatcaaaccggttctgttctttcttgtgttgccatgttactatgcctcaagcccagtttgcttttgccgcagcgatggggccagtctcattcctccccaggagtgaaacttgcttcagctgaaaaggttgggtgcattgtcagtaaaaagggcttatttgtttcattttactttcctgcaaaattttcttcaaagcaacaagtcctaggagcacacaaagcaacccaaaggcttttccctggaaaagctctttcttacctaaagataaaaccaattcacaaactgaaggtagctttttattactccgtggggagcatgtacagagctctgtgtatacacagcttcacacccaccagattgttactacagtgggttgggttttcatacagacgtaaattttgagagaaaagtcaaaggtgcttcagccttgtactgtgtatatatattaaaaaaaaaacaaagttttgtatgtttttattactttaactattgttataaaaagcctgccatttttaatatgtggtttgggggatttttgtttgtttttcctgtttgggggttttgtttgttgttttggtttttttttttttttttttttttttttttttttt

SEQ ID NO: 436239 - DNA, 4726 bp, Homo sapiens
ggaggtggttgggggcagaccagcaccttcggcccaggggcagtgccagcttcctttgcccctgccctccacgtgggcaccagggccaggacatctgcggccaggtgggcagctgtcggcgcagttgacgtcttggctacatcgtggcactcgcttcacggcgtgctgggtgccaacggtgtctgcttccccgggtgtgtgtctggtgtgaccttcggatgtccacaccaggaggggtggaggcaggagcccctgccaccctgcatccttcacctgcacacattgtgtttctggggggttctagttcttttgctggactgaggaggcccagggagggagacggatcccgagacgcacttcaccccagacctgtcgcagccacatcccctttcttacggttctgcttcccacaccacatgcaccatgttttgcgtagaaagccttagggaaaggatgtttctagaacatgaactaaatctagcgccttcccgtgagtcaggagacctggctgtgtcctgtggtcagtggcctataccaggctcctgccctgactggacgctctcctcccgcaggatgccggctccaggagcagcagtggaggtcgggaacgcctcattgtggagcccccgctccctcaggagaaggcagggggaccagccatcccctcgcacctgctcagcaccccctaccccttcggcctctcccccagctcagttgtgcaggattcccgcttcccgccactcaacctccagcggcccgtgcaccacgtggtgccccccagtaccgtgaccgaggactacctgagaagcttccggccctaccacaccaccgacgacctccgcatgtcctcactgcctcccctcggcctggacccggccactgctgcagcctactaccaccccagctacctggccccacaccccttcccccacccggccttcaggatggacgactcctactgcctgtctgccctgaggtccccgttctaccccatccccacccccggctccctgcccccactgcacccatcagcgatgcacctgcacctctctggggtccgctaccctcccgagctctcccactcatccctggcagcgctgcactcggagcgcatgtctggcctcagcgcggagaggctgcagatggacgaggagctaaggcgggagagggagcgcgagcgcgagcgcgagcgtgagcgtgaggctgaccgcgagcgggagaaggaacgtgagcgcgaacgcgagaaggagcgcgagcaagagaaggagcgtgagcgtgagaaggagcgcgagcgcgagctggagcgccagcgggagcagcgggcccgggagaaggagctgctggccgccaaggccctggagcccagcttcctgcccgtggccgagctgcatgggctgcgtggccatgccactgaggagcggggcaagccctcggagcagctgaccccaacccgagcagagaagctgaaggatgccggcctgcaggcgcccaagcccgtccaacaccccttgcatccggtgcccaccccacaccacacggtgcccagcctcatctccaaccatggcatcttctctctgcctagcagcagtgctgccacagccctgctgatccagcgcaccaatgaggaggagaagtggctggcgcggcagcggcggctgcggcaggagaaggaggaccggcagtctcaggtgtccgagttccggcagcaggtgctggagcagcacctggatatgggccggcccccggtgccggcggaggcagagcacaggccggagagcaccaccaggccaggaccaaaccgtcacgagccaggtggccgtgaccctccgcagcactttggggggccaccacctctgatttcgcccaagccccagctccatgctgcacccacggccctctggaaccccgtgtccctgatggacaacaccttggagacgcggcgggccgaaagccactctctgcacagccacccggctgcatttgagcccagccgccaggcagccgtgccgctggtgaaggtggagcgggtcttctgcccggagaaagcagaggaggggccacggaagcgtgagcctgcccctctggacaagtaccagccacctccgccgccaccacgagagggagggagcctggagcaccagcccttcctgcccgggcccgggcccttcctggctgagctcgagaagtccacccagaccatcctgggccagcagcgggcctccctcccacaggcggccaccttcggggagctcagcggacccctgaagcctggctcgccctaccggcccccagtgccacgggcccccgaccctgcctacatctatgatgagttcctgcagcagcgccggaggctggtcagcaagctggacctggaggagcgcaggcggcgggaggcccaggagaaagggtactactacgacctcgatgactcttacgacgagagcgatgaggaggaggtcagggcccacctccgttgcgtggccgagcagccgcccctcaaactggacacgtcctctgagaagctagagtttttgcaactttttggcttgaccacccaacagcagaaggaggaattggtggcccagaagcggaggaagcggcggaggatgctgcgagagagaagcccgtcgcccccaacaattcagagcaagcggcagacgccttcaccgagactggcgctgtctacccgctacagccctgatgagatgaacaacagtcccaacttcgaagaaaagaagaagttcctgaccatcttcaacctgacccacatcagcgctgagaagaggaaagacaaagagagacttgttgaaatgctccgtgccatgaagcagaaggcactgtcagcagcagtggccgactccttgacaaactctccgagggacagtcctgccgtctccctgagtgaaccagccacgcagcaagcctctctggatgtggagaagccggttggtgttgctgcttccttgtctgacatcccaaaggccgcggagcctgggaagctggaacaggtccggccccaggagctgtcgagagtccaggagctagctcctgccagcggggagaaggccaggctgagcgaggcccctggaggcaaaaagagtctgagcatgcttcactatatccggggcgctgcacccaaggacattcctgtgccgctgtcccacagcaccaatgggaagagcaagccgtgggagccctttgtggcagaagagtttgcacatcagttccacgagtcagtgctgcagtccacccagaaggccctgcagaagcataaagggagcgtggctgtgctgtctgcagagcagaaccacaaggttgacacgtccgtccactacaacattcctgagctgcagtcctccagccgcgcccctccaccccagcacaatgggcagcaggagccccccactgcaaggaagggccccccaacccaggagttggaccgggactcggaggaggaggaagaggaggatgatgaagatggagaagatgaggaggaagtccccaagcgcaagtggcaagggatcgaggccgtttttgaagcttaccaggaacacatagaagagcaaaatctggagcggcaggtgttacagacacaatgtagacgactggaggcccggcactacagcctcagcctgacggcagagcagctctcccacagcgtggcggagttgaggagccagaaacagaagatggtctcagaacgggagcggctccaggcagaactggaccacttacgaaagtgccttgccttgcctgcaatgcactggcctaggggctacctgaagggatatcccaggtgacggtttcccttgcactaggccgaacctatagtatagaaatattatctattttattaccttgaatatttaatatttttcactgggaggtttgaagcttacaaaatgagaatgtgccatgcatgaagcaaaggattccaggctccagaaaaaatgaatgaactcaccttgacgtcaatgcaattgaatcaccgttgtcattcagcgagcaaccaatgtaggattgcccacagtttttctttttaaaggtggttttcgcccttcctctcccacattatttcttaatctgaacatgaaggctccattagcaacactaaaacttgatcattaacagccccctgtgcatatgagtggatcaaaccggttctgttctttcttgtgttgccatgttactatgcctcaagcccagtttgcttttgccgcagcgatggggccagtctcattcctccccaggagtgaaacttgcttcagctgaaaaggttgggtgcattgtcagtaaaaagggcttatttgtttcattttactttcctgcaaaattttcttcaaagcaacaagtcctaggagcacacaaagcaacccaaaggcttttccctggaaaagctctttcttacctaaagataaaaccaattcacaaactgaaggtagctttttattactccgtggggagcatgtacagagctctgtgtatacacagcttcacacccaccagattgttactacagtgggttgggttttcatacagacgtaaattttgagagaaaagtcaaaggtgcttcagccttgtactgtgtatatatattaaaaaaaaaacaaagttttgtatgtttttattactttaactattgttataaaaagcctgccatttttaatatgtggtttgggggatttttgtttgtttttcctgtttggtgctcctagggaggcccagc

SEQ ID NO: 436240 - DNA, 4006 bp, Homo sapiens
ggaggtggttgggggcagaccagcaccttcggcccaggggcagtgccagcttcctttgcccctgccctccacgtgggcaccagggccaggacatctgcggccaggtgggcagctgtcggcgcagttgacgtcttggctacatcgtggcactcgcttcacggcgtgctgggtgccaacggtgtctgcttccccgggtgtgtgtctggtgtgaccttcggatgtccacaccaggaggggtggaggcaggagcccctgccaccctgcatccttcacctgcacacattgtgtttctggggggttctagttcttttgctggactgaggaggcccagggagggagacggatcccgagacgcacttcaccccagacctgtcgcagccacatcccctttcttacggttctgcttcccacaccacatgcaccatgttttgcgtagaaagccttagggaaaggatgtttctagaacatgaactaaatctagcgccttcccgtgagtcaggagacctggctgtgtcctgtggtcagtggcctataccaggctcctgccctgactggacgctctcctcccgcaggatgccggctccaggagcagcagtggaggtcgggaacgcctcattgtggagcccccgctccctcaggagaaggcagggggaccagccatcccctcgcacctgctcagcaccccctaccccttcggcctctcccccagctcagttgtgcaggattcccgcttcccgccactcaacctccagcggcccgtgcaccacgtggtgccccccagtaccgtgaccgaggactacctgagaagcttccggccctaccacaccaccgacgacctccgcatgtcctcactgcctcccctcggcctggacccggccactgctgcagcctactaccaccccagctacctggccccacaccccttcccccacccggccttcaggatggacgactcctactgcctgtctgccctgaggtccccgttctaccccatccccacccccggctccctgcccccactgcacccatcagcgatgcacctgcacctctctggggtccgctaccctcccgagctctcccactcatccctggcagcgctgcactcggagcgcatgtctggcctcagcgcggagaggctgcagatggacgaggagctaaggcgggagagggagcgcgagcgcgagcgcgagcgtgagcgtgaggctgaccgcgagcgggagaaggaacgtgagcgcgaacgcgagaaggagcgcgagcaagagaaggagcgtgagcgtgagaaggagcgcgagcgcgagctggagcgccagcgggagcagcgggcccgggagaaggagctgctggccgccaaggccctggagcccagcttcctgcccgtggccgagctgcatgggctgcgtggccatgccactgaggagcggggcaagccctcggagcagctgaccccaacccgagcagagaagctgaaggatgccggcctgcaggcgcccaagcccgtccaacaccccttgcatccggtgcccaccccacaccacacggtgcccagcctcatctccaaccatggcatcttctctctgcctagcagcagtgctgccacagccctgctgatccagcgcaccaatgaggaggagaagtggctggcgcggcagcggcggctgcggcaggagaaggaggaccggcagtctcaggtgtccgagttccggcagcaggtgctggagcagcacctggatatgggccggcccccggtgccggcggaggcagagcacaggccggagagcaccaccaggccaggaccaaaccgtcacgagccaggtggccgtgaccctccgcagcactttggggggccaccacctctgatttcgcccaagccccagctccatgctgcacccacggccctctggaaccccgtgtccctgatggacaacaccttggagacgcggcgggccgaaagccactctctgcacagccacccggctgcatttgagcccagccgccaggcagccgtgccgctggtgaaggtggagcgggtcttctgcccggagaaagcagaggaggggccacggaagcgtgagcctgcccctctggacaagtaccagccacctccgccgccaccacgagagggagggagcctggagcaccagcccttcctgcccgggcccgggcccttcctggctgagctcgagaagtccacccagaccatcctgggccagcagcgggcctccctcccacaggcggccaccttcggggagctcagcggacccctgaagcctggctcgccctaccggcccccagtgccacgggcccccgaccctgcctacatctatgatgagttcctgcagcagcgccggaggctggtcagcaagctggacctggaggagcgcaggcggcgggaggcccaggagaaagggtactactacgacctcgatgactcttacgacgagagcgatgaggaggaggtcagggcccacctccgttgcgtggccgagcagccgcccctcaaactggacacgtcctctgagaagctagagtttttgcaactttttggcttgaccacccaacagcagaaggaggaattggtggcccagaagcggaggaagcggcggaggatgctgcgagagagaagcccgtcgcccccaacaattcagagcaagcggcagacgccttcaccgagactggcgctgtctacccgctacagccctgatgagatgaacaacagtcccaacttcgaagaaaagaagaagttcctgaccatcttcaacctgacccacatcagcgctgagaagaggaaagacaaagagagacttgttgaaatgctccgtgccatgaagcagaaggcactgtcagcagcagtggccgactccttgacaaactctccgagggacagtcctgccgtctccctgagtgaaccagccacgcagcaagcctctctggatgtggagaagccggttggtgttgctgcttccttgtctgacatcccaaaggccgcggagcctgggaagctggaacaggtccggccccaggagctgtcgagagtccaggagctagctcctgccagcggggagaaggccaggctgagcgaggcccctggaggcaaaaagagtctgagcatgcttcactatatccggggcgctgcacccaaggacattcctgtgccgctgtcccacagcaccaatgggaagagcaagccgtgggagccctttgtggcagaagagtttgcacatcagttccacgagtcagtgctgcagtccacccagaaggccctgcagaagcataaagggagcgtggctgtgctgtctgcagagcagaaccacaaggttgacacgtccgtccactacaacattcctgagctgcagtcctccagccgcgcccctccaccccagcacaatgggcagcaggagccccccactgcaaggaagggccccccaacccaggagttggaccgggactcggaggaggaggaagaggaggatgatgaagatggagaagatgaggaggaagtccccaagcgcaagtggcaagggatcgaggccgtttttgaagcttaccaggaacacatagaagagcaaaatctggagcggcaggtgttacagacacaatgtagacgactggaggcccggcactacagcctcagcctgacggcagagcagctctcccacagcgtggcggtgagttgggaagggatggaaaccttcaaacacgcaaccttttgagtttgggttcagaaacacccatgcagataagtttcagagaggaaatgtgctcttaagagatcaaaatttggcggatcacgaggtcaggagatcgagaccatcccggctaaaacggtgaaaccctgtctctactaaaaatacaaaaaattagccgggcgtagtggcgggcgcctgtagtcccagctacttgggaggctgaggcaggagaatggcgtgaacccgggaggcggagcttgcagtgagccgagattgcgccactgcactccagcctgggcgacagagcgagactccgtctc

SEQ ID NO: 436241 - DNA, 731 bp, Homo sapiens
acatcccaaaggccgcggagcctgggaagctggaacaggtccggccccaggagctgtcgagagtccaggagctagctcctgccagcggggagaaggccaggctgagcgaggcccctggaggcaaaaagagtctgagcatgcttcactatatccggggcgctgcacccaaggacattcctgtgccgctgtcccacagcaccaatgggaagagcaagccgtgggagccctttgtggcagaagagtttgcacatcagttccacgagtcagtgctgcagtccacccagaaggccctgcagaagcataaaggtaatgaggctgccagtccctgctcagctctcggctgtggttgaggctgaccaaagttgctgagcgccacagctgctcagccgttcagccgtgggcacaagtttttataaactccaatcaccagaagaaaataatttcgttattatgccaaaaccatgtttgtttgtttatctccaagctctaaaacctgaactcgtaggtgagaaacgtttgtaggcaccagcgctgacgctgtgctgtgagcagggacgcatcgatcggtaagaggtaaaggagtgaacgccgacaggcattggtttttgcagagattaaaagattccccaaaggcaggaagagcacttgagtggatttttacccgcattcatttgaaagaatcatgtttttcaagacagagatgcagatggccaccagtcctcagggtagag

SEQ ID NO: 436242 - DNA, 7171 bp, Homo sapiens
ccagcatgtatcagccgaggtggagctgcggggccctggcatgaaagggtcctcactgagcagcgagtcgtcccccgtgtcctctccggccaccaaccacagctcccccgccagcacacccaagcgcgtgcccatgggccctatcatcgtcccccctgggggccacagcgtgcccagcaccccccccgtggtgaccatcgctccaaccaaaaccgtgaatggtgtctggaggagtgagagccggcaggatgccggctccaggagcagcagtggaggtcgggaacgcctcattgtggagcccccgctccctcaggagaaggcagggggaccagccatcccctcgcacctgctcagcaccccctaccccttcggcctctcccccagctcagttgtgcaggattcccgcttcccgccactcaacctccagcggcccgtgcaccacgtggtgccccccagtaccgtgaccgaggactacctgagaagcttccggccctaccacaccaccgacgacctccgcatgtcctcactgcctcccctcggcctggacccggccactgctgcagcctactaccaccccagctacctggccccacaccccttcccccacccggccttcaggatggacgactcctactgcctgtctgccctgaggtccccgttctaccccatccccacccccggctccctgcccccactgcacccatcagcgatgcacctgcacctctctggggtccgctaccctcccgagctctcccactcatccctggcagcgctgcactcggagcgcatgtctggcctcagcgcggagaggctgcagatggacgaggagctaaggcgggagagggagcgcgagcgcgagcgcgagcgtgagcgtgaggctgaccgcgagcgggagaaggaacgtgagcgcgaacgcgagaaggagcgcgagcaagagaaggagcgtgagcgtgagaaggagcgcgagcgcgagctggagcgccagcgggagcagcgggcccgggagaaggagctgctggccgccaaggccctggagcccagcttcctgcccgtggccgagctgcatgggctgcgtggccatgccactgaggagcggggcaagccctcggagcagctgaccccaacccgagcagagaagctgaaggatgccggcctgcaggcgcccaagcccgtccaacaccccttgcatccggtgcccaccccacaccacacggtgcccagcctcatctccaaccatggcatcttctctctgcctagcagcagtgctgccacagccctgctgatccagcgcaccaatgaggaggagaagtggctggcgcggcagcggcggctgcggcaggagaaggaggaccggcagtctcaggtgtccgagttccggcagcaggtgctggagcagcacctggatatgggccggcccccggtgccggcggaggcagagcacaggccggagagcaccaccaggccaggaccaaaccgtcacgagccaggtggccgtgaccctccgcagcactttggggggccaccacctctgatttcgcccaagccccagctccatgctgcacccacggccctctggaaccccgtgtccctgatggacaacaccttggagacgcggcgggccgaaagccactctctgcacagccacccggctgcatttgagcccagccgccaggcagccgtgccgctggtgaaggtggagcgggtcttctgcccggagaaagcagaggaggggccacggaagcgtgagcctgcccctctggacaagtaccagccacctccgccgccaccacgagagggagggagcctggagcaccagcccttcctgcccgggcccgggcccttcctggctgagctcgagaagtccacccagaccatcctgggccagcagcgggcctccctcccacaggcggccaccttcggggagctcagcggacccctgaagcctggctcgccctaccggcccccagtgccacgggcccccgaccctgcctacatctatgatgagttcctgcagcagcgccggaggctggtcagcaagctggacctggaggagcgcaggcggcgggaggcccaggagaaagggtactactacgacctcgatgactcttacgacgagagcgatgaggaggaggtcagggcccacctccgttgcgtggccgagcagccgcccctcaaactggacacgtcctctgagaagctagagtttttgcaactttttggcttgaccacccaacagcagaaggaggaattggtggcccagaagcggaggaagcggcggaggatgctgcgagagagaagcccgtcgcccccaacaattcagagcaagcggcagacgccttcaccgagactggcgctgtctacccgctacagccctgatgagatgaacaacagtcccaacttcgaagaaaagaagaagttcctgaccatcttcaacctgacccacatcagcgctgagaagaggaaagacaaagagagacttgttgaaatgctccgtgccatgaagcagaaggcactgtcagcagcagtggccgactccttgacaaactctccgagggacagtcctgccgtctccctgagtgaaccagccacgcagcaagcctctctggatgtggagaagccggttggtgttgctgcttccttgtctgacatcccaaaggccgcggagcctgggaagctggaacaggtccggccccaggagctgtcgagagtccaggagctagctcctgccagcggggagaaggccaggctgagcgaggcccctggaggcaaaaagagtctgagcatgcttcactatatccggggcgctgcacccaaggacattcctgtgccgctgtcccacagcaccaatgggaagagcaagccgtgggagccctttgtggcagaagagtttgcacatcagttccacgagtcagtgctgcagtccacccagaaggccctgcagaagcataaagggagcgtggctgtgctgtctgcagagcagaaccacaaggttgacacgtccgtccactacaacattcctgagctgcagtcctccagccgcgcccctccaccccagcacaatgggcagcaggagccccccactgcaaggaagggccccccaacccaggagttggaccgggactcggaggaggaggaagaggaggatgatgaagatggagaagatgaggaggaagtccccaagcgcaagtggcaagggatcgaggccgtttttgaagcttaccaggaacacatagaagagcaaaatctggagcggcaggtgttacagacacaatgtagacgactggaggcccggcactacagcctcagcctgacggcagagcagctctcccacagcgtggcggagttgaggagccagaaacagaagatggtctcagaacgggagcggctccaggcagaactggaccacttacgaaagtgccttgccttgcctgcaatgcactggcctaggggctacctgaagggatatcccaggtgacggtttcccttgcactaggccgaacctatagtatagaaatattatctattttattaccttgaatatttaatatttttcactgggaggtttgaagcttacaaaatgagaatgtgccatgcatgaagcaaaggattccaggctccagaaaaaatgaatgaactcaccttgacgtcaatgcaattgaatcaccgttgtcattcagcgagcaaccaatgtaggattgcccacagtttttctttttaaaggtggttttcgcccttcctctcccacattatttcttaatctgaacatgaaggctccattagcaacactaaaacttgatcattaacagccccctgtgcatatgagtggatcaaaccggttctgttctttcttgtgttgccatgttactatgcctcaagcccagtttgcttttgccgcagcgatggggccagtctcattcctccccaggagtgaaacttgcttcagctgaaaaggttgggtgcattgtcagtaaaaagggcttatttgtttcattttactttcctgcaaaattttcttcaaagcaacaagtcctaggagcacacaaagcaacccaaaggcttttccctggaaaagctctttcttacctaaagataaaaccaattcacaaactgaaggtagctttttattactccgtggggagcatgtacagagctctgtgtatacacagcttcacacccaccagattgttactacagtgggttgggttttcatacagacgtaaattttgagagaaaagtcaaaggtgcttcagccttgtactgtgtatatatattaaaaaaaaaacaaagttttgtatgtttttattactttaactattgttataaaaagcctgccatttttaatatgtggtttgggggatttttgtttgtttttcctgtttgggggttttgtttgttgttttggttttttttgggcaaaaaaaaaaaaaaaaccttgcttttagtgtttgtactgctgctggtcaggacattaaaatattgaagtgtttttaaaaattaaagaagaagaaaagtaaaagagcttaccactggcgcctatgcgatcacttcatttttagtttgagttgcaccagaagctgccgtagaaagccatgcgctactgcttacctcctccactccccctgcctgcccccagcatctggacaagctaatagcaaatattacccattgctatcaagggaggagggggtagtctgtagaacccatgtgtgacagtcatgtgcacacatgggcgggggcttttaaaaacctttcaggaagtcaatgatttctgtgattgatataattctaaggtgtctgagagcaggtacagaataggaacttcagaggctttgtttaaacgcaaagctttgtaaaagccacaaggtctgagctgaacccctcctttttgaacttactgtgacaagcacaggaacggtcagaaactgggctcatcacaccaaggcaaagcaacgggcgagtcttcctccttgtcctagttactgcctatggaggcagtgtttagatcaagaaggcctctcttgctcccaagggccctcaccagaggccagggctgccagtcactggtctggggggtggaggcctgagctgagggcagggtgcctgacctgtgtgccggctgctcactgctgtgaccagcagccgagcccttggccctagcccttgctgcgcagaacagcttgctggcagctggcatcgtgtcgctttatctgcccccgcacagtttgctttgtacgtctgccaagaatcttccagttattagcaaactcagacgaatgtaccgccagtattatcagcagtcaacaagcaccttcctctccacagaagcagctggaagagaactcgaggggctgtgctgcaggcctcccctcgaaagacactgggaggtcagcatgttccacaggtgttcagagggagtctgctacaaactatcagggcaaaatctcactggatttctccactgaaaacctacttgaggtttctggtctgaaggcttaagagtcacatcttagcacttccgctctcaggcctcctcctccatcacagatgtctggatgcttttggaaatggccttggctaaagtaaaagggaaaagtagatccgataacttaaaaacgtagctcatcccttaccatccaaggggcactcccttggttggattttctatgacagcacaggggacaggtggcacaccatgagaggtctgcccagggtgggagcagtgtcactgtgctagcaatagttggcttctcccctgtcagtggaaaccccacttctgcccggcccttgagcttcttgcccactgtctccccatccttccacctacttgtggcgatctgagtactctactcttgctcaagaagtaatacgacaatcagaatacaaaccagtaaggcaacacgaataaactaagaaaaaggtaagaactgtctcaaaaacgaaagcacaccacccaagacacagtacccagtcatggtttccccatccaactattagtttcatactttgaaaacttactttcagattattctcaaagaacacagtagcacctaaatctgttttcaattgggcttaaaaattgacatgcaatctcttaagttttttgttcagctacttcacactgagtacctcaaatctgctctggagtcgattatgccacctgtgtgtcaggatgcacctgaaagccctcggctcggtccttagaccatcttcctacattacctggaagggagctgccatctgtccctctgcagagggataccttccaatagtaaattatctggttcctcactgaaacaagttatttttgcttcatatagtcagagtcagactgacatgataaaatatcatgttcctaatctgttgtctcagataagtgaccaagacgggactttccacattttagtctacattctaatcttaaaggaataaagcactgaattgggactaacattctgataggttgcacccttaagagtattcagagagcatcaaaaggagcccacaccttcagcagtgaaggattctaacacagggaatctgcagtttgtagcagaatggtattttcctcaagtagctcataatactgccaaatctcaaaagttaagctgaatttcacaccagatcctacccctttccctgagccacatgtttcacacaagtgtagaaaatgccagggatccaccacaagatggagatggtcagcacaaaccgattctgttcctctttaaagtgtatattagccacttagcaatctctatattctttcaagtaaccaagctgttgactttcttactacttgcagtagcctgtccccaacttttccatccagtgcttaacctaaaaaactccttaactctgccttgacctgaggaagaccatgctaactggtgttattttgtatgtaccctgtgcttaattctataacagtaaaccccatacgcaggtgggagggaggaacaccggtgcctcggtcactctgggggcagtttagatgctgtgaaattaaacctgttctaagtgtacttgtttgaattaattgtattgtaatattatttgttgaatgtagtaattaggtatttatgaatatattgctgtaatttctgacaacatccaaaaaataaaatcttcctaaattataaaaaaaaaacacagaaaaaaacaaaaagcaaag

SEQ ID NO: 436243 - DNA, 7488 bp, Homo sapiens
  misc_feature (196)..(196): n is a, c, g, or t
  misc_feature (269)..(269): n is a, c, g, or t
  misc_feature (390)..(390): n is a, c, g, or t
tgcatctcaagtccaaaaggcagaaaatacacacgcggcgaagacacccgggcagccgtggaggctccggcccgtccttggtcgtcaattacctcattgtggatctgccagggccaaggtggccgaaattgcctgggcgctggtcggagagagagccttttgatcatcttgcggggggggggggaaagactgattntttttttttttcgtcgctctcgggatcgctcttctgcctttattttattgttttggacatttttgagcgccgnggcttgaacggtgctttttgttcattcctgggttttaatattattttccttcttcatccctctctggccactatggaattctaatttgaaccatgtttggattgaagccgcctctgtattncttaccagggtcctcactgagcagcgagtcgtcccccgtgtcctctccggccaccaaccacagctcccccgccagcacacccaagcgcgtgcccatgggccctatcatcgtcccccctgggggccacagcgtgcccagcaccccccccgtggtgaccatcgctccaaccaaaaccgtgaatggtgtctggaggagtgagagccggcaggatgccggctccaggagcagcagtggaggtcgggaacgcctcattgtggagcccccgctccctcaggagaaggcagggggaccagccatcccctcgcacctgctcagcaccccctaccccttcggcctctcccccagctcagttgtgcaggattcccgcttcccgccactcaacctccagcggcccgtgcaccacgtggtgccccccagtaccgtgaccgaggactacctgagaagcttccggccctaccacaccaccgacgacctccgcatgtcctcactgcctcccctcggcctggacccggccactgctgcagcctactaccaccccagctacctggccccacaccccttcccccacccggccttcaggatggacgactcctactgcctgtctgccctgaggtccccgttctaccccatccccacccccggctccctgcccccactgcacccatcagcgatgcacctgcacctctctggggtccgctaccctcccgagctctcccactcatccctggcagcgctgcactcggagcgcatgtctggcctcagcgcggagaggctgcagatggacgaggagctaaggcgggagagggagcgcgagcgcgagcgcgagcgtgagcgtgaggctgaccgcgagcgggagaaggaacgtgagcgcgaacgcgagaaggagcgcgagcaagagaaggagcgtgagcgtgagaaggagcgcgagcgcgagctggagcgccagcgggagcagcgggcccgggagaaggagctgctggccgccaaggccctggagcccagcttcctgcccgtggccgagctgcatgggctgcgtggccatgccactgaggagcggggcaagccctcggagcagctgaccccaacccgagcagagaagctgaaggatgccggcctgcaggcgcccaagcccgtccaacaccccttgcatccggtgcccaccccacaccacacggtgcccagcctcatctccaaccatggcatcttctctctgcctagcagcagtgctgccacagccctgctgatccagcgcaccaatgaggaggagaagtggctggcgcggcagcggcggctgcggcaggagaaggaggaccggcagtctcaggtgtccgagttccggcagcaggtgctggagcagcacctggatatgggccggcccccggtgccggcggaggcagagcacaggccggagagcaccaccaggccaggaccaaaccgtcacgagccaggtggccgtgaccctccgcagcactttggggggccaccacctctgatttcgcccaagccccagctccatgctgcacccacggccctctggaaccccgtgtccctgatggacaacaccttggagacgcggcgggccgaaagccactctctgcacagccacccggctgcatttgagcccagccgccaggcagccgtgccgctggtgaaggtggagcgggtcttctgcccggagaaagcagaggaggggccacggaagcgtgagcctgcccctctggacaagtaccagccacctccgccgccaccacgagagggagggagcctggagcaccagcccttcctgcccgggcccgggcccttcctggctgagctcgagaagtccacccagaccatcctgggccagcagcgggcctccctcccacaggcggccaccttcggggagctcagcggacccctgaagcctggctcgccctaccggcccccagtgccacgggcccccgaccctgcctacatctatgatgagttcctgcagcagcgccggaggctggtcagcaagctggacctggaggagcgcaggcggcgggaggcccaggagaaagggtactactacgacctcgatgactcttacgacgagagcgatgaggaggaggtcagggcccacctccgttgcgtggccgagcagccgcccctcaaactggacacgtcctctgagaagctagagtttttgcaactttttggcttgaccacccaacagcagaaggaggaattggtggcccagaagcggaggaagcggcggaggatgctgcgagagagaagcccgtcgcccccaacaattcagagcaagcggcagacgccttcaccgagactggcgctgtctacccgctacagccctgatgagatgaacaacagtcccaacttcgaagaaaagaagaagttcctgaccatcttcaacctgacccacatcagcgctgagaagaggaaagacaaagagagacttgttgaaatgctccgtgccatgaagcagaaggcactgtcagcagcagtggccgactccttgacaaactctccgagggacagtcctgccgtctccctgagtgaaccagccacgcagcaagcctctctggatgtggagaagccggttggtgttgctgcttccttgtctgacatcccaaaggccgcggagcctgggaagctggaacaggtccggccccaggagctgtcgagagtccaggagctagctcctgccagcggggagaaggccaggctgagcgaggcccctggaggcaaaaagagtctgagcatgcttcactatatccggggcgctgcacccaaggacattcctgtgccgctgtcccacagcaccaatgggaagagcaagccgtgggagccctttgtggcagaagagtttgcacatcagttccacgagtcagtgctgcagtccacccagaaggccctgcagaagcataaagggagcgtggctgtgctgtctgcagagcagaaccacaaggttgacacgtccgtccactacaacattcctgagctgcagtcctccagccgcgcccctccaccccagcacaatgggcagcaggagccccccactgcaaggaagggccccccaacccaggagttggaccgggactcggaggaggaggaagaggaggatgatgaagatggagaagatgaggaggaagtccccaagcgcaagtggcaagggatcgaggccgtttttgaagcttaccaggaacacatagaagagcaaaatctggagcggcaggtgttacagacacaatgtagacgactggaggcccggcactacagcctcagcctgacggcagagcagctctcccacagcgtggcggagttgaggagccagaaacagaagatggtctcagaacgggagcggctccaggcagaactggaccacttacgaaagtgccttgccttgcctgcaatgcactggcctaggggctacctgaagggatatcccaggtgacggtttcccttgcactaggccgaacctatagtatagaaatattatctattttattaccttgaatatttaatatttttcactgggaggtttgaagcttacaaaatgagaatgtgccatgcatgaagcaaaggattccaggctccagaaaaaatgaatgaactcaccttgacgtcaatgcaattgaatcaccgttgtcattcagcgagcaaccaatgtaggattgcccacagtttttctttttaaaggtggttttcgcccttcctctcccacattatttcttaatctgaacatgaaggctccattagcaacactaaaacttgatcattaacagccccctgtgcatatgagtggatcaaaccggttctgttctttcttgtgttgccatgttactatgcctcaagcccagtttgcttttgccgcagcgatggggccagtctcattcctccccaggagtgaaacttgcttcagctgaaaaggttgggtgcattgtcagtaaaaagggcttatttgtttcattttactttcctgcaaaattttcttcaaagcaacaagtcctaggagcacacaaagcaacccaaaggcttttccctggaaaagctctttcttacctaaagataaaaccaattcacaaactgaaggtagctttttattactccgtggggagcatgtacagagctctgtgtatacacagcttcacacccaccagattgttactacagtgggttgggttttcatacagacgtaaattttgagagaaaagtcaaaggtgcttcagccttgtactgtgtatatatattaaaaaaaaaacaaagttttgtatgtttttattactttaactattgttataaaaagcctgccatttttaatatgtggtttgggggatttttgtttgtttttcctgtttgggggttttgtttgttgttttggttttttttgggcaaaaaaaaaaaaaaaaccttgcttttagtgtttgtactgctgctggtcaggacattaaaatattgaagtgtttttaaaaattaaagaagaagaaaagtaaaagagcttaccactggcgcctatgcgatcacttcatttttagtttgagttgcaccagaagctgccgtagaaagccatgcgctactgcttacctcctccactccccctgcctgcccccagcatctggacaagctaatagcaaatattacccattgctatcaagggaggagggggtagtctgtagaacccatgtgtgacagtcatgtgcacacatgggcgggggcttttaaaaacctttcaggaagtcaatgatttctgtgattgatataattctaaggtgtctgagagcaggtacagaataggaacttcagaggctttgtttaaacgcaaagctttgtaaaagccacaaggtctgagctgaacccctcctttttgaacttactgtgacaagcacaggaacggtcagaaactgggctcatcacaccaaggcaaagcaacgggcgagtcttcctccttgtcctagttactgcctatggaggcagtgtttagatcaagaaggcctctcttgctcccaagggccctcaccagaggccagggctgccagtcactggtctggggggtggaggcctgagctgagggcagggtgcctgacctgtgtgccggctgctcactgctgtgaccagcagccgagcccttggccctagcccttgctgcgcagaacagcttgctggcagctggcatcgtgtcgctttatctgcccccgcacagtttgctttgtacgtctgccaagaatcttccagttattagcaaactcagacgaatgtaccgccagtattatcagcagtcaacaagcaccttcctctccacagaagcagctggaagagaactcgaggggctgtgctgcaggcctcccctcgaaagacactgggaggtcagcatgttccacaggtgttcagagggagtctgctacaaactatcagggcaaaatctcactggatttctccactgaaaacctacttgaggtttctggtctgaaggcttaagagtcacatcttagcacttccgctctcaggcctcctcctccatcacagatgtctggatgcttttggaaatggccttggctaaagtaaaagggaaaagtagatccgataacttaaaaacgtagctcatcccttaccatccaaggggcactcccttggttggattttctatgacagcacaggggacaggtggcacaccatgagaggtctgcccagggtgggagcagtgtcactgtgctagcaatagttggcttctcccctgtcagtggaaaccccacttctgcccggcccttgagcttcttgcccactgtctccccatccttccacctacttgtggcgatctgagtactctactcttgctcaagaagtaatacgacaatcagaatacaaaccagtaaggcaacacgaataaactaagaaaaaggtaagaactgtctcaaaaacgaaagcacaccacccaagacacagtacccagtcatggtttccccatccaactattagtttcatactttgaaaacttactttcagattattctcaaagaacacagtagcacctaaatctgttttcaattgggcttaaaaattgacatgcaatctcttaagttttttgttcagctacttcacactgagtacctcaaatctgctctggagtcgattatgccacctgtgtgtcaggatgcacctgaaagccctcggctcggtccttagaccatcttcctacattacctggaagggagctgccatctgtccctctgcagagggataccttccaatagtaaattatctggttcctcactgaaacaagttatttttgcttcatatagtcagagtcagactgacatgataaaatatcatgttcctaatctgttgtctcagataagtgaccaagacgggactttccacattttagtctacattctaatcttaaaggaataaagcactgaattgggactaacattctgataggttgcacccttaagagtattcagagagcatcaaaaggagcccacaccttcagcagtgaaggattctaacacagggaatctgcagtttgtagcagaatggtattttcctcaagtagctcataatactgccaaatctcaaaagttaagctgaatttcacaccagatcctacccctttccctgagccacatgtttcacacaagtgtagaaaatgccagggatccaccacaagatggagatggtcagcacaaaccgattctgttcctctttaaagtgtatattagccacttagcaatctctatattctttcaagtaaccaagctgttgactttcttactacttgcagtagcctgtccccaacttttccatccagtgcttaacctaaaaaactccttaactctgccttgacctgaggaagaccatgctaactggtgttattttgtatgtaccctgtgcttaattctataacagtaaaccccatacgcaggtgggagggaggaacaccggtgcctcggtcactctgggggcagtttagatgctgtgaaattaaacctgttctaagtgtacttgtttgaattaattgtattgtaatattatttgttgaatgtagtaattaggtatttatgaatatattgctgtaatttctgacaacatccaaaaaataaaatcttcctaaattat

SEQ ID NO: 436244 - DNA, 5443 bp, Homo sapiens
aacaaacgcccatgtagccacaaccaggacatcaaatcccgtattttgtttcctttcctcctcccgtggaatctttgagtttattgcgcaccaccccctacatgttgccattcttttagtgcactcgtatatatccagaagcaatacacagtgatttttaactctcctagatgaaatatttccatctttgctggttttgtaggttttttggtgtggtgttgggaattatttccataccccatggctgtcaggctattcttctgtattttcttctgtgagtttggctttttcctgttctgcgtaggattcatgtgtgtgtacagagtaaggcagaaatcttaactgtacctttcccacccaaccagttgtcctggcaatgtgtggggtgccctcttccctgcctcactcccacacctgctgggcctggcttcgcccctgtcaggcatgacctgcgctgaccccctcttctctcagctaccgctcagctgtttttagcccatggctttcccccaaggacttttcccctaaggattttaggatcgccttatattcaccccaaagagtcctgttagattttcagttgcattgaatttacaggcgtggttggcatccttttccatgaatatggtacaaaactattacatcatttttggacgtgaagttttgactagatttagtttcaggtatcacatagattttgggggtctttggatttttgtgttgcctgtgattattccttagatcagaggaatcacagatgatcaaacctgcaaatacaaggtttggttctttccttttgaatttgtctgattgtcttgtcactccagtgctgccaaagagaggcactggtggggcccttgtctgtgaaactttaaagcatcccattaaagagtgaaggttcccatttccggagtttttcatcctttgattttttttttcttgatgttgctccatccttgttgaatttgttagtacttttaggatttttaatgtatgttcgttagtattagactctagttttattgtactttggtatccagattgtgagcactttccctgtttttcatttgctgaaacactgtgtataaggtagggatttgtcctgaaagatgtgaagtcactctcctgttcaaactaggcctggtatcttttggtagagcagaggctttattttattaattaaatctgtgctttaggtgtactctggcctttttccagcagcctaaactgaaagcctatttttttttttttgaaagctgcattttaaggccatcaaatttcttcctaatctgtatcaaattgcctttaggtcctggatcctttgtctttattcctgtgtattgggcttaatttagtgacgtttatgtatttatcggtacaattcaaagggctgggagcattgtggtccacaggagaggccttcgctggctgcactggagagaggttttgggctctgctgggcagggtgtgaagaggagagcacaaagcgggccttcgggctcctgcatacggaaaatacatcaccatctcctgtcttttcagagcaaaatctggagcggcaggtgttacagacacaatgtagacgactggaggcccggcactacagcctcagcctgacggcagagcagctctcccacagcgtggcggagttgaggagccagaaacagaagatggtctcagaacgggagcggctccaggcagaactggaccacttacgaaagtgccttgccttgcctgcaatgcactggcctaggggctacctgaagggatatcccaggtgacggtttcccttgcactaggccgaacctatagtatagaaatattatctattttattaccttgaatatttaatatttttcactgggaggtttgaagcttacaaaatgagaatgtgccatgcatgaagcaaaggattccaggctccagaaaaaatgaatgaactcaccttgacgtcaatgcaattgaatcaccgttgtcattcagcgagcaaccaatgtaggattgcccacagtttttctttttaaaggtggttttcgcccttcctctcccacattatttcttaatctgaacatgaaggctccattagcaacactaaaacttgatcattaacagccccctgtgcatatgagtggatcaaaccggttctgttctttcttgtgttgccatgttactatgcctcaagcccagtttgcttttgccgcagcgatggggccagtctcattcctccccaggagtgaaacttgcttcagctgaaaaggttgggtgcattgtcagtaaaaagggcttatttgtttcattttactttcctgcaaaattttcttcaaagcaacaagtcctaggagcacacaaagcaacccaaaggcttttccctggaaaagctctttcttacctaaagataaaaccaattcacaaactgaaggtagctttttattactccgtggggagcatgtacagagctctgtgtatacacagcttcacacccaccagattgttactacagtgggttgggttttcatacagacgtaaattttgagagaaaagtcaaaggtgcttcagccttgtactgtgtatatatattaaaaaaaaaacaaagttttgtatgtttttattactttaactattgttataaaaagcctgccatttttaatatgtggtttgggggatttttgtttgtttttcctgtttgggggttttgtttgttgttttggttttttttgggcaaaaaaaaaaaaaaaaccttgcttttagtgtttgtactgctgctggtcaggacattaaaatattgaagtgtttttaaaaattaaagaagaagaaaagtaaaagagcttaccactggcgcctatgcgatcacttcatttttagtttgagttgcaccagaagctgccgtagaaagccatgcgctactgcttacctcctccactccccctgcctgcccccagcatctggacaagctaatagcaaatattacccattgctatcaagggaggagggggtagtctgtagaacccatgtgtgacagtcatgtgcacacatgggcgggggcttttaaaaacctttcaggaagtcaatgatttctgtgattgatataattctaaggtgtctgagagcaggtacagaataggaacttcagaggctttgtttaaacgcaaagctttgtaaaagccacaaggtctgagctgaacccctcctttttgaacttactgtgacaagcacaggaacggtcagaaactgggctcatcacaccaaggcaaagcaacgggcgagtcttcctccttgtcctagttactgcctatggaggcagtgtttagatcaagaaggcctctcttgctcccaagggccctcaccagaggccagggctgccagtcactggtctggggggtggaggcctgagctgagggcagggtgcctgacctgtgtgccggctgctcactgctgtgaccagcagccgagcccttggccctagcccttgctgcgcagaacagcttgctggcagctggcatcgtgtcgctttatctgcccccgcacagtttgctttgtacgtctgccaagaatcttccagttattagcaaactcagacgaatgtaccgccagtattatcagcagtcaacaagcaccttcctctccacagaagcagctggaagagaactcgaggggctgtgctgcaggcctcccctcgaaagacactgggaggtcagcatgttccacaggtgttcagagggagtctgctacaaactatcagggcaaaatctcactggatttctccactgaaaacctacttgaggtttctggtctgaaggcttaagagtcacatcttagcacttccgctctcaggcctcctcctccatcacagatgtctggatgcttttggaaatggccttggctaaagtaaaagggaaaagtagatccgataacttaaaaacgtagctcatcccttaccatccaaggggcactcccttggttggattttctatgacagcacaggggacaggtggcacaccatgagaggtctgcccagggtgggagcagtgtcactgtgctagcaatagttggcttctcccctgtcagtggaaaccccacttctgcccggcccttgagcttcttgcccactgtctccccatccttccacctacttgtggcgatctgagtactctactcttgctcaagaagtaatacgacaatcagaatacaaaccagtaaggcaacacgaataaactaagaaaaaggtaagaactgtctcaaaaacgaaagcacaccacccaagacacagtacccagtcatggtttccccatccaactattagtttcatactttgaaaacttactttcagattattctcaaagaacacagtagcacctaaatctgttttcaattgggcttaaaaattgacatgcaatctcttaagttttttgttcagctacttcacactgagtacctcaaatctgctctggagtcgattatgccacctgtgtgtcaggatgcacctgaaagccctcggctcggtccttagaccatcttcctacattacctggaagggagctgccatctgtccctctgcagagggataccttccaatagtaaattatctggttcctcactgaaacaagttatttttgcttcatatagtcagagtcagactgacatgataaaatatcatgttcctaatctgttgtctcagataagtgaccaagacgggactttccacattttagtctacattctaatcttaaaggaataaagcactgaattgggactaacattctgataggttgcacccttaagagtattcagagagcatcaaaaggagcccacaccttcagcagtgaaggattctaacacagggaatctgcagtttgtagcagaatggtattttcctcaagtagctcataatactgccaaatctcaaaagttaagctgaatttcacaccagatcctacccctttccctgagccacatgtttcacacaagtgtagaaaatgccagggatccaccacaagatggagatggtcagcacaaaccgattctgttcctctttaaagtgtatattagccacttagcaatctctatattctttcaagtaaccaagctgttgactttcttactacttgcagtagcctgtccccaacttttccatccagtgcttaacctaaaaaactccttaactctgccttgacctgaggaagaccatgctaactggtgttattttgtatgtaccctgtgcttaattctataacagtaaaccccatacgcaggtgggagggaggaacaccggtgcctcggtcactctgggggcagtttagatgctgtgaaattaaacctgttctaagtgtacttgtttgaattaattgtattgtaatattatttgttgaatgtagtaattaggtatttatgaatatattgctgtaatttctgacaacatccaaaaaataaaatcttcctaaattat

SEQ ID NO: 436245 - DNA, 3420 bp, Homo sapiens
ttgaagtagatcctctcccacattatttattatttcttaatctgaacatgaaggctccattagcaacactaaaacttgatcattaacagccccctgtgcatatgagtggatcaaaccggttctgttctttcttgtgttgccatgttactatgcctcaagcccagtttgcttttgccgcagcgatggggccagtctcattcctccccaggagtgaaacttgcttcagctgaaaaggttgggtgcattgtcagtaaaaagggcttatttgtttcattttactttcctgcaaaattttcttcaaagcaacaagtcctaggagcacacaaagcaacccaaaggcttttccctggaaaagctctttcttacctaaagataaaaccaattcacaaactgaaggtagctttttattactccgtggggagcatgtacagagctctgtgtatacacagcttcacacccaccagattgttactacagtgggttgggttttcatacagacgtaaattttgagagaaaagtcaaaggtgcttcagccttgtactgtgtatatatattaaaaaaaaaacaaagttttgtatgtttttattactttaactattgttataaaaagcctgccatttttaatatgtggtttgggggatttttgtttgtttttcctgtttgggggttttgtttgttgttttggttttttttgggcaaaaaaaaaaaaaaaaccttgcttttagtgtttgtactgctgctggtcaggacattaaaatattgaagtgtttttaaaaattaaagaagaagaaaagtaaaagagcttaccactggcgcctatgcgatcacttcatttttagtttgagttgcaccagaagctgccgtagaaagccatgcgctactgcttacctcctccactccccctgcctgcccccagcatctggacaagctaatagcaaatattacccattgctatcaagggaggagggggtagtctgtagaacccatgtgtgacagtcatgtgcacacatgggcgggggcttttaaaaacctttcaggaagtcaatgatttctgtgattgatataattctaaggtgtctgagagcaggtacagaataggaacttcagaggctttgtttaaacgcaaagctttgtaaaagccacaaggtctgagctgaacccctcctttttgaacttactgtgacaagcacaggaacggtcagaaactgggctcatcacaccaaggcaaagcaacgggcgagtcttcctccttgtcctagttactgcctatggaggcagtgtttagatcaagaaggcctctcttgctcccaagggccctcaccagaggccagggctgccagtcactggtctggggggtggaggcctgagctgagggcagggtgcctgacctgtgtgccggctgctcactgctgtgaccagcagccgagcccttggccctagcccttgctgcgcagaacagcttgctggcagctggcatcgtgtcgctttatctgcccccgcacagtttgctttgtacgtctgccaagaatcttccagttattagcaaactcagacgaatgtaccgccagtattatcagcagtcaacaagcaccttcctctccacagaagcagctggaagagaactcgaggggctgtgctgcaggcctcccctcgaaagacactgggaggtcagcatgttccacaggtgttcagagggagtctgctacaaactatcagggcaaaatctcactggatttctccactgaaaacctacttgaggtttctggtctgaaggcttaagagtcacatcttagcacttccgctctcaggcctcctcctccatcacagatgtctggatgcttttggaaatggccttggctaaagtaaaagggaaaagtagatccgataacttaaaaacgtagctcatcccttaccatccaaggggcactcccttggttggattttctatgacagcacaggggacaggtggcacaccatgagaggtctgcccagggtgggagcagtgtcactgtgctagcaatagttggcttctcccctgtcagtggaaaccccacttctgcccggcccttgagcttcttgcccactgtctccccatccttccacctacttgtggcgatctgagtactctactcttgctcaagaagtaatacgacaatcagaatacaaaccagtaaggcaacacgaataaactaagaaaaaggtaagaactgtctcaaaaacgaaagcacaccacccaagacacagtacccagtcatggtttccccatccaactattagtttcatactttgaaaacttactttcagattattctcaaagaacacagtagcacctaaatctgttttcaattgggcttaaaaattgacatgcaatctcttaagttttttgttcagctacttcacactgagtacctcaaatctgctctggagtcgattatgccacctgtgtgtcaggatgcacctgaaagccctcggctcggtccttagaccatcttcctacattacctggaagggagctgccatctgtccctctgcagagggataccttccaatagtaaattatctggttcctcactgaaacaagttatttttgcttcatatagtcagagtcagactgacatgataaaatatcatgttcctaatctgttgtctcagataagtgaccaagacgggactttccacattttagtctacattctaatcttaaaggaataaagcactgaattgggactaacattctgataggttgcacccttaagagtattcagagagcatcaaaaggagcccacaccttcagcagtgaaggattctaacacagggaatctgcagtttgtagcagaatggtattttcctcaagtagctcataatactgccaaatctcaaaagttaagctgaatttcacaccagatcctacccctttccctgagccacatgtttcacacaagtgtagaaaatgccagggatccaccacaagatggagatggtcagcacaaaccgattctgttcctctttaaagtgtatattagccacttagcaatctctatattctttcaagtaaccaagctgttgactttcttactacttgcagtagcctgtccccaacttttccatccagtgcttaacctaaaaaactccttaactctgccttgacctgaggaagaccatgctaactggtgttattttgtatgtaccctgtgcttaattctataacagtaaaccccatacgcaggtgggagggaggaacaccggtgcctcggtcactctgggggcagtttagatgctgtgaaattaaacctgttctaagtgtacttgtttgaattaattgtattgtaatattatttgttgaatgtagtaattaggtatttatgaatatattgctgtaatttctgacaacatccaaaaaataaaatcttcctaaattat

SEQ ID NO: 436246 - DNA, 4959 bp, Homo sapiens
ggaggtggttgggggcagaccagcaccttcggcccaggggcagtgccagcttcctttgcccctgccctccacgtgggcaccagggccaggacatctgcggccaggtgggcagctgtcggcgcagttgacgtcttggctacatcgtggcactcgcttcacggcgtgctgggtgccaacggtgtctgcttccccgggtgtgtgtctggtgtgaccttcggatgtccacaccaggaggggtggaggcaggagcccctgccaccctgcatccttcacctgcacacattgtgtttctggggggttctagttcttttgctggactgaggaggcccagggagggagacggatcccgagacgcacttcaccccagacctgtcgcagccacatcccctttcttacggttctgcttcccacaccacatgcaccatgttttgcgtagaaagccttagggaaaggatgtttctagaacatgaactaaatctagcgccttcccgtgagtcaggagacctggctgtgtcctgtggtcagtggcctataccaggctcctgccctgactggacgctctcctcccgcaggatgccggctccaggagcagcagtggaggtcgggaacgcctcattgtggagcccccgctccctcaggagaaggcagggggaccagccatcccctcgcacctgctcagcaccccctaccccttcggcctctcccccagctcagttgtgcaggattcccgcttcccgccactcaacctccagcggcccgtgcaccacgtggtgccccccagtaccgtgaccgaggactacctgagaagcttccggccctaccacaccaccgacgacctccgcatgtcctcactgcctcccctcggcctggacccggccactgctgcagcctactaccaccccagctacctggccccacaccccttcccccacccggccttcaggatggacgactcctactgcctgtctgccctgaggtccccgttctaccccatccccacccccggctccctgcccccactgcacccatcagcgatgcacctgcacctctctggggtccgctaccctcccgagctctcccactcatccctggcagcgctgcactcggagcgcatgtctggcctcagcgcggagaggctgcagatggacgaggagctaaggcgggagagggagcgcgagcgcgagcgcgagcgtgagcgtgaggctgaccgcgagcgggagaaggaacgtgagcgcgaacgcgagaaggagcgcgagcaagagaaggagcgtgagcgtgagaaggagcgcgagcgcgagctggagcgccagcgggagcagcgggcccgggagaaggagctgctggccgccaaggccctggagcccagcttcctgcccgtggccgagctgcatgggctgcgtggccatgccactgaggagcggggcaagccctcggagcagctgaccccaacccgagcagagaagctgaaggatgccggcctgcaggcgcccaagcccgtccaacaccccttgcatccggtgcccaccccacaccacacggtgcccagcctcatctccaaccatggcatcttctctctgcctagcagcagtgctgccacagccctgctgatccagcgcaccaatgaggaggagaagtggctggcgcggcagcggcggctgcggcaggagaaggaggaccggcagtctcaggtgtccgagttccggcagcaggtgctggagcagcacctggatatgggccggcccccggtgccggcggaggcagagcacaggccggagagcaccaccaggccaggaccaaaccgtcacgagccaggtggccgtgaccctccgcagcactttggggggccaccacctctgatttcgcccaagccccagctccatgctgcacccacggccctctggaaccccgtgtccctgatggacaacaccttggagacgcggcgggccgaaagccactctctgcacagccacccggctgcatttgagcccagccgccaggcagccgtgccgctggtgaaggtggagcgggtcttctgcccggagaaagcagaggaggggccacggaagcgtgagcctgcccctctggacaagtaccagccacctccgccgccaccacgagagggagggagcctggagcaccagcccttcctgcccgggcccgggcccttcctggctgagctcgagaagtccacccagaccatcctgggccagcagcgggcctccctcccacaggcggccaccttcggggagctcagcggacccctgaagcctggctcgccctaccggcccccagtgccacgggcccccgaccctgcctacatctatgatgagttcctgcagcagcgccggaggctggtcagcaagctggacctggaggagcgcaggcggcgggaggcccaggagaaagggtactactacgacctcgatgactcttacgacgagagcgatgaggaggaggtcagggcccacctccgttgcgtggccgagcagccgcccctcaaactggacacgtcctctgagaagctagagtttttgcaactttttggcttgaccacccaacagcagaaggaggaattggtggcccagaagcggaggaagcggcggaggatgctgcgagagagaagcccgtcgcccccaacaattcagagcaagcggcagacgccttcaccgagactggcgctgtctacccgctacagccctgatgagatgaacaacagtcccaacttcgaagaaaagaagaagttcctgaccatcttcaacctgacccacatcagcgctgagaagaggaaagacaaagagagacttgttgaaatgctccgtgccatgaagcagaaggcactgtcagcagcagtggccgactccttgacaaactctccgagggacagtcctgccgtctccctgagtgaaccagccacgcagcaagcctctctggatgtggagaagccggttggtgttgctgcttccttgtctgacatcccaaaggccgcggagcctgggaagctggaacaggtccggccccaggagctgtcgagagtccaggagctagctcctgccagcggggagaaggccaggctgagcgaggcccctggaggcaaaaagagtctgagcatgcttcactatatccggggcgctgcacccaaggacattcctgtgccgctgtcccacagcaccaatgggaagagcaagccgtgggagccctttgtggcagaagagtttgcacatcagttccacgagtcagtgctgcagtccacccagaaggccctgcagaagcataaagggagcgtggctgtgctgtctgcagagcagaaccacaaggttgacacgtccgtccactacaacattcctgagctgcagtcctccagccgcgcccctccaccccagcacaatgggcagcaggagccccccactgcaaggaagggccccccaacccaggagttggaccgggactcggaggaggaggaagaggaggatgatgaagatggagaagatgaggaggaagtccccaagcgcaagtggcaagggatcgaggccgtttttgaagcttaccaggaacacatagaagagcaaaatctggagcggcaggtgttacagacacaatgtagacgactggaggcccggcactacagcctcagcctgacggcagagcagctctcccacagcgtggcggagttgaggagccagaaacagaagatggtctcagaacgggagcggctccaggcagaactggaccacttacgaaagtgccttgccttgcctgcaatgcactggcctaggggctacctgaagggatatcccaggtgacggtttcccttgcactaggccgaacctatagtatagaaatattatctattttattaccttgaatatttaatatttttcactgggaggtttgaagcttacaaaatgagaatgtgccatgcatgaagcaaaggattccaggctccagaaaaaatgaatgaactcaccttgacgtcaatgcaattgaatcaccgttgtcattcagcgagcaaccaatgtaggattgcccacagtttttctttttaaaggtggttttcgcccttcctctcccacattatttcttaatctgaacatgaaggctccattagcaacactaaaacttgatcattaacagccccctgtgcatatgagtggatcaaaccggttctgttctttcttgtgttgccatgttactatgcctcaagcccagtttgcttttgccgcagcgatggggccagtctcattcctccccaggagtgaaacttgcttcagctgaaaaggttgggtgcattgtcagtaaaaagggcttatttgtttcattttactttcctgcaaaattttcttcaaagcaacaagtcctaggagcacacaaagcaacccaaaggcttttccctggaaaagctctttcttacctaaagataaaaccaattcacaaactgaaggtagctttttattactccgtggggagcatgtacagagctctgtgtatacacagcttcacacccaccagattgttactacagtgggttgggttttcatacagacgtaaattttgagagaaaagtcaaaggtgcttcagccttgtactgtgtatatatattaaaaaaaaaacaaagttttgtatgtttttattactttaactattgttataaaaagcctgccatttttaatatgtggtttgggggatttttgtttgtttttcctgtttgggggttttgtttgttgttttggttttttttgggcaaaaaaaaaaaaaaaaccttgcaaaaaaaaaaacaaaatgttgcggcacatgggcccctcgaaaacagcttacaaccaccccttgggcccaggcccaagagggaacacaacaagtggccaaagcgggccccagagaaaactcggggaccacacaaagggcgaaaatccacacaatatgaaaaggccgggggaaacgcgggccttcagaacacctcacagg

SEQ ID NO: 436247 - DNA, 4449 bp, Homo sapiens
ggaggtggttgggggcagaccagcaccttcggcccaggggcagtgccagcttcctttgcccctgccctccacgtgggcaccagggccaggacatctgcggccaggtgggcagctgtcggcgcagttgacgtcttggctacatcgtggcactcgcttcacggcgtgctgggtgccaacggtgtctgcttccccgggtgtgtgtctggtgtgaccttcggatgtccacaccaggaggggtggaggcaggagcccctgccaccctgcatccttcacctgcacacattgtgtttctggggggttctagttcttttgctggactgaggaggcccagggagggagacggatcccgagacgcacttcaccccagacctgtcgcagccacatcccctttcttacggttctgcttcccacaccacatgcaccatgttttgcgtagaaagccttagggaaaggatgtttctagaacatgaactaaatctagcgccttcccgtgagtcaggagacctggctgtgtcctgtggtcagtggcctataccaggctcctgccctgactggacgctctcctcccgcaggatgccggctccaggagcagcagtggaggtcgggaacgcctcattgtggagcccccgctccctcaggagaaggcagggggaccagccatcccctcgcacctgctcagcaccccctaccccttcggcctctcccccagctcagttgtgcaggattcccgcttcccgccactcaacctccagcggcccgtgcaccacgtggtgccccccagtaccgtgaccgaggactacctgagaagcttccggccctaccacaccaccgacgacctccgcatgtcctcactgcctcccctcggcctggacccggccactgctgcagcctactaccaccccagctacctggccccacaccccttcccccacccggccttcaggatggacgactcctactgcctgtctgccctgaggtccccgttctaccccatccccacccccggctccctgcccccactgcacccatcagcgatgcacctgcacctctctggggtccgctaccctcccgagctctcccactcatccctggcagcgctgcactcggagcgcatgtctggcctcagcgcggagaggctgcagatggacgaggagctaaggcgggagagggagcgcgagcgcgagcgcgagcgtgagcgtgaggctgaccgcgagcgggagaaggaacgtgagcgcgaacgcgagaaggagcgcgagcaagagaaggagcgtgagcgtgagaaggagcgcgagcgcgagctggagcgccagcgggagcagcgggcccgggagaaggagctgctggccgccaaggccctggagcccagcttcctgcccgtggccgagctgcatgggctgcgtggccatgccactgaggagcggggcaagccctcggagcagctgaccccaacccgagcagagaagctgaaggatgccggcctgcaggcgcccaagcccgtccaacaccccttgcatccggtgcccaccccacaccacacggtgcccagcctcatctccaaccatggcatcttctctctgcctagcagcagtgctgccacagccctgctgatccagcgcaccaatgaggaggagaagtggctggcgcggcagcggcggctgcggcaggagaaggaggaccggcagtctcaggtgtccgagttccggcagcaggtgctggagcagcacctggatatgggccggcccccggtgccggcggaggcagagcacaggccggagagcaccaccaggccaggaccaaaccgtcacgagccaggtggccgtgaccctccgcagcactttggggggccaccacctctgatttcgcccaagccccagctccatgctgcacccacggccctctggaaccccgtgtccctgatggacaacaccttggagacgcggcgggccgaaagccactctctgcacagccacccggctgcatttgagcccagccgccaggcagccgtgccgctggtgaaggtggagcgggtcttctgcccggagaaagcagaggaggggccacggaagcgtgagcctgcccctctggacaagtaccagccacctccgccgccaccacgagagggagggagcctggagcaccagcccttcctgcccgggcccgggcccttcctggctgagctcgagaagtccacccagaccatcctgggccagcagcgggcctccctcccacaggcggccaccttcggggagctcagcggacccctgaagcctggctcgccctaccggcccccagtgccacgggcccccgaccctgcctacatctatgatgagttcctgcagcagcgccggaggctggtcagcaagctggacctggaggagcgcaggcggcgggaggcccaggagaaagggtactactacgacctcgatgactcttacgacgagagcgatgaggaggaggtcagggcccacctccgttgcgtggccgagcagccgcccctcaaactggacacgtcctctgagaagctagagtttttgcaactttttggcttgaccacccaacagcagaaggaggaattggtggcccagaagcggaggaagcggcggaggatgctgcgagagagaagcccgtcgcccccaacaattcagagcaagcggcagacgccttcaccgagactggcgctgtctacccgctacagccctgatgagatgaacaacagtcccaacttcgaagaaaagaagaagttcctgaccatcttcaacctgacccacatcagcgctgagaagaggaaagacaaagagagacttgttgaaatgctccgtgccatgaagcagaaggcactgtcagcagcagtggccgactccttgacaaactctccgagggacagtcctgccgtctccctgagtgaaccagccacgcagcaagcctctctggatgtggagaagccggttggtgttgctgcttccttgtctgacatcccaaaggccgcggagcctgggaagctggaacaggtccggccccaggagctgtcgagagtccaggagctagctcctgccagcggggagaaggccaggctgagcgaggcccctggaggcaaaaagagtctgagcatgcttcactatatccggggcgctgcacccaaggacattcctgtgccgctgtcccacagcaccaatgggaagagcaagccgtgggagccctttgtggcagaagagtttgcacatcagttccacgagtcagtgctgcagtccacccagaaggccctgcagaagcataaagggagcgtggctgtgctgtctgcagagcagaaccacaaggttgacacgtccgtccactacaacattcctgagctgcagtcctccagccgcgcccctccaccccagcacaatgggcagcaggagccccccactgcaaggaagggccccccaacccaggagttggaccgggactcggaggaggaggaagaggaggatgatgaagatggagaagatgaggaggaagtccccaagcgcaagtggcaagggatcgaggccgtttttgaagcttaccaggaacacatagaagagcaaaatctggagcggcaggtgttacagacacaatgtagacgactggaggcccggcactacagcctcagcctgacggcagagcagctctcccacagcgtggcggagttgaggagccagaaacagaagatggtctcagaacgggagcggctccaggcagaactggaccacttacgaaagtgccttgccttgcctgcaatgcactggcctaggggctacctgaagggatatcccaggtgacggtttcccttgcactaggccgaacctatagtatagaaatattatctattttattaccttgaatatttaatatttttcactgggaggtttgaagcttacaaaatgagaatgtgccatgcatgaagcaaaggattccaggctccagaaaaaatgaatgaactcaccttgacgtcaatgcaattgaatcaccgttgtcattcagcgagcaaccaatgtaggattgcccacagtttttctttttaaaggtggttttcgcccttcctctcccacattatttcttaatctgaacatgaaggctccattagcaacactaaaacttgatcattaacagccccctgtgcatatgagtggatcaaaccggttctgttctttcttgtgttgccatgttactatgcctcaagcccagtttgcttttgccgcagcgatggggccagtctcattcctccccaggagtgaaacttgcttcagctgaaaaggttgggtgcattgtcagtaaaaagggcttatttgtttcattttactttcctgcaaaattttcttcaaagcaacaagtcctaggagcacacaaagcaacccaaaggcttttccctggatccgtgggagatggccaaactttggtatcaccagttaaacccacagattggtctct

SEQ ID NO: 436248 - DNA, 2549 bp, Homo sapiens
ggaggtggttgggggcagaccagcaccttcggcccaggggcagtgccagcttcctttgcccctgccctccacgtgggcaccagggccaggacatctgcggccaggtgggcagctgtcggcgcagttgacgtcttggctacatcgtggcactcgcttcacggcgtgctgggtgccaacggtgtctgcttccccgggtgtgtgtctggtgtgaccttcggatgtccacaccaggaggggtggaggcaggagcccctgccaccctgcatccttcacctgcacacattgtgtttctggggggttctagttcttttgctggactgaggaggcccagggagggagacggatcccgagacgcacttcaccccagacctgtcgcagccacatcccctttcttacggttctgcttcccacaccacatgcaccatgttttgcgtagaaagccttagggaaaggatgtttctagaacatgaactaaatctagcgccttcccgtgagtcaggagacctggctgtgtcctgtggtcagtggcctataccaggctcctgccctgactggacgctctcctcccgcaggatgccggctccaggagcagcagtggaggtcgggaacgcctcattgtggagcccccgctccctcaggagaaggcagggggaccagccatcccctcgcacctgctcagcaccccctaccccttcggcctctcccccagctcagttgtgcaggattcccgcttcccgccactcaacctccagcggcccgtgcaccacgtggtgccccccagtaccgtgaccgaggactacctgagaagcttccggccctaccacaccaccgacgacctccgcatgtcctcactgcctcccctcggcctggacccggccactgctgcagcctactaccaccccagctacctggccccacaccccttcccccacccggccttcaggatggacgactcctactgcctgtctgccctgaggtccccgttctaccccatccccacccccggctccctgcccccactgcacccatcagcgatgcacctgcacctctctggggtccgctaccctcccgagctctcccactcatccctggcagcgctgcactcggagcgcatgtctggcctcagcgcggagaggctgcagatggacgaggagctaaggcgggagagggagcgcgagcgcgagcgcgagcgtgagcgtgaggctgaccgcgagcgggagaaggaacgtgagcgcgaacgcgagaaggagcgcgagcaagagaaggagcgtgagcgtgagaaggagcgcgagcgcgagctggagcgccagcgggagcagcgggcccgggagaaggagctgctggccgccaaggccctggagcccagcttcctgcccgtggccgagctgcatgggctgcgtggccatgccactgaggagcggggcaagccctcggagcagctgaccccaacccgagcagagaagctgaaggatgccggcctgcaggcgcccaagcccgtccaacaccccttgcatccggtgcccaccccacaccacacggtgcccagcctcatctccaaccatggcatcttctctctgcctagcagcagtgctgccacagccctgctgatccagcgcaccaatgaggaggagaagtggctggcgcggcagcggcggctgcggcaggagaaggaggaccggcagtctcaggtgtccgagttccggcagcaggtgctggagcagcacctggatatgggccggcccccggtgccggcggaggcagagcacaggccggagagcaccaccaggccaggaccaaaccgtcacgagccaggtggccgtgaccctccgcagcactttggggggccaccacctctgatttcgcccaagccccagctccatgctgcacccacggccctctggaaccccgtgtccctgatggacaacaccttggagacgcggcgggccgaaagccactctctgcacagccacccggctgcatttgagcccagccgccaggcagccgtgccgctggtgaaggtggagcgggtcttctgcccggagaaagcagaggaggggccacggaagcgtgagcctgcccctctggacaagtaccagccacctccgccgccaccacgagagggagggagcctggagcaccagcccttcctgcccgggcccgggcccttcctggctgagctcgagaagtccacccagaccatcctgggccagcagcgggcctccctcccacaggcggccaccttcggggagctcagcggacccctgaagcctggctcgccctaccggcccccagtgccacgggcccccgaccctgcctacatctatgatgagttcctgcagcagcgccggaggctggtcagcaagctggacctggaggagcgcaggcggcgggaggcccaggagaaagggtactactacgacctcgatgactcttacgacgagagcgatgaggaggaggtcagggcccacctccgttgcgtggccgagcagccgcccctcaaactggacacgtcctctgaggtactgggctctcctccccacggacatgct

SEQ ID NO: 436249 - DNA, 970 bp, Homo sapiens
gaagtggactgggtggctgcgccggaagtggcgcgcggccggacaactcatggcggcggcggcggcggcggcagctgcttgggcgcggtgcggtggtgactgagctacgagcctggcggcgggtgtgcgccgagccccggcccggcccggccctcgcgtgcctcccaggctccgcacccctgatgctgcgcgggtgctgagcccgcttcggccgggacgatggtgaagtatttcctgggccagagcgtgctccggagttcctgggaccaagtgttcgccgccttctggcagcggtacccgaatccctatagcaaacatgtcttgacggaagacatagtacaccgggaggtgacccctgaccagaaactgctgtcccggcgactcctgaccaagaccaacaggatgccacgctgggccgagcgactatttcctgccaatgttgctcactcggtgtacgtcctggaggactctattgtggacccacagaatcagaccatgactaccttcacctggaacatcaaccacgcccggctgatggtggtggaggaacgatgtgtttactgtgtgaactctgacaacagtggctggactgaaatccgccgggaagcctgggtctcctctagcttatttggtgtctccagagctgtccaggaatttggtcttgcccggttcaaaagcaacgtgaccaagactatgaagggttttgaatatatcttggctaagctgcaaggcgaggccccttccaaaacacttgttgagacagccaaggaagccaaggagaaggcaaaggagacggcactggcagctacagagaaggccaaggacctcgccagcaaggcggccaccaagaagcagcagcagcagcaacagtttgtgtagccagtctaccaccaccacagcaccccagacagctaggcttagcccctctgccctcccttcattgtactttatcattaaaaatcaacttcca

SEQ ID NO: 436250 - DNA, 957 bp, Homo sapiens
gacccacgcgtcgcccacgcgtcgctcatggcggcggcggcggcggcggcggcggcggcagctgcttgggcgcggtgcggtggtgactgagctacgagcctggcggcgggtgtgcgccgagccccggcccggcccggccctcgcgtgcctcccaggctccgcacccctgatgctgcgcgggtgctgagcccgcttcggccgggacgatggtgaagtatttcctgggccagagcgtgctccggagttcctgggaccaagtgttcgccgccttctggcagcggtacccgaatccctatagcaaacatgtcttgacggaagacatagtacaccgggaggtgacccctgaccagaaactgctgtcccggcgactcctgaccaagaccaacaggatgccacgctgggccgagcgactatttcctgccaatgttgctcactcggtgtacgtcctggaggactctattgtggacccacagaatcagaccatgactaccttcacctggaacatcaaccacgcccggctgatggtggtggaggaacgatgtgtttactgtgtgaactctgacaacagtggctggactgaaatccgccgggaagcctgggtctcctctagcttatttggtgtctccagagctgtccaggaatttggtcttgcccggttcaaaagcaacgtgaccaagactatgaagggttttgaatatatcttggctaagctgcaaggcgaggccccttccaaaacacttgttgagacagccaaggaagccaaggagaaggcaaaggagacggcactggcagctacagagaaggccaaggacctcgccagcaaggcggccaccaagaagcagcagcagcagcaacagtttgtgtagccagtctaccaccaccacagcaccccagacagctaggcttagcccctctgccctcccttcattgtactttatcattaaaaatcaacttcca

SEQ ID NO: 436251 - DNA, 340 bp, Homo sapiens
  misc_feature (21)..(21): n is a, c, g, or t
cactatcaaaactgccacagnaaatagtctccacaaatatcctaatcccagcacacctcgtgggaaaaaaaagaaggctttgccagcatctgagaccccaaaagctgcagagtctgcagacccccagggaaagccaaggaagccaaggagaaggcaaaggagacggcactggcagctacagagaaggccaaggacctcgccagcaaggcggccaccaagaagcagcagcagcagcaacagtttgtgtagccagtctaccaccaccacagcaccccagacagctaggcttagcccctctgccctcccttcattgtactttatcattaaaaatcaacttcca

SEQ ID NO: 436252 - DNA, 1248 bp, Homo sapiens
ttaggctaggtacgaggctgggtgttgctcatggcggcggcggcggcggcggcggcggcggcagctgcttgggcgcggtgcggtggtgactgagctacgagcctggcggcgggtgtgcgccgagccccggcccggcccggccctcgcgtgcctcccaggctccgcacccctgatgctgcgcgggtgctgagcccgcttcggccgggacgatggtgaagtatttcctgggccagagcgtgctccggagttcctgggaccaagtgttcgccgccttctggcagcggtacccgaatccctatagcaaacatgtcttgacggaagacatagtacaccgggaggtgacccctgaccagaaactgctgtcccggcgactcctgaccaagaccaacaggatgccacgctgggccgagcgactatttcctgccaatgttgctcactcggtgtacgtcctggaggactctattgtggacccacagaatcagaccatgactaccttcacctggaacatcaaccacgcccggctgatggtggtggaggaacgatgtgtttactgtgtgaactctgacaacagtggctggactgaaatccgccgggaagcctgggtctcctctagcttatttggtgtctccagagctgtccaggaatttggtcttgcccggttcaaaagcaacgtgaccaagactatgaagggttttgaatatatcttggctaagctgcaaggcgaggccccttccaaaacacttgttgagacagccaaggaagccaaggagaaggcaaaggagacggcactggcagctacagagaaggccaaggacctcgccagcaaggcggccaccaagaagcagcagcagcagcaacagtttgtgtagccagtctaccaccaccacagcaccccagacagctaggcttagcccctctgccctcccttcattgtactttatcattaaaaatcaacttccagccctgtctgctgtctacgtggtgggttgtggggatgcagtttggcatctgcagtacaccaagcacatgattcatgtctgagccaggtctgcttattctcccattgggcagctgaggaccgaggcacagaggtgcggtgacttgcccggggctccaggtagcctgcaggttaactggcggtaagtgctagactgtaagcccgacaagggcagggcttttggttttgttctctgatgtgtctcagtatctagcacataatagacactcaataaatacttgttgaattca

SEQ ID NO: 436253 - DNA, 843 bp, Homo sapiens
  misc_feature (798)..(798): n is a, c, g, or t
  misc_feature (807)..(807): n is a, c, g, or t
  misc_feature (812)..(813): n is a, c, g, or t
gaagtggactgggtggctgcgccggaagtggcgcgcggccggacaactcatggcggcggcggcggcggcggcagctgcttgggcgcggtgcggtggtgactgagctacgagcctggcggcgggtgtgcgccgagccccggcccggcccggccctcgcgtgcctcccaggctccgcacccctgatgctgcgcgggtgctgagcccgcttcggccgggacgatggtgaagtatttcctgggccagagcgtgctccggagttcctgggaccaagtgttcgccgccttctggcagcggtacccgaatccctatagcaaacatgtcttgacggaagacatagtacaccgggaggtgacccctgaccagaaactgctgtcccggcgactcctgaccaagaccaacaggatgccacgctgggccgagcgactatttcctgccaatgttgctcactcggtgtacgtcctggaggactctattgtggacccacagaatcagaccatgactaccttcacctggaacatcaaccacgcccggctgatggtggtggaggaacgatgtgtttactgtgtgaactctgacaacagtggctggactgaaatccgccgggaagcctgggtctcctctagcttatttggtgtctccagagctgtccaggaatttggtcttgcccggttcaaaagcaacgtgaccaagactatgaagggttttgaatatatcttggctaagctgcaaggcgaggccccttccaaaacacttgttgagacagccaaggaagccaaggagaaggaacggctggagtangaaagcagnctccnngggcccaaaaaggcgagttggttcgttccc

SEQ ID NO: 436254 - DNA, 857 bp, Homo sapiens
gaagtggactgggtggctgcgccggaagtggcgcgcggccggacaactcatggcggcggcggcggcggcggcagctgcttgggcgcggtgcggtggtgactgagctacgagcctggcggcgggtgtgcgccgagccccggcccggcccggccctcgcgtgcctcccaggctccgcacccctgatgctgcgcgggtgctgagcccgcttcggccgggacgatggtgaagtatttcctgggccagagcgtgctccggagttcctgggaccaagtgttcgccgccttctggcagcggtacccgaatccctatagcaaacatgtcttgacggaagacatagtacaccgggaggtgacccctgaccagaaactgctgtcccggcgactcctgaccaagaccaacaggatgccacgctgggccgagcgactatttcctgccaatgttgctcactcggtgtacgtcctggaggactctattgtggacccacagaatcagaccatgactaccttcacctggaacatcaaccacgcccggctgatggtggtggaggaacgatgtgtttactgtgtgaactctgacaacagtggctggactgaaatccgccgggaagcctgggtctcctctagcttatttggtgtctccagagctgtccaggaatttggtcttgcccggttcaaaagcaacgtgaccaagactatgaagggttttgaatatatcttggctaagctgcaaggcgaggccccttccaaaacacttgttgagacagtagccagtctaccaccaccacagcaccccagacagctaggcttagcccctctgccctcccttcattgtactttatcattaaaaatcaacttcca

SEQ ID NO: 436255 - DNA, 1225 bp, Homo sapiens
gaagtggactgggtggctgcgccggaagtggcgcgcggccggacaactcatggcggcggcggcggcggcggcagctgcttgggcgcggtgcggtggtgactgagctacgagcctggcggcgggtgtgcgccgagccccggcccggcccggccctcgcgtgcctcccaggctccgcacccctgatgctgcgcgggtgctgagcccgcttcggccgggacgatggtgaagtatttcctgggccagagcgtgctccggagttcctgggaccaagtgttcgccgccttctggcagcggtacccgaatccctatagcaaacatgtcttgacggaagacatagtacaccgggaggtgacccctgaccagaaactgctgtcccggcgactcctgaccaagaccaacaggatgccacgctgggccgagcgactatttcctgccaatgttgctcactcggtgtacgtcctggaggactctattgtggacccacagaatcagaccatgactaccttcacctggaacatcaaccacgcccggctgatggtggtggaggaacgatgtgtttactgtgtgaactctgacaacagtggctggactgaaatccgccgggaagcctgggtctcctctagcttatttggtgtctccagagctgtccaggaatttggtcttgcccggttcaaaagcaacgtgaccaagactatgaagggttttgaatatatcttggctaagctgcaagccaaggaagccaaggagaaggcaaaggagacggcactggcagctacagagaaggccaaggacctcgccagcaaggcggccaccaagaagcagcagcagcagcaacagtttgtgtagccagtctaccaccaccacagcaccccagacagctaggcttagcccctctgccctcccttcattgtactttatcattaaaaatcaacttccagccctgtctgctgtctacgtggtgggttgtggggatgcagtttggcatctgcagtacaccaagcacatgattcatgtctgagccaggtctgcttattctcccattgggcagctgaggaccgaggcacagaggtgcggtgacttgcccggggctccaggtagcctgcaggttaactggcggtaagtgctagactgtaagcccgacaagggcagggcttttggttttgttctctgatgtgtctcagtatctagcacataatagacactcaataaatacttgttgaattca

SEQ ID NO: 436256 - DNA, 802 bp, Homo sapiens
gaagtggactgggtggctgcgccggaagtggcgcgcggccggacaactcatggcggcggcggcggcggcggcagctgcttgggcgcggtgcggtggtgactgagctacgagcctggcggcgggtgtgcgccgagccccggcccggcccggccctcgcgtgcctcccaggctccgcacccctgatgctgcgcgggtgctgagcccgcttcggccgggacgatggtgaagtatttcctgggccagagcgtgctccggagttcctgggaccaagtgttcgccgccttctggcagcggtacccgaatccctatagcaaacatgtcttgacggaagacatagtacaccgggaggtgacccctgaccagaaactgctgtcccggcgactcctgaccaagaccaacaggatgccacgctgggccgagcgactatttcctgccaatgttgctcactcggtgtacgtcctggaggactctattgtggacccacagaatcagaccatgactaccttcacctggaacatcaaccacgcccggctgatggtggtggaggaacgatgtgtttactgtgtgaactctgacaacagtggctggactgaaatccgccgggaagcctgggtctcctctagcttatttggtgtctccagagctgtccaggaatttggtcttgcccggttcaaaagcaacgtgaccaagaccggaatatccgggcaagccgcagggaaggcccttcccactggtggacacgcaggagccagggaagggcggaacggccggcccccggcgggccccaaggggccccgggccc

SEQ ID NO: 436257 - DNA, 930 bp, Homo sapiens
gaagtggactgggtggctgcgccggaagtggcgcgcggccggacaactcatggcggcggcggcggcggcggcagctgcttgggcgcggtgcggtggtgactgagctacgagcctggcggcgggtgtgcgccgagccccggcccggcccggccctcgcgtgcctcccaggctccgcacccctgatgctgcgcgggtgctgagcccgcttcggccgggacgatggtgaagtatttcctgggccagagcgtgctccggagttcctgggaccaagtgttcgccgccttctggcagcggtacccgaatccctatagcaaacatgtcttgacggaagacatagtacaccgggaggtgacccctgaccagaaactgctgtcccggcgactcctgaccaagaccaacaggatgccacgctgggccgagcgactatttcctgccaatgttgctcactcggtgtacgtcctggaggactctattgtggacccacagaatcagaccatgactaccttcacctggaacatcaaccacgcccggctgatggtggtggaggaacgatgtgtttactgtgtgaactctgacaacagtggctggactgaaatccgccgggaagcctgggtctcctctagcttatttggtgtctccagagctgtccagctatgaagggttttgaatatatcttggctaagctgcaaggcgaggccccttccaaaacacttgttgagacagccaaggaagccaaggagaaggcaaaggagacggcactggcagctacagagaaggccaaggacctcgccagcaaggcggccaccaagaagcagcagcagcagcaacagtttgtgtagccagtctaccaccaccacagcaccccagacagctaggcttagcccctctgccctcccttcattgtactttatcattaaaaatcaacttcca

SEQ ID NO: 436258 - DNA, 630 bp, Homo sapiens
gaagtggactgggtggctgcgccggaagtggcgcgcggccggacaactcatggcggcggcggcggcggcggcagctgcttgggcgcggtgcggtggtgactgagctacgagcctggcggcgggtgtgcgccgagccccggcccggcccggccctcgcgtgcctcccaggctccgcacccctgatgctgcgcgggtgctgagcccgcttcggccgggacgatggtgaagtatttcctgggccagagcgtgctccggagttcctgggaccaagtgttcgccgccttctggcagcggtacccgaatccctatagcaaacatgtcttgacggaagacatagtacaccgggaggtgacccctgaccagaaactgctgtcccggcgactcctgaccaagaccaacaggatgccacgctgggccgagcgactatttcctgccaatgttgctcactcggtgtacgtcctggaggactctattgtggacccacagaatcagaccatgactaccttcacctggaacatcaaccacgcccggctgatggtgagacacctcctgttgtgattctgcacctccccctctcccctccccccgagatagagagctcctcagatacatgtggctagagagccataa

SEQ ID NO: 436259 - DNA, 639 bp, Homo sapiens
  misc_feature (25)..(28): n is a, c, g, or t
cttcctcagtgggcttttcatatgnnnnagctgttcacgagttgggttttgccccaacccaccccccctgtcctatgaagggttttgaatatatcttggctaagctgcaaggcgaggccccttccaaaacacttgttgagacagccaaggaagccaaggagaaggcaaaggagacggcactggcagctacagagaaggccaaggacctcgccagcaaggcggccaccaagaagcagcagcagcagcaacagtttgtgtagccagtctaccaccaccacagcaccccagacagctaggcttagcccctctgccctcccttcattgtactttatcattaaaaatcaacttccagccctgtctgctgtctacgtggtgggttgtggggatgcagtttggcatctgcagtacaccaagcacatgattcatgtctgagccaggtctgcttattctcccattgggcagctgaggaccgaggcacagaggtgcggtgacttgcccggggctccaggtagcctgcaggttaactggcggtaagtgctagactgtaagcccgacaagggcagggcttttggttttgttctctgatgtgtctcagtatctagcacataatagacactcaataaatacttgttgaattca

SEQ ID NO: 436260 - DNA, 1258 bp, Homo sapiens
gaagtggactgggtggctgcgccggaagtggcgcgcggccggacaactcatggcggcggcggcggcggcggcagctgcttgggcgcggtgcggtggtgactgagctacgagcctggcggcgggtgtgcgccgagccccggcccggcccggccctcgcgtgcctcccaggctccgcacccctgatgctgcgcgggtgctgagcccgcttcggccgggacgatggtgaagtatttcctgggccagagcgtgctccggagttcctgggaccaagtgttcgccgccttctggcagcggtacccgaatccctatagcaaacatgtcttgacggaagacatagtacaccgggaggtgacccctgaccagaaactgctgtcccggcgactcctgaccaagaccaacaggatgccacgctgggccgagcgactatttcctgccaatgttgctcactcggtgtacgtcctggaggactctattgtggacccacagaatcagaccatgactaccttcacctggaacatcaaccacgcccggctgatggtggtggaggaacgatgtgtttactgtgtgaactctgacaacagtggctggactgaaatccgccgggaagcctgggtctcctctagcttatttggtgtctccagagctgtccaggaatttggtcttgcccggttcaaaagcaacgtgaccaagactatgaagggttttgaatatatcttggctaagctgcaaggcgaggccccttccaaaacacttgttgagacagccaaggaagccaaggagaaggcaaaggagacggcactggcagctacagagaaggccaaggacctcgccagcaaggcggccaccaagaagcagcagcagcagcaacagtttgtgtagccagtctaccaccaccacagcaccccagacagctaggcttagcccctctgccctcccttcattgtactttatcattaaaaatcaacttccagccctgtctgctgtctacgtggtgggttgtggggatgcagtttggcatctgcagtacaccaagcacatgattcatgtctgagccaggtctgcttattctcccattgggcagctgaggaccgaggcacagaggtgcggtgacttgcccggggctccaggtagcctgcaggttaactggcggtaagtgctagactgtaagcccgacaagggcagggcttttggttttgttctctgatgtgtctcagtatctagcacataatagacactcaataaatacttgttgaattca

SEQ ID NO: 436261 - DNA, 956 bp, Homo sapiens
ttaggctaggtacgaggctgggtgttgctcatggcggcggcggcggcggcggcggcggcggcagctgcttgggcgcggtgcggtggtgactgagctacgagcctggcggcgggtgtgcgccgagccccggcccggcccggccctcgcgtgcctcccaggctccgcacccctgatgctgcgcgggtgctgagcccgcttcggccgggacgatggtgaagtatttcctgggccagagcgtgctccggagttcctgggaccaagtgttcgccgccttctggcagcggtacccgaatccctatagcaaacatgtcttgacggaagacatagtacaccgggaggtgacccctgaccagaaactgctgtcccggcgactcctgaccaagaccaacaggatgccacgctgggccgagcgactatttcctgccaatgttgctcactcggtgtacgtcctggaggactctattgtggacccacagaatcagaccatgactaccttcacctggaacatcaaccacgcccggctgatggtggtggaggaacgatgtgtttactgtgtgaactctgacaacagtggctggactgaaatccgccgggaagcctgggtctcctctagcttatttggtgtctccagagctgtccaggaatttggtcttgcccggttcaaaagcaacgtgaccaagactatgaagggttttgaatatatcttggctaagctgcaaggcgaggccccttccaaaacacttgttgagacagccaaggaagccaaggagaaggcaaaggagacggcactggcagctacagagaaggccaaggacctcgccagcaaggcggccaccaagaagcagcagcagcagcaacagtttgtgtctacaccaccaagacccgaagtaggtagcccttgcctcctattgtctttcttaaataaatcagccggtggtgtactgtggtggggggca

SEQ ID NO: 436262 - DNA, 1420 bp, Homo sapiens
  misc_feature (1378)..(1378): n is a, c, g, or t
  misc_feature (1404)..(1405): n is a, c, g, or t
gaagtggactgggtggctgcgccggaagtggcgcgcggccggacaactcatggcggcggcggcggcggcggcagctgcttgggcgcggtgcggtggtgactgagctacgagcctggcggcgggtgtgcgccgagccccggcccggcccggccctcgcgtgcctcccaggctccgcacccctgatgctgcgcgggtgctgagcccgcttcggccgggacgatggtgaagtatttcctgggccagagcgtgctccggagttcctgggaccaagtgttcgccgccttctggcagcggtacccgaatccctatagcaaacatgtcttgacggaagacatagtacaccgggaggtgacccctgaccagaaactgctgtcccggcgactcctgaccaagaccaacaggatgccacgctgggccgagcgactatttcctgccaatgttgctcactcggtgtacgtcctggaggactctattgtggacccacagaatcagaccatgactaccttcacctggaacatcaaccacgcccggctgatggtggtggaggaacgatgtgtttactgtgtgaactctgacaacagtggctggactgaaatccgccgggaagcctgggtctcctctagcttatttggtgtctccagagctgtccaggaatttggtcttgcccggttcaaaagcaacgtgaccaagactatgaagggttttgaatatatcttggctaagctgcaaggcgaggccccttccaaaacacttgttgagacagccaaggaagccaaggagaaggcaaaggagacggcactggcagctacagagaaggccaaggacctcgccagcaaggcggccaccaagaagcagcagcagcagcaacagtttgtgtagccagtctaccaccaccacagcaccccagacagctaggcttagcccctctgccctcccttcattgtactttatcattaaaaatcaacttccagccctgtctgctgtctacgtggtgggttgtggggatgcagtttggcatctgcagtacaccaagcacatgattcatgtctgagccaggtctgcttattctcccattgggcagctgaggaccgaggcacagaggtgcggtgacttgcccggggctccaggtagcctgcaggttaactggcggtaagtgctagactgtaagcccgacaagggcagggcttttggttttgttctctgatgtgtctcagtatctagcacataatagacactcaataaatacttgttgaattcaaaaaaaaaaaaagaaaaaaaaaaaaatggggggcgccttgggccaattaattttagatcaagcaaccttttcttgcggcccaattttagctcccttggcccatcgccctaataggggcgnttaaaaccacctggcccgcggttacnnggggggcgggggccc

SEQ ID NO: 436263 - DNA, 966 bp, Homo sapiens
gaagtggactgggtggctgcgccggaagtggcgcgcggccggacaactcatggcggcggcggcggcggcggcagctgcttgggcgcggtgcggtggtgactgagctacgagcctggcggcgggtgtgcgccgagccccggcccggcccggccctcgcgtgcctcccaggctccgcacccctgatgctgcgcgggtgctgagcccgcttcggccgggacgatggtgaagtatttcctgggccagagcgtgctccggagttcctgggaccaagtgttcgccgccttctggcagcggtacccgaatccctatagcaaacatgtcttgacggaagacatagtacaccgggaggtgacccctgaccagaaactgctgtcccggcgactcctgaccaagaccaacaggatgccacgctgggccgagcgactatttcctgccaatgttgctcactcggtgtacgtcctggaggactctattgtggacccacagaatcagaccatgactaccttcacctggaacatcaaccacgcccggctgatggtggtggaggaacgatgtgtttactgtgtgaactctgacaacagtggctggactgaaatccgccgggaagcctgggtctcctctagcttatttggtgtctccagagctgtccaggaatttggtcttgcccggttcaaaagcaacgtgaccaagactatgaagggttttgaatatatcttggctaagctgcaaggcgaggccccttccaaaacacttgttgagacagccaaggaagccaaggagaaggcaaaggagacggcactggcagctacagagaaggccaaggacctcgccagcaaggcggccaccaagaagcagcagcagcagcaacagtttgtgtctacaccaccaagacccgaagtaggtagcccttgcctcctattgtctttcttaaataaatcagccggtggtgtactgtggtggggggca

SEQ ID NO: 436264 - DNA, 1319 bp, Homo sapiens
gaagtggactgggtggctgcgccggaagtggcgcgcggccggacaactcatggcggcggcggcggcggcggcagctgcttgggcgcggtgcggtggtgactgagctacgagcctggcggcgggtgtgcgccgagccccggcccggcccggccctcgcgtgcctcccaggctccgcacccctgatgctgcgcgggtgctgagcccgcttcggccgggacgatggtgaagtatttcctgggccagagcgtgctccggagttcctgggaccaagtgttcgccgccttctggcagcggtacccgaatccctatagcaaacatgtcttgacggaagacatagtacaccgggaggtgacccctgaccagaaactgctgtcccggcgactcctgaccaagaccaacaggatgccacgctgggccgagcgactatttcctgccaatgttgctcactcggtgtacgtcctggaggactctattgtggacccacagaatcagaccatgactaccttcacctggaacatcaaccacgcccggctgatggtggtggaggaacgatgtgtttactgtgtgaactctgacaacagtggctggactgaaatccgccgggaagcctgggtctcctctagcttatttggtgtctccagagctgtccaggaatttggtcttgcccggttcaaaagcaacgtgaccaagactatgaagggttttgaatatatcttggctaagctgcaaagggaaattaggttggtctttcaggcatcttctaaaggcagccacctgccgttcgcgacagggcgaggccccttccaaaacacttgttgagacagccaaggaagccaaggagaaggcaaaggagacggcactggcagctacagagaaggccaaggacctcgccagcaaggcggccaccaagaagcagcagcagcagcaacagtttgtgtagccagtctaccaccaccacagcaccccagacagctaggcttagcccctctgccctcccttcattgtactttatcattaaaaatcaacttccagccctgtctgctgtctacgtggtgggttgtggggatgcagtttggcatctgcagtacaccaagcacatgattcatgtctgagccaggtctgcttattctcccattgggcagctgaggaccgaggcacagaggtgcggtgacttgcccggggctccaggtagcctgcaggttaactggcggtaagtgctagactgtaagcccgacaagggcagggcttttggttttgttctctgatgtgtctcagtatctagcacataatagacactcaataaatacttgttgaattca

SEQ ID NO: 436265 - DNA, 1369 bp, Homo sapiens
  misc_feature (660)..(660): n is a, c, g, or t
  misc_feature (662)..(662): n is a, c, g, or t
  misc_feature (664)..(664): n is a, c, g, or t
  misc_feature (697)..(697): n is a, c, g, or t
  misc_feature (701)..(701): n is a, c, g, or t
  misc_feature (704)..(704): n is a, c, g, or t
gaagtggactgggtggctgcgccggaagtggcgcgcggccggacaactcatggcggcggcggcggcggcggcagctgcttgggcgcggtgcggtggtgactgagctacgagcctggcggcgggtgtgcgccgagccccggcccggcccggccctcgcgtgcctcccaggctccgcacccctgatgctgcgcgggtgctgagcccgcttcggccgggacgatggtgaagtatttcctgggccagagcgtgctccggagttcctgggaccaagtgttcgccgccttctggcagcggtacccgaatccctatagcaaacatgtcttgacggaagacatagtacaccgggaggtgacccctgaccagaaactgctgtcccggcgactcctgaccaagaccaacaggatgccacgctgggccgagcgactatttcctgccaatgttgctcactcggtgtacgtcctggaggactctattgtggacccacagaatcagaccatgactaccttcacctggaacatcaaccacgcccggctgatggtggtggaggaacgatgtgtttactgtgtgaactctgacaacagtggctggactgaaatccgccgggaagcctgggtctcctctagcttatttggtgtctccagagctgtccaggtgagcagngngntggggctgctggggctctgggacccagtgcttncggngtnggggctgggctggggtcagtgggcaacctcagtatctttccattctcatctcatgccagaatttggtcttgcccggttcaaaagcaacgtgaccaagactatgaagggttttgaatatatcttggctaagctgcaaggcgaggccccttccaaaacacttgttgagacagccaaggaagccaaggagaaggcaaaggagacggcactggcagctacagagaaggccaaggacctcgccagcaaggcggccaccaagaagcagcagcagcagcaacagtttgtgtagccagtctaccaccaccacagcaccccagacagctaggcttagcccctctgccctcccttcattgtactttatcattaaaaatcaacttccagccctgtctgctgtctacgtggtgggttgtggggatgcagtttggcatctgcagtacaccaagcacatgattcatgtctgagccaggtctgcttattctcccattgggcagctgaggaccgaggcacagaggtgcggtgacttgcccggggctccaggtagcctgcaggttaactggcggtaagtgctagactgtaagcccgacaagggcagggcttttggttttgttctctgatgtgtctcagtatctagcacataatagacactcaataaatacttgttgaattca

SEQ ID NO: 436266 - DNA, 798 bp, Homo sapiens
gaagtggactgggtggctgcgccggaagtggcgcgcggccggacaactcatggcggcggcggcggcggcggcagctgcttgggcgcggtgcggtggtgactgagctacgagcctggcggcgggtgtgcgccgagccccggcccggcccggccctcgcgtgcctcccaggctccgcacccctgatgctgcgcgggtgctgagcccgcttcggccgggacgatggtgaagtatttcctgggccagagcgtgctccggagttcctgggaccaagtgttcgccgccttctggcagcggtacccgaatccctatagcaaacatgtcttgacggaagacatagtacaccgggaggtgacccctgaccagaaactgctgtcccggcgactcctgaccaagaccaacaggatgccacgctgggccgagcgactatttcctgccaatgttgctcactcggtgtacgtcctggaggactctattgtggacccacagaatcagaccatgactaccttcacctggaacatcaaccacgcccggctgatggtggtggaggaacgatgtgtttactgtgtgaactctgacaacagtggctggactgaaatccgccgggaagcctgggtctcctctagcttatttggtgtctccagagctgtccagtgtagcagtgttgttgtcggctgctcggggctctgtcgacccaggtgcttttcgatgttcggggcgtgggctgggggtcatgtagggcaatctcaccactgttgcttcactgtttgagttagggtacctgctgctcgaagttcagta

SEQ ID NO: 436267 - DNA, 434 bp, Homo sapiens
gtttactgtgtgaactctgacaacagtggctggactgaaatccgccgggaagcctgggtctcctctagcttatttggtgtctccagagctgtccaggaatttggtcttgcccggttcaaaagcaacgtgaccaagactatgaagggttttgaatatatcttggctaagctgcaaggcgaggccccttccaaaacacttgttgagacagccaaggaagccaaggagaaggcaaaggagacggcactggcagctacagagaaggccaaggacctcgccagcaaggcggccaccaagaagcagcagcagcagcaacagtttgtgtagccagtctaccaccaccacagcaccccagacagctaggcttagcccctctgccctcccttcattgtactttatcattaaaaatcaacttccaaaaaaaaaaaaaaaaaaga

SEQ ID NO: 436268 - DNA, 7991 bp, Homo sapiens
  misc_feature (1531)..(1531): n is a, c, g, or t
tgatggcggcggcgctggggcccccagaagtgatcgctcagctggagaacgcggctaaagttctgatggcaccaccttccatggtcaataatgaacaacgccagcatgcagagcacatattcttatcatttaggaaatcaaaatcaccatttgcagtttgcaagcatattttggaaactagtaaagtggactatgtcctctttcaagctgccacagccataatggaagcagttgtccgagagtggattctcttggaaaaaggtagcatcgagtctctgcgaacattccttttaacctatgtcttacaaaggcccaaccttcaaaagtatgttcgggaacagattctactagcagtagcagtaattgtaaaaagaggatcattagataaatcaattgactgcaaaagcatttttcatgaagtcagccagttgattagtagtggcaatcccactgtgcaaactctggcctgttctattctgactgcgctattgagtgaattttcaagttcaagtaaaactagcaacattggattgagcatggaattccatggtaactgcaaaagagtttttcaggaagaagaccttcgtcagatcttcatgttaactgttgaagttctgcaggagttcagcaggcgggaaaacctcaatgctcagatgtcttcagtatttcagcgttaccttgcactcgccaatcaagtcttgagctggaactttcttcctccaaatttgggcagacattatatagctatgtttgaatcctcgcaaaatgtgctgttgaagccaacagagtcctggcgggagactcttctggacagcagagttatggagcttttcttcacagtacatcgaaaaatcagagaagattcagatatggcacaagattctctgcagtgccttgcccagttagcttctcttcatggacccatcttcccagatgaaggatcacaagttgattatctagcacacttcattgagggattactgaatactatcaatggaattgaaatagaagattctgaagctgtggggatctccagcattatcagcaacctgataaccgtgttcccacgaaatgttttaactgccattccaagtgaacttttctcctcctttgttaactgcctcacacacctcacttgttcttttgggcgaagtgctgcattggaagaagtgcttgataaagatgacatggtatacatggaagcatatgataaattgttggagtcctggttaactttggttcaagatgacaaacatttccataaaggcttttttacccaacatgcagttcaagttttcaattcctatattcagtgccacctagctgctccagatggcacaagaaatttgactgccaatggtgtggcctctcgtgaggaggaagaaataagtgaacttcaagaggatgatcgagaccagttttctgatcaactggccagtgtaggaatgctaggaagaattgctgcagaacactgtatacctcttctgacaagtttattagaagaaagagtaacaagactccatggtcagtnacaacgacatcagcaacagttacttgcttcaccgggttcaagcactgttgacaacaaaatgcttgatgatctctatgaagatattcactggcttattttagttacaggctacctcttagctgatgatactcagggagagactccgctaatacctccagaaataatggaatattccattaagcattcatctgaagttgacattaatacaacacttcaaattttgggatctccaggagaaaaggcttcttccatcccagggtacaacagaacagattctgtgattaggctgttgtctgccattctcagagtttcagaagttgaatctcgagcaataagagcagatctcactcatctactaagtccccagatgggcaaagatattgtttggtttttaaaacgctgggcaaagacttatctcctggtggatgaaaaactgtatgatcagataagtctgccattcagtacagcgttcggagcagatacagagggttctcagtggataattggctacctcttacaaaaagtcatcagtaacctctcagtctggagtagtgagcaggaccttgcaaatgacactgtgcagctccttgtcactttggtggaaagaagagaaagggcaaacttagtaattcaatgtgagaactggtggaatttagctaagcagtttgcaagccgaagcccacctcttaatttcttgtcaagtcctgtgcagaggacattgatgaaggctctagtcttaggaggttttgcacatatggacacagaaaccaaacagcagtattggacagaggttcttcagccacttcagcagcgattcttaagagtgataaaccaagaaaacttccagcagatgtgtcagcaagaggaagtcaagcaggaaatcactgccacactagaggccctgtgtggcattgctgaggctacccagattgacaacgtagcaatcctgtttaattttttaatggacttccttaccaattgcattggattgatggaagtttacaagaataccccagagactgtcaatctcattatagaagtttttgttgaagttgcacataaacagatatgctatcttggagagtccaaagctatgaacttatatgaagcctgccttactttgttgcaagtgtattctaagaataatttagggcggcaaagaatagatgttacagcagaagaagagcaataccaagacctgcttctcattatggaacttcttactaacctgctgtcaaaagaattcatagatttcagtgatacagatgaagtgtttagaggacatgagccaggtcaagcagcaaacagatctgtgtcagcagcggatgttgtgttgtatggagtaaacctaattctgcccttgatgtcacaggatctcttgaagtttccaaccctttgtaatcagtactacaaattaatcacatttatctgtgagatttttcctgaaaaaataccacagcttcctgaggatctgtttaaaagtctgatgtactccctagaattaggaatgacatcaatgagttcggaggtttgccagctttgcctggaggccttgacaccgttagctgaacagtgtgcaaaagcacaagaaacagactcaccactttttctagcaacacggcactttcttaagctggtttttgatatgctggttttgcaaaagcacaacacagagatgaccactgcggctggcgaagctttctacacgttggtgtgtttgcaccaggctgaatattctgaactggtcgaaacattactatcaagtcagcaagacccagttatttaccagagattagcagatgccttcaacaagctcactgcaagcagcactcctcctacgctggatcggaagcagaagatggccttcttaaagagtttagaagaatttatggcaaatgttggtggtctcctttgtgtaaaataaacaacagaactttatgcttaatttagatcctttctgcaaagtgcactgaattgctgaaagttgacttgagtcttgtcctattcctcagttcatttggccattttggattttggagagcctgaaactttgatatgtatgtaatacagtgaaacaggagaggtcaacttggcatcagcttctgctgttaagtgttagccacaatctgtcatatatatgtcttttagattctgaatggtgatttaaaattttcaaaatgaaattccatatatgtgcaaacagatatgggcaccacgaaatacatatgcagtgccttttttccttttaacataggtggctagccaaagtttagaatttttgtcattaaatatgaaatggatatatgctaggcagtgtttctcaaaatctccatagatcgcctgcatcacttgaggagctggtgaaaaggcagattcttaggcccaactgtagaccttcagagtcagaatgtctggttgttgggcccaggagtcttcatgttaataagcttctccctttcgtcaccccaaaagttttgaatcaatgaaagagacattgaaaactcttaagaggttttgtgctttctagcttttcctccctttgatgattgggttttataattcagcaggaaggggaaacatcaccaggggtttgttggctttttcttagcttgctttcttgcttgcttgctttcttgcttttcttgctttctgtctctctctttcttttctctctctctctcacatcaacccagtgctgcaggttttgtgtaatacaagtcactaatcatactctgatgcctgaacttgaggaggaaaatacatgtatatttttgttccgtaaaaataaccttaggaactgtagccatttcattgccttaattttaagaggagttggtttagggtgttagctgctatgaacctgttgcccctttcgatcgtgtatttatgtaggtttatcagtgaaatgaaaggcttgtttccgtctagtctaactttttgagtgtgtttctatccagccacatagcccatatctactctaaatggcttgcttaagcaataattattttaaaggatgtgaatcactgattcacacagactattgcacgttggggcattaggggcaataattcttatccagacatgggagccagtgaatttaatttcagagattaaaaattcactttagatcctctagtttgatctcttaatcaggatttttatacagctgccaggctcccctaattcagtgtgccagcttacaatgtggaaatgaaagctaatttatacacagcaggcatatgaaactccactcattgcagtactttcacagcacagtgacaggtagaggactctggcacaggtgcactcatgaaactctgcttccaccatgttcctgacacctatctattaaaccattctgcaaatacggtttttctacctgattgcatatagcatatgtgtcattacatgtgatgctgtgcaaaactttgtataattctgtgttattaacagttaacaaaactggagcatctgaattacatccaacctgtgcatgtgatgttaggtagatgtgaatgcagggccttgggccataacttacatttctctcaatttgattagctttgagtcacaattaaggggaagcaaaaacatcttgaaaagactgctaggaaggaaattaatatcagtcatccagaagtacacgtttctgtattttaaaaaatactttgatgcatttatttttaggtgttttttttttccccttaaaaaacttgaagtgatatgcagcagtaatctatttgttttgcattgttcttggtgttttgtgtttcccagatccctcaagctttctcagctgttgcgaattatgtgtatctgtgtgtgtgctaagtacagtctctttaccaaagggcactgaaacacacaattgactggacaggtccacgcgccatgacaaaactataatcaagttattaaaactaaagaggagtgggaaaggaatgccttggtaagtaaaaaggcatctatatttaataacttttatccagatggcaacatatttgcaaaatttgcccagatcctattacaatactaaaaatagaaaatttcacctccatattcctgaggtgtaatttcattagactagttttagtttaaaaagaccttcttcagattggaccaaataatacttataagatcagcagaatgttgaatattagctcactggggtggggagaagccactaccattttttaggtgatggggatgccactgagttgcaacggctagaccttttcagggtggttgtgtccatgtttgcctgattggatgcttattcactttgtgttttcttttgttttattttgtccaattttgtctttagctgtgtttattaacttctccggtcttgttttgttttaatgctcttggcccagtgggtgtcaagaacactggcttaattcaagtcagttgattttttttctattaaaactgttgttaaaatattttttaaaacaaaaacattatttgtgccctcttttatatatgtcaaagggacactgtcaagtatttcatttttagatttttgttttataaaatttctgttgttcatatagtatcctttaacctctagttttccatacatcctttgtttgtttctcattttattttccttgacccatttatttcccaaggcacaatcactaaagactttgtactttcacagtctgttaatgtggtagcacctgtaactgtgttcttgttctgttaaaaggattgatttgcttttatagtccttgtgctggatgagtggctgcctcagtagcaaaactacctgacagtatttgacagtgtcctttccagcaccattatttgggtctttcagggtggccatctctgttagaagacagtagcatgttaacatcactgcattgagtttttgtctggtgtaaagtatgacttttaatgtaaacaaactgcaggtttttttcaaactaattttaagaatttagtcttatttcgttgtaaactgtgtatctaattatattacattactctgttcagatgggatggttactaccacttgtccatgattttcatttgaaaagcaagtatctatatcatttccccccagtcagcattatttaacactccccttaactgtctttgaactttctcttttaacaaaaatgtcaagtctttatagttgtaatatcaccatgtttcccatttctgttaatacttctatgaacccctaaagtattgaagggaactagctgtcagtttcaaggattacaagtttgagtctcctagtattcaacatcattctgaaccctgaaataatatttttctctgttaaacaatttttatctgtttgccacctctgttgttagaggtggttgtcaattgaccttactaagttagctgtctttgatgaggaattattgttattggttcctgaataaaacattaaccttttaagtcagaaggaacctcggtacttcttaaggtttgtttgtgttttctaaaaccagagaataaggaactgatttggctatgaggtttaacattataattttctgtaagctttcccacaaaaaaacattgttgatttgaggatataataatgttttaatctttttaaaatataagtggttattctctgacttggtaactatgttctgaaaacactgcatttaagaatttttaaaaattggttttctaaaattaaaatgtccaaattaggcatattgctgagctcaaattgatgtgaaatgccatggttccagttgaattttaagcatattttcatttagatataaaatatatgaagtatgctttgttgattatagtgagaacccatgacatagttaaccaaagaatatgtttggttcaaataaaaatagaagcttaatactgggcattcatactttttaaagagaatgaatgaagaaatcggtttcctgctgtagttctctatgggtaagtcttagtaaagacgagaatgctgaagtcggccgtggcgattccctcctaggaactgggaggtgtggcttgcccattacccgcttgaagctcacatctttaccctcctctcccactgtggtttgatcttcacctattcccaggccctcccagcaattggagaggtgtctttttttttggttttggttttttttctccccgtctgcattcttaggcctcttagctattaggaactgtcagatacatactagtagctaattttcctagcctgaaattatatactgcatctgcactatgtacctactagggatctgacctcaagtgttttctgagcccaggcttcctggtgtggtgtcttttaccacataaaattattacaaattgcaaatgttggtattgtgatttgattatctgtacaaagaaagaagctctatgcagtgagtttgtggtttaatggtcacaaaaatgttagcactgctaccactcagcacgtgtaaaattttttaaatttataaatattaaaattttaaactta

SEQ ID NO: 436269 - DNA, 8309 bp, Homo sapiens
  misc_feature (1531)..(1531): n is a, c, g, or t
tgatggcggcggcgctggggcccccagaagtgatcgctcagctggagaacgcggctaaagttctgatggcaccaccttccatggtcaataatgaacaacgccagcatgcagagcacatattcttatcatttaggaaatcaaaatcaccatttgcagtttgcaagcatattttggaaactagtaaagtggactatgtcctctttcaagctgccacagccataatggaagcagttgtccgagagtggattctcttggaaaaaggtagcatcgagtctctgcgaacattccttttaacctatgtcttacaaaggcccaaccttcaaaagtatgttcgggaacagattctactagcagtagcagtaattgtaaaaagaggatcattagataaatcaattgactgcaaaagcatttttcatgaagtcagccagttgattagtagtggcaatcccactgtgcaaactctggcctgttctattctgactgcgctattgagtgaattttcaagttcaagtaaaactagcaacattggattgagcatggaattccatggtaactgcaaaagagtttttcaggaagaagaccttcgtcagatcttcatgttaactgttgaagttctgcaggagttcagcaggcgggaaaacctcaatgctcagatgtcttcagtatttcagcgttaccttgcactcgccaatcaagtcttgagctggaactttcttcctccaaatttgggcagacattatatagctatgtttgaatcctcgcaaaatgtgctgttgaagccaacagagtcctggcgggagactcttctggacagcagagttatggagcttttcttcacagtacatcgaaaaatcagagaagattcagatatggcacaagattctctgcagtgccttgcccagttagcttctcttcatggacccatcttcccagatgaaggatcacaagttgattatctagcacacttcattgagggattactgaatactatcaatggaattgaaatagaagattctgaagctgtggggatctccagcattatcagcaacctgataaccgtgttcccacgaaatgttttaactgccattccaagtgaacttttctcctcctttgttaactgcctcacacacctcacttgttcttttgggcgaagtgctgcattggaagaagtgcttgataaagatgacatggtatacatggaagcatatgataaattgttggagtcctggttaactttggttcaagatgacaaacatttccataaaggcttttttacccaacatgcagttcaagttttcaattcctatattcagtgccacctagctgctccagatggcacaagaaatttgactgccaatggtgtggcctctcgtgaggaggaagaaataagtgaacttcaagaggatgatcgagaccagttttctgatcaactggccagtgtaggaatgctaggaagaattgctgcagaacactgtatacctcttctgacaagtttattagaagaaagagtaacaagactccatggtcagtnacaacgacatcagcaacagttacttgcttcaccgggttcaagcactgttgacaacaaaatgcttgatgatctctatgaagatattcactggcttattttagttacaggctacctcttagctgatgatactcagggagagactccgctaatacctccagaaataatggaatattccattaagcattcatctgaagttgacattaatacaacacttcaaattttgggatctccaggagaaaaggcttcttccatcccagggtacaacagaacagattctgtgattaggctgttgtctgccattctcagagtttcagaagttgaatctcgagcaataagagcagatctcactcatctactaagtccccagatgggcaaagatattgtttggtttttaaaacgctgggcaaagacttatctcctggtggatgaaaaactgtatgatcagataagtctgccattcagtacagcgttcggagcagatacagagggttctcagtggataattggctacctcttacaaaaagtcatcagtaacctctcagtctggagtagtgagcaggaccttgcaaatgacactgtgcagctccttgtcactttggtggaaagaagagaaagggcaaacttagtaattcaatgtgagaactggtggaatttagctaagcagtttgcaagccgaagcccacctcttaatttcttgtcaagtcctgtgcagaggacattgatgaaggctctagtcttaggaggttttgcacatatggacacagaaaccaaacagcagtattggacagaggttcttcagccacttcagcagcgattcttaagagtgataaaccaagaaaacttccagcagatgtgtcagcaagaggaagtcaagcaggaaatcactgccacactagaggccctgtgtggcattgctgaggctacccagattgacaacgtagcaatcctgtttaattttttaatggacttccttaccaattgcattggattgatggaagtttacaagaataccccagagactgtcaatctcattatagaagtttttgttgaagttgcacataaacagatatgctatcttggagagtccaaagctatgaacttatatgaagcctgccttactttgttgcaagtgtattctaagaataatttagggcggcaaagaatagatgttacagcagaagaagagcaataccaagacctgcttctcattatggaacttcttactaacctgctgtcaaaagaattcatagatttcagtgatacagatgaagtgtttagaggacatgagccaggtcaagcagcaaacagatctgtgtcagcagcggatgttgtgttgtatggagtaaacctaattctgcccttgatgtcacaggatctcttgaagtttccaaccctttgtaatcagtactacaaattaatcacatttatctgtgagatttttcctgaaaaaataccacagcttcctgaggatctgtttaaaagtctgatgtactccctagaattaggaatgacatcaatgagttcggaggtttgccagctttgcctggaggccttgacaccgttagctgaacagtgtgcaaaagcacaagaaacagactcaccactttttctagcaacacggcactttcttaagctggtttttgatatgctggttttgcaaaagcacaacacagagatgaccactgcggctggcgaagctttctacacgttggtgtgtttgcaccaggctgaatattctgaactggtcgaaacattactatcaagtcagcaagacccagttatttaccagagattagcagatgccttcaacaagctcactgcaagcagcactcctcctacgctggatcggaagcagaagatggccttcttaaagagtttagaagaatttatggcaaatgttggtggtctcctttgtgtaaaataaacaacagaactttatgcttaatttagatcctttctgcaaagtgcactgaattgctgaaagttgacttgagtcttgtcctattcctcagttcatttggccattttggattttggagagcctgaaactttgatatgtatgtaatacagtgaaacaggagaggtcaacttggcatcagcttctgctgttaagtgttagccacaatctgtcatatatatgtcttttagattctgaatggtgatttaaaattttcaaaatgaaattccatatatgtgcaaacagatatgggcaccacgaaatacatatgcagtgccttttttccttttaacataggtggctagccaaagtttagaatttttgtcattaaatatgaaatggatatatgctaggcagtgtttctcaaaatctccatagatcgcctgcatcacttgaggagctggtgaaaaggcagattcttaggcccaactgtagaccttcagagtcagaatgtctggttgttgggcccaggagtcttcatgttaataagcttctccctttcgtcaccccaaaagttttgaatcaatgaaagagacattgaaaactcttaagaggttttgtgctttctagcttttcctccctttgatgattgggttttataattcagcaggaaggggaaacatcaccaggggtttgttggctttttcttagcttgctttcttgcttgcttgctttcttgcttttcttgctttctgtctctctctttcttttctctctctctctcacatcaacccagtgctgcaggttttgtgtaatacaagtcactaatcatactctgatgcctgaacttgaggaggaaaatacatgtatatttttgttccgtaaaaataaccttaggaactgtagccatttcattgccttaattttaagaggaaaatacaaaaacagctgatttgttttagtaagaaaccacgtcttgatgcttcagagttggtttagggtgttagctgctatgaacctgttgcccctttcgatcgtgtatttatgtaggtttatcagtgaaatgaaaggcttgtttccgtctagtctaactttttgagtgtgtttctatccagccacatagcccatatctactctaaatggcttgcttaagcaataattattttaaaggatgtgaatcactgattcacacagactattgcacgttggggcattaggggcaataattcttatccagacatgggagccagtgaatttaatttcagagattaaaaattcactttagatcctctagtttgatctcttaatcaggatttttatacagctgccaggctcccctaattcagtgtgccagcttacaatgtggaaatgaaagctaatttatacacagcaggcatatgaaactccactcattgcagtactttcacagcacagtgacaggtagaggactctggcacaggtgcactcatgaaactctgcttccaccatgttcctgacacctatctattaaaccattctgcaaatacggtttttctacctgattgcatatagcatatgtgtcattacatgtgatgctgtgcaaaactttgtataattctgtgttattaacagttaacaaaactggagcatctgaattacatccaacctgtgcatgtgatgttaggtagatgtgaatgcagggccttgggccataacttacatttctctcaatttgattagctttgagtcacaattaaggggaagcaaaaacatcttgaaaagactgctaggaaggaaattaatatcagtcatccagaagtacacgtttctgtattttaaaaaatactttgatgcatttatttttaggtgttttttttttccccttaaaaaacttgaagtgatatgcagcagtaatctatttgttttgcattgttcttggtgttttgtgtttcccagatccctcaagctttctcagctgttgcgaattatgtgtatctgtgtgtgtgctaagtacagtctctttaccaaagggcactgaaacacacaattgactggacaggtccacgcgccatgacaaaactataatcaagttattaaaactaaagaggagtgggaaaggaatgccttggtaagtaaaaaggcatctatatttaataacttttatccagatggcaacatatttgcaaaatttgcccagatcctattacaatactaaaaatagaaaatttcacctccatattcctgaggtgtaatttcattagactagttttagtttaaaaagaccttcttcagattggaccaaataatacttataagatcagcagaatgttgaatattagctcactggggtggggagaagccactaccattttttaggtgatggggatgccactgagttgcaacggctagaccttttcagggtggttgtgtccatgtttgcctgattggatgcttattcactttgtgttttcttttgttttattttgtccaattttgtctttagctgtgtttattaacttctccggtcttgttttgttttaatgctcttggcccagtgggtgtcaagaacactggcttaattcaagtcagttgattttttttctattaaaactgttgttaaaatattttttaaaacaaaaacattatttgtgccctcttttatatatgtcaaagggacactgtcaagtatttcatttttagatttttgttttataaaatttctgttgttcatatagtatcctttaacctctagttttccatacatcctttgtttgtttctcattttattttccttgacccatttatttcccaaggcacaatcactaaagactttgtactttcacagtctgttaatgtggtagcacctgtaactgtgttcttgttctgttaaaaggattgatttgcttttatagtccttgtgctggatgagtggctgcctcagtagcaaaactacctgacagtatttgacagtgtcctttccagcaccattatttgggtctttcagggtggccatctctgttagaagacagtagcatgttaacatcactgcattgagtttttgtctggtgtaaagtatgacttttaatgtaaacaaactgcaggtttttttcaaactaattttaagaatttagtcttatttcgttgtaaactgtgtatctaattatattacattactctgttcagatgggatggttactaccacttgtccatgattttcatttgaaaagcaagtatctatatcatttccccccagtcagcattatttaacactccccttaactgtctttgaactttctcttttaacaaaaatgtcaagtctttatagttgtaatatcaccatgtttcccatttctgttaatacttctatgaacccctaaagtattgaagggaactagctgtcagtttcaaggattacaagtttgagtctcctagtattcaacatcattctgaaccctgaaataatatttttctctgttaaacaatttttatctgtttgccacctctgttgttagaggtggttgtcaattgaccttactaagttagctgtctttgatgaggaattattgttattggttcctgaataaaacattaaccttttaagtcagaaggaacctcggtacttcttaaggtttgtttgtgttttctaaaaccagagaataaggaactgatttggctatgaggtttaacattataattttctgtaagctttcccacaaaaaaacattgttgatttgaggatataataatgttttaatctttttaaaatataagtggttattctctgacttggtaactatgttctgaaaacactgcatttaagaatttttaaaaattggttttctaaaattaaaatgtccaaattaggcatattgctgagctcaaattgatgtgaaatgccatggttccagttgaattttaagcatattttcatttagatataaaatatatgaagtatgctttgttgattatagtgagaacccatgacatagttaaccaaagaatatgtttggttcaaataaaaatagaagcttaatactgggcattcatactttttaaagagaatgaatgaagaaatcggtttcctgctgtagttctctatgggtaagtcttagtaaagacgagaatgctgaagtcggccgtggcgattccctcctaggaactgggaggtgtggcttgcccattacccgcttgaagctcacatctttaccctcctctcccactgtggtttgatcttcacctattcccaggccctcccagcaattggagaggtgtctttttttttggttttggttttttttctccccgtctgcattcttaggcctcttagctattaggaactgtcagatacatactagtagctaattttcctagcctgaaattatatactgcatctgcactatgtacctactagggatctgacctcaagtgttttctgagcccaggcttcctggtgtggtgtcttttaccacataaaattattacaaattgcaaatgttggtattgtgatttgattatctgtacaaagaaagaagctctatgcagtgagtttgtggtttaatggtcacaaaaatgttagcactgctaccactcagcacgtgtaaaattttttaaatttataaatattaaaattttaaacttacactaagacttttcagttttatttaaagacccagggatgagtgtactgtttaaatatttacctctattaacataactaatgaaggtataaaattgcatttagtttttcagaagatgctgcaatatgattttaggaaataaggctatgtattgagccagttataggctgaatatcaggttgataaaattttatttgtatttttaaaattcataaatgggagttaaaatgtgtcttttcactaaatatttttattacaaaaatgt

SEQ ID NO: 436270 - DNA, 6993 bp, Homo sapiens
  misc_feature (1531)..(1531): n is a, c, g, or t
tgatggcggcggcgctggggcccccagaagtgatcgctcagctggagaacgcggctaaagttctgatggcaccaccttccatggtcaataatgaacaacgccagcatgcagagcacatattcttatcatttaggaaatcaaaatcaccatttgcagtttgcaagcatattttggaaactagtaaagtggactatgtcctctttcaagctgccacagccataatggaagcagttgtccgagagtggattctcttggaaaaaggtagcatcgagtctctgcgaacattccttttaacctatgtcttacaaaggcccaaccttcaaaagtatgttcgggaacagattctactagcagtagcagtaattgtaaaaagaggatcattagataaatcaattgactgcaaaagcatttttcatgaagtcagccagttgattagtagtggcaatcccactgtgcaaactctggcctgttctattctgactgcgctattgagtgaattttcaagttcaagtaaaactagcaacattggattgagcatggaattccatggtaactgcaaaagagtttttcaggaagaagaccttcgtcagatcttcatgttaactgttgaagttctgcaggagttcagcaggcgggaaaacctcaatgctcagatgtcttcagtatttcagcgttaccttgcactcgccaatcaagtcttgagctggaactttcttcctccaaatttgggcagacattatatagctatgtttgaatcctcgcaaaatgtgctgttgaagccaacagagtcctggcgggagactcttctggacagcagagttatggagcttttcttcacagtacatcgaaaaatcagagaagattcagatatggcacaagattctctgcagtgccttgcccagttagcttctcttcatggacccatcttcccagatgaaggatcacaagttgattatctagcacacttcattgagggattactgaatactatcaatggaattgaaatagaagattctgaagctgtggggatctccagcattatcagcaacctgataaccgtgttcccacgaaatgttttaactgccattccaagtgaacttttctcctcctttgttaactgcctcacacacctcacttgttcttttgggcgaagtgctgcattggaagaagtgcttgataaagatgacatggtatacatggaagcatatgataaattgttggagtcctggttaactttggttcaagatgacaaacatttccataaaggcttttttacccaacatgcagttcaagttttcaattcctatattcagtgccacctagctgctccagatggcacaagaaatttgactgccaatggtgtggcctctcgtgaggaggaagaaataagtgaacttcaagaggatgatcgagaccagttttctgatcaactggccagtgtaggaatgctaggaagaattgctgcagaacactgtatacctcttctgacaagtttattagaagaaagagtaacaagactccatggtcagtnacaacgacatcagcaacagttacttgcttcaccgggttcaagcactgttgacaacaaaatgcttgatgatctctatgaagatattcactggcttattttagttacaggctacctcttagctgatgatactcagggagagactccgctaatacctccagaaataatggaatattccattaagcattcatctgaagttgacattaatacaacacttcaaattttgggatctccaggagaaaaggcttcttccatcccagggtacaacagaacagattctgtgattaggctgttgtctgccattctcagagtttcagaagttgaatctcgagcaataagagcagatctcactcatctactaagtccccagatgggcaaagatattgtttggtttttaaaacgctgggcaaagacttatctcctggtggatgaaaaactgtatgatcagataagtctgccattcagtacagcgttcggagcagatacagagggttctcagtggataattggctacctcttacaaaaagtcatcagtaacctctcagtctggagtagtgagcaggaccttgcaaatgacactgtgcagctccttgtcactttggtggaaagaagagaaagggcaaacttagtaattcaatgtgagaactggtggaatttagctaagcagtttgcaagccgaagcccacctcttaatttcttgtcaagtcctgtgcagaggacattgatgaaggctctagtcttaggaggttttgcacatatggacacagaaaccaaacagcagtattggacagaggttcttcagccacttcagcagcgattcttaagagtgataaaccaagaaaacttccagcagatgtgtcagcaagaggaagtcaagcaggaaatcactgccacactagaggccctgtgtggcattgctgaggctacccagattgacaacgtagcaatcctgtttaattttttaatggacttccttaccaattgcattggattgatggaagtttacaagaataccccagagactgtcaatctcattatagaagtttttgttgaagttgcacataaacagatatgctatcttggagagtccaaagctatgaacttatatgaagcctgccttactttgttgcaagtgtattctaagaataatttagggcggcaaagaatagatgttacagcagaagaagagcaataccaagacctgcttctcattatggaacttcttactaacctgctgtcaaaagaattcatagatttcagtgatacagatgaagtgtttagaggacatgagccaggtcaagcagcaaacagatctgtgtcagcagcggatgttgtgttgtatggagtaaacctaattctgcccttgatgtcacaggatctcttgaagtttccaaccctttgtaatcagtactacaaattaatcacatttatctgtgagatttttcctgaaaaaataccacagcttcctgaggatctgtttaaaagtctgatgtactccctagaattaggaatgacatcaatgagttcggaggtttgccagctttgcctggaggccttgacaccgttagctgaacagtgtgcaaaagcacaagaaacagactcaccactttttctagcaacacggcactttcttaagctggtttttgatatgctggttttgcaaaagcacaacacagagatgaccactgcggctggcgaagctttctacacgttggtgtgtttgcaccaggctgaatattctgaactggtcgaaacattactatcaagtcagcaagacccagttatttaccagagattagcagatgccttcaacaagctcactgcaagcagcactcctcctacgctggatcggaagcagaagatggccttcttaaagagtttagaagaatttatggcaaatgttggtggtctcctttgtgtaaaataaacaacagaactttatgcttaatttagatcctttctgcaaagtgcactgaattgctgaaagttgacttgagtcttgtcctattcctcagttcatttggccattttggattttggagagcctgaaactttgatatgtatgtaatacagtgaaacaggagaggtcaacttggcatcagcttctgctgttaagtgttagccacaatctgtcatatatatgtcttttagattctgaatggtgatttaaaattttcaaaatgaaattccatatatgtgcaaacagatatgggcaccacgaaatacatatgcagtgccttttttccttttaacataggtggctagccaaagtttagaatttttgtcattaaatatgaaatggatatatgctaggcagtgtttctcaaaatctccatagatcgcctgcatcacttgaggagctggtgaaaaggcagattcttaggcccaactgtagaccttcagagtcagaatgtctggttgttgggcccaggagtcttcatgttaataagcttctccctttcgtcaccccaaaagttttgaatcaatgaaagagacattgaaaactcttaagaggttttgtgctttctagcttttcctccctttgatgattgggttttataattcagcaggaaggggaaacatcaccaggggtttgttggctttttcttagcttgctttcttgcttgcttgctttcttgcttttcttgctttctgtctctctctttcttttctctctctctctcacatcaacccagtgctgcaggttttgtgtaatacaagtcactaatcatactctgatgcctgaacttgaggaggaaaatacatgtatatttttgttccgtaaaaataaccttaggaactgtagccatttcattgccttaattttaagaggaaaatacaaaaacagctgatttgttttagtaagaaaccacgtcttgatgcttcagagttggtttagggtgttagctgctatgaacctgttgcccctttcgatcgtgtatttatgtaggtttatcagtgaaatgaaaggcttgtttccgtctagtctaactttttgagtgtgtttctatccagccacatagcccatatctactctaaatggcttgcttaagcaataattattttaaaggatgtgaatcactgattcacacagactattgcacgttggggcattaggggcaataattcttatccagacatgggagccagtgaatttaatttcagagattaaaaattcactttagatcctctagtttgatctcttaatcaggatttttatacagctgccaggctcccctaattcagtgtgccagcttacaatgtggaaatgaaagctaatttatacacagcaggcatatgaaactccactcattgcagtactttcacagcacagtgacaggtagaggactctggcacaggtgcactcatgaaactctgcttccaccatgttcctgacacctatctattaaaccattctgcaaatacggtttttctacctgattgcatatagcatatgtgtcattacatgtgatgctgtgcaaaactttgtataattctgtgttattaacagttaacaaaactggagcatctgaattacatccaacctgtgcatgtgatgttaggtagatgtgaatgcagggccttgggccataacttacatttctctcaatttgattagctttgagtcacaattaaggggaagcaaaaacatcttgaaaagactgctaggaaggaaattaatatcagtcatccagaagtacacgtttctgtattttaaaaaatactttgatgcatttatttttaggtgttttttttttccccttaaaaaacttgaagtgatatgcagcagtaatctatttgttttgcattgttcttggtgttttgtgtttcccagatccctcaagctttctcagctgttgcgaattatgtgtatctgtgtgtgtgctaagtacagtctctttaccaaagggcactgaaacacacaattgactggacaggtccacgcgccatgacaaaactataatcaagttattaaaactaaagaggagtgggaaaggaatgccttggtaagtaaaaaggcatctatatttaataacttttatccagatggcaacatatttgcaaaatttgcccagatcctattacaatactaaaaatagaaaatttcacctccatattcctgaggtgtaatttcattagactagttttagtttaaaaagaccttcttcagattggaccaaataatacttataagatcagcagaatgttgaatattagctcactggggtggggagaagccactaccattttttaggtgatggggatgccactgagttgcaacggctagaccttttcagggtggttgtgtccatgtttgcctgattggatgcttattcactttgtgttttcttttgttttattttgtccaattttgtctttagctgtgtttattaacttctccggtcttgttttgttttaatgctcttggcccagtgggtgtcaagaacactggcttaattcaagtcagttgattttttttctattaaaactgttgttaaaatattttttaaaacaaaaacattatttgtgccctcttttatatatgtcaaagggacactgtcaagtatttcatttttagatttttgttttataaaatttctgttgttcatatagtatcctttaacctctagttttccatacatcctttgtttgtttctcattttattttccttgacccatttatttcccaaggcacaatcactaaagactttgtactttcacagtctgttaatgtggtagcacctgtaactgtgttcttgttctgttaaaaggattgatttgcttttatagtccttgtgctggatgagtggctgcctcagtagcaaaactacctgacagtatttgacagtgtcctttccagcaccattatttgggtctttcagggtggccatctctgttagaagacagtagcatgttaacatcactgcattgagtttttgtctggtgtaaagtatgacttttaatgtaaacaaactgcaggtttttttcaaactaattttaagaatttagtcttatttcgttgtaaactgtgtatctaattatattacattactctgttcagatgggatggttactaccacttgtccatgattttcatttgaaaagcaagtatctatatcatttctccccgtctgcattcttaggcctcttagctattaggaactgtcagatacatactagtagctaattttcctagcctgaaattatatactgcatctgcactatgtacctactagggatctgacctcaagtgttttctgagcccaggcttcctggtgtggtgtcttttaccacataaaattattacaaattgcaaatgttggtattgtgatttgattatctgtacaaagaaagaagctctatgcagtgagtttgtggtttaatggtcacaaaaatgttagcactgctaccactcagcacgtgtaaaattttttaaatttataaatattaaaattttaaactta

SEQ ID NO: 436271 - DNA, 738 bp, Homo sapiens
tgatggcggcggcgctggggcccccagaagtgatcgctcagctggagaacgcggctaaagttctgatggcaccaccttccatggtcaataatgaacaacgccagcatgcagagcacatattcttatcatttaggaaatcaaaatcaccatttgcagtttgcaagcatattttggaaactagtaaagtggactatgtcctctttcaagctgccacagccataatggaagcagttgtccgagagtggattctcttggaaaaaggtagcatcgagtctctgcgaacattccttttaacctatgtcttacaaaggcccaaccttcaaaagtatgttcgggaacagattctactagcagtagcagtaattgtaaaaagaggatcattagataaatcaattgactgcaaaagcatttttcatgaagtcagccagttgattagtagtggcaatcccactgtggtaagtgtgctatttgtatttataaatattaacaatttatattttctgttacacaaatagcattatagcaagagtaatggatatctacataaaaatagtgaaaaagctatcagtcaagcaattttcatttgttcaggttttcttctagtctttttttttttttttcccttgtgacaagagttttgctcttgttgcccaggccagaggttgcagtgagccgagatcattgcatcactgcactccagcctggtgacagagcaagactccttctcaaaaaaaaaaa

SEQ ID NO: 436272 - DNA, 8046 bp, Homo sapiens
  misc_feature (1531)..(1531): n is a, c, g, or t
tgatggcggcggcgctggggcccccagaagtgatcgctcagctggagaacgcggctaaagttctgatggcaccaccttccatggtcaataatgaacaacgccagcatgcagagcacatattcttatcatttaggaaatcaaaatcaccatttgcagtttgcaagcatattttggaaactagtaaagtggactatgtcctctttcaagctgccacagccataatggaagcagttgtccgagagtggattctcttggaaaaaggtagcatcgagtctctgcgaacattccttttaacctatgtcttacaaaggcccaaccttcaaaagtatgttcgggaacagattctactagcagtagcagtaattgtaaaaagaggatcattagataaatcaattgactgcaaaagcatttttcatgaagtcagccagttgattagtagtggcaatcccactgtgcaaactctggcctgttctattctgactgcgctattgagtgaattttcaagttcaagtaaaactagcaacattggattgagcatggaattccatggtaactgcaaaagagtttttcaggaagaagaccttcgtcagatcttcatgttaactgttgaagttctgcaggagttcagcaggcgggaaaacctcaatgctcagatgtcttcagtatttcagcgttaccttgcactcgccaatcaagtcttgagctggaactttcttcctccaaatttgggcagacattatatagctatgtttgaatcctcgcaaaatgtgctgttgaagccaacagagtcctggcgggagactcttctggacagcagagttatggagcttttcttcacagtacatcgaaaaatcagagaagattcagatatggcacaagattctctgcagtgccttgcccagttagcttctcttcatggacccatcttcccagatgaaggatcacaagttgattatctagcacacttcattgagggattactgaatactatcaatggaattgaaatagaagattctgaagctgtggggatctccagcattatcagcaacctgataaccgtgttcccacgaaatgttttaactgccattccaagtgaacttttctcctcctttgttaactgcctcacacacctcacttgttcttttgggcgaagtgctgcattggaagaagtgcttgataaagatgacatggtatacatggaagcatatgataaattgttggagtcctggttaactttggttcaagatgacaaacatttccataaaggcttttttacccaacatgcagttcaagttttcaattcctatattcagtgccacctagctgctccagatggcacaagaaatttgactgccaatggtgtggcctctcgtgaggaggaagaaataagtgaacttcaagaggatgatcgagaccagttttctgatcaactggccagtgtaggaatgctaggaagaattgctgcagaacactgtatacctcttctgacaagtttattagaagaaagagtaacaagactccatggtcagtnacaacgacatcagcaacagttacttgcttcaccgggttcaagcactgttgacaacaaaatgcttgatgatctctatgaagatattcactggcttattttagttacaggctacctcttagctgatgatactcagggagagactccgctaatacctccagaaataatggaatattccattaagcattcatctgaagttgacattaatacaacacttcaaattttgggatctccaggagaaaaggcttcttccatcccagggtacaacagaacagattctgtgattaggctgttgtctgccattctcagagtttcagaagttgaatctcgagcaataagagcagatctcactcatctactaagtccccagatgggcaaagatattgtttggtttttaaaacgctgggcaaagacttatctcctggtggatgaaaaactgtatgatcagataagtctgccattcagtacagcgttcggagcagatacagagggttctcagtggataattggctacctcttacaaaaagtcatcagtaacctctcagtctggagtagtgagcaggaccttgcaaatgacactgtgcagctccttgtcactttggtggaaagaagagaaagggcaaacttagtaattcaatgtgagaactggtggaatttagctaagcagtttgcaagccgaagcccacctcttaatttcttgtcaagtcctgtgcagaggacattgatgaaggctctagtcttaggaggttttgcacatatggacacagaaaccaaacagcagtattggacagaggttcttcagccacttcagcagcgattcttaagagtgataaaccaagaaaacttccagcagatgtgtcagcaagaggaagtcaagcaggaaatcactgccacactagaggccctgtgtggcattgctgaggctacccagattgacaacgtagcaatcctgtttaattttttaatggacttccttaccaattgcattggattgatggaagtttacaagaataccccagagactgtcaatctcattatagaagtttttgttgaagttgcacataaacagatatgctatcttggagagtccaaagctatgaacttatatgaagcctgccttactttgttgcaagtgtattctaagaataatttagggcggcaaagaatagatgttacagcagaagaagagcaataccaagacctgcttctcattatggaacttcttactaacctgctgtcaaaagaattcatagatttcagtgatacagatgaagtgtttagaggacatgagccaggtcaagcagcaaacagatctgtgtcagcagcggatgttgtgttgtatggagtaaacctaattctgcccttgatgtcacaggatctcttgaagtttccaaccctttgtaatcagtactacaaattaatcacatttatctgtgagatttttcctgaaaaaataccacagcttcctgaggatctgtttaaaagtctgatgtactccctagaattaggaatgacatcaatgagttcggaggtttgccagctttgcctggaggccttgacaccgttagctgaacagtgtgcaaaagcacaagaaacagactcaccactttttctagcaacacggcactttcttaagctggtttttgatatgctggttttgcaaaagcacaacacagagatgaccactgcggctggcgaagctttctacacgttggtgtgtttgcaccaggctgaatattctgaactggtcgaaacattactatcaagtcagcaagacccagttatttaccagagattagcagatgccttcaacaagctcactgcaagcagcactcctcctacgctggatcggaagcagaagatggccttcttaaagagtttagaagaatttatggcaaatgttggtggtctcctttgtgtaaaataaacaacagaactttatgcttaatttagatcctttctgcaaagtgcactgaattgctgaaagttgacttgagtcttgtcctattcctcagttcatttggccattttggattttggagagcctgaaactttgatatgtatgtaatacagtgaaacaggagaggtcaacttggcatcagcttctgctgttaagtgttagccacaatctgtcatatatatgtcttttagattctgaatggtgatttaaaattttcaaaatgaaattccatatatgtgcaaacagatatgggcaccacgaaatacatatgcagtgccttttttccttttaacataggtggctagccaaagtttagaatttttgtcattaaatatgaaatggatatatgctaggcagtgtttctcaaaatctccatagatcgcctgcatcacttgaggagctggtgaaaaggcagattcttaggcccaactgtagaccttcagagtcagaatgtctggttgttgggcccaggagtcttcatgttaataagcttctccctttcgtcaccccaaaagttttgaatcaatgaaagagacattgaaaactcttaagaggttttgtgctttctagcttttcctccctttgatgattgggttttataattcagcaggaaggggaaacatcaccaggggtttgttggctttttcttagcttgctttcttgcttgcttgctttcttgcttttcttgctttctgtctctctctttcttttctctctctctctcacatcaacccagtgctgcaggttttgtgtaatacaagtcactaatcatactctgatgcctgaacttgaggaggaaaatacatgtatatttttgttccgtaaaaataaccttaggaactgtagccatttcattgccttaattttaagaggaaaatacaaaaacagctgatttgttttagtaagaaaccacgtcttgatgcttcagagttggtttagggtgttagctgctatgaacctgttgcccctttcgatcgtgtatttatgtaggtttatcagtgaaatgaaaggcttgtttccgtctagtctaactttttgagtgtgtttctatccagccacatagcccatatctactctaaatggcttgcttaagcaataattattttaaaggatgtgaatcactgattcacacagactattgcacgttggggcattaggggcaataattcttatccagacatgggagccagtgaatttaatttcagagattaaaaattcactttagatcctctagtttgatctcttaatcaggatttttatacagctgccaggctcccctaattcagtgtgccagcttacaatgtggaaatgaaagctaatttatacacagcaggcatatgaaactccactcattgcagtactttcacagcacagtgacaggtagaggactctggcacaggtgcactcatgaaactctgcttccaccatgttcctgacacctatctattaaaccattctgcaaatacggtttttctacctgattgcatatagcatatgtgtcattacatgtgatgctgtgcaaaactttgtataattctgtgttattaacagttaacaaaactggagcatctgaattacatccaacctgtgcatgtgatgttaggtagatgtgaatgcagggccttgggccataacttacatttctctcaatttgattagctttgagtcacaattaaggggaagcaaaaacatcttgaaaagactgctaggaaggaaattaatatcagtcatccagaagtacacgtttctgtattttaaaaaatactttgatgcatttatttttaggtgttttttttttccccttaaaaaacttgaagtgatatgcagcagtaatctatttgttttgcattgttcttggtgttttgtgtttcccagatccctcaagctttctcagctgttgcgaattatgtgtatctgtgtgtgtgctaagtacagtctctttaccaaagggcactgaaacacacaattgactggacaggtccacgcgccatgacaaaactataatcaagttattaaaactaaagaggagtgggaaaggaatgccttggtaagtaaaaaggcatctatatttaataacttttatccagatggcaacatatttgcaaaatttgcccagatcctattacaatactaaaaatagaaaatttcacctccatattcctgaggtgtaatttcattagactagttttagtttaaaaagaccttcttcagattggaccaaataatacttataagatcagcagaatgttgaatattagctcactggggtggggagaagccactaccattttttaggtgatggggatgccactgagttgcaacggctagaccttttcagggtggttgtgtccatgtttgcctgattggatgcttattcactttgtgttttcttttgttttattttgtccaattttgtctttagctgtgtttattaacttctccggtcttgttttgttttaatgctcttggcccagtgggtgtcaagaacactggcttaattcaagtcagttgattttttttctattaaaactgttgttaaaatattttttaaaacaaaaacattatttgtgccctcttttatatatgtcaaagggacactgtcaagtatttcatttttagatttttgttttataaaatttctgttgttcatatagtatcctttaacctctagttttccatacatcctttgtttgtttctcattttattttccttgacccatttatttcccaaggcacaatcactaaagactttgtactttcacagtctgttaatgtggtagcacctgtaactgtgttcttgttctgttaaaaggattgatttgcttttatagtccttgtgctggatgagtggctgcctcagtagcaaaactacctgacagtatttgacagtgtcctttccagcaccattatttgggtctttcagggtggccatctctgttagaagacagtagcatgttaacatcactgcattgagtttttgtctggtgtaaagtatgacttttaatgtaaacaaactgcaggtttttttcaaactaattttaagaatttagtcttatttcgttgtaaactgtgtatctaattatattacattactctgttcagatgggatggttactaccacttgtccatgattttcatttgaaaagcaagtatctatatcatttccccccagtcagcattatttaacactccccttaactgtctttgaactttctcttttaacaaaaatgtcaagtctttatagttgtaatatcaccatgtttcccatttctgttaatacttctatgaacccctaaagtattgaagggaactagctgtcagtttcaaggattacaagtttgagtctcctagtattcaacatcattctgaaccctgaaataatatttttctctgttaaacaatttttatctgtttgccacctctgttgttagaggtggttgtcaattgaccttactaagttagctgtctttgatgaggaattattgttattggttcctgaataaaacattaaccttttaagtcagaaggaacctcggtacttcttaaggtttgtttgtgttttctaaaaccagagaataaggaactgatttggctatgaggtttaacattataattttctgtaagctttcccacaaaaaaacattgttgatttgaggatataataatgttttaatctttttaaaatataagtggttattctctgacttggtaactatgttctgaaaacactgcatttaagaatttttaaaaattggttttctaaaattaaaatgtccaaattaggcatattgctgagctcaaattgatgtgaaatgccatggttccagttgaattttaagcatattttcatttagatataaaatatatgaagtatgctttgttgattatagtgagaacccatgacatagttaaccaaagaatatgtttggttcaaataaaaatagaagcttaatactgggcattcatactttttaaagagaatgaatgaagaaatcggtttcctgctgtagttctctatgggtaagtcttagtaaagacgagaatgctgaagtcggccgtggcgattccctcctaggaactgggaggtgtggcttgcccattacccgcttgaagctcacatctttaccctcctctcccactgtggtttgatcttcacctattcccaggccctcccagcaattggagaggtgtctttttttttggttttggttttttttctccccgtctgcattcttaggcctcttagctattaggaactgtcagatacatactagtagctaattttcctagcctgaaattatatactgcatctgcactatgtacctactagggatctgacctcaagtgttttctgagcccaggcttcctggtgtggtgtcttttaccacataaaattattacaaattgcaaatgttggtattgtgatttgattatctgtacaaagaaagaagctctatgcagtgagtttgtggtttaatggtcacaaaaatgttagcactgctaccactcagcacgtgtaaaattttttaaatttataaatattaaaattttaaactta

SEQ ID NO: 436273 - DNA, 6936 bp, Homo sapiens
  misc_feature (421)..(421): n is a, c, g, or t
caggctaggtagcgaggctgggtggttagtctttgggcgaagtgctgcattggtaagaagtgcttgataaagatgacatggtatacatggaagcatatgataaattgttggagtcctggttaactttggttcaagatgacaaacatttccataaaggcttttttacccaacatgcagttcaagttttcaattcctatattcagtgccacctagctgctccagatggcacaagaaatttgactgccaatggtgtggcctctcgtgaggaggaagaaataagtgaacttcaagaggatgatcgagaccagttttctgatcaactggccagtgtaggaatgctaggaagaattgctgcagaacactgtatacctcttctgacaagtttattagaagaaagagtaacaagactccatggtcagtnacaacgacatcagcaacagttacttgcttcaccgggttcaagcactgttgacaacaaaatgcttgatgatctctatgaagatattcactggcttattttagttacaggctacctcttagctgatgatactcagggagagactccgctaatacctccagaaataatggaatattccattaagcattcatctgaagttgacattaatacaacacttcaaattttgggatctccaggagaaaaggcttcttccatcccagggtacaacagaacagattctgtgattaggctgttgtctgccattctcagagtttcagaagttgaatctcgagcaataagagcagatctcactcatctactaagtccccagatgggcaaagatattgtttggtttttaaaacgctgggcaaagacttatctcctggtggatgaaaaactgtatgatcagataagtctgccattcagtacagcgttcggagcagatacagagggttctcagtggataattggctacctcttacaaaaagtcatcagtaacctctcagtctggagtagtgagcaggaccttgcaaatgacactgtgcagctccttgtcactttggtggaaagaagagaaagggcaaacttagtaattcaatgtgagaactggtggaatttagctaagcagtttgcaagccgaagcccacctcttaatttcttgtcaagtcctgtgcagaggacattgatgaaggctctagtcttaggaggttttgcacatatggacacagaaaccaaacagcagtattggacagaggttcttcagccacttcagcagcgattcttaagagtgataaaccaagaaaacttccagcagatgtgtcagcaagaggaagtcaagcaggaaatcactgccacactagaggccctgtgtggcattgctgaggctacccagattgacaacgtagcaatcctgtttaattttttaatggacttccttaccaattgcattggattgatggaagtttacaagaataccccagagactgtcaatctcattatagaagtttttgttgaagttgcacataaacagatatgctatcttggagagtccaaagctatgaacttatatgaagcctgccttactttgttgcaagtgtattctaagaataatttagggcggcaaagaatagatgttacagcagaagaagagcaataccaagacctgcttctcattatggaacttcttactaacctgctgtcaaaagaattcatagatttcagtgatacagatgaagtgtttagaggacatgagccaggtcaagcagcaaacagatctgtgtcagcagcggatgttgtgttgtatggagtaaacctaattctgcccttgatgtcacaggatctcttgaagtttccaaccctttgtaatcagtactacaaattaatcacatttatctgtgagatttttcctgaaaaaataccacagcttcctgaggatctgtttaaaagtctgatgtactccctagaattaggaatgacatcaatgagttcggaggtttgccagctttgcctggaggccttgacaccgttagctgaacagtgtgcaaaagcacaagaaacagactcaccactttttctagcaacacggcactttcttaagctggtttttgatatgctggttttgcaaaagcacaacacagagatgaccactgcggctggcgaagctttctacacgttggtgtgtttgcaccaggctgaatattctgaactggtcgaaacattactatcaagtcagcaagacccagttatttaccagagattagcagatgccttcaacaagctcactgcaagcagcactcctcctacgctggatcggaagcagaagatggccttcttaaagagtttagaagaatttatggcaaatgttggtggtctcctttgtgtaaaataaacaacagaactttatgcttaatttagatcctttctgcaaagtgcactgaattgctgaaagttgacttgagtcttgtcctattcctcagttcatttggccattttggattttggagagcctgaaactttgatatgtatgtaatacagtgaaacaggagaggtcaacttggcatcagcttctgctgttaagtgttagccacaatctgtcatatatatgtcttttagattctgaatggtgatttaaaattttcaaaatgaaattccatatatgtgcaaacagatatgggcaccacgaaatacatatgcagtgccttttttccttttaacataggtggctagccaaagtttagaatttttgtcattaaatatgaaatggatatatgctaggcagtgtttctcaaaatctccatagatcgcctgcatcacttgaggagctggtgaaaaggcagattcttaggcccaactgtagaccttcagagtcagaatgtctggttgttgggcccaggagtcttcatgttaataagcttctccctttcgtcaccccaaaagttttgaatcaatgaaagagacattgaaaactcttaagaggttttgtgctttctagcttttcctccctttgatgattgggttttataattcagcaggaaggggaaacatcaccaggggtttgttggctttttcttagcttgctttcttgcttgcttgctttcttgcttttcttgctttctgtctctctctttcttttctctctctctctcacatcaacccagtgctgcaggttttgtgtaatacaagtcactaatcatactctgatgcctgaacttgaggaggaaaatacatgtatatttttgttccgtaaaaataaccttaggaactgtagccatttcattgccttaattttaagaggaaaatacaaaaacagctgatttgttttagtaagaaaccacgtcttgatgcttcagagttggtttagggtgttagctgctatgaacctgttgcccctttcgatcgtgtatttatgtaggtttatcagtgaaatgaaaggcttgtttccgtctagtctaactttttgagtgtgtttctatccagccacatagcccatatctactctaaatggcttgcttaagcaataattattttaaaggatgtgaatcactgattcacacagactattgcacgttggggcattaggggcaataattcttatccagacatgggagccagtgaatttaatttcagagattaaaaattcactttagatcctctagtttgatctcttaatcaggatttttatacagctgccaggctcccctaattcagtgtgccagcttacaatgtggaaatgaaagctaatttatacacagcaggcatatgaaactccactcattgcagtactttcacagcacagtgacaggtagaggactctggcacaggtgcactcatgaaactctgcttccaccatgttcctgacacctatctattaaaccattctgcaaatacggtttttctacctgattgcatatagcatatgtgtcattacatgtgatgctgtgcaaaactttgtataattctgtgttattaacagttaacaaaactggagcatctgaattacatccaacctgtgcatgtgatgttaggtagatgtgaatgcagggccttgggccataacttacatttctctcaatttgattagctttgagtcacaattaaggggaagcaaaaacatcttgaaaagactgctaggaaggaaattaatatcagtcatccagaagtacacgtttctgtattttaaaaaatactttgatgcatttatttttaggtgttttttttttccccttaaaaaacttgaagtgatatgcagcagtaatctatttgttttgcattgttcttggtgttttgtgtttcccagatccctcaagctttctcagctgttgcgaattatgtgtatctgtgtgtgtgctaagtacagtctctttaccaaagggcactgaaacacacaattgactggacaggtccacgcgccatgacaaaactataatcaagttattaaaactaaagaggagtgggaaaggaatgccttggtaagtaaaaaggcatctatatttaataacttttatccagatggcaacatatttgcaaaatttgcccagatcctattacaatactaaaaatagaaaatttcacctccatattcctgaggtgtaatttcattagactagttttagtttaaaaagaccttcttcagattggaccaaataatacttataagatcagcagaatgttgaatattagctcactggggtggggagaagccactaccattttttaggtgatggggatgccactgagttgcaacggctagaccttttcagggtggttgtgtccatgtttgcctgattggatgcttattcactttgtgttttcttttgttttattttgtccaattttgtctttagctgtgtttattaacttctccggtcttgttttgttttaatgctcttggcccagtgggtgtcaagaacactggcttaattcaagtcagttgattttttttctattaaaactgttgttaaaatattttttaaaacaaaaacattatttgtgccctcttttatatatgtcaaagggacactgtcaagtatttcatttttagatttttgttttataaaatttctgttgttcatatagtatcctttaacctctagttttccatacatcctttgtttgtttctcattttattttccttgacccatttatttcccaaggcacaatcactaaagactttgtactttcacagtctgttaatgtggtagcacctgtaactgtgttcttgttctgttaaaaggattgatttgcttttatagtccttgtgctggatgagtggctgcctcagtagcaaaactacctgacagtatttgacagtgtcctttccagcaccattatttgggtctttcagggtggccatctctgttagaagacagtagcatgttaacatcactgcattgagtttttgtctggtgtaaagtatgacttttaatgtaaacaaactgcaggtttttttcaaactaattttaagaatttagtcttatttcgttgtaaactgtgtatctaattatattacattactctgttcagatgggatggttactaccacttgtccatgattttcatttgaaaagcaagtatctatatcatttccccccagtcagcattatttaacactccccttaactgtctttgaactttctcttttaacaaaaatgtcaagtctttatagttgtaatatcaccatgtttcccatttctgttaatacttctatgaacccctaaagtattgaagggaactagctgtcagtttcaaggattacaagtttgagtctcctagtattcaacatcattctgaaccctgaaataatatttttctctgttaaacaatttttatctgtttgccacctctgttgttagaggtggttgtcaattgaccttactaagttagctgtctttgatgaggaattattgttattggttcctgaataaaacattaaccttttaagtcagaaggaacctcggtacttcttaaggtttgtttgtgttttctaaaaccagagaataaggaactgatttggctatgaggtttaacattataattttctgtaagctttcccacaaaaaaacattgttgatttgaggatataataatgttttaatctttttaaaatataagtggttattctctgacttggtaactatgttctgaaaacactgcatttaagaatttttaaaaattggttttctaaaattaaaatgtccaaattaggcatattgctgagctcaaattgatgtgaaatgccatggttccagttgaattttaagcatattttcatttagatataaaatatatgaagtatgctttgttgattatagtgagaacccatgacatagttaaccaaagaatatgtttggttcaaataaaaatagaagcttaatactgggcattcatactttttaaagagaatgaatgaagaaatcggtttcctgctgtagttctctatgggtaagtcttagtaaagacgagaatgctgaagtcggccgtggcgattccctcctaggaactgggaggtgtggcttgcccattacccgcttgaagctcacatctttaccctcctctcccactgtggtttgatcttcacctattcccaggccctcccagcaattggagaggtgtctttttttttggttttggttttttttctccccgtctgcattcttaggcctcttagctattaggaactgtcagatacatactagtagctaattttcctagcctgaaattatatactgcatctgcactatgtacctactagggatctgacctcaagtgttttctgagcccaggcttcctggtgtggtgtcttttaccacataaaattattacaaattgcaaatgttggtattgtgatttgattatctgtacaaagaaagaagctctatgcagtgagtttgtggtttaatggtcacaaaaatgttagcactgctaccactcagcacgtgtaaaattttttaaatttataaatattaaaattttaaactta

SEQ ID NO: 436274 - DNA, 1246 bp, Homo sapiens
tgatggcggcggcgctggggcccccagaagtgatcgctcagctggagaacgcggctaaagttctgatggcaccaccttccatggtcaataatgaacaacgccagcatgcagagcacatattcttatcatttaggaaatcaaaatcaccatttgcagtttgcaagcatattttggaaactagtaaagtggactatgtcctctttcaagctgccacagccataatggaagcagttgtccgagagtggattctcttggaaaaaggtagcatcgagtctctgcgaacattccttttaacctatgtcttacaaaggcccaaccttcaaaagtatgttcgggaacagattctactagcagtagcagtaattgtaaaaagaggatcattagataaatcaattgactgcaaaagcatttttcatgaagtcagccagttgattagtagtggcaatcccactgtgcaaactctggcctgttctattctgactgcgctattgagtgaattttcaagttcaagtaaaactagcaacattggattgagcatggaattccatggtaactgcaaaagagtttttcaggaagaagaccttcgtcagatcttcatgttaactgttgaagttctgcaggagttcagcaggcgggaaaacctcaatgctcagatgtcttcagtatttcagcgttaccttgcactcgccaatcaagtcttgagctggaactttcttcctccaaattctaactggattatagagtaagtaatgggatacagaagctttcacctaaattggatttccagtaaagccaacctttactatttggaggcaaggcttgggaaaacattcaggtaaggtcactcatgtatttcaaaggatttgtggttgcttggactgtgttgtctataagactggggttgttggttctgtgctgtgccaggagaagtagcagtttttgttgttagaaaatttaataatgaaagggattaaatatttaagaaagaaaatggtcttgctgtagctcctgaaactttgttttactgatgaagtagggtaaaaaatagtatggaaagatgaagggagtaaagcatttattacttatgtgaaatgcccattgttgctacaagatctttctatattgtaaagtaattataagaataggcaaaggaaattttcagattgtccatatttgcttgaagataatgtgtagctactgtatgccttatttaattatttttttgagtgtcattcacaatcacaaa

SEQ ID NO: 436275 - DNA, 1773 bp, Homo sapiens
cggaagcgagaccgtccatccagaggaaggcaagtttttggctcgggcggctgagaagaccgcgcggggctggagacaggtagcagtacgggggcggggcttcatgccggatgtgatagtctgcagtcgtttcggttggcagcctggcgggtgggagatgcggcggccacctgctgcaaagaaccgaagggaaggttagaagtacgaaggcagtttggagctggggctaagcagctgtcgcacggtcagatcatgggctccaccaagcactggggcgaatggctcctgaacttgaaggtggctccagccggcgtctttggtgtggcctttctagccagagtcgccctggttttctatggcgtcttccaggaccggaccctgcacgtgaggtatacggacatcgactaccaggtcttcaccgacgccgcgcgcttcgtcacggaggggcgctcgccttacctgagagccacgtaccgttacaccccgctgctgggttggctcctcactcccaacatctacctcagcgagctctttggaaagtttctcttcatcagctgcgacctcctcaccgctttcctcttataccgcctgctgctgctgaaggggctggggcgccgccaggcttgtggctactgtgtcttttggcttcttaaccccctgcctatggcagtatccagccgcggtaatgcggactctattgtcgcctccctggtcctgatggtcctctacttgataaagaaaagactcgtcgcgtgtgcagctgtattctatggtttcgcggtgcatatgaagatatatccagtgacttacatccttcccataaccctccacctgcttccagatcgcgacaatgacaaaagcctccgtcaattccggtacactttccaggcttgtttgtacgagctcctgaaaaggctgtgtaatcgggctgtgctgctgtttgtagcagttgctggactcacgttttttgccctgagctttggtttttactatgagtacggctgggaatttttggaacacacctacttttatcacctgactaggcgggatatccgtcacaacttttctccgtacttctacatgctgtatttgactgcagagagcaagtggagtttttccctgggaattgctgcattcctgccacagctcatcttgctttcagctgtgtctttcgcctattacagagacctcgttttttgttgttttcttcatacgtccatttttgtgacttttaacaaagtctgcacctcccagtactttctttggtacctctgcttactgcctcttgtgatgccactagtcagaatgccttggaaaagagctgtagttctcctaatgttatggtttatagggcaggccatgtggctggctcctgcctatgttctagagtttcaaggaaagaacacctttctgtttatttggttagctggtttgttctttcttcttatcaattgttccatcctgattcaaattatttcccattacaaagaagaacccctgacagagagaatcaaatatgactagtgtatgttccacaccctctgctactgtgttacattctgattgtcttgtatggaccagaagagagctttgggacattttttctgaacattctaagcattctagtgaaagttcccatgttccaacagaacttaaaagcaatgtttgccttatatataaaagggacacaataattgaggtccaccttctaggaaatcctaggactcgtttatttgggacatggtgggaataaaggtcacatattggaaaatg

SEQ ID NO: 436276 - DNA, 760 bp, Homo sapiens
gttcctaaatattcctggataaattctcttgataggcccattggaaaggctaatactcccacccagctggagtgcagtggtataaacatggctcactgcagccgaactcccaggctcaggtgatccttcctcctcagcctcccaagtagctgggaccacaggtatttgccaccatgcctggctaatctttattttttgtagagacgaggtcttgctatgttgcaagagggagatcacttaagtgatcttccctcattggcttcccaaagtgttgggattccaggcgtgagccactgcaccccgcctgacctaactattttaaacactactcatattgccatcatctaaattcaacaacaatttgccatatttgctttatgtatatgtataattatatatttataaaattttttgaaccatgtgaagttgcaaacatcattgaacttcaccactaaatatatcagcatgcatctcctaaaaatcaggtattttcttacaaaaccataattctgctatctattatgatttaacattctgtcattttcaaatttcttcaggtgttttttgttacatcttaaagaacagacattcttggatctcaaagattccgaggaaggaaagaacatggtggataatccataattaagaagtttgaatcttttcctagtcttaaaaacaaagtgagaactaaaggggtttaccttccatcaaagttgaacaaattaattcttttgtgtgtcatactttctgtctctctccc

SEQ ID NO: 436277 - DNA, 2769 bp, Homo sapiens
cggaagcgagaccgtccatccagaggaaggcaagtttttggctcgggcggctgagaagaccgcgcggggctggagacaggtagcagtacgggggcggggcttcatgccggatgtgatagtctgcagtcgtttcggttggcagcctggcgggtgggagatgcggcggccacctgctgcaaagaaccgaagggaaggttagaagtacgaaggcagtttggagctggggctaagcagctgtcgcacggtcagatcatgggctccaccaagcactggggcgaatggctcctgaacttgaaggtggctccagccggcgtctttggtgtggcctttctagccagagtcgccctggttttctatggcgtcttccaggaccggaccctgcacgtgaggtatacggacatcgactaccaggtcttcaccgacgccgcgcgcttcgtcacggaggggcgctcgccttacctgagagccacgtaccgttacaccccgctgctgggttggctcctcactcccaacatctacctcagcgagctctttggaaagtttctcttcatcagctgcgacctcctcaccgctttcctcttataccgcctgctgctgctgaaggggctggggcgccgccaggcttgtggctactgtgtcttttggcttcttaaccccctgcctatggcagtatccagccgcggtaatgcggactctattgtcgcctccctggtcctgatggtcctctacttgataaagaaaagactcgtcgcgtgtgcagctgtattctatggtttcgcggtgcatatgaagatatatccagtgacttacatccttcccataaccctccacctgcttccagatcgcgacaatgacaaaagcctccgtcaattccggtacactttccaggcttgtttgtacgagctcctgaaaaggctgtgtaatcgggctgtgctgctgtttgtagcagttgctggactcacgttttttgccctgagctttggtttttactatgagtacggctgggaatttttggaacacacctacttttatcacctgactaggcgggatatccgtcacaacttttctccgtacttctacatgctgtatttgactgcagagagcaagtggagtttttccctgggaattgctgcattcctgccacagctcatcttgctttcagctgtgtctttcgcctattacagagacctcgttttttgttgttttcttcatacgtccatttttgtgacttttaacaaagtctgcacctcccagtactttctttggtacctctgcttactgcctcttgtgatgccactagtcagaatgccttggaaaagagctgtagttctcctaatgttatggtttatagggcaggccatgtggctggctcctgcctatgttctagagtttcaaggaaagaacacctttctgtttatttggttagctggtttgttctttcttcttatcaattgttccatcctgattcaaattatttcccattacaaagaagaacccctgacagagagaatcaaatatgactagtgtatgttccacaccctctgctactgtgttacattctgattgtcttgtatggaccagaagagagctttgggacattttttctgaacattctaagcattctagtgaaagttcccatgttccaacagaacttaaaagcaatgtttgccttatatataaaagggacacaataattgaggtccaccttctaggaaatcctaggactcgtttatttgggacatggtgggaataaaggtcacatattggaaaatggaaaggctgatgaaactatcagatactaaaacattcttaaaatagaggaatatagttagagacatcaggtttaagccagtatttgttcctgttttacaatgcttctgtcttaagctgtgtcttaacttttaacacccatcttttctttctaaagctttcctgacagctgtgaaaatccaaaaaatattcttaaactgtgtatggtggcccttgcctgtagtctcagcactttgggaggctgaggtgggagggtcgcttgagttcaggagttctagacccacctggggcaagatggtgagacctagtctcaaaaaaaaaaaaaaaaattagccaggtgttgtggtgcacccctgtagtcatagctgcatgggaggctgaggtgggagaattgcttgagcccagagcaagaccctgtctcaaaaaaaaaaaaaaaaaaaaaaggaaaggacaactttttagatagaaaagtattaaataatactaagatgcttagtagtattattttagagagttttaaacttctatattaaatgtggggtcttacaagataatccaaagatgttgggattccaggcgtgagccactgcaccccgcctgacctaactattttaaacactactcatattgccatcatctaaattcaacaacaatttgccatatttgctttatgtatatgtataattatatatttataaaattttttgaaccatgtgaagttgcaaacatcattgaacttcaccactaaatatatcagcatgcatctcctaaaaatcaggtattttcttaccttcaggtgttttttgttacatcttaaagaacagacattcttggatctcaaagattccgaggaaggaaagaacatggtggataatccataattaagaagtttgaatcttttcctagtcttaaaaacaaagtgagaactaaaggggtttaccttccatcaaagttgaacaaattaattcttttgtgtgtcatactttctgtctctctccc

SEQ ID NO: 436278 - DNA, 1949 bp, Homo sapiens
ttgagacaaggctttactctgtcgcttaggctggagtgcagggatgtgatcactgaagccttgacctggtctcaagcaatcttccctcccagctactcctcgggaggctgaggcaggagaatggcgtgaactccggaggtggagcctgtagtgagccgagatggcaccactgcgctccagcctgggcgacagagcaagactccatatcaaaaaaaaaaaaaaaaagataatccaaagaatttaaattgtaatcatgtttcatgtatttgttttattacttacttttatagcacttagtcccagtggtattagactgctatttggtttcatacaaaaaggattaaatttaaattcattcatgtttagacttgagttattacatttttaaaactatcatcttgcctttaatgtttgtggtcctacacaaactattagtacatttcagtatcctcttacccctttgtttttaagtttttgattgctaaagcaagacttttttcttctagaatttaagtcaaccaagtgttatctatgttgtaaaaatggataatagtagattttaggtgataaaacaacttgttagtaagacatttcctagcttaaaaaaaaaaatcaaaaattccatgatagaaatgcagacctgtgagggaaactcctgaaaagcataagaagcatcccagagagccatgggttttctagaccagagaatttagagggagattgtggaactgaggcttaggtggtcagatcgtttcccttatcactgtaatatttctgggggaaaaatgctttctgagttgtttaaacaagcatccttacattttttttttaattaaacagcctgtcttaggcttgggattccctaatactacagtagcagtatatgaatatgattttgtgattgtgttttttaaaagataagtaatttgatgaactgttcttttgcagtcagaaaacactcacaaaaagacaaaaaaagttccacagtattatatttcatgtcagttcaggcctaaaatcctttgcaaataagatgtttataggctggtcacaattaacaatgttattattggcagcacttcttggatggataccttttgggacctttcattagaaagagggaaagaatggggtggttttgtatgggctcctgtttggggtaaaaatagcagagtcagttgctgaggacaatgaccttccttataacatttagtttcatacccatattaggtcttgtcttgaggaccctttatatgtgcttgtttactagtggccttccagccatagcattcttacctttttttcctattctaagaattaaaaaaaaaaattatagagccagcaagggaggaggcaggaaacagaaatcgaatttcatcattccagtatagttgtccctttttttgtatttctgacttggttttataattatatttacttactaattattgttttttaacattctttattgtggcttactcttcatacttagaattgaaattgttggacatcacatgtatattcacattataaatacatcattcttccactgttagacctttagattgcttccagtttttaatattctaaataagactttcaacattttctgtgttttagctcattctcttaggacattcttagaagttagaaacatttctgctgggatcgttggagggaacttcaaactttggaatctttcctgcaagaaattctttaccaaagaaaggcaggtgtttcttaaagggatgcaaaagatattttgcactttgtatgttccaaaacatttagtaagttaactaaaaaaatgagttaatttggtttcttgggggattttaattttttaatttgttttctggttatgtaaaaaaaatgttttttttttgcttcttatcacaatccttttgtttcctttttaatcctttaataacaccttcaaattttataag

SEQ ID NO: 436279 - DNA, 1237 bp, Homo sapiens
gttcctaaatattcctggataaattctcttgataggcccattggaaaggctaatactcccacccagtgctttgttccttcctggcaaaagaattcctaaaaccactgattttagttactgacttctcaccatctggactcttacaagatgtttcagaagttgtgtagaacttgtctttcagttgacttgtggctgaatttactgttacttctctaatatcagttgttttctgcattaccaccctctcccctaaccatctgtactatgaatggaaaaggaaaaagatggaaaaattatacctaggattgtccctaaatgcaacctcttggttccccccacccctcatgttttattataaacgattttaagagctgggcatggtggttcatgcctataatcccaatgctttgggaagctgaggcaggaggatcacttgaggacaggagtttgagaccagcctggacaacatagtgagacccccatctgtacaaaaaaaaaagtgctacttgggaagctgaagtgggaggaccacttgagcccaggctggagtgcagtggtataaacatggctcactgcagccgaactcccaggctcaggtgatccttcctcctcagcctcccaagtagctgggaccacaggtatttgccaccatgcctggctaatctttattttttgtagagacgaggtcttgctatgttgcaagagggagatcacttaagtgatcttccctcattggcttcccaaagtgttgggattccaggcgtgagccactgcaccccgcctgacctaactattttaaacactactcatattgccatcatctaaattcaacaacaatttgccatatttgctttatgtatatgtataattatatatttataaaattttttgaaccatgtgaagttgcaaacatcattgaacttcaccactaaatatatcagcatgcatctcctaaaaatcaggtattttcttacaaaaccataattctgctatctattatgatttaacattctgtcattttcaaatttcttcaggtgttttttgttacatcttaaagaacagacattcttggatctcaaagattccgaggaaggaaagaacatggtggataatccataattaagaagtttgaatcttttcctagtcttaaaaacaaagtgagaactaaaggggtttaccttccatcaaagttgaacaaattaattcttttgtgtgtcatactttctgtctctctccc

SEQ ID NO: 436280 - DNA, 356 bp, Homo sapiens
actttttagatagaaaagtattaaataatactaagatgcttagtagtattattttagagagttttaaacttctatattaaatgtggggtcttacaagataatccaaagactttgggaggccaaggcgggcagatcacgaggtcaggagattgagaccatcctggctaacacggtgaaacccctctctactaaaaatacaaaaaattagccgggcgtggtgggtgcctgtagtcccagctactcctcgggaggctgaggcaggagaatggcgtgaactccggaggtggagcctgtagtgagccgagatggcaccactgcgctccagcctgggcgacagagcaagactccatatcaaa

SEQ ID NO: 436281 - DNA, 603 bp, Homo sapiens
  misc_feature (588)..(588): n is a, c, g, or t
cggaagcgagaccgtccatccagaggaaggcaagtttttggctcgggcggctgagaagaccgcgcggggctggagacaggtagcagtacgggggcggggcttcatgccggatgtgatagtctgcagtcgtttcggttggcagcctggcgggtgggagatgcggcggccacctgctgcaaagaaccgaagggaaggttagaagtacgaaggcagtttggagctggggctaagcagctgtcgcacggtcagatcatgggctccaccaagcactggggcgaatggctcctgaacttgaaggtggctccagccggcgtctttggtgtggcctttctagccagagtcgccctggttttctatggcgtcttccaggaccggaccctgcacgtgaggtatacggacatcgactaccaggtcttcaccgacgccgcgcgcttcgtcacggaggggcgctcgccttacctgagagccacgtaccgttacaccccgctgctgggttggctcctcactcccaacatctacctcagcgagctctttggaaagtttctcttcatcagctgcgacctcctcccaacacccaactccgaatcntgcggtaccgagctc

SEQ ID NO: 436282 - DNA, 2823 bp, Homo sapiens
cggaagcgagaccgtccatccagaggaaggcaagtttttggctcgggcggctgagaagaccgcgcggggctggagacaggtagcagtacgggggcggggcttcatgccggatgtgatagtctgcagtcgtttcggttggcagcctggcgggtgggagatgcggcggccacctgctgcaaagaaccgaagggaaggttagaagtacgaaggcagtttggagctggggctaagcagctgtcgcacggtcagatcatgggctccaccaagcactggggcgaatggctcctgaacttgaaggtggctccagccggcgtctttggtgtggcctttctagccagagtcgccctggttttctatggcgtcttccaggaccggaccctgcacgtgaggtatacggacatcgactaccaggtcttcaccgacgccgcgcgcttcgtcacggaggggcgctcgccttacctgagagccacgtaccgttacaccccgctgctgggttggctcctcactcccaacatctacctcagcgagctctttggaaagtttctcttcatcagctgcgacctcctcaccgctttcctcttataccgcctgctgctgctgaaggggctggggcgccgccaggcttgtggctactgtgtcttttggcttcttaaccccctgcctatggcagtatccagccgcggtaatgcggactctattgtcgcctccctggtcctgatggtcctctacttgataaagaaaagactcgtcgcgtgtgcagctgtattctatggtttcgcggtgcatatgaagatatatccagtgacttacatccttcccataaccctccacctgcttccagatcgcgacaatgacaaaagcctccgtcaattccggtacactttccaggcttgtttgtacgagctcctgaaaaggctgtgtaatcgggctgtgctgctgtttgtagcagttgctggactcacgttttttgccctgagctttggtttttactatgagtacggctgggaatttttggaacacacctacttttatcacctgactaggcgggatatccgtcacaacttttctccgtacttctacatgctgtatttgactgcagagagcaagtggagtttttccctgggaattgctgcattcctgccacagctcatcttgctttcagctgtgtctttcgcctattacagagacctcgttttttgttgttttcttcatacgtccatttttgtgacttttaacaaagtctgcacctcccagtactttctttggtacctctgcttactgcctcttgtgatgccactagtcagaatgccttggaaaagagctgtagttctcctaatgttatggtttatagggcaggccatgtggctggctcctgcctatgttctagagtttcaaggaaagaacacctttctgtttatttggttagctggtttgttctttcttcttatcaattgttccatcctgattcaaattatttcccattacaaagaagaacccctgacagagagaatcaaatatgactagtgtatgttccacaccctctgctactgtgttacattctgattgtcttgtatggaccagaagagagctttgggacattttttctgaacattctaagcattctagtgaaagttcccatgttccaacagaacttaaaagcaatgtttgccttatatataaaagggacacaataattgaggtccaccttctaggaaatcctaggactcgtttatttgggacatggtgggaataaaggtcacatattggaaaatggaaaggctgatgaaactatcagatactaaaacattcttaaaatagaggaatatagttagagacatcaggtttaagccagtatttgttcctgttttacaatgcttctgtcttaagctgtgtcttaacttttaacacccatcttttctttctaaagctttcctgacagctgtgaaaatccaaaaaatattcttaaactgtgtatggtggcccttgcctgtagtctcagcactttgggaggctgaggtgggagggtcgcttgagttcaggagttctagacccacctggggcaagatggtgagacctagtctcaaaaaaaaaaaaaaaaattagccaggtgttgtggtgcacccctgtagtcatagctgcatgggaggctgaggtgggagaattgcttgagcccagagcaagaccctgtctcaaaaaaaaaaaaaaaaaaaaaaggaaaggacaactttttagatagaaaagtattaaataatactaagatgcttagtagtattattttagagagttttaaacttctatattaaatgtggggtcttacaagataatccaaagatgttgggattccaggcgtgagccactgcaccccgcctgacctaactattttaaacactactcatattgccatcatctaaattcaacaacaatttgccatatttgctttatgtatatgtataattatatatttataaaattttttgaaccatgtgaagttgcaaacatcattgaacttcaccactaaatatatcagcatgcatctcctaaaaatcaggtattttcttacaaaaccataattctgctatctattatgatttaacattctgtcattttcaaatttcttcaggtgttttttgttacatcttaaagaacagacattcttggatctcaaagattccgaggaaggaaagaacatggtggataatccataattaagaagtttgaatcttttcctagtcttaaaaacaaagtgagaactaaaggggtttaccttccatcaaagttgaacaaattaattcttttgtgtgtcatactttctgtctctctccc

SEQ ID NO: 436283 - DNA, 1857 bp, Homo sapiens
tttatctacatgtgacagttttctatcattgggttttttaaaaaatctgtgtattcaactagaacttgagctccacggaggcaggaacttttgttttgtttttcttcactgctcttttcctcgcacctgtctgaagcagtgattttagccagaatctagatttcctgattctggtccagtgctctttccatggttctgtgtgacctcatacatcaaccttatttcacaaacgaggtttttaagttccttgagcacagtcgattgtgttttttactgcttctgctccgtccctgcataagacaggactgtgtcatgtacccagtgatggactcctggtaaataccatggcttgactaaatgacctccagtgctccctgtggtcttcaccaacacgcatcagacgacaggctcagccacgggatacttcgctttctgtaggagtaagagacaagttgctatcactgaacagatacacagtggcatttggaaactgcatgcagtttgaaaaaatcgtgatacagcaggagtctagttttcaataaatagcttattcatattctggattttgaacagttcatgtaactgtaactttggggtagtggataatgagactgaaattaatggttcctctgctggtttccgtctgttttttttttttttctcccaggaggttggtatttctgcacttaaccacctgatgtttttagggggagtatatcccagataaattctgttgtaagtcaaagagcatccatgattggcttggctctttcttaagcaactactaagatgctcctacatttgggtttgaacgttttttattctcttggctatgaagtttcttaagtgactctagtaatactgatggttccccttgtgtttacaggtgatctgcaactctttcaccatctgtaatgcggagatgcaggaagttggtgttggcctatatcccagtatctctttgctcaatcacagctgtgaccccaactgttcgattgtgttcaatgggccccacctcttactgcgagcagtccgagacatcgaggtgggagaggagctcaccatctgctacctggatatgctgatgaccagtgaggagcgccggaagcagctgagggaccagtactgctttgaatgtgactgtttccgttgccaaacccaggacaaggatgctgatatgctaactggtgatgagcaagtatggaaggaagttcaagaatccctgaaaaaaattgaagaactgaaggcacactggaagtgggagcaggttctggccatgtgccaggcaatcataagcagcaattctgaacggcttcccgatatcaacatctaccagctgaaggtgctcgactgcgccatggatgcctgcatcaacctcggcctgttggaggaagccttgttctatggtactcggaccatggagccatacaggatttttttcccaggaagccatcccgtcagaggggttcaagtgatgaaagttggcaaactgcagctacatcaaggcatgtttccccaagcaatgaagaatctgagactggcttttgatattatgagagtgacacatggcagagaacacagcctgattgaagatttgattctacttttagaagaatgcgacgccaacatcagagcatcctaagggaacgcagtcagagggaaatacggcgtgtgtctttgttgaatgccttattgaggtcacacactctatgctttgttagctgtgtgaacctctcctattggaaattctgttccgtgtttgtgtaggtaaataaaggcagacatggtttgcaaaccacaagaatcattagttgtagagaagcacgattataataaattcaaaacatttggttgagg

SEQ ID NO: 436284 - DNA, 477 bp, Homo sapiens
tatataaataaatgtctacatttattacaaacgcacgccgctgagcattacgatttttttcccaggaagccatcccgtcagaggggttcaagtgatgaaagttggcaaactgcagctacatcaaggcatgtttccccaagcaatgaagaatctgagactggcttttgatattatgagagtgacacatggcagagaacacagcctgattgaagatttgattctacttttagaagaatgcgacgccaacatcagagcatcctaagggaacgcagtcagagggaaatacggcgtgtgtctttgttgaatgccttattgaggtcacacactctatgctttgttagctgtgtgaacctctcctattggaaattctgttccgtgtttgtgtaggtaaataaaggcagacatggtttgcaaaccacaagaatcattagttgtagagaagcacgattataataaattcaaaacatttggttgagg

SEQ ID NO: 436285 - DNA, 464 bp, Homo sapiens
aaattaaaattatatgaatttcatgtcagttcattctggatttttttcccaggaagccatcccgtcagaggggttcaagtgatgaaagttggcaaactgcagctacatcaaggcatgtttccccaagcaatgaagaatctgagactggcttttgatattatgagagtgacacatggcagagaacacagcctgattgaagatttgattctacttttagaagaatgcgacgccaacatcagagcatcctaagggaacgcagtcagagggaaatacggcgtgtgtctttgttgaatgccttattgaggtcacacactctatgctttgttagctgtgtgaacctctcctattggaaattctgttccgtgtttgtgtaggtaaataaaggcagacatggtttgcaaaccacaagaatcattagttgtagagaagcacgattataataaattcaaaacatttggttgagg

SEQ ID NO: 436286 - DNA, 915 bp, Homo sapiens
gcagaggcggcccacgctgtccacatgcagaggctcgctacagaagctacagaagaagatggttacatttcaagtgggcaggtgccgtttgcttatgagcaccatcagccacatcagccacggttctttgaattttacctaattgtctctaattcttaacaattctttgaggtgatctgcaactctttcaccatctgtaatgcggagatgcaggaagttggtgttggcctatatcccagtatctctttgctcaatcacagctgtgaccccaactgttcgattgtgttcaatgggccccacctcttactgcgagcagtccgagacatcgaggtgggagaggagctcaccatctgctacctggatatgctgatgaccagtgaggagcgccggaagcagctgagggaccagtactgctttgaatgtgactgtttccgttgccaaacccaggacaaggatgctgatatgctaactggtgatgagcaagtatggaaggaagttcaagaatccctgaaaaaaattgaagaactgaaggcacactggaagtgggagcaggttctggccatgtgccaggcaatcataagcagcaattctgaacggcttcccgatatcaacatctaccagctgaaggtgctcgactgcgccatggatgcctgcatcaacctcggcctgttggaggaagccttgttctatggtactcggaccatggagccatacaggatttttttcccaggaagccatcccgtcagaggggttcaagtgatgaaagttggcaaactgcagctacatcaaggcatgtttccccaagcaatgaagaatctgagactggttggaatatgagagtaacattgggagaccagctgttgagattgagcatttaaagatggaagaataggagtttaggaagcaaagaggatg

SEQ ID NO: 436287 - DNA, 356 bp, Homo sapiens
  misc_feature (5)..(5): n is a, c, g, or t
cctangctgcactgactctcttaactaccacctctaccggcttttgatattatgagagtgacacatggcagagaacacagcctgattgaagatttgattctacttttagaagaatgcgacgccaacatcagagcatcctaagggaacgcagtcagagggaaatacggcgtgtgtctttgttgaatgccttattgaggtcacacactctatgctttgttagctgtgtgaacctctcctattggaaattctgttccgtgtttgtgtaggtaaataaaggcagacatggtttgcaaaccacaagaatcattagttgtagagaagcacgattataataaattcaaaacatttggttgagg

SEQ ID NO: 436288 - DNA, 506 bp, Homo sapiens
  misc_feature (52)..(52): n is a, c, g, or t
ttttaataaccggtttgtctatatcttgcaaataaaaaacaggtttcgggtnacgatttttttcccaggaagccatcccgtcagaggggttcaagtgatgaaagttggcaaactgcagctacatcaaggcatgtttccccaagcaatgaagaatctgagactggcttttgatattatgagagtgacacatggcagagaacacagcctgattgaagatttgattctacttttagaagaatgcgacgccaacatcagagcatcctaagggaacgcagtcagagggaaatacggcgtgtgtctttgttgaatgccttattgaggtcacacactctatgctttgttagctgtgtgaacctctcctattggaaattctgttccgtgtttgtgtaggtaaataaaggcagacatggtttgcaaaccacaagaatcattagttgtagagaagcacgattataataaattcaaaacatttggttgaggatttggttgaggatgccatcaaaaaa

SEQ ID NO: 436289 - DNA, 614 bp, Homo sapiens
actatatttacttttattctcttctcatcgtgttgaacgaagaagcggaatgttaggatttttttcccaggaagccatcccgtcagaggggttcaagtgatgaaagttggcaaactgcagctacatcaaggcatgtttccccaagcaatgaagaatctgagactggcttttgatattatgagagtgacacatggcagagaacacagcctgattgaagatttgattctacttttagaagaatgcgacgccaacatcagagcatcctaagggaacgcagtcagagggaaatacggcgtgtgtctttgttgaatgccttattgaggtcacacactctatgctttgttagctgtgtgaacctctcctattggaaattctgttccgtgtttgtgtaggtaaataaaggcagacatggtttgcaaaccacaagaatcattagttgtagagaagcacgattataataaattcaaaacatttggttgaggaaaaaaaaaattttgttatcaatgaatgagtgagaaaaaatggtttgttcttaaactattttatttccggccttgttggcctaatcggggaagtttttcggccctttcctttttgtgggggaaaatccaaga

SEQ ID NO: 436290 - DNA, 422 bp, Homo sapiens
agctcggtacctacttttcacagggcagtgatattttctcccctcagtccaataattctccaggagttgcaaaatgatttttctaattccgtcatcattccacatttatcagctaaaattcatacaactggagctatttagttactctaagatacaatttaaataggcaggttaagttctcctttcaggttcagtaatatgttttgcatcagtttttaaaaaataattgtattaacttagtttgtgctgctacaccaaaataccatagacggtaattcaccaagaacagaatttttttttttctcacagttccggaggctgggaagttcaagtcatgaaatccaagatgaaggtgccagcaggttgtctggtgagggctgctttccatttccaacatgatgtcttgttgctacatcctctgg

SEQ ID NO: 436291 - DNA, 1580 bp, Homo sapiens
gtggattttagagatacctcccctccttctgctcagctgccttgcagtaattaaactctttctctgctgcaacacccctactgttctccgtgtattggcttttctgggcagcagaatcttgctctgtcacccaggctggagtgcagtggcatgatcatagctcactgtagccgtgaactcctgggctcaagggatcctcctaccacttgccccaacttggactatagcgttagggaacaaaggaaggaaaagctgatgcgatgctctcagtgccgcgtcgccaaatactgtagtgctaagtgtcagaaaaaagcttggccagaccacaagcgggaatgcaaatgccttaaaagctgcaaacccagatatcctccagactccgttcgacttcttggcagagttgtcttcaaacttatggatggagcaccttcagaatcagagaagctttactcattttatgatctggagtcaaatattaacaaactgactgaagataagaaagagggcctcaggcaactcgtaatgacatttcaacatttcatgagagaagaaatacaggatgcctctcagctgccacctgcctttgacctttttgaagcctttgcaaaagtgatctgcaactctttcaccatctgtaatgcggagatgcaggaagttggtgttggcctatatcccagtatctctttgctcaatcacagctgtgaccccaactgttcgattgtgttcaatgggccccacctcttactgcgagcagtccgagacatcgaggtgggagaggagctcaccatctgctacctggatatgctgatgaccagtgaggagcgccggaagcagctgagggaccagtactgctttgaatgtgactgtttccgttgccaaacccaggacaaggatgctgatatgctaactggtgatgagcaagtatggaaggaagttcaagaatccctgaaaaaaattgaagaactgaaggcacactggaagtgggagcaggttctggccatgtgccaggcaatcataagcagcaattctgaacggcttcccgatatcaacatctaccagctgaaggtgctcgactgcgccatggatgcctgcatcaacctcggcctgttggaggaagccttgttctatggtactcggaccatggagccatacaggatttttttcccaggaagccatcccgtcagaggggttcaagtgatgaaagttggcaaactgcagctacatcaaggcatgtttccccaagcaatgaagaatctgagactggcttttgatattatgagagtgacacatggcagagaacacagcctgattgaagatttgattctacttttagaagaatgcgacgccaacatcagagcatcctaagggaacgcagtcagagggaaatacggcgtgtgtctttgttgaatgccttattgaggtcacacactctatgctttgttagctgtgtgaacctctcctattggaaattctgttccgtgtttgtgtaggtaaataaaggcagacatggtttgcaaaccacaagaatcattagttgtagagaagcacgattataataaattcaaaacatttggttgagg

SEQ ID NO: 436292 - DNA, 1561 bp, Homo sapiens
gtgtgcgcgcagggcgcaggcgcgcgggtcccggcagcccgtgagacgcccgctgctggacgcgggtagccgtctgaggtgccggagctgcgggaggatggagccgctgaaggtggaaaagttcgcaaccgccaacaggggaaacgggctgcgcgccgtgaccccgctgcgccccggagagctactcttccgctcggatcccttggcgtacacggtgtgcaaggaaggaaaagctgatgcgatgctctcagtgccgcgtcgccaaatactgtagtgctaagtgtcagaaaaaagcttggccagaccacaagcgggaatgcaaatgccttaaaagctgcaaacccagatatcctccagactccgttcgacttcttggcagagttgtcttcaaacttatggatggagcaccttcagaatcagagaagctttactcattttatgatctggagtcaaatattaacaaactgactgaagataagaaagagggcctcaggcaactcgtaatgacatttcaacatttcatgagagaagaaatacaggatgcctctcagctgccacctgcctttgacctttttgaagcctttgcaaaagtgatctgcaactctttcaccatctgtaatgcggagatgcaggaagttggtgttggcctatatcccagtatctctttgctcaatcacagctgtgaccccaactgttcgattgtgttcaatgggccccacctcttactgcgagcagtccgagacatcgaggtgggagaggagctcaccatctgctacctggatatgctgatgaccagtgaggagcgccggaagcagctgagggaccagtactgctttgaatgtgactgtttccgttgccaaacccaggacaaggatgctgatatgctaactggtgatgagcaagtatggaaggaagttcaagaatccctgaaaaaaattgaagaactgaaggcacactggaagtgggagcaggttctggccatgtgccaggcaatcataagcagcaattctgaacggcttcccgatatcaacatctaccagctgaaggtgctcgactgcgccatggatgcctgcatcaacctcggcctgttggaggaagccttgttctatggtactcggaccatggagccatacaggatttttttcccaggaagccatcccgtcagaggggttcaagtgatgaaagttggcaaactgcagctacatcaaggcatgtttccccaagcaatgaagaatctgagactggcttttgatattatgagagtgacacatggcagagaacacagcctgattgaagatttgattctacttttagaagaatgcgacgccaacatcagagcatcctaagggaacgcagtcagagggaaatacggcgtgtgtctttgttgaatgccttattgaggtcacacactctatgctttgttagctgtgtgaacctctcctattggaaattctgttccgtgtttgtgtaggtaaataaaggcagacatggtttgcaaaccacaagaatcattagttgtagagaagcacgattataataaattcaaaacatttggttgagg

SEQ ID NO: 436293 - DNA, 1958 bp, Homo sapiens
  misc_feature (1949)..(1949): n is a, c, g, or t
gtgtgcgcgcagggcgcaggcgcgcgggtcccggcagcccgtgagacgcccgctgctggacgcgggtagccgtctgaggtgccggagctgcgggaggatggagccgctgaaggtggaaaagttcgcaaccgccaacaggggaaacgggctgcgcgccgtgaccccgctgcgccccggagagctactcttccgctcggatcccttggcgtacacggtgtgcaaggggagtcgtggcgtcgtctgcgaccgctgccttctcgggaaggaaaagctgatgcgatgctctcagtgccgcgtcgccaaatactgtagtgctaagtgtcagaaaaaagcttggccagaccacaagcgggaatgcaaatgccttaaaagctgcaaacccagatatcctccagactccgttcgacttcttggcagagttgtcttcaaacttatggatggagcaccttcagaatcagagaagctttactcattttatgatctggagtcaaatattaacaaactgactgaagataagaaagagggcctcaggcaactcgtaatgacatttcaacatttcatgagagaagaaatacaggatgcctctcagctgccacctgcctttgacctttttgaagcctttgcaaaagtgatctgcaactctttcaccatctgtaatgcggagatgcaggaagttggtgttggcctatatcccagtatctctttgctcaatcacagctgtgaccccaactgttcgattgtgttcaatgggccccacctcttactgcgagcagtccgagacatcgaggtgggagaggagctcaccatctgctacctggatatgctgatgaccagtgaggagcgccggaagcagctgagggaccagtactgctttgaatgtgactgtttccgttgccaaacccaggacaaggatgctgatatgctaactggtgatgagcaagtatggaaggaagttcaagaatccctgaaaaaaattgaagaactgaaggcacactggaagtgggagcaggttctggccatgtgccaggcaatcataagcagcaattctgaacggcttcccgatatcaacatctaccagctgaaggtgctcgactgcgccatggatgcctgcatcaacctcggcctgttggaggaagccttgttctatggtactcggaccatggagccatacaggatttttttcccaggaagccatcccgtcagaggggttcaagtgatgaaagttggcaaactgcagctacatcaaggcatgtttccccaagcaatgaagaatctgagactggcttttgatattatgagagtgacacatggcagagaacacagcctgattgaagatttgattctacttttagaagaatgcgacgccaacatcagagcatcctaagggaacgcagtcagagggaaatacggcgtgtgtctttgttgaatgccttattgaggtcacacactctatgctttgttagctgtgtgaacctctcctattggaaattctgttccgtgtttgtgtaggtaaataaaggcagacatggtttgcaaaccacaagaatcattagttgtagagaagcacgattataataaattcaaaacatttggttgaggaaaaaaaaaaaaaaaaaaaggggggcagataaaaaaataatacaataaggaggggccaaagataaagggttaacacaaagttttggtaaaaagggggtcccatatagggagtcgattataagctaggagggccgggttaacaacgtcgtgcgtgggaaaacggtgtagctggggatctggtgaggggaaccttacttctggggggtgaccatattggaccaaataccctaagagagttaagagtcctagggtacatataaaagtttcaagtgtatagggtgttaacctagatgattatgttgtgtggagagtgggctacagagttgattctgaccatttcttccgcgtcngataaagca

SEQ ID NO: 436294 - DNA, 1656 bp, Homo sapiens
gtgtgcgcgcagggcgcaggcgcgcgggtcccggcagcccgtgagacgcccgctgctggacgcgggtagccgtctgaggtgccggagctgcgggaggatggagccgctgaaggtggaaaagttcgcaaccgccaacaggggaaacgggctgcgcgccgtgaccccgctgcgccccggagagctactcttccgctcggatcccttggcgtacacggtgtgcaaggggagtcgtggcgtcgtctgcgaccgctgccttctcgggaaggaaaagctgatgcgatgctctcagtgccgcgtcgccaaatactgtagtgctaagtgtcagaaaaaagcttggccagaccacaagcgggaatgcaaatgccttaaaagctgcaaacccagatatcctccagactccgttcgacttcttggcagagttgtcttcaaacttatggatggagcaccttcagaatcagagaagctttactcattttatgatctggagtcaaatattaacaaactgactgaagataagaaagagggcctcaggcaactcgtaatgacatttcaacatttcatgagagaagaaatacaggatgcctctcagctgccacctgcctttgacctttttgaagcctttgcaaaagtgatctgcaactctttcaccatctgtaatgcggagatgcaggaagttggtgttggcctatatcccagtatctctttgctcaatcacagctgtgaccccaactgttcgattgtgttcaatgggccccacctcttactgcgagcagtccgagacatcgaggtgggagaggagctcaccatctgctacctggatatgctgatgaccagtgaggagcgccggaagcagctgagggaccagtactgctttgaatgtgactgtttccgttgccaaacccaggacaaggatgctgatatgctaactggtgatgagcaagtatggaaggaagttcaagaatccctgaaaaaaattgaagaactgaaggcacactggaagtgggagcaggttctggccatgtgccaggcaatcataagcagcaattctgaacggcttcccgatatcaacatctaccagctgaaggtgctcgactgcgccatggatgcctgcatcaacctcggcctgttggaggaagccttgttctatggtactcggaccatggagccatacaggatttttttcccaggaagccatcccgtcagaggggttcaagtgatgaaagttggcaaactgcagctacatcaaggcatgtttccccaagcaatgaagaatctgagactggcttttgatattatgagagtgacacatggcagagaacacagcctgattgaagatttgattctacttttagaagaatgcgacgccaacatcagagcatcctaagggaacgcagtcagagggaaatacggcgtgtgtctttgttgaatgccttattgaggtcacacactctatgctttgttagctgtgtgaacctctcctattggaaattctgttccgtgtttgtgtaggtaaataaaggcagacatggtttgcaaaccacaagaatcattagttgtagagaagcacgattataataaattcaaaacatttggttgaggactgatgcggctcagatttttattttttggaataaacacaaaaaaaccccgaccccg

SEQ ID NO: 436295 - DNA, 1620 bp, Homo sapiens
  misc_feature (1603)..(1603): n is a, c, g, or t
  misc_feature (1609)..(1609): n is a, c, g, or t
  misc_feature (1620)..(1620): n is a, c, g, or t
gtgtgcgcgcagggcgcaggcgcgcgggtcccggcagcccgtgagacgcccgctgctggacgcgggtagccgtctgaggtgccggagctgcgggaggatggagccgctgaaggtggaaaagttcgcaaccgccaacaggggaaacgggctgcgcgccgtgaccccgctgcgccccggagagctactcttccgctcggatcccttggcgtacacggtgtgcaaggggagtcgtggcgtcgtctgcgaccgctgccttctcgggaaggaaaagctgatgcgatgctctcagtgccgcgtcgccaaatactgtagtgctaagtgtcagaaaaaagcttggccagaccacaagcgggaatgcaaatgccttaaaagctgcaaacccagatatcctccagactccgttcgacttcttggcagagttgtcttcaaacttatggatggagcaccttcagaatcagagaagctttactcattttatgatctggagtcaaatattaacaaactgactgaagataagaaagagggcctcaggcaactcgtaatgacatttcaacatttcatgagagaagaaatacaggatgcctctcagctgccacctgcctttgacctttttgaagcctttgcaaaagtgatctgcaactctttcaccatctgtaatgcggagatgcaggaagttggtgttggcctatatcccagtatctctttgctcaatcacagctgtgaccccaactgttcgattgtgttcaatgggccccacctcttactgcgagcagtccgagacatcgaggtgggagaggagctcaccatctgctacctggatatgctgatgaccagtgaggagcgccggaagcagctgagggaccagtactgctttgaatgtgactgtttccgttgccaaacccaggacaaggatgctgatatgctaactggtgatgagcaagtatggaaggaagttcaagaatccctgaaaaaaattgaagaactgaaggcacactggaagtgggagcaggttctggccatgtgccaggcaatcataagcagcaattctgaacggcttcccgatatcaacatctaccagctgaaggtgctcgactgcgccatggatgcctgcatcaacctcggcctgttggaggaagccttgttctatggtactcggaccatggagccatacaggatttttttcccaggaagccatcccgtcagaggggttcaagtgatgaaagttggcaaactgcagctacatcaaggcatgtttccccaagcaatgaagaatctgagactggcttttgatattatgagagtgacacatggcagagaacacagcctgattgaagatttgattctacttttagaagaatgcgacgccaacatcagagcatcctaagggaacgcagtcagagggaaatacggcgtgtgtctttgttgaatgccttattgaggtcacacactctatgctttgttagctgtgtgaacctctcctattggaaattctgttccgtgtttgtgtaggtaaataaaggcagacatggtttgcaaaccacaagaatcattagttgtagagaagcacgattataataaattcaaaacatttggttgaggccgncgatgncgcccggaaan

SEQ ID NO: 436296 - DNA, 1488 bp, Homo sapiens
gtgtgcgcgcagggcgcaggcgcgcgggtcccggcagcccgtgagacgcccgctgctggacgcgggtagccgtctgaggtgccggagctgcgggaggatggagccgctgaaggtggaaaagttcgcaaccgccaacaggggaaacgggctgcgcgccgtgaccccgctgcgccccggagagctactcttccgctcggatcccttggcgtacacggtgtgcaaggggagtcgtggcgtcgtctgcgaccgctgccttctcgggaaggaaaagctgatgcgatgctctcagtgccgcgtcgccaaatactgtagtgctaagtgtcagaaaaaagcttggccagaccacaagcgggaatgcaaatgccttaaaagctgcaaacccagatatcctccagactccgttcgacttcttggcagagttgtcttcaaacttatggatggagcaccttcagaatcagagaagctttactcattttatgatctggagtcaaatattaacaaactgactgaagataagaaagagggcctcaggcaactcgtaatgacatttcaacatttcatgagagaagaaatacaggatgcctctcagctgccacctgcctttgacctttttgaagcctttgcaaaagtgatctgcaactctttcaccatctgtaatgcggagatgcaggaagttggtgttggcctatatcccagtatctctttgctcaatcacagctgtgaccccaactgttcgattgtgttcaatgggccccacctcttactgcgagcagtccgagacatcgaggtgggagaggaggatgctgatatgctaactggtgatgagcaagtatggaaggaagttcaagaatccctgaaaaaaattgaagaactgaaggcacactggaagtgggagcaggttctggccatgtgccaggcaatcataagcagcaattctgaacggcttcccgatatcaacatctaccagctgaaggtgctcgactgcgccatggatgcctgcatcaacctcggcctgttggaggaagccttgttctatggtactcggaccatggagccatacaggatttttttcccaggaagccatcccgtcagaggggttcaagtgatgaaagttggcaaactgcagctacatcaaggcatgtttccccaagcaatgaagaatctgagactggcttttgatattatgagagtgacacatggcagagaacacagcctgattgaagatttgattctacttttagaagaatgcgacgccaacatcagagcatcctaagggaacgcagtcagagggaaatacggcgtgtgtctttgttgaatgccttattgaggtcacacactctatgctttgttagctgtgtgaacctctcctattggaaattctgttccgtgtttgtgtaggtaaataaaggcagacatggtttgcaaaccacaagaatcattagttgtagagaagcacgattataataaattcaaaacatttggttgagg

SEQ ID NO: 436297 - DNA, 1225 bp, Homo sapiens
gggcggaggccgtccctgaggaagtaggagaagaccactagggctgtgtctaagtcacagcgaaaagttgttccgtgagacctcttgcataatgactctaaggggcttcagagacattctcctgcgaggtaactgtgcctgtgatgtggggagagtgtgagactgggaagcagaagaccggaatgtgatacagcctttcccacgacttggctgaggaactgctgttgtgaaccttttgccctggtgggattattgtgatctgcaactctttcaccatctgtaatgcggagatgcaggaagttggtgttggcctatatcccagtatctctttgctcaatcacagctgtgaccccaactgttcgattgtgttcaatgggccccacctcttactgcgagcagtccgagacatcgaggtgggagaggagctcaccatctgctacctggatatgctgatgaccagtgaggagcgccggaagcagctgagggaccagtactgctttgaatgtgactgtttccgttgccaaacccaggacaaggatgctgatatgctaactggtgatgagcaagtatggaaggaagttcaagaatccctgaaaaaaattgaagaactgaaggcacactggaagtgggagcaggttctggccatgtgccaggcaatcataagcagcaattctgaacggcttcccgatatcaacatctaccagctgaaggtgctcgactgcgccatggatgcctgcatcaacctcggcctgttggaggaagccttgttctatggtactcggaccatggagccatacaggatttttttcccaggaagccatcccgtcagaggggttcaagtgatgaaagttggcaaactgcagctacatcaaggcatgtttccccaagcaatgaagaatctgagactggcttttgatattatgagagtgacacatggcagagaacacagcctgattgaagatttgattctacttttagaagaatgcgacgccaacatcagagcatcctaagggaacgcagtcagagggaaatacggcgtgtgtctttgttgaatgccttattgaggtcacacactctatgctttgttagctgtgtgaacctctcctattggaaattctgttccgtgtttgtgtaggtaaataaaggcagacatggtttgcaaaccacaagaatcattagttgtagagaagcacgattataataaattcaaaacatttggttgagg

SEQ ID NO: 436298 - DNA, 1676 bp, Homo sapiens
gtgtgcgcgcagggcgcaggcgcgcgggtcccggcagcccgtgagacgcccgctgctggacgcgggtagccgtctgaggtgccggagctgcgggaggatggagccgctgaaggtggaaaagttcgcaaccgccaacaggggaaacgggctgcgcgccgtgaccccgctgcgccccggagagctactcttccgctcggatcccttggcgtacacggtgtgcaaggggagtcgtggcgtcgtctgcgaccgctgccttctcgggaaggaaaagctgatgcgatgctctcagtgccgcgtcgccaaatactgtagtgctaagtgtcagaaaaaagcttggccagaccacaagcgggaatgcaaatgccttaaaagctgcaaacccagatatcctccagactccgttcgacttcttggcagagttgtcttcaaacttatggatggagcaccttcagaatcagagaagctttactcattttatgatctggagtcaaatattaacaaactgactgaagataagaaagagggcctcaggcaactcgtaatgacatttcaacatttcatgagagaagaaatacaggatgcctctcagctgccacctgcctttgacctttttgaagcctttgcaaaagtgatctgcaactctttcaccatctgtaatgcggagatgcaggaagttggtgttggcctatatcccagtatctctttgctcaatcacagctgtgaccccaactgttcgattgtgttcaatgggccccacctcttactgcgagcagtccgagacatcgaggtgggagaggagctcaccatctgctacctggatatgctgatgaccagtgaggagcgccggaagcagctgagggaccagtactgctttgaatgtgactgtttccgttgccaaacccaggacaaggatgctgatatgctaactggtgatgagcaagtatggaaggaagttcaagaatccctgaaaaaaattgaagaactgaaggcacactggaagtgggagcaggttctggccatgtgccaggcaatcataagcagcaattctgaacggcttcccgatatcaacatctaccagctgaaggtgctcgactgcgccatggatgcctgcatcaacctcggcctgttggaggaagccttgttctatggtactcggaccatggagccatacaggatttttttcccaggaagccatcccgtcagaggggttcaagtgatgaaagttggcaaactgcagctacatcaaggcatgtttccccaagcaatgaagaatctgagactggcttttgatattatgagagtgacacatggcagagaacacagcctgattgaagatttgattctacttttagaagaatgcgacgccaacatcagagcatcctaagggaacgcagtcagagggaaatacggcgtgtgtctttgttgaatgccttattgaggtcacacactctatgctttgttagctgtgtgaacctctcctattggaaattctgttccgtgtttgtgtaggtaaataaaggcagacatggtttgcaaaccacaagaatcattagttgtagagaagcacgattataataaattcaaaacatttggttgaggcagataaaaaatgctgtcgcccgtcagcgccttgctgattattatgcacagagatgctctggatatgaataaaaaga

SEQ ID NO: 436299 - DNA, 1148 bp, Homo sapiens
tgccagcaaagaggcctgaacaagtaggtaatgagactgtctacacagaggttctgcgagcccacagctgcccactggaagacccgtttaggattaatatttcagatcatctattctgcttgctctgagattgatgcgcaagacacaaagcaacctctagacacttcagctaagaatgtgatctgcaactctttcaccatctgtaatgcggagatgcaggaagttggtgttggcctatatcccagtatctctttgctcaatcacagctgtgaccccaactgttcgattgtgttcaatgggccccacctcttactgcgagcagtccgagacatcgaggtgggagaggagctcaccatctgctacctggatatgctgatgaccagtgaggagcgccggaagcagctgagggaccagtactgctttgaatgtgactgtttccgttgccaaacccaggacaaggatgctgatatgctaactggtgatgagcaagtatggaaggaagttcaagaatccctgaaaaaaattgaagaactgaaggcacactggaagtgggagcaggttctggccatgtgccaggcaatcataagcagcaattctgaacggcttcccgatatcaacatctaccagctgaaggtgctcgactgcgccatggatgcctgcatcaacctcggcctgttggaggaagccttgttctatggtactcggaccatggagccatacaggatttttttcccaggaagccatcccgtcagaggggttcaagtgatgaaagttggcaaactgcagctacatcaaggcatgtttccccaagcaatgaagaatctgagactggcttttgatattatgagagtgacacatggcagagaacacagcctgattgaagatttgattctacttttagaagaatgcgacgccaacatcagagcatcctaagggaacgcagtcagagggaaatacggcgtgtgtctttgttgaatgccttattgaggtcacacactctatgctttgttagctgtgtgaacctctcctattggaaattctgttccgtgtttgtgtaggtaaataaaggcagacatggtttgcaaaccacaagaatcattagttgtagagaagcacgattataataaattcaaaacatttggttgagg

SEQ ID NO: 436300 - DNA, 1217 bp, Homo sapiens
aaaaatgaaagacttagcggtgttttttatattctactcttcctttcgtccaacgaaagttgttccgtgagacctcttgcataatgactctaaggggcttcagagacattctcctgcgaggtaactgtgcctgtgatgtggggagagtgtgagactgggaagcagaagaccggaatgtgatacagcctttcccacgacttggctgaggaactgctgttgtgaaccttttgccctggtgggattattgtgatctgcaactctttcaccatctgtaatgcggagatgcaggaagttggtgttggcctatatcccagtatctctttgctcaatcacagctgtgaccccaactgttcgattgtgttcaatgggccccacctcttactgcgagcagtccgagacatcgaggtgggagaggagctcaccatctgctacctggatatgctgatgaccagtgaggagcgccggaagcagctgagggaccagtactgctttgaatgtgactgtttccgttgccaaacccaggacaaggatgctgatatgctaactggtgatgagcaagtatggaaggaagttcaagaatccctgaaaaaaattgaagaactgaaggcacactggaagtgggagcaggttctggccatgtgccaggcaatcataagcagcaattctgaacggcttcccgatatcaacatctaccagctgaaggtgctcgactgcgccatggatgcctgcatcaacctcggcctgttggaggaagccttgttctatggtactcggaccatggagccatacaggatttttttcccaggaagccatcccgtcagaggggttcaagtgatgaaagttggcaaactgcagctacatcaaggcatgtttccccaagcaatgaagaatctgagactggcttttgatattatgagagtgacacatggcagagaacacagcctgattgaagatttgattctacttttagaagaatgcgacgccaacatcagagcatcctaagggaacgcagtcagagggaaatacggcgtgtgtctttgttgaatgccttattgaggtcacacactctatgctttgttagctgtgtgaacctctcctattggaaattctgttccgtgtttgtgtaggtaaataaaggcagacatggtttgcaaaccacaagaatcattagttgtagagaagcacgattataataaattcaaaacatttggttgagg

SEQ ID NO: 436301 - DNA, 1048 bp, Homo sapiens
  misc_feature (1)..(1): n is a, c, g, or t
  misc_feature (11)..(11): n is a, c, g, or t
  misc_feature (20)..(20): n is a, c, g, or t
nttgttgtggngggtgtgcncgggatatattatttttctttgtttttggcgccccccgtcctcccctaagaggactggtgatctgcaactctttcaccatctgtaatgcggagatgcaggaagttggtgttggcctatatcccagtatctctttgctcaatcacagctgtgaccccaactgttcgattgtgttcaatgggccccacctcttactgcgagcagtccgagacatcgaggtgggagaggagctcaccatctgctacctggatatgctgatgaccagtgaggagcgccggaagcagctgagggaccagtactgctttgaatgtgactgtttccgttgccaaacccaggacaaggatgctgatatgctaactggtgatgagcaagtatggaaggaagttcaagaatccctgaaaaaaattgaagaactgaaggcacactggaagtgggagcaggttctggccatgtgccaggcaatcataagcagcaattctgaacggcttcccgatatcaacatctaccagctgaaggtgctcgactgcgccatggatgcctgcatcaacctcggcctgttggaggaagccttgttctatggtactcggaccatggagccatacaggatttttttcccaggaagccatcccgtcagaggggttcaagtgatgaaagttggcaaactgcagctacatcaaggcatgtttccccaagcaatgaagaatctgagactggcttttgatattatgagagtgacacatggcagagaacacagcctgattgaagatttgattctacttttagaagaatgcgacgccaacatcagagcatcctaagggaacgcagtcagagggaaatacggcgtgtgtctttgttgaatgccttattgaggtcacacactctatgctttgttagctgtgtgaacctctcctattggaaattctgttccgtgtttgtgtaggtaaataaaggcagacatggtttgcaaaccacaagaatcattagttgtagagaagcacgattataataaattcaaaacatttggttgagg
